United States Patent Application Publication US 2007/0083945 A1 - sequence listing, part 2

SEQ ID NO: 6393 - DNA, 395 bp, Glycine max
gaggaagccaaaggattcaatgagttagatctagacccgagaaccaatgacaacaacggggttaaaccaattgaagaaatatttacttttcaactcaacattaaaacaggttactaaatttggcaaccaactctcaatggaagataagaacaactttcaacaagttatttcagcgcatgctgacctatttgcatggtccatgactaacatgccagacatagatctagccttccattgccataaattatccatatgctgagacgccaaacccattgctcagaggaagagaaagataagggaagaaaggtgtcatgcagtgcaacaggaggtttccaagctgatggtgggtcaatttattagaaaggtagactacaccacataactgtcaaatgtag

SEQ ID NO: 6394 - DNA, 399 bp, Glycine max
ctcttctggaggaatattgtggaaggcacaagtgggcctgattgctatttgcacccctatttttactaaatacacccccttgctcttttttggtgattctttttccgtaacattacgaaactttacgaatttcgtaacgatgcttgttttctttccgtaatgttgcgaaaccttatggattacgtaatcaccccctttttaccttccggaacgttacggaactttacggattgcgcactaacacttccttttaatttccggcatgtcacggaacttcacgaattgtgctacaatgctttcttttgactttcggcatgtcacgaactgcctaacgatgggtgccaagtacctcatagtggtcaaacgagggtcgcatcccaacaacggatggtccccgga

SEQ ID NO: 6395 - DNA, 284 bp, Glycine max
atcattgagagagcatctctcagtaggctacaaggcttccttggagaagactacctctactggtaggacattatggagatgtatatcaagcccacccaacatataagtctggtcattctcacaaatggggatattcctaagtcccagacccggagctgaattgacagatgagtatctgatcattatggagctcaacacataaaccaaatactttcgaacatgtgcatatccaaaaataagtagaacgagagctgctcactaacaactgctaaagagatctggga

SEQ ID NO: 6396 - DNA, 445 bp, Glycine max
  unsure (1)..(445): unsure at all n locations
ggccacccagctcttctggagggaatttntggaaggcacaagtgggcctgattgctatttgcacccctatttttactaaatacacccccttgctcttttttggtgattctttttccgtaacattacgaaactttacgaatttcgtaacgatgcttgttttctttccgtaatgttgcgaaaccttatggattacgtaatcaccccctttntaccttccggaacgttacggaactttacggattgcgcactaacacttccttttaatttccggcatgtcacggaacttcacgaattgtgctacaatgctntctttngactttcggcatgtcacgaactgcctaacgatgggtgccaagtacctcatagtggtcaaacgagggtcgcatcccaacaacggatggtccccggacgaaattaaggtatgacacctaccataaactcattt

SEQ ID NO: 6397 - DNA, 411 bp, Glycine max
  unsure (1)..(411): unsure at all n locations
agtctcacgattgctttgctcatgcacaattgtagccgtggctatacgagacatctttccaaacaaagtcaggttagccataactcgcctgtgctttttcttccatgctatatgtagctaagtcattgatcctgtgaagtttgatgagctggaaaatgaggccgcaattatactgtgccagttggagatgtattttccccctgctttctttgacatcatgattcacttgattgtgcatctagtcagagaaatcaaatgttgtggtccagtttatctacggtggatgtacccggttgagcgatacatgaagatcttaaaagggtatacaaaaaatctatatcgtccagaagcatctatagttgagaggtacatagcggaagaagccattgagtnntgttcagaatacattga

SEQ ID NO: 6398 - DNA, 440 bp, Glycine max
  unsure (1)..(440): unsure at all n locations
tatgatacttgttaatgttttcttactaatcgtggttatgtgtattttgtattaatttcttttataataaactcacccctcgcaatttctgtactgtgtggttggtacctgtgatgatcgcgaacctttgtttgtgggagcagaatgacagtagtagtgaatgagaagtgagattcttttgtggagccaccgagccgacgtgatgacgttgggattattttgggagagagttgtattttgttaatcaattcctccatagcttgttccgtaattctttttgttgatntgaagatgtaaatcacaaatttaattatatgtatgaacaaatttatcttccattatgtgaatgatgtgtactacgttactatatatatatatatatatatatatatatatatatatatgtataacagtgcgtgtgtgtgtgaatgtatgtatgt

SEQ ID NO: 6399 - DNA, 395 bp, Glycine max
ttggcgagcaggaaaaacctttaattttaatatatttactatagaaagatattgaaagggtggggaaaaacaacatgaaagaaaacataattaaaagcaaaccatccagttgagttgcggcgttcataattctttatcttgtcttccaattgaagggcttctaacacgtaagtcatatacacactacaagaatgtgaaagaagtaagagataaaaacaaagaatcaagctgttatatatacctagtcaatagactgctgtgatactgtgaaagtgtcagacaatgccaatgaacaaaagaattaataatcaatccatcatacatagctattatggattatatgagttagaatataggctagttgtgtctttgaaagagtagtcttgacaggttta

SEQ ID NO: 6400 - DNA, 453 bp, Glycine max
  unsure (1)..(453): unsure at all n locations
gcttaacatcagaccacttccaggtgctggaactacttcacatggatttgatggggcctatgcaagttgaaagccttggaggaaagaggtatgcctatgttgttgtggatgatttctccagatttacctgtgtcaactttatcagagagaaatcagacacctttgaagtattcaaagagttgagtctaagacttcaaagagaaaaagactgtgtcatcaagagaattatgagtgaccatggcagagagtttgaaaacagcaagtttactgaattctgcacatctgaaggcatcactcatgagttctctgcagccatcacaccacaacaaaatggcatagttgaaaggaaaaacaggactntgcaagaagctgctatggtcatgcttcatgccaaagaacttccctataatctctgggctgaagccatgaacacagcatgctatatccacaaca

SEQ ID NO: 6401 - DNA, 324 bp, Glycine max
ttcctgatcttgatttctgaagcaagcatatcgtagattcacattgcataacccctattccagatctcaattgagatataattagtttctgcagaagctcctcattggattgctcacaaatcctctgcattttacgcgaacaagtttgcatggctatggatctgaatttggaatatgcgtacacgtacatgattcatattatacgtattcattccctgcatgatcgaataagtctcatcatttggttcactttgttgataaaccacccaattacatattggtgtgcatatcatataagctaacgacataatctattgctgaatt

SEQ ID NO: 6402 - DNA, 403 bp, Glycine max
ctgtaattaataggaaaaagaaattgtaggaatggaaatggtataaaaagaatggaagggttattataaacaccaagttttatgagttatgaaagggttattattataatatatatatatatatatatatatatatatatatatatatatatattaattatttcctcttttatctcatttttataccactatttatctatcttttttgcaatcatatctatattatatcctttccttttcattaacatatatattcatatctctgtgattaaaaaatgtatataaatgagataaaagaggaaatgatggatatggatctcttacactgcaccccacccatatgcagtttgtataataacaatcgattgtgtgtaattttttgtaagacaatgataataatatt

SEQ ID NO: 6403 - DNA, 294 bp, Glycine max
  unsure (1)..(294): unsure at all n locations
ccctactctgacatcaatggtggatttctatngaaatgcctacctcgacgatcgaccctgacgatgctagacggtggacgctggttcgtggctcgtggctcctcttgacggcaacacggctcccttcacggtggttcgtggttcgtggctcatggccgaagaagaagacgaagatggtagcgtgaggaagaagaatggctggctgcaaggagaatgcgacgaanaagataaagaatgcgacgaanaagaatggctttgtggggggaaagaagaagaatgcacggaaggaagaag

SEQ ID NO: 6404 - DNA, 390 bp, Glycine max
  unsure (1)..(390): unsure at all n locations
ntaggggagtatattgaaagattaatttaatgtaatttgttcaatcttattcttttttttttatcaattacaaaattactattcaaagttatataatgaagtgtttctaaatttttactatcaatatataaaaccataaaaaatttaattcatcttttaacagttaatatcaaagaanatttgagtagttctaattttgaaaaacaactttcaacaataaaaataattacaagtcttaccaaataacattttaaaaaacaatgtatatatttagaaaagaataatttttttataaaagataactaatattttttttaatgaaatatgaatntcttttatatatagcttgagcaatatctttatttttaaaataaatctagatttttatat

SEQ ID NO: 6405 - DNA, 423 bp, Glycine max
  unsure (1)..(423): unsure at all n locations
ccaaaatatcttaactttaaggtagatataacatgtataaactgaattatactagcaaaggaatggtaagagatgttaaagttatatttatcaattatcaagactaagtacattatctcaaatcacaccttcttgcttattcttatagggaaatgatcattntatggcaacataagtaattgaagcccgaaaggatacacctctactgccaattcagtctgggaaagacctgaactaaataactttccttgccaatgtaggtcaccgccatacctagtcaaggggaacaaagttaggcaactcattaaagcctagttaaagggttagtcatctaagtttgtgtaatatatcattaatataatatatcacttattacattntagatgaactatatatgaccagtgtgacaagtaaacaatctca

SEQ ID NO: 6406 - DNA, 459 bp, Glycine max
agctagcgccagcggcacttagcccaacttgactactggaacataattgcattagtgagaatggcttgctaagccttattctgaaacagagaagaaattacgcttagcgagcatgactcgcttagcgcatgaacagaatttaagaaaacaaaattgccttgggcttagcgagactgactcgcttagcccaggcttattcaagctaaagaagcatggtggcttaacgagactgactcgcttagccgccaatagaataccaaaagcctcaaacattctgacctaactaaactaactcgtttagcgcggcatgccgacttagcgagttcatacaaactcagaaattaaaactggaaatttaaacactcgccaagcctaagtgcagtggcttagcaagttcatatagaaaagcataaattcaaacagaaatgatgaacatgcttagcgggacagggacaacct

SEQ ID NO: 6407 - DNA, 419 bp, Glycine max
  unsure (1)..(419): unsure at all n locations
gaagagaaagatgaaagattgcagatatacaagtaatggggatgtctcctccacctctaggacctcacaatcactcacaaactcatctcaagctcttaggatggcttcctcttccagctctggtctctgcagatcttcacacaacagaatctctcaaactctttcgaacttggacctttctctctctagaatctctcacatgcagaagctccttcaaaaaatggcccaaactcctcttcaaaatctaatttcaggcttaaataggtggctttgttcgtgctcgtacgcttagcgcacttttgaaccgcttagcatgcattagtgaatntcggcttagcgtggctntactcgcttagtggagggactgaagcagtgcgcttagcgggatggaccttcgctcagtgaacaagcacagctca

SEQ ID NO: 6408 - DNA, 439 bp, Glycine max
tttccttttacatgcccaactctcttgagtggcatttgtattgattgttgtattatgtgttgcatcttagtctctatcttttgatatgtgcatcatgcatcattgtgtaggagtaagaaaaaaggttctaaagttagaaaatttcttttgtgtttaaagctctatgttttaatcaattataggctgatcgtaatcatttacacaagtgtttgtagcttgtggagaagttttcgtatcagtttcatcgattacaaacttatcataattgattacacagttctttttgagacaatgattgggttttcaagagtctcttctttaattatgattatgctttgtttgtttgtgtctctgattaagaagttaagttttatgataatagtttaaggtttaagatgtaatgtttgaatttgtggagccaaaatttccctaattatga

SEQ ID NO: 6409 - DNA, 369 bp, Glycine max
  unsure (1)..(369): unsure at all n locations
taatatcatatctattatagactatcaatcaaggatttagaaaagggtcctggattgcaatattggccataatatcaagggttctatgtaattgcatcgcaatcccatttgtttgtaatttcctgcaacattaaggattgtgatgaaattgcacctgcacctacaactgcaatntaaattctttctatcaaaaattatcagctctgaaaccatgacctgcttgatttccaaaacaatccttggtaagaaatgtaacaaaacatctttccttgagaataaacccgtgtctgagtgatcttaaaaacatttcaaagaaacaaatcttctgcaaaatttctgcaaaaataatactctaattcaagggtcaaa

SEQ ID NO: 6410 - DNA, 435 bp, Glycine max
tctactaaacaagatgtagacgtttttcaactatatattagtgtcgtctctgataaagattaatcagggagcagagtgtaatacgaaaaaatattatgtagtctgaaactattataatcttcatatgttaagaatattatgtggtttgagtctacttagttttgattaatctttatatcaacataatcaaatattattaattcttttttatcaattgaaaactaattaaatataaattgactgggatcacaaacaagtaattgtcaaataaaagtagctaataatttcgcgtgttgcagagcgaagttgaaaccataaagggcattcatgattcaactaagctcttgttccttgattttttgtacaaaatcttacgactgtcctacatatgtattattacttcgcaatctgaacgtggacacacgctttgtactc

SEQ ID NO: 6411 - DNA, 412 bp, Glycine max
aatgacccactaacctataattaaaataacttaatgccattaacctagggaattaaaaaaaaacttaatggctgagtgtaactgaaattgtggcaaccaaaagtcacccccaacagccaataagtcagccaccatttggtctcccaaaaggctgatgcctatgttgccaattgggcccttattacaacttgaactaaacctaactaaagcccttttagttgattaacccaaaacatatttttggtcagccaactttagagggattgggccattatttagacaaactaaacactctaaaattgaaacaaagtggtgtcatttagtcctcctccatttgggccatgatacaactcacaaccttggacttttctccttgaaacttgggcttgtattcaaatagtatggacagcac

SEQ ID NO: 6412 - DNA, 442 bp, Glycine max
  unsure (1)..(442): unsure at all n locations
atactaagctttaaccttgacttggtagaacctcttgccggttngatttgttcccatgcttgctaaagtgagacaaaagctggtgcaaatcaaaactccgatatctcatgggtggaatggatgaatgcatgaaggaatgcatataacacagatgtaatctaggaatgcgggggtccggggaattcgtccccttcttagacacaatgtctaggggtagcaaagtgccccaacgtacgtttttaagaaggcgacacggaccctccgttggtttgtatacagaagggatcaagacagaacccatatgcgatgcctatgcaaaagacacaatgcgggaatgtacacagtatgataatattcactgaacataagccaaagggtatatgatacttatgcatggcagtgtaaaaatggcacgcagcgtgtttgctccgtgcccctattt

SEQ ID NO: 6413 - DNA, 406 bp, Glycine max
tgatgatgtggaaatattgccgcacttctcctgctttgcaagaatatcatgcacaatgtaagagtgggactatagtccatttctctgtttgatctccttctgtcatacttagattatacttctatctggcttatatattatttcactacccctagaagtagatatttacataaataatattcttgaagctcaagtaccggctctatcttgcctaagtagtgcagatacacaagtagtgggcattcaccatgcagtaaaaataaaaattgtagcatgtagctgcgtctgttgcagaagttcgaacaagaggaacgaaacattgggattttgcttatctttgggtatttaagaaatagaacaaaagacgatataatgttgaaaatgtattatatgttaattcctctaa

SEQ ID NO: 6414 - DNA, 422 bp, Glycine max
tctatcataatctttaacagtattgtccttgcgatatcaaacacaggcaatactaacatatcacatccctattaaacataaagtcatatacaccattaagcatggtacaaagaacacaattcactcacaaaatgaaaggtgggtggcactcaagctgtgaaaaagctagttaccatacacaaactacaaagtcctatactcttgtgcatattttcaaatgaaattgtatttattccaccattaattaggaagaccagcataacatgagcagccaaaaattttcacagaaattgacttcatgttcttctattgagtttaaatctaacaatcagaagccacacagatggatattatgattagaagcaactagcaaaacgtaatagttcatattttgaaacccctggtcccagagaacataaaat

SEQ ID NO: 6415 - DNA, 430 bp, Glycine max
  unsure (1)..(430): unsure at all n locations
gcagcgcggtgagttgtgactcgctcactcgtttataccgactcggcgggaacacggaacggtgactcactcttcgtttttctctccgtccctcgcagggagtgtaacactatttagagcgtcttgtgttaccttttatgatggtgtggaccctgcaggtgaagcaccgactcttgcagccgtttgattgtagggggaataaatcgagggtagagatggttcacaggtaaattttattntcttggcatgatttttatatgtaaagaaatattattttataccaaatacagtagataggggtgttcgattngattnttagaaaaaaataatcatctgaatcaagcataaaataaataaacatatatgtatgtttaaattaatatcanattcaaataaactaaagtcattttttaatttaatttatgttgat

SEQ ID NO: 6416 - DNA, 387 bp, Glycine max
  unsure (1)..(387): unsure at all n locations
aaggactcatggtcactatgaatgacaaattccttgggataaaggtagtctggccatgttttcaaagcccgtactaaggcatacaactccttatcatatagtgaatagttaagggtaggaccacttaacttttcactaaaataagcaattgaatggccttcttgcatcaacacagtcccaatcccaacatttgaagcatcacactcaatttcaaaagatttttgaaagtttggcaacgcaagtatgggagcattaattaggttttgcttaagaacattgaaagctntttcttgtttctctccccatttgaaaccaacatttttcttgagcacttcattgagaggtgctaccaatgtgctaaaatccttcataaatcgtctataaaaa

SEQ ID NO: 6417 - DNA, 350 bp, Glycine max
gaatcaactgagaaagtctttccacacataatacaaaaaggtaactggatagaggatatctttgcctaagacccctcgaaagattgaaaacattactcttctccccattcaatagaacttggaaagatgtgaaaggcatacactcgtaaacaatactaaggaaatggtcatcaaaacccaaatccctcaaagtgtgaatgacaaaatctcactaaatgctatcatatgccttctctagaacaactttgatcgccataaacccttttctccctttagatcttctcgtcttatggaaaacttcttgagccatattaccattatccctcccttgtctccctagaataaagctg

SEQ ID NO: 6418 - DNA, 443 bp, Glycine max
  unsure (1)..(443): unsure at all n locations
tgccttgccccttgatatatttgaaggactcatggtcactatgaatgacaaattccttgggataaaggtagtcttgccatgttttcaaagcccgtactaaggcatacaactccttatcataagttgaatagttaagggtaggaccacttaacttttcactaaaataagcaattgaatggccttcttgcatcaacacagccccaatcccaacatttgaagcatcacactcaatttcaaaagatttttgaaagtttggcaacgcaagtatgggagcattagttaggttttgcttaagaacattgaaagctttntcttgtttctctccccatttgaaaccaacatttttcttgagcacttcattgagaggtgctaccaatgtgctaaaatccttcataaatcgtctataaaaacttgctaagccatgaaaactcctcacctcggtc

SEQ ID NO: 6419 - DNA, 562 bp, Glycine max
  unsure (1)..(562): unsure at all n locations
ccgctatcatatagtatgtgcatctntgatanttanangattgttatagtcgtcacattatgactgaactcgtcacaagtggatgtaactgactgtgtacgcaatcatgtcctattctatatagtanctagatatatagtaatcttatcaatgctctcattatcnntgaatcatattagagatgacccactatcctataattaaaataactcaatgccataacctatggaatataaacaaactaaatgggctgagagtaactgtaaatgtggcaaccaaaaagcacccccaacaaccaacaagtcagtcaccatttgtctcacaaaggctgtgcctaagtggcaattggcccctattacacttgaactaaacccttttattattaacccaaacatattttggtcaccaacttaccagatgggccatatttaacaactaacactctaaattgaaataaggggtatttatcctcatttggcaaatacactcacaactgactttttcttaaactggcttgatcaaaagatgacagacttgtgaaagcgcctcgcttcttgtctac

SEQ ID NO: 6420 - DNA, 451 bp, Glycine max
  unsure (1)..(451): unsure at all n locations
actaagcttttatccaggctcatcttggtggtgaagctctttcttccatggcttattccctagaggatggcgcctactctcacctcttctcctttgtcttccgctgcatctccatggtggaaaatcaccattaaaggacctcattgaagctcaaagattcaacctccatagaagccccacaagaaagcttctatcactaaagctagaaatcctaacttaacaacctacaactaagaaaaagcgaaatcatctatcctatggtttgagaaataacaatgcaaatgaacgatgcaagagaacttacttggattatgtctgtgcaaggaaatgaagcaagcagatgcaatgtatgatttggaagcaagaaaatgcagtagcagaggtagaggtaactttgggtatcacccagagtgcctcatactttggctntttttaaaaaaaactgaaattc

SEQ ID NO: 6421 - DNA, 433 bp, Glycine max
  unsure (1)..(433): unsure at all n locations
ctagctcgcctggacgagcatgttacttcaagcttatgccaccagctcgcctgngcgagctgggcggcaagctcctcccctattttggctataaaaaagtgtgggaggctgaggagaagggttcgtcacccttggcaagcatatttcacttaaaattagtgaaaagaaggagaaagaagaagaaaatcaaggccgaggtgctttcgtaacatttccatgatcaattctgtgaatgttcatcaccgttcttcatcattcttcgttcttcattcggttagtgcttactttaaggatttgaatttgatttatggacccttaggggtcccctttattctttgtgcatcttcatctccttcttcgatcattggtgatcttttcctttgtataaagtgagtttcaaccgatcgttcgtgccataaactcacttaaccac

SEQ ID NO: 6422 - DNA, 348 bp, Glycine max
cgggctcaatttcgagcgtctcgatatattattcgcctgaatctgacatccgtgtgataagttctgaccattataatttgtcgagagcttccgttgttcaatttcatacctctcgatatattatgcgcttgaatcggacctccgtgtgaaaagctatgacatattgaatatctcgcgatcttccattgttcaatttcgagcgtttcgatacatgatgcgcctaaatcggacatctcggagaaaacgtactaacatttgaattcctcgagagctttcgttgttcaatgtcgagcgtctagatatattatgctcctgaatcggactttcgagtgagaagttatgaccatt

SEQ ID NO: 6423 - DNA, 302 bp, Glycine max
  unsure (1)..(302): unsure at all n locations
tggcatgaattgaacaatcaagaaagctatctttcaatcctctctctcaacatcatncaatatacttcaactctttctacagaatttttgattcacttctctttatctttctaaaagagctttttcaaataactttctcttccaagaaaagtcctttgttaaaaacttgtgtattcaatctttttcattctcttctccctctgccaaaagaacgaaagactaaccgcctgaattcttttgtgtctctcttctcccttacaaaaaatgcaaaggactaaccggctgagaatgtctttgattct

SEQ ID NO: 6424 - DNA, 449 bp, Glycine max
gtacggacacttagatactcagcttgaagagatttacagttcacatgcataatgcataaaatattgagcacaggtaactgttctgtgttgataatattactatttgtaaatgttagatatataaaatcatggatcggcctccacttaacatcttaaagcttttagaagaaatgatccttaagagtaattagtagcatgtcctgctgggagtcccaaatttgttactagcactaatggcattttacaaatatgcagactggggccctttagttgatgatggtgggttttgattcttgagccttgcatcaaagtatcaaccccgcgaagattttgtccatgttgattcaagaaggaccacctctatattaaaacattaatttgactggagtttatactttttctaaactccctggtcaacgtattggacatatagtaatctaatagtaata

SEQ ID NO: 6425 - DNA, 241 bp, Glycine max
  unsure (1)..(241): unsure at all n locations
tgaaatcaagtgcatccatttcccttagagtcctctcacgaggtggaggttgtgccatgttctcggaatgtgcaaaatcagaatgctcagaatcagaatgctcnaaattataatgctcaagatcaggatgttcacaatcaccaataacagaatgcacagattcaccacttatggaatgctcanaatgatcaaaaagtttaaaatgatgcctaactaatctatgaaatgtcctatctatctc

SEQ ID NO: 6426 - DNA, 414 bp, Glycine max
ttacggaactatgaaactcagcttccaaagtgtagattccttctaaaaacaaataacaagcggtcccctttatatatatagattccttttcagctcgcatggaactttgaataactttatttcatcaaacataatcaccaaagagacattcctaaaacgcagacagaaggtacatatggcataaaacctcaaaatctgagctaaatgaatggcaattatattatagatgaatcctctgcaattgacactgattcactgaacaggaaacttaccttcatccctcttcacactttccaatgtccacaagccccatggttggcccaatccctcccatagccacagtttcagtgaagtggtgattgcgatggccattccctcccataacgaaacatgtacgcatcttcaggacgtggt

SEQ ID NO: 6427 - DNA, 432 bp, Glycine max
  unsure (1)..(432): unsure at all n locations
cccacaaagtattctgtttcaactttcttggctagctaggctctcttaatttgaggcacataagtaaagcgcaaacatccaaatactttaaaaaatttcaagaagggtntataaccataccaagcctcagaaggagtcttctcatctactgctttggtgggaagtctatttaacaaaaatactgcagtgtttgtagctttcgcccaatatgccttaggtaactctttctcatgaaacatacatctgaccatttccaagattgtttgattctttctttcactaaccccatcttgtttagaggtgtaagaagcttgtaattgatgtcaatgtctgcttcctcacaaaacatgatgaggtatgctgaagtgtactccttaccattatcagacctcaaagcttgaatcatgcagccactttgctttttaatccact

SEQ ID NO: 6428 - DNA, 456 bp, Glycine max
  unsure (1)..(456): unsure at all n locations
tgcacctgatgcanagtaagttggctttctttgaaagttctatactcttagatntccttgatgttgatgttcccatcctgtacattcgtgccatgacttangattaagattaagctccatcaaaaaaaatttttgttagtcaatgtgtacaattgataactattgttattataaaataagaagtgcaccaagacgaagagaagaaaattacaaagagtttgaaggattatggatcctctttgttaaaacgaaaacaaacaacaaagaaaaaaagaagaaaaacatcaatgaagcaaagttgctgccctgatgtgtgtgtgttatgtgagtgcaaactcagaattatagtctatcatctgttcttacattgcttaaatgctatttctatctgaattcattgcttgccatttttggtgaatgtagtgtgcaccctangtttttagatncattttatat

SEQ ID NO: 6429 - DNA, 447 bp, Glycine max
ctaagctatccaggcattataattacatttatactttgcggtattcaatggaccgagactaattcattataccaaattacatgagaaaactgtcattaaaggataagataatagtttttctttcccaaataaaaacaaattaaaaaagaacagctcgaatatataagaaatcttgacatttttctaacaactacaattaaatattgatacaagcttgtgataattgtcaatatatatatgtccttaaaagcataaaaatcctaggaataatttagcttctacatactctggctacttggtttacaattcataataaaaaaaaccagcactaaaagcatctagagttcttcaatcctatatagtttccttcaaagatggaagaattttccttacggataccaacgataacatcaatattaaatctgacaaatgctgctccttgaaact

SEQ ID NO: 6430 - DNA, 432 bp, Glycine max
acaaccccgtgcctacatccagtccccaagcaaccaacgattcttgagatttctttcaaccttgtaaaatcctttacaagccaaagatccacaaggaatgtaccctcccttgttctctttgaacaaccaagtggatgtaccctccacttgaactgatccacaagagatgtaccctctcttgttctcagtataagaacccaagtagatataccctctactggtgccacaaaggatgtatcctccaatgtgttaagacaaagaattctcaggcggttagtcctttgaatctttgtaagggaaaacaaaagatatctcaggcggttaatcctttgaaatcttttgttaaggggaagggaagaatcaaaagaattctcaggcagttagtcatttgaattctcttggaagagggagaagggagacacataagaactc

SEQ ID NO: 6431 - DNA, 452 bp, Glycine max
  unsure (1)..(452): unsure at all n locations
nntctttgtagttaatggcatggcagcagggttctttgcttgcaagagggtgtgtgaggcaaggagatcccctctcccctcctcttttgattggcagaattagttctcagcagagggatatccaagttaattcagaatggtctcttacctcggaggtcaggaccaaggggctgtctcattcccagtcatgctttttttacagatgatcttatgattttttgccgtggccaaaagaaagggttgatgcatttgatgaccttgctttctcaatatggggaagcttcgggacagtggattagcctggaaaagtgcagatcagattttttcatggcgttctctctcgaaataggatcctctcttatggacatccttggtattggaaagggatctcttccttttcattaccttggtgttcctaatttccaaggtagaccacaggcaagttatcttat

SEQ ID NO: 6432 - DNA, 387 bp, Glycine max
  unsure (1)..(387): unsure at all n locations
ggcttgcctaggagtccagccttctcctttgggagggggtgaggcctccgcagcccaagagcctcaacaggatcagtaggaggacattccagaggccgtagagcctacacctcctgagccattcactttagagtctgatccagttgttgtataaggtcaggaggatgttgcagcatcagagccctttctagcagagccctctccatcagagccctttanttttgaggctgatccaactatatctcctcagtctgagccatctgcaccagtgtcagacctgcctctttctcaagatccatcatctgcaccagcactggacctgaatgagcatgcacaggatcattgataggatcaagattttatttccctgcttttgaacagttatta

SEQ ID NO: 6433 - DNA, 456 bp, Glycine max
  unsure (1)..(456): unsure at all n locations
gcttctgatgatgaatcaagttgattcatgtagttnttgatgatgacaatgatgatgacaaacatcccaagagaatgatttcaagattgagtcaacaagttcaagatcaagtttaatttcaagtttcataagaagaaatcaagaagattcaagaatcatgagaagtttgatttcaagattcatgagaagatgagttcaagattcaagagaaaaaatcaagaagacttcgcaagagaagtattgaagatgtttttcaaaaaacagacatagcacatttttatttttcaaaagagtttttctcataattctctaagttaccagaatttttactctctggtaatcgattaccaatttccagtaatctattactagtggcaaagtttgatttcaaaagcttttaactgaatgtgcaatgttccaattgttttttaaatagtgtaattgattacaatatat

SEQ ID NO: 6434 - DNA, 221 bp, Glycine max
gtatccgagcttgatagctcatctttcctctaattatccagaccatgctctacctgagatcattgagacactgagagtgtatccgaaaaatgcagagctattcctctaaagctctacctctaaagcttaaacgcctcctagattaactttccatcaccgagtctgacattattaacatatagcattcaacatgggtgcttactctagcatgccaaaatcac

SEQ ID NO: 6435 - DNA, 421 bp, Glycine max
  unsure (1)..(421): unsure at all n locations
tggtcttcgccagtgaaattgatcatgtgggtccgaaaagaggcaaatttgatcatcctactaggacgactgagaaaactggtgcaaatgaagagggtgagaaagagggagaaacccatgctgagactgccattcctatacggccaaagttcccaccaaacccaacagtgtcattactcagtcaataacaaacctcctccttacccaccacccagttatccacaaaggccatccctaaatcaaccacaaagcctgtctaccgcacttccaatgacgaagaccacctttagcacaaaccattaaaacaccaacaaaaaggaattttgcagcaaaaagcctgtagggttcaccccaaattccgntgtcatatgctaaactagatcccatatccactcaataattcaatgctagccataacccc

SEQ ID NO: 6436 - DNA, 442 bp, Glycine max
ctatgcttgagccaaatcctgactcaccataaaccttgacttcttgttagaatgtcaatccttaccctcggaagcgaaaagaataaaagggaaatttccaatcaaagaaaaggaaagaatgaagatttccaatcaaatagaaagcaaaaaagaaaagaaggaaaattccccaatcaaagagtgggagaaagcaaatagaaaagaaagaaaattcccaatcaaagaatgggagaaagtaaaaaaggaagaagaagaaggaaagaaagctcctgatcaaggatcgaaggaaaacagaagaaatgtgcagaaaggtctttggaccggacaatatctgaacaatacagaattgtcaccaaatgaaaaaaaagaatgaaaggaaaccacgacctaaaatgggtcttctcctttgattaccaaccaaaattccgtgcgctagcgactt

SEQ ID NO: 6437 - DNA, 613 bp, Glycine max
  unsure (1)..(613): unsure at all n locations
ccgctcgcgtgtgncatacanangtatgatctgttgtgtagtagtgttactcgtgtagacgtttgtgataagtcgtgtgcagtggtattgaaatgcgatgtagtttctactattatatacgnacttggtcatacgtctcgcttntgatcgatctcactacgttaatgacctagatgngtctcttctgtctgagaacatcgncctacaatgacgctgttcaccgcccatttagagtctctctttgcttatttccttacgaaacatcgtagaagcttacggatcgctgggcaatttgctttaagtatctcaaccgtgcctggcgtaataaccgcatgccaacaaacaattgtccctagacgaaattagggtctgactctgatgatagaataaggagatgaagatgcacaaaacaactaaaaggacccctaagggtgcatagatcgtatccaaatccttaaaacaaaactaatcgaataacgaacgataaacaccgaacgacgaacgatgtaaaagctgattacaatcggaaattcggcggcgccctggggctcgattttctcttctttctactcgtgtctccaattctctcaaaatcctctaatactaatgcgcg

SEQ ID NO: 6438 - DNA, 453 bp, Glycine max
  unsure (1)..(453): unsure at all n locations
tctaagctntcacaagagtcttcacaaataaccatcatgaagcataattctaacaaaactacccatcatatctcccaaaaccccatacccacgaaaatcaaaggagaaagaagtccacccaaacctgaaattttgaagtcccactcgtagacacgcacttcacgaccccgaaaatgccctcctttcacgatttggggcagaaatgatggccaaaggttgaagctttgtgtggagcttcaatggtggaggaagaagaagagaatggcaacgtgagggagagagagagctgtctgaaataatgtggggctgagtgaagagagagagagttgctttttgattntaaaaaaaaggctttttcctcatttcttattattttattataaactatgccacatgtctccattngagtggagcaaaaagggcccgatttcccttttgactgtgacccatact

SEQ ID NO: 6439 - DNA, 344 bp, Glycine max
gcgagctgtcgttgctttttgttgaacccccacaccaagaggaacactttaatcagagcggaatattcaaaacttatctcgaggattcggtacaaaacgaagcctccaatcttaccttcgcggttttcttcgagggaaccgagattctaagcctgttccttgatagtttgagcctctctttgcatctcttctaacttgggagccattattggatgtttttacacttcctttgaaaaacccttgaagaatgagacgttgtaaaagttatatttgtatgaaatgggtgttatttcgggaccttcactgaacctgggtcacattggcgcgagcgatagttcaaaatg

SEQ ID NO: 6440 - DNA, 448 bp, Glycine max
  unsure (1)..(448): unsure at all n locations
ntaacaagagtcttcacaaataaccatcatgaagcttaaatctaacaaaactacccatcatatctcccaaaaccccatacccacgaaaatcaaaggagaaagaagtccacccaaacctgaaattttgaagtcccactcgtagacacgcacttcacgaccccgaaaatgccctcctttcacgatttggggcagaaatgatggccaaaggttgaagctttgtgtggagcttcaatggtggaggaagaagaagagaatggcaacgtgagggagagagagagctgtctgaaataatgtggggctgagtgaagagagagagagttgctttttgattttaaaaaaaaggctttttcctcatttcttattattntattataaactatgccacatgtctccatttgagtggagcaaaaagggcccattttcccttttgactgtgacccatactcag

SEQ ID NO: 6441 - DNA, 332 bp, Glycine max
agcttctattgtatgcacaacaggtggaagaacacactacaagtgtgggttttattaagaaactcctcaagtgcagggtcgttttctttgatttttggtttatggataaatctttttggcttcgtcaaaaaggtttgggttttgtgaattttcgcaacacaaaagctttaatcttgttgggtggtctccttttaatttattctttctgagttctcgcactacaaaaagtttaaattgctttgttcctgaaccttctacaccgtgcgttgcatttcggtttaatctattcattcgtcaatcttttaaattgttttttgcacccaacactaaac

SEQ ID NO: 6442 - DNA, 448 bp, Glycine max
  unsure (1)..(448): unsure at all n locations
tagcccaagaggggatggaccttttaggtcttggagaggatcaataataatgcctataggttggacctcccaagagagtatggagtcagcaccacttttaatatttatgatttaattccttttgcaggtggagttgatatagaggaggaggaaccaatagatttgaggtcaaatcctcttcaagggggaggggatgatgcaatcctccttaggaaaggaccagttaccagagccatgagcaagaggctccaagaggattgcgctagagttgataaagaaggccttatggttctcatgaaccttagggtagatttttgagcccatgggccaaggttgggtccactcttctttgtaaatagtagaataggttgttttcttcttttgggccttgtatattggccattctagtagtatagggttttagccctgtatttcanggcattttgag

SEQ ID NO: 6443 - DNA, 449 bp, Glycine max
tgtcttatgcataattagggtaacaacttgaagaatgtttcttgcacaaaattccatagcacaccacagtgcctactttgggaaatcagctctggaggcaataaaaggagcagcttttgcagagatacctaggttttgtaagcttataattgttagggtttcttctgtattggctgactaaacaccctagttggggatttctaatgaacagctgatgtaaatacttaatatctaattgattatgttttctatgttcaatgcttccttcaatgcttaatgtttgtatgctttttgtctgatcatccatatgtgtgcatagttaggtgactttagcattgggaaatgtactgttgccttagaactttattgaagcaggatcgaaacttagtcttacaagagtgatctgcggattaagttttggttttaattatgttcgtacaataatgcta

SEQ ID NO: 6444 - DNA, 428 bp, Glycine max
  unsure (1)..(428): unsure at all n locations
ccttggaaatgatttctatacaaaagttagtcgtatgaagcgtctaatagttatccaaggagaggtcttctagagttctctattctctagtaaattctttaggcattgtcatagagatttctttgctttgttcaagctcttcttatccttgatgtcatcttcaagagtagaatccttttcctaaaaacctatatcttcttctaaagaattatcttaagcaataaagttagtttcatcacaaactacatgtacaaattcttcaacatttagagttcgtttattgaatactctatatgctcaagaggttatactttagtccaaccacatatagaaccattttatttgagttntgtactgacttctaatatttccttctcccattatatttccttctgacaagcatctacttgttgttagcctactacata

SEQ ID NO: 6445 - DNA, 440 bp, Glycine max
tctcgatatattatgtgcctgaatcggacttctgtttgtattattattaccatttgaatttctcgagagctttggctgttcagtttcgagtgtctcgatatattatgcgcctgaatcggacttttgtgtgacaagttatgaacatttgaatttctcgagacctttcggttttcaatttaaatcgtctcgatatgtgatgcgccagaatcggacttccgcgtgacaagttatgaccattggaatttatcgagagctttcggtgttcaatttcgagggtctcgatatattatgtgcctgaatcggactttcgtgtgacaagttatgaacattggaatttctcgagaccatacgatgttcaatttcgagcgtctcgatatattatgcgcctgaatcggacttctgttagacatgttatgaccttttgaatttctcgagagctt

SEQ ID NO: 6446 - DNA, 53 bp, Glycine max
ggcagagaggagaaaaaaaggagagaaaaagcaaagggagagagacgccctcc

SEQ ID NO: 6447 - DNA, 288 bp, Glycine max
cagaacacgctggaacagggcaaacacctggtcaactttcatgctgatgctgttggcatgcctagaaacatgcatgaggatgtctatgtccgatagggcgccgcaacggatgggtgatcaactggggcactctgatgggggttctcaccagagaggtgcatactctaggggggtgacaacattaccggaatgtgccaaaattaacaacaaatgtaaagaaaaggcctaaaactaaagcgagacatccataaacgacaacaaaagccccaggacacagtcaccgaaacc

SEQ ID NO: 6448 - DNA, 138 bp, Glycine max
  unsure (1)..(138): unsure at all n locations
ggggatccatcacatgggactatgcgtctgtctggngacgagcaagacagctctctatatccacaattcacacataaacccaccatcgacaggtgcccaccttaactgagctcacgtactcccacgccacccttgtgc

SEQ ID NO: 6449 - DNA, 374 bp, Glycine max
gaagaaatgcaagtagtggggatgtctcctccacctctagaacctaacaatcactcacagactcatctcatgctcttaggatggcttcctcttctcgctcagttctctgccagtcttctcatagcaaaagctctcaaaactctctagaacttggaccttcctctctctagaaatgtataaacatgcaaaagcttcgagaatttcccaaactcccttcctaaatctgatttcaggcttaaataggtggttttgtttgtgctagcgcgcttagcacgactatggaccactcaacgcgcattagtggaattcggcttagcacgtgcttttctcgctcaacggatggactgaagcggtgcacttagcgggatgaccct

SEQ ID NO: 6450 - DNA, 415 bp, Glycine max
  unsure (1)..(415): unsure at all n locations
ctgctgatttagttntcgtcagcgaaagaattgatgtgttcttcgaaaagaggcaaatttgatcatcctactttgacaaataaaaagcctagggcaaatggagagaatgagaaggaggagggaacccatgttgtgactgccattcctacatggccaaatttcccaccagctcaacaatgtcattactcagccaatatcagcccttctcattacctaccacccaatcatccacaaaggccacccctaaatcagccacaaagctttcctgctgtgcacccaatgccaaacaccacccttaagacaaaccaaagcaccaaccaggaaaggaattttccagcaaaaaagcatgtagaattcaccccaattctggtttcctatgctaacttgctcccataactactccataatccaatgg

SEQ ID NO: 6451 - DNA, 420 bp, Glycine max
  unsure (1)..(420): unsure at all n locations
agcttctacgtgaagatgccctaaactttcttttcttttgattntgcttttcttgccggaggagataaagggagatgacatgtttaacctaaacagtaaacaattactatataattcacaacaaaaactttctcactttataatagatactgtatatttgtttgagatgaaagaaaaacaactaaaggcaagtttaagctatacatttcgaaaagatatatatgtcttttgattatgaaactcttaaagagtcaaatagcggcattattaaagctccaagttaagccgttctttcttgaaattggacccacaaaagttctcaatggacccccctagacaagtactagcaccacccatctttatatatacccctggaaagaagttaagggaaaggttcatcattaactactttgcatggga

SEQ ID NO: 6452 - DNA, 416 bp, Glycine max
  unsure (1)..(416): unsure at all n locations
nggattcacggagaacagtggcaaagctcagagatttcgtgtgttgatgatgaaaggagtaacaaattgatatgaatatctgaaaataaaaaggtttcgccggagatacgaattataagaagaagggttttggaagcagagaagctgaaggggtttttctggagttttgggcgctatttatggagtttcactttaaaaagggaaaaacaatataataataatcaattgtcaaaaatcaatcaaatcagatttcctttccgactccccagcgtgacacgtgtcccactctgcctagaaaagtggaattaatgatgggtagtgggagatcgaggcgacgattacacagtaaacgtgcaatcatggcgccatttcatgaaaactggtagaagaagagaaaaaatgtcaacttctcatct

SEQ ID NO: 6453 - DNA, 422 bp, Glycine max
agcttgtatgagttagttgggggtaatttatattatatggaaagagttagataattaagtaggtataactaatggagtttattgttataagctctctccatatataaaatctatttattgtaaatcatcttgtagaaatcaataatacaaatctcattcttgatttcatttactttctcactctcttaattcctctctaaatagaaagtgtgtgtgtgaaccacccttgctccaacattgccggggattatatgtcaaactcaacaaaggcgaatacttttgctccattgtggtctcatatgctgcgtcatctactactcatcatttgagggaagttatagattgtaagatataatatggaccattcaaaatttaccttgaaaatttacacgtctactagtatttgtatgggaaattctgcg

SEQ ID NO: 6454 - DNA, 418 bp, Glycine max
  unsure (1)..(418): unsure at all n locations
tatgatataaaataagttctcatttgataaacttattgcctgtcctaacacaccaatggtgcagcagcagcaattagggtatgcctaggataagtttatcttcggtcttatccgactcgaaattttgacattgtcatttatctgaagccgaacccaagccgataaatatgtaataacatcatgtcaacttgatttattaatgtagcacatcaattagggtatgcctagaataaaagaagtataaaaattaaattaagatatattttataatatatatttcaaaataattaataaagaatatacagtagaatataatattatgttagagaagatattactattaaataactaaaaattattattaatacacttggtaaatntatatatatatatatatatatatatatatatatatata

SEQ ID NO: 6455 - DNA, 423 bp, Glycine max
  unsure (1)..(423): unsure at all n locations
agcnttgtgacgaactatgtatggctttatctttatttttattattnagtatatacaaatgagcttgttgcaattcttctagacttggagtgataacatacaatcctcttgaacccttacctcccactctttcgccatgctaagactccggaacctcaacaagtatgagaaaaaacttagcttttcctttttggataaagtatgagaagctggaggcaagtatattttcttaccatcaaaccttggatgtaactggtctcgtatacccatctcaactagatcttggcgagtattcaaaccatcctttgtcttgccttgaatgttaagaagattgtcgatgacactatcacacacacttttctcaacatgcataacatcaatacaatgtatgacatctagatcgaaccagtatggaagatcaaa

SEQ ID NO: 6456 - DNA, 412 bp, Glycine max
  unsure (1)..(412): unsure at all n locations
ntgcgaatntggtcttcaccggcgaaatgatcaatgtgtgtctggaaaaaggcaaatctgatcatcctgctttgatgaatgcgaaaattggggcaaatgaagaggatgagaatgagggagaaacccttgctatgactacaattcctatacggtcaaaattcccatcatcccaacaatgtcattactcagccaataacagtccctctaacccaatcatccacaaagcatgcccgccgcacatccagtgcctaaacaccaaccaaaaaggaattttgtagcaaaaagcctgtaggattgaccccaaattccggtgtcatatgctaacttgctcccatatctactcgataatgcaatggtagccataacccctgctagggttcctcaacctccatttttccaaggatacgactcg

SEQ ID NO: 6457 - DNA, 406 bp, Glycine max
  unsure (1)..(406): unsure at all n locations
agcttctcccactcaagttttctgtcatttgtaacaacatcaactcctttttccaaatggtcatgatgtccttggccaaggaaccaaagctccacagaggaagaccgagatagataatttttctagttcagttttgtagttgttattgttggggttccagaaaaggaaaaaactggtccagaagaggccatttctgatcaacaatggaaacccaaaggaacaaaggatagaagaaggcacatgcaggcacaaaggcttgccaaaataaaaaaaacaacacctgaaacaggcttatggaagaacgaagaagctgtcggaacaagctgggcgagctttctacgtcgggacggcggcgcgcgccgaanaacgcaaggagctgtgacatcgcgtgacggcacgtgacaac

SEQ ID NO: 6458 - DNA, 399 bp, Glycine max
tgtgactcttggcaatttctttaaaactagtttcctaatatgttgtgacttttgaaaaaatcttcagaaacaagtcacttgaagaattatgacttttggaaatgtatttttcgaaatcagtcactggtaatcaattaccattaaggtgtaatcgattacacatcaatagtgtagaagcaaagcttcatggtgaatcaaaagtgattcaaaggtgttttgatgataacaatgatgataacaaaagatgataacaaaaggtgatgacaaaaagctcaaaggtcaatcaaaggatgagttcaagatgttcaagaagaaatcaagaacaaattcaagactcaacaggaaaagttgaagaacacttcaagattcaagaagaaggatgaattcaagaatcaagct

SEQ ID NO: 6459 - DNA, 398 bp, Glycine max
  unsure (1)..(398): unsure at all n locations
agctntgcgaatttggtcttctccggttattatatcaaagngggtctggaaaaaggcaaatatgatcgtcctgctttgatgaatgcaaaaactagggcaaatgaagaagatgagaatgagggagaaacccttgctatgactgccattcctatacggtcaaatttcccataagcctaacaatgtcattactcagccaataacagttcctctcacctaatcatccacaaaagccatcccaaatcagccacaaggcctgcctgcttaccacacgcccaatgcccaaacaccacctttagtgaaaggcaaaaaggaattttgcagcaaaaagcctgtaggattcaccccaaattccggtgtcatatgctaacttgctcccatatctacttgataatgcaatg

SEQ ID NO: 6460 - DNA, 414 bp, Glycine max
  unsure (1)..(414): unsure at all n locations
tgtagaatggctagacatgatacatgtcagggtttgttttggttcattgataaaagggatgccccacattatttccatgacacaaatgcaaaaatgatgatttggaaattttatgcaaaactggtcatgcatgcacctatgtggacgctcaagtgtcaaatttttatggtcatgtgatgctagggctcangattcatttcctctattttaaatcaacccaatgtttccaaaatatgttcttttatcaatttgtgcattcatccgagtccattttgggcgtctgggaaaatcttcacagcattcacccttcaggtgtatacacattttttcaaaaactagttatgatcagtgaatttttccaaagaaaagttggaagtcatctcttttaaaagcatgttggtttttcagcttgac

SEQ ID NO: 6461 - DNA, 403 bp, Glycine max
  unsure (1)..(403): unsure at all n locations
agcttcctttaatgcgttctattattaccagttcgatggtagtacgagctttcgacggtagtcggcgggaggtaatgggggaaattgacatccccattcagataggccctcacacttacaatgcggttttccaagtgatggacataaatcctgcctatagctgccttttcgggaggccattggtccacgcgctaggagtggtcccctcgatgcttcttccttggcaccatatgtagaggcagcagaggaatcattggaaacagctttccaatccttcgaggtggtaagttgtgcctctatggaaacaagtccattgctaccttgtttctctaatgcggccttgatggtggcgcgggtaatgctcangcacggttatgagcccggaatgggtctgggcaaggac

SEQ ID NO: 6462 - DNA, 402 bp, Glycine max
tgcaatgactgaagacattgttgtcgcaacctatttttttgcagaagggcgacgcggggctcatgggtgcattttccaagggaggaaaacccccggagtcgctaccaatgtatatttgaggaaaacgtcaaaaaaaccaaaaggggggggcctacaacctttaagtgtgaaaggttcgggtgttgtttttacgcacggggaaggtattaccactccacccgtccgtcataagggacgaaaaccttttaatcaaatgtgcaatatcatgtctttaattggttttattttcccttttttatgtttttatgttttttatgggtcttttgtattttttatctctttttgcaagatatattttaaccgaacaaaatatcatttaaggcgttgaaccattaaacgatc

SEQ ID NO: 6463 - DNA, 415 bp, Glycine max
  unsure (1)..(415): unsure at all n locations
agcttctcaaggaagtttcttagtgtttctacctangctataaatagaaacatgtgtaacacttgttgtaactttgatgaatgagagtcttgtgagacacaatttaaatttcaacttctctccctcttttcctccttcaatttcgtgctccccctccccccctctctctctttcttttcctccattgaagatacctctctaagcttcttatccaaggcactctcttggtggtgaagctccttcttccatggcttattccctagtggatggcatctcctctcacccttctcctttatctttcgctgcatctccatgggtggaaaatcaccattgaaggacctcattgaagctcaaagatttagcctccatagaagcttcacaagcaagcttccatcacaaggagtgcagggtaatt

SEQ ID NO: 6464 - DNA, 398 bp, Glycine max
tctactcaaattatcttgtaattcacttgaatgcttctgtattttcatttcatgatatttatactattttttccaatgtctatattctagataaataatactactacttgaaatagttcatttttttactatatgtctctttattttatttgttcatcaactttcttttctttctcttggtcttatttttttcctatcaatctaacacttagcaggggagactgtatagtagttctggagaattttattttcctcattcatgtgttacataaaatgctaaccaaactttgccccattttgtagtctacaaatttctgacatatgccatattatacttgtttaaacccagctaccctctctctaccttgtgaccgatcatgagtttaaattctgaaaac

SEQ ID NO: 6465 - DNA, 420 bp, Glycine max
agcttgagtgtctgacattttattattttaattataagattaattcaataaatcagtgtaagtaatacgaatcagatagtaagcattgataagttgttttattttagtacctaattatgacggaacaaattataatttcttttttgacgaggctggtataaattttaataacaactcaaagaataatagaatatacgaagtgagtcaattgttaaaaagaagacaaaaaaaaaactgaagctttaaaatcttctaaaaatatatacataagggaaaaatagaaaggacaatagtgaaacgaaaataaaatagaaaattatattgtttgaatggataaaactaaaagggaaagaaaatgattttttttaatatttatttggatgattaaaaataatgggtaatatatatatatatatatat

SEQ ID NO: 6466 - DNA, 404 bp, Glycine max
  unsure (1)..(404): unsure at all n locations
tcttatgaatctaatttgataattacaacactgnattgtcttggctgttgactgatgtcgaatgtatattttgtttaggttctctctctatcgatctcttttgcttttcctctcccattcacacacatttttttgatttggaggttgtgtaagtgaattaactgaaaatttgaaacacgagaaaagaaacttcccaacacaaatctgctgaaagtacaatgattggagcttccttgaaattctgattttgccacaattttgaggacaaaagtaaagagctatggacattaaatgactgtcgcgaaatcaagtttcagggaaaattttctcagaataaagattgagtacgtgcaacctaatagcaactgctagcaaatactagctgaagtacccccaagatgcac

SEQ ID NO: 6467 - DNA, 391 bp, Glycine max
  unsure (1)..(391): unsure at all n locations
agcttgtagaatggcttacattatatatgtcanggtttggtttggttcaaggataaaaagggatgccccacattatttccatgacacaaaatgcaaaaaaatgatgatttggaaactttatgcaaaactggtcatgcatgcacctatgcggacactcaagtgtcaaatttttatggtcatgtgatgctagggctcangattcatttcctctattttaatcaacccaatgtttccaaaatatgttcttttatcaatttgtgcattcatccgagtccatttcgggcgtccggggaaatttcacagcattcacccttcaggtgtagacacattttccaaaaattggttatgaatcaatgaactttttttggaaatcgtctcttttcaaaagcat

SEQ ID NO: 6468 - DNA, 388 bp, Glycine max
  unsure (1)..(388): unsure at all n locations
ngaaagagcccgggtagtctatgatttttcaagtctatagccatcaaagtctgaagagagtatgatgaactaagggacgtcaatatggccaccgatgaagccttggaatgagaaaccaagaaggcccgaaaggaagaacacgaccaaaacaagttttgaggggctatatatggcagcaatagtgagctcaaactccgaagaggtgaaaggaatcatcacgggtcaaaggcatgatctggaaggacgagctaaaggcttgccttaggtcgaaaagaaatttgtcccaacagttaaagtgagactgaagggaatatgtgggccatcatcgatgagtgcaaagagaagctaaatctagcggcgactcacgagcaaagggctagaagatgag

SEQ ID NO: 6469 - DNA, 408 bp, Glycine max
  unsure (1)..(408): unsure at all n locations
agcttgtgggatgcgtgtatgttctgtttttgagaggatntttagaatgaggggttgggtgagtccgagagcgaggttaggagggaggttgatagttgcagagtgagagtgggatagcgtgttggtgatagaagctgccaccagcacctctcccaattgtttccaatgccgcatttcactcggaatcaaagtattctcgattggttttggttgctttatgaatcatcttccatcataatatgcctcaacaatgctaatcctaaaaccctaatcggaaagtacaaacctggagaggtaaaattgttgtgaatgttatgtgaaaccgtcgcactttctttgtcgatgacgaattcgaaatcctcggcggtgatcagcttcgccgtgtcttgcttcttcgtcttcattctt

SEQ ID NO: 6470 - DNA, 293 bp, Glycine max
  unsure (1)..(293): unsure at all n locations
tcagcttcaggaaaagagtgttatttttgatcgttgtagatgaagatgnngagagaggaggaggaaaaactggaaaaatatgagtggggaaggagatggagcatgggagatgaatagacggaacagagggaggaggaaaaagtgataaaaaaagattaagaaagaaaagtgggcattaatggaaagccatacgattgataatggtacacaatgaccgttcctgtgttcacagtaacattcaaaaatttggagaagaaaacgcgaatgacatactacagtggttggaaaaaatg

SEQ ID NO: 6471 - DNA, 395 bp, Glycine max
gcaagcttgtacgcacatcgttcgcgtgtatgatattcattccacaaggtttgaagtagaggagagcttcaaccctataaagcaacgtggcggacaaaagtggacagtaaacttgaatggtcgtcattgtcaatgcggaaggtattctgcgcttcactatccatgtttacacattattgcagcttgtggttacgtgagcatgaactactaccaatatatagatgttgtttatacaaacgagcacatcttaaaagcttactccgcacaatggtggcctcttgggaatgaagcagctattcctccttctgatgacgcatggacacttatccctgacccaactacaattcgtgcgaaaggtcggccaaaatcaacaaggataagaaatgagatggatt

SEQ ID NO: 6472 - DNA, 411 bp, Glycine max
  unsure (1)..(411): unsure at all n locations
agttgctccaacacttaagatacttagctcgctcttcttatccaatcttatgtcggctaaacggacttcatacttgacttgattgttcatcgtcccaaacttgaaccttagggattgctctaggattatttcatttgggctttctaggatgacaccagtcctactccctttntcattggatgaacccatctgcatacaaattccaccactcggattgtagttctgtagttgttgtcaattcgacgatgaagtctgctaagcattgagccttcgttagatcccttggtttgtacttgatcccaaactcgaacaactagaccgactaacatatcattcggtttgcaagttctggtttcatcatgactgttaagatatggtggttggtttaaactatgatttgatgactttgga

SEQ ID NO: 6473 - DNA, 408 bp, Glycine max
  unsure (1)..(408): unsure at all n locations
agcttgaaaagtatttaagatctgcttttatttttgattcctgcgaattgtattgtttcttaaattgggaaaatccttgttggaccgtttctgggaatatctctgggattggtccaaagaagtcccaccattgcaaaaaccaattgggaaaattgtaaattgtgttggtcttgaaatatatcaaccatgaatgcttgaagcgggtattttggtgccaaaacaccttagtccaagcatcaacgtaatcccaataggtataacctaccggatcaaatggaactgaaaatctctttcctttgttcaagtccgaaccaaagtgtctcggttgaagaacttttagtatttggatggttgagtgggtgtttaaggtttggtcttttggatctttgaaatgttngatagatactg

SEQ ID NO: 6474 - DNA, 419 bp, Glycine max
tgaactactctctgcaagttgaagcttgattgcacgttatgttcttacatctcaggctaagcacattttgtagaaaaaattttgtgttgcagaaagtgctaagcgcagcctgcagcactaagccctagatcctctctagaatttgaaacttcaagttgagcttagcgtgaggttaggctaagcgcatgggttttaaactcaaacgtcatgttggcacgctagtagctatgcgctaagtgtgccaaatgaaaatgctaaaataaaataaaattgcaaatggtagttaccattcacacttcatcattttctcccttgttcttgtgcccacatttgtgctttgtgcattttgttgcctgtgcttcaagttactcctgcattctttctcttatcttgcatcttcatttcaatgcaagtaagtt

SEQ ID NO: 6475 - DNA, 421 bp, Glycine max
agcttgtaatccatcaactattatcatttttgttatctcctccaaacacaggggcagaactaggatattttcttaagggggccaaaatagaaaataatacactttaaaactatgttccccaaccattgtcctacaactctatttaagacatcactaatagaatcaaagtaatgatcacctttcataagtgttgtccttgaaaatcctggtatttattagggatcaaaaaatattttaaccagacttaaaatatattattatcctacttggtttatgcactaacatccacttaggcatataaaccatttgaattcaaatataaacaattttttttttgagtgtgttagtcgtcttatacgactaacttttgtatagaaaacttttgcaaaatatgtatagttttccccaatttatagttctt

SEQ ID NO: 6476 - DNA, 411 bp, Glycine max
  unsure (1)..(411): unsure at all n locations
ntgcgganttggtctttgccgatgaaaggattgatgtgtttctaaaaagaggcaaatttaatcatcctgcttggacgaatgaaaaaattggggcaaatgaagagggtgaggatgagggagaaacccatgctgagactgccattcctacatggccaaacttcccaccagcccaactgtcgcaacctaccctttggcgggagggcgacacgtgactcgcgggatgcgtgttccacgaaaggaatacgcgcggagtcgccaccaacgtttatttgaggaaaacgtcggaaaacccggaaaagacgcgatctacgaactttaaagtgaaaggttcgggagttgtatttacgcacggggaaggtattagcaccccacacgtccgtcccaagggacggcaacctttaatcgaatgtg

SEQ ID NO: 6477 - DNA, 410 bp, Glycine max
agcttctcccctattttgctataaattgggggttatttgaagaagaaaagggttcagctttcttggcatttctcccttgctcgaaattactgaggaaaattatttccgtgaagaaaatccaagccgaggcgcttccgtaacgtttccgtgagcaattacgcgaagattctcgatcgttcttcaacattcatcgttcgttcttccttttcttcagtcttcaacgggtaagtacctcaaaccgagcttttcaattcattctatgtacccatggtggtccacattttgttgcatgtatttttattctcgttttcatttgctttttatacccccttttgacgtgcttaagccatttatttaagtcatttctcacttaatctaaaaataaaataaatttccaccgatcgtttgaa

SEQ ID NO: 6478 - DNA, 309 bp, Glycine max
  unsure (1)..(309): unsure at all n locations
tgaacctganattgcatgcagttttctggagatggtttgctctatagcatttatatctggaccagaaatggtcagtgatagtaagttggaagctaacatggctgctgaagttgaaacaatgggtgccttatttgttactgatactggcaaaatttcagaagcaagtgttacagaaggtacagaagataaagcagaagatgcagaagatagagaagatggtgcaggaggcaaagctgatggagcaggagccaaagcagaaggtgctggaggcaaggaaacagatgttatactaaggatactggccctcac

SEQ ID NO: 6479 - DNA, 211 bp, Glycine max
  unsure (1)..(211): unsure at all n locations
agcttagctacacaccccctttaaatcatatctcacccccatgacgagaatacatgaaaataacaatacagngccttctccacagtgactccttgctatgccgcgaggagggagggtaatagactcgccgaagatagtgctcgatatacaagggaaggctctagggtattcatgatccatatggcacattccttgcccacgggctatttat

SEQ ID NO: 6480 - DNA, 400 bp, Glycine max
actcagctgagatatatagaagcgaccaaggtataatactctctctcgttttagaataaaatcatagatacaacaataatagatcccctgatccagtattcaataaattcatcacaagttttcacttttcacttctttctcacaattacataactcatcgtagcactcttggtatcaatagatagcatatggtgtagcaactagctacaacgttggaaaattcagatatatatgatcttattctggttctggtttacgttgtcatcacactcatgagaagtactccaagaacaagtgacacccacattccatacgcactgatcatcttggcagtgccagagttctgatcagtggaattaacctgtgacgaatctgaagatgatgactcatccttatcagc

SEQ ID NO: 6481 - DNA, 412 bp, Glycine max
agcttaacataaagtaaaagttgaaattttttgcacagcagaaagcaaaagagtagggaagaaggagacaaacacacaagagtttttatactggttcggcaacaacccgtgcctacatccagtccccaagcgacctgcggtccttgagatttcttttcaaccttgtaaaaatccttttacaagcaaagatccacaagggatgtaccctcccttgttctctttgaacctagtggatgtaccctccactagaactgatccacaagagatgtaccctctcttgttctcagttaacaacccaagtagatgtaccctctacttgtaccacaaaggatgtaccctccaatgtgttaagacaaagatctaaggcggttaaacctttgatactttgtgaatggggatacaaaagaattct

SEQ ID NO: 6482 - DNA, 410 bp, Glycine max
  unsure (1)..(410): unsure at all n locations
tttcgattcattctatgtacccacgggggtctacattgtgttnngtgtatnnnnatacccgngncatttactttttataccccctcttgacgtgcttaagccattttacttaagtcatttctcgcttaacttaaaaataaaataaatttccaccgaacgtttgaattgtattatccgttaacttcggttaaaatgaattccgaccgttcggtcgtgccgtaaccacgttggaaatcaaaaagaggtaaaaaataataatataataacaaaaacataccttttagcaaaataaagcggaaaatcaatcggacgttttctctttggaatttctcattcttaatcgaattgattaataactaaagtgaaactaaggctaaaatcaactcgcctagtcaagctcgtccataaaa

SEQ ID NO: 6483 - DNA, 414 bp, Glycine max
agcttgtatgattatggggtttctcattacatgtggtactaggtggcggtcgggcgatggtgcacaacaagtttttccacatccacaatgcgcgcataaacccaccatcccctgttgcccacctccaactgagctcacgtactcccacgtagcccatatcctcgtttctctcaacaccgggtccccatcaatcctcccaagcttccacaacatccaagcaaaacaacattcaaacaacacaagctatcacagccaagcaaaacagaacaaagacagaaaactctgctcaacacatcaaccaaaatcacagcttttctcacttaaagaccacagtaacaattccttcgatccaattcattaaccgttggatcgactccaaaattttactgggagtctatagtgcataagcctaca

SEQ ID NO: 6484 - DNA, 261 bp, Glycine max
  unsure (1)..(261): unsure at all n locations
ntaattatgggtctctgtcagttctacggagttctttgncacctccagcaagggcatcagaccccctactaatcgagctttcatcaagaagtactgcgtctccaggcaggcgcagggcgaaacaccacagcagcctgtggatggctggcagcgggcaacagacgcaccgccatcacctctagagttcacctctgctcatccacaaaaaggtttgagtattgcctacaccacatggccgaccaataggcgaccaagtccaaa

SEQ ID NO: 6485 - DNA, 436 bp, Glycine max
  unsure (1)..(436): unsure at all n locations
gattcttaagtcacctgcggcatgcaagcttgtcagaaaagcagtttgttttatttataaagctcttaattcaattcaactgtttgcacaaattcaagccaaatcatagaagacatgggttcatcattgttgcacatattcatgatcaaatagcaaaatgttctcaatattctcattactattttaatttcatgtgtgaaaatgcaataacagcttttatcttctatttgtataactgtttctcttcccctgtgattgatgccaggttttcatttgatcccactcagaaattgggtctggatattgcctcttgcatccttacaaggtgtgatagattgtcaataattaacatggttttgctattggtataatatatatcttttttggttcactacnatctgtataactgcaaggctccattgggacaagatgctga

SEQ ID NO: 6486 - DNA, 365 bp, Glycine max
tacacataattggaaacataatgagatcattatcttttcacaatacttacacttcaaaataaaagattggtcgagaggaaagaatggagcaaataaccatacttaagtgcttgaagaggcttattatgaaatgaaacaagtgaaccctccaaatcctgaagaatgttgaatgcatcctgaaataatagatgtgaatgctgtccagtatactttaagaaaagtttatagttcgcaaagaacataacgtaaagaacacataagatcaatatcagacaataacagtacctccttgtcctgcgtgggtgcatcatctgaatgattagctgctccagctgatatcctctctgcagaaactttgaagttgt

SEQ ID NO: 6487 - DNA, 421 bp, Glycine max
agcttcctcggggccattttctgcgttagctaacatttggaaagttagttttaccaagaaatgctactcttaaaacaaaaatggcatacaacctcctttaataaacacaaacatcaatgtaaatttagagtaaactcatgcacatacttctttacgaacattcactcgcacaagatattcttctaactaagaaaaatgcacaatcaaggcaccttcgttacctagattatttatatgtacttccaaggtgtatttgctatctacatcacatgcacttcctttgctaaatttacatacatgcatactcaaagcattttggctacccaaaattgcacacgtgcacattctggtatttctaatacctatgcatatacaaactttgtgatgaatcttggctatctacacaataaggtgctacatt

SEQ ID NO: 6488 - DNA, 409 bp, Glycine max
tgtcaccatcaatgttgctccaggtatggatttcttttataccatccttgatgttgctcgtcgtgaccatgttagcctcatcattcttaatgcatctggcatgataaaaaatgcaactgtttgtgactcaccacaaggtgtccctaccttgctcattggacccttctccttgttctccctcactggcttctacttatacaacaaccagtacgcccttcacccaggagccacccctccccctccgttttcctttgggatcaagctgtgcgcatctcatggacaggtcttcaacggacttattggcggcagcgtcattgccggtgataatgtcagcctcatggtctccaccttcagagaaccaaatatttgcaaatttattcccgaaggaaaagaagtgaacaacaatgac

SEQ ID NO: 6489 - DNA, 198 bp, Glycine max
tgccgagatggactatatgttatggtggccgaataaatggaaacatgccactttcacccctaacaaacggtcggatgagctagcgcaaaaaaacctatgcgagctacattgtaaattctttatgcgtcaacaaaacaagaaaactgcctctgctgaaaaaaaaacataatcagccggcgagcgttttgacaaaaaaat

SEQ ID NO: 6490 - DNA, 319 bp, Glycine max
  unsure (1)..(319): unsure at all n locations
ntacagcagaannngagaatgtccctctaaccnagtttttaaaaaacnnaatgccattaacctagggaattaaaaaaaacttaatggctgagtgtaactgaaattgtggcaaccaaaagtcacccccaacagccaacaagtcagccaccatttggtctcccaaaaggctgatgcctaggttgccaattgggcccttattacaactggaactaaacctaactaaagcccttttagttgattaacccaagacatatttttggtcagccaactttacaaggattgggccattatttacaccaaactaagacactctaaaatt

SEQ ID NO: 6491 - DNA, 405 bp, Glycine max
  unsure (1)..(405): unsure at all n locations
agcttgcttaagattatatattgtatttctttaattngcacactatgtgtttctttccttcaactaagaatcccattggttggtccatataaacattctcctctaattctccattaagaaaggcattttttgcattcatctgatgtagctccaagtcataatgggctactaatgctatgataatcctgaaagaatcctttagtgagaccgatgaaaacgtctctttataatcaatgccatctttcttagtaaatcccttagcaacaagtctagccttgtaacatttaaggttgtcatgagagtcacatttagtcttgaagacccacttacaaatcttacaactttggtaattctacaaggtcccaaacaccattatgttccatggaatctatctcttctttcatg

SEQ ID NO: 6492 - DNA, 401 bp, Glycine max
tgtaagtatttttcctagtttgtgtctagagagtattgttatcaaataattaaaaccaagaaagtgatgagcaaaggaagattgaagcaagatatcaaattggagtgacaaatggagtgaaagagaggaaggattctaatgaaagaaagggagaatgtttagttgtcatggaaggaatacattgttgggaggggagtgtgcgactatgtgagggaaagaagagcatttgaaataagaaggtcatttaagtaatttgagtttaaaaaagaagggagtttacttagaaaaaatggagagtggatattgttagtgaaggtttcaaataacgagattctcttattgacagttaagcaattagttagttgaaggggggttattagtatctttgttacttgttatat

SEQ ID NO: 6493 - DNA, 380 bp, Glycine max
  unsure (1)..(380): unsure at all n locations
ttagntaatagtcaattcaattaagaatgagaaatctcaaagagaaaacgtccgattgattntttcgctttactttactaaaaggtatttttttattatattatttttattttacctctttttttattttcaacgtggttatggcacgaccgaacggtcggaattcattttaacagaaattaacggatattacaaatcaaatgatcgatgaaaatttattttattttttattaggcgagaaatgacttaaataaatgactgaagcatgtcaaaaaggggtacgaaaagtaaatgaaaatgagaataaaagtacatgaaacaaatggggaccaccacgggtacatagaatgaattgaaaagctcggtttggggtacttacc

SEQ ID NO: 6494 - DNA, 423 bp, Glycine max
tattccgaggacagttcattatcatgcacagcctgtctgatttggctcactataggccaatcatatctatggagcattttcttgagccagtagcctggcctgaagctcaacttccattggtgaaaccaaacgaggttgctccgcctgagctcacacctgtgtaggtcaattcagagccagctaacccacaatctccagtggtgaatccaccttcttcgcttgagcttgaagcagttcccccatctcctcctctgattgtcatttctgacgcatcattagatgaagcaattgctccttctgatttaccagctgcagaaacagctgacccccttgtttccccaattggaggaattgctgatctttctgattcgtcatctagagaagttgttgctctcatcgattccccaatttaaacactttttg

SEQ ID NO: 6495 - DNA, 423 bp, Glycine max
  unsure (1)..(423): unsure at all n locations
agctngcagatgagtttattggaagattcanatgttgttggtttaaaaanacnngnanctttgggtaaagatagtgaaaattttgtgaagtgtcaaaaactagacacaatctcgaaaagaaacaatataaattattgtattttcttggtggcttttcttattatttttgtttatttgaaaaaacatgattttaagtcattaattattgtttgtgccttaacattttttaaaatatcattgtcttacactacaaacacgacaaacaatagtgatttttatatcacaatttaactcttaaatcaattacgtttttttatttataaggttcaaacataaaattttacttaagaattgagtctaatgtggatgtttttataagtacatatgttataataatgtaattttttccccttaaatctaatt

SEQ ID NO: 6496 - DNA, 419 bp, Glycine max
cttcaagtttcaaagcaaaacgtttcggaggcagatctgatatttgaacccaaatactaacgtggtttctcttcaccgattccctttatatacactttttcaattacagttacaggtaatggattaaacaattattagtcggttaataaacacactctctctctactaattctcatcgcattccttttcctctttctccttccaattgagaattcgtttctctaattgacgcaaagttcacagtgaaattagtgcaatggaagcggatttcgtcaccagtgacatgctcacactcacgcaggacgctttttacgccaacgataatgtaagctcatcgctctcttctcttctgcatagtttcgaccttatgaaatgcctcttaaaccctcgcttgcgcttatttttgttgcagctttgat

SEQ ID NO: 6497 - DNA, 420 bp, Glycine max
caagcttcatttataaatttggtttatgttatgtcaacatgacttcaaaatttttcatatatgttagtgccagttgctttcaattatatataaatggtgccatcttggagggttaatcccccactaagtgccaaaagttcagtgatccattaaaggacaacccgctttgtttcttatggcttcttgccttacaatttttttttaagagtaattcatttttcatcctccatagtttcaagccttgtcactttagtctctcaattattcaaggtatcatcaaatcgatccttctttgatgatattttgcttgatcaagagactaaattgatgatattttgtattgtttagggactaattgatgtttgaaatatttggagtgtcaaagtgatgactcttagcactgttgagggattaatttga

SEQ ID NO: 6498 - DNA, 329 bp, Glycine max
  unsure (1)..(329): unsure at all n locations
ntagattaacaacatgacatcatcacatcataaaattctttctcttcgattttcaataaatatggtccattaccaatctaaatctaaattgaatgaaaatcaaaacctaaacaagtgcatggcaatagagagagttattaattaattgaatgagggaaaacctaaacgaggataggtcagttccgaattgaacaatcagtggaagctaagattaaaatgttactggcaatttgcaagttgcaagacgacgacgctttggaggaataataatcataaaacaaagcgagcaacagttaagtgaataaaacaaagaaaagtaagtgaaaaaa

SEQ ID NO: 6499 - DNA, 381 bp, Glycine max
  unsure (1)..(381): unsure at all n locations
agctttgagaatttgagaacatgacatttcatttgacagtaatatccaagatatacaaatgggtgttggtcaatgtaccacatttaatagtacaaactaaaagaacaagaaaaacagaccaatttctaggcgtctcagaaaaaactttagacaagacagttcacctaataaggttttggattagtagtaatcatatttgtgtaaataaatagcttaccagagttcattggactccatcgctggaaccgaaaaggagatggtatgttgagaacagaagcaccagaaacactgttatgcctggaaatgggaagatattgcctccggaaaaaccttggcatccaattgccaatacatgataaagcacanagaagaagaataaaa

SEQ ID NO: 6500 - DNA, 412 bp, Glycine max
tccatggctaagcttattgtttctactgtagtggattatgtatcatcatattgacaacaatgctcggagtcagccacaagcaggtgtggttgactacagacaaaggcttattacatgtcactttcttttggcagagaaacttgtatcgacaaaacatgacagcaagaaagacaatgtttcacttagcagtgcgtgcttaccttctccattttgttggttgcacgatatttgcatagaataaatctaactgcctttcggtctactacttacactgtttcaggatcttggcaactataagccatattaataaagtgtggtttccttagtgggggattaatttgcttggtttctgtttttattttattgaaaatataaaatgagaatgaagatgtgtttaattggatttctgaaa

SEQ ID NO: 6501 - DNA, 422 bp, Glycine max
  unsure (1)..(422): unsure at all n locations
agcttggaaaggctttttngaaataattttgtgtgtagcctgtagaggcttaaagaatagtcacgaggaagccaaaataggcttttagaaagaataattgaaggaagcttggagagactttgagaaagaatacttgagtgaagcttggagagggacttttcgaaagaataccctggtgaagcctgcaaaggcttagaaaatacttagtgaaatctacaacgttttagaatactggttgtaggagcctatgaagactttaggaaagaaagaataccacaattgggtgcatgatcttactggagaaacctataagtgaggacatgtcactcactgccttaaggaaaacaatttttgacgccaatggaaactgcacaattttaataaatgtttttttaccatcaaccaaactacgtaggtgatga

SEQ ID NO: 6502 - DNA, 394 bp, Glycine max
acttgccatgtaatcgatactttatattaaaactctggtaacttagaaaattttgagaaaaactcttttgaataacaaaattgtgctatgtttgttttttgaaaaatcttttcaatacttcccttgtgaagtcttcttgatttcttctattgaatcttgaattcatcttctcttgaatcttgaaatcaaacttctcttgattcttgaatcttcttgatttcttctcataaacttgaaattaatcttgatcttgaacttgttgactcaattgtcatcatctttgtcatcatcaaaattacttgaatcaacttgattcatcatcatgaagcttgcttctacaatctcccttttttttatgatgacaaccctgaaatcaagaaacacatacacattc

SEQ ID NO: 6503 - DNA, 379 bp, Glycine max
  unsure (1)..(379): unsure at all n locations
tgcatacagnggattatagtctattgatgcaggaggaggcagaccaaaatgaataatttatgtatgcagggagttgaattattactttgggactgtgtaattctgtatacagttgtaggaattctgtgtatgcagggaaaacgcaaaaatactgaataattgtgcaggaattttggatatatatctatgtaaaaatataattatttggctgattaaaaaatattaaaaacaatcctatttttgtatttttttgaaggtgttcctccttttagaatccaactcacctttataaataatttatatgtttgtgaacaaatgaaaagtaaattaaattagtatgcattaatagttgaattaatattaaaatattcaaacgatt

SEQ ID NO: 6504 - DNA, 316 bp, Glycine max
gctagtaccttaggctctgtggctatttaagttatattatttcatgacaaggaaaaacatcaatgcagagtcctacactctctgtctatccgaggaggagaataggaactctgaaaaggaatgtgactactacctgtggaaggcaaaagtttcctgtcagggcttgaaaatagagtataaaggagaatggatgtggatgagttggttatcaccttagcctttccaaatcaggagcggcttcaaagggggaaaaccttacctggggtatatgcatttcttcctacagagatgatatccaactttccttttataattc

SEQ ID NO: 6505 - DNA, 417 bp, Glycine max
tgagggaaaaatgtgcaactccaattcttaaacatgttatctcatcatagattcatgcttaccacctggcttggtgtcattttaaaatacaccatgacaatgctgacttattgaaaggttaaccttgacattgcctatttaacttatttatttattgtgcaaataaattccaagatgcccaacacttttcttttataccatttatctaatagcaatcaagattgggtaatttaaaggaagcacataatgggatgtctagtttctgctcatttatatcgagggttaaaattgccaatttggcatctctagtattttctaattgcttaggtaaaatggtcattttcaatttatattctaaaaggctcaacagtttaattggccaacatgcacgagtcaaaccatatatacaccactaac

SEQ ID NO: 6506 - DNA, 407 bp, Glycine max
  unsure (1)..(407): unsure at all n locations
agcttgaaggaaaactngangtcntgttaacctactaacccagcttgccatgattcataaatctacacctgtcgcaagagtctgtggtctatgttcttctgcagatcaccatacagatctttgtccttctttgcagcaatctggaatcaacgagccacctgaagcttatgcggcaaacatttataatagacatcctcagcagcaaaaccaacaacagctgaataattatgacctttgaagcaatacatacaatccatgttggaggaatcatccgaatctgcgatggacatgtcctccacaacaaaaataagccgtccctccttttcagaatgttgctggtccaagcaagccatatgttcctcctccagtacagcagcagcgatcacaactaacacaacaagcagatg

SEQ ID NO: 6507 - DNA, 412 bp, Glycine max
tgaccaagttaggttggctatacaccttgcatttttaatttttataccaatgtcacattgaagttattgttatctacttgcccttcttatccacttgcttgactactaaggctctggtggctgtttcatccccagagaagattttaattcaaactttgtatattgtttcgtacttttactctttacttggtatgaacttcctgctaaattgttcatattcttatttttcatatttatgagccaagctgatcatatttactctgatttcagttgttgtcatttgactcttgtggatgcttttttagtgtagacccttattgacatggacaaaattaactaaatgtttgatcattaattgaacatattgagtggcagaatcagttattgagttgtagaatgtaaattcattttg

SEQ ID NO: 6508 - DNA, 379 bp, Glycine max
agctttgaaggtgcgtagccttccattttttttagtagaataccgataatgtgtctaccatcacgattatcgtctccttttccatcattaggggtaccacttgggctgccagatccctccacctttgggtgtattctttgaaggattcatgctcccttttgcacatgttttgtagttgcatcctatccgaagccattatactgacaccgcctaacggaggcaaccattatgtccttccaacaatggactcgggaaggttccaaactagtgtaccaagtaacagctaccctattaagactttcttggaaggaatgtatcaacaatccctcatcttttgcgtatgcccccatcttccgataatacatatttatatggatct

SEQ ID NO: 6509 - DNA, 342 bp, Glycine max
  unsure (1)..(342): unsure at all n locations
tgctctanatttacattgatgtgnngatttattggatgtggttgtatgccatttttgttttaagggtagcatttcttggtaaaaactaactttccaaatgtttgccttcgcaggaatggccccgaggaagcttgcctcaaagaggtccaggaaggacaaggcggccgaaggaactagttctgctccggagtacgacagtcaccgctttaggagtgttgtacaccagcagcgcttcgaggccatcaagggatggtcgtttctccgggagcgacgcgtccagctcagggacgacgagtatactgatttccaggaggaaataaagcgtcggcgatggacatcact

SEQ ID NO: 6510 - DNA, 420 bp, Glycine max
agcttgtagaattcacctcttttctgttgtcctatgctgacttgctcccatatctacttgataattcaatggtagtcataaccccagccaaggttcatcaacctctatttctccaaggatatgacatgaacgcaacgtgtgcttaacatggaggagccccggggcattccattgagcattgtagggccctaaagcataaggtgcaaggtctaattgatgcaggctggctgaaatttgaggagaatcgcttgctgaatcctaacattaacaagcaacaccacacatggggcaattttgaaagctgttgttagatgtctctaatgcctcatcaggattttcaagtttatgccattattgtaaaccacagttacaatgctaaataaaatggatgaaattgacatctttgtccctcatcctctc

SEQ ID NO: 6511 - DNA, 391 bp, Glycine max
tgcatgcacatcgttcgcgtgtatgatatcctctcttcttgtttgaagtagaggagagcttcaaccctataacgcaacatggcggacaaaagtgggcagtaaacttgaatggttgtcattgtcaatgcgaaaggtattctgcgcttcactatccatgttcacacattattgcagcttgtggttacgtgagcatgaactactaccaatatatagatgttgtttatacaaacgagcacatcttaaaagcttactccgcacaatggtggcctcttgggaatgaagcggctattcctccttctgatgacacatggacacttatccctgacccaactacaattcgtgcgaaaggtcggccaaaatcaacaaggataagaaatgagatggattgggt

SEQ ID NO: 6512 - DNA, 337 bp, Glycine max
gaaagacgcccctttccttggatgatgagcacaaccccacaactaggtcaagggacttaaaatcttatgtctccaacttctaagaatgaaaaaaaaaataaagaaatttgagtccatagatgtgaaactgacaagatcctaatgaagaaagcatgtctagaagaaggataggagacaacttacctaacgctagatgaaaggaacttcaagaacacatgaatgaatttggaagaagaagaaaaatatggtctcccctctctctaaaagcttcaagcaaaatggcagatatggcctagactgtggcttctgaaaataacacttattgtaagtgaaatgc

SEQ ID NO: 6513 - DNA, 314 bp, Glycine max
  unsure (1)..(314): unsure at all n locations
gtgtggagtagaaacatgggaccttttcattttattttcaaanaaacaaaaaacaagaaaaaggngggaattcttatctagtcaaggtctgagagaccatacaagtttcctaacgatttctaattatgtgggccattaagtctatcatatgctgacaatagccgagaagcccatgaatctctttgggggcggagtatgtgtctgccatcgccttggccttggctaacaatcggggaagttcttgactcccgttcaaggtaagagcaaaccgatccatccacatggttgcctcttggtgtaaagagtcgatcacc

SEQ ID NO: 6514 - DNA, 394 bp, Glycine max
agcttctgttctgaatttccatgtctctatataccactggccacagtcagacatccgagtaaaatgttattgtctggatatactacgggacccaattggacatgcaagcacaaagttattgtcgtttgacttttcttagagcttttattctgaatttcgagcatctcgatatactacgggacacaatcggacatccgagtaaaaagttattgtcgtttgattaggcaaagagcttctgttctgaatttcaagcgtcttgatatactacgggacacaattgaacatctgagtaaaaagttattgtggtttgattttgcacagagcttttgttctgaatttacagcgtcacgatatactacgggacacaatcggacatccgagtgaaaagttatag

SEQ ID NO: 6515 - DNA, 343 bp, Glycine max
tcaccttctggtcctcctcatatttgtggcatgagtaaacatgctctattttcatctcccactccaagtaggcctccggatcattctttcctttaaatggaggaatgttgagtttaataccatcaattcggttttgtctaggaacaccatcattccctcttctcctcctttcttcttcattatgatctctattctccatttgatccaacctctcgtggagcgcatcatctcgttgtttcattaacctctccatatgttgcatcaaagcttgcatttggaattgcgaaagccccactccatcattaggattagtacctgacatctcaaacaaacaaatcaaacg

SEQ ID NO: 6516 - DNA, 419 bp, Glycine max
  unsure (1)..(419): unsure at all n locations
agctntaacaaggtttggcaagtgtgttatatgtttatagagcagagcgatttctttttcttattaatcatcaaaggagttagatcaggatatatataatatacacatacattatcttaacattgcatacattatcttaacacgcgaacattatcattaagtgttcattatctttacgtgtgtattatcttaatccgcatacaacattatgtgttccgcgagggctttgcccttgcaccccaattcgattcgtaacccaactgcaagttggcccttacactccactccaactttcccctgctcctaacatatgagccatacacaacaatctctaccttggcaaatatttagctcctaacatatgagcaatccatgttgccaaagatagttgatacaattatgtcaatgtatgatggagc

SEQ ID NO: 6517 - DNA, 324 bp, Glycine max
taagcgctgcttacatggcggacaagagagcaaattgtcttgctacttctgtgatgaagttctttctcttgcccatagtcagacacataagacccttcagctactagttctggagattgatgatgctgaccctactcctatagaacttgaagatgcagtaattcctagtgagtcacctacttctaaaccttaaatctcaatgaatgctcttactggtgctgcaaatttcaaaactatgcgtgtgactggttatcataagaagaaggctttgcatatactgattgatagcggaagtacacataactttctctatatcaacatggc

SEQ ID NO: 6518 - DNA, 421 bp, Glycine max
  unsure (1)..(421): unsure at all n locations
gcttctcaaggaagttttcttaagatttcttttattgaagctacctagtctataaatagaagcatgtgtaacacttgttgtaactntgatgaatganagtcttatgagatacacttcanagttccacttctttccctcttttattccttcaatttcgtgctccccccttctctctttcttttcctccattaaagcatcctcttcaagcttcttatccaaggcaattattggtggtgaagctccttcttccttggcttattccctagtggatggtgcctcccctctcctcttctcctttgccttccgttgcatctccatggtgaaaaatcaccattgaaggacctcattgaagctcanagatccagcctccatagaagccccacaagcaagcttccatcagaagccattccataagagaact

SEQ ID NO: 6519 - DNA, 421 bp, Glycine max
  unsure (1)..(421): unsure at all n locations
cttggtaagaagctcttaaatatcttcttttctactctttttttcattntcttgcaaagcctttatgtttggttcaaaaatttgtttttcatcctttgaagattgagacttcaagatctgaacctttatgttagagatagggggagcaacatgaacaaaatggtgaataacctctcaaggaaaatcttgaaaaagttttgaagatgttttgacttttacatacctaactcccttgagtggcatttatattggttgaagtttctaagttagaaaagattcttcaagaggaaaaaactctctgttttaatcgattacaggtccatcgtaatcaactatgacatgttttttgaagtttgaagagttgagtcttgtatcggtttaatcaattatagttgtttcataattgattactctattgttt

SEQ ID NO: 6520 - DNA, 423 bp, Glycine max
agcttctagttagttaggtgccagctgttcgattactgctggataactaacttacatactctgaaccgagtacaatactcatatcttctgactaaatatcaaattgttgttctattttaggagctgtgtctctgtatatctctctctcacgagaaatggttaagcaagaaataattaatttgtctcattcacaatataactactgaaggaagagatgctttttcggttgtccccctcaaataattagagaatatatctcaggatttaattgcaaatcataatgtgaactgggtgacttatcttctgattacaatgtggaatgtacaaagactaggtccctgaatatgagctatgctgaatcgctgatgctgttaatatagcttttgttgattcaatttcagcttatttaatctaagaatatat

SEQ ID NO: 6521 - DNA, 401 bp, Glycine max
cttgattaatggcaatatatatgcctaatatttaaattgctgttgtaaatgatcgtgaatgtggattttctttagcttttggtttgttttctttcacttgtatcattattagactatggttgcgctggtgtaaaatgagtgtgaatgtagattttcttgtttttccatcatggttgcctattgaattatgaacttgagtaatgttaatgtgagaataactagctcaacttaattgatgggtgaaaattatgatagacaaacccgtattttggacacttgattgtgttatagtgttttagttgacaagggattgagatcacgttatttcataatcaactactctgtaaaatcaattttgtcaccacaaatccaaatacacaccaaagctttgccctctcctt

SEQ ID NO: 6522 - DNA, 420 bp, Glycine max
agctttgaggatatcagcatcagtgctatctcttattggaaagtcccaacaagccttgtagatagctaagtgtgccaagggtgctcctcctctggctaaaccagaagcaagtcccctataatttgcatttcctacaaagtaacctgctgctgtggaagctgtgtgagtgccatggccaatggcatctcttgccgagagatattcatcagagttgtttccttggaggagtttcttagtctgatcacttattcctttcatgaaccatctagcacctattatcttcttgttgcaattggtggagttgaagtgctttcccccttgacaaattcctttccaccttgatgggatttgtcccattgcttcatcattgaaacttggtgactctggccaaatgccttcaagaaatcatatttgtcattg

SEQ ID NO: 6523 - DNA, 416 bp, Glycine max
taaacaagcccttcagaatgctcccttaatcatagattcattgaaaatgatgataaaaatggcattatttagctccttagtcgttattcattcaatatttcactctcagttagtataagtccctttatgtagttttcaatagtttgctaaatacccaaatagtgatttaattctgtaaagttaaagtataattaagcagcttcatggcgtaaatcctcacaccaaaaaaatttcacccataatgagcaaataatccaatgaatcaaccaaaagtatagatgaaagctcaaatattttgccccctagccctgaaagaacatttttgcattttagcagattgtagcaaaattcgctgaaaaggctggaaaagcagcattatgaattcacaaacataataacaaagtaacaaatagagc

SEQ ID NO: 6524 - DNA, 419 bp, Glycine max
  unsure (1)..(419): unsure at all n locations
agcttgtcatcgtgagacatcagatgttattattttattaaatgtgggtaagaaaaattcaccaaattgatagagaaaaatctaaaatcatacatcttaggcaaataaggcatgctagcccccaacattattgcattttgattccatctttagacattcaaattgttgtttatttttcctgttatcttttcctttgccttagtctaaatttcaaacttacaattcggtatctctttcttcttttgtttctcctcatttcttaataattggatttgcatcacttaagtacaaccaaagtccctctggatttaattgttgaacttcaatttcaatctttactacttgtgataaaattaggacacttgtcaatctattaacaagtttttggcgttgttgatggagactntggttttcgtact

SEQ ID NO: 6525 - DNA, 334 bp, Glycine max
  unsure (1)..(334): unsure at all n locations
cggagttgcaatagcgctaacgttactggnnntagttacttcatattgtttacaattaacttggggtcctgtcttcatgatttttaagtttaatgtgctaagttgttccaagtttaggctttggcaagtgtgtacaaagatattcatgaccccctgattaataggaaagattcaacacctatatgatatgaataaacttttggtgaatagctcaattgcgtggtttcttaatactgatgcaaggctaactcagtgatgtttacttctataaaataggccgatatttttatgatagattcatgcctttatatatttttggcttgtcaaacctcac

SEQ ID NO: 6526 - DNA, 418 bp, Glycine max
agctttctcaagaggcttctttgagtatctagatccttatctatccacacccctctattaactaaattaacctccttaaaaataattacgaatgaaaataacgcaacaaataatcaaacatcaaacataattagtaataatatatagatatatatatcagggtgttacagctgctactaagactgcaacgccttttgaaaactcatattggaaaagtggagatataaaaacttcaacactatagatggaacagataaaataataaaaaaaacacgacactccatattggatcgaatggccacggaataattaagaaagggggttgaattaattatgaacgtgtcttgactaattaaaaatttatccttcttaatgttactagattcaattaggctttactactaagttatgagaaagt

SEQ ID NO: 6527 - DNA, 144 bp, Glycine max
tgtaggattatggggtacccatcacatgtggttcctggtggcggtcgggcgatggtgcacaacaagttttccacatccacaaagcgcgcataaacccaccattccctgttgcccaccttccactgagctcacgtactcccacgt

SEQ ID NO: 6528 - DNA, 350 bp, Glycine max
agctttcaactctttgacattttagatattgttttgaaacatgtcgagacacatggacaagttttagagaataaagtacagagtataagagtattgttgggtgtgcatgcatacataacataagaattaagaatattcgtatgagtatgatattggaagctcaccttgtgaagatggaagtccatgtcatccacttcaatcacaatgtcacttggcaatccaattgtgcaaaacctgcatgaaagaattgttatgcatatggtctcgtttggaataggaaaatagtgattcagagacagtgagggaaaaaagagttattcatctaaccatgcttgccctctcgagctcag

SEQ ID NO: 6529 - DNA, 421 bp, Glycine max
  unsure (1)..(421): unsure at all n locations
ttcttaatatattntcacctctctaaaaaatttattttatactctatttacacctaaaataaataaataaacgtcgatatatataaatgatcatgtaacattaaaaaatatttgatgatcgcttagttgaaaagtacagcatatgggcttttcgccctgttcattgatgtgacttacacttcaatattaaaatattacttcttgcattatcttttaagtcatataacttttttatatttttaaatttaattttaaaatatattaaatactctatcttattttttaataattatttataaaaaaatatttcagaaaataaaattttgaaaaatatttaataatttcagaattaaattttcataagttaaatactcttctaatatttaatatatcaaagtaattaaaagaataatgagaatag

SEQ ID NO: 6530 - DNA, 407 bp, Glycine max
agcttaaatgatagaaatctattacttttttttataataatatcaaccaacatcataagtagcactttgatcttatcttatgaaaataaaatgaatatattttttttatcttatcaccatcttgactcttaagaaacaaaaaaaaaatagattatttaaaaaataatggaataataaaatatgacaaagccttagtaaagatgtatatgacttattgatatgtgcagatgagatgtaaataaacatctttatggaaaactatccttagtaaagttttaagttattattcaaattccttgtgtaatactcttactgtcactatttatttttatttgtataaattgaacataaattacatttgattggaatatgtaataggttgttcatgatagttcttactatgtaaa

SEQ ID NO: 6531 - DNA, 390 bp, Glycine max
gacactatgaaactcagctatgttataatatattttctaataatttgcttgtgtgttctacgttgtagtctaaattactaaacctcgctgtaagagaaaaaaaaacacaaatgagtgacaatgcattaaccaataccttaagaagtaactcatacgaatcaaaattgaattggataaaaactaaaaggattttctttattattatttaaatctaactttcttgttcatactcgtaaacaattgtccacctacaataattttgtccgtcacaaaagtacttcatcgatttcagtaaaaaaaaaaaaaaaaggagaaacaaaatacaaattacgcaaaaaatgtattgcacattactagctaagatctttgaataatgccaagactacagct

SEQ ID NO: 6532 - DNA, 417 bp, Glycine max
agcttagactatattggagattcttgtgcttttgttctcaatgattaagttggtcttatcatagaggtggtctttatgctttcttcaaatattgagaatccattttgtaagtacaatgtttttcctaaagatatgatcgaggcttcacatcaataatgtggacttatcatttactaaaagtattaggattccagacaaggaaaaattaccaccatatacatcttgtgtaacacccaatttttgcataatataaattaaaaaagattctatttaaaaataaatagagttttaggaaaataatgagattttcgtaattaaataaataagacaaaataattttattactaacaataatgattttaaggttaataaaataattatatgttcttataaaataatatgaatattttatttatt

SEQ ID NO: 6533 - DNA, 374 bp, Glycine max
tgtacatgcatgtgcacaccatatttactatacttttatcaactgatacaatctatttgattgaaaagataatttatactactcttctaatgtagtggacaactaaaattaaaataatataatagaaaatactgcttaagccattcaaatcaagtcattttgaatctcactattagtatcatgcatgtcaaagataaggagaatcaggcatcgtaatgcataacacaaccaaacattaaaagaaaacataaagactcccttcatgatattagcggcttaatcgttgaaccaaagcctcaaaatttttcccatgtctctatgtcttttcctaagaaaataatataattgagattaactgcaacctaactgacaat

SEQ ID NO: 6534 - DNA, 416 bp, Glycine max
  unsure (1)..(416): unsure at all n locations
agcttgacagaattgaaatttttatatatatagaaaggcagacaaaggtagaaagaatgatgtttgtatttgaagtgtagaatacaagaggaagaattcttttacagggggtgttcccttctcccactgaaaatcatagtttctattatttaccaaaaagatgcgttcctattacaatttccccaatttaaactacctaacctcctcactgaccctgaaaccaccgataacaaaatcactagcctcctactaattatttcttctggaatattccctccaaaccttattcctccttattaagagttggctcatgcctaatgcagtatgatgcatcgaaatttatcacatattctcgacaaactcacaaataatataggacatgtgtaaagtcaattgagattaanattacagaacta

SEQ ID NO: 6535 - DNA, 405 bp, Glycine max
  unsure (1)..(405): unsure at all n locations
ttttatgccataatatttgtgttcttccgcatctcttttgacntnttttatcaaacggcaaatgagcaactcacgggagtagtatgcctgtgcagaagaaaaggaaataggaaaaaaaacattgaatacctacataatctattgtgttgttcattactttgttttttaatctgaactctattttattgaactcaaagaccttatttacgtgtataatatatgttttttctttattaacaggtggaactgaaatttcaatatagagcacttctgtttttggcataccagagtttaagctttatgtttggtgacttgaccttatcccctctttatgtctatcaaagtatattntctggaagactgaaaaaggtccaaaatgaggatgcaatatttggcgcattttct

SEQ ID NO: 6536 - DNA, 406 bp, Glycine max
agcttctgcatgtctatggttttctatagtagagaatggtccaagttccagagagttttgagattttgttgtgtgaagactagcggagaatcgagcttgaagaggaagtcgtcctgagagcataatatgagtctgtgagtgattgtgaggttctagaggtggaggagacatccccaccacttgtatatcttcaatccttcatctttctcttctctttgttgtaaaggaagctttctagttatggagagctaatcctctgttggttcttccttgtaggtacttgatgtaaatacctgtatatctatttaatgatgttttgtgtgttcactgtgctatcaaaacttcattctaccatgcttttgccttgatcacgtagatgcatgtgtttttaggatcattcaacagt

SEQ ID NO: 6537 - DNA, 402 bp, Glycine max
tggttcgaggtacttacctgttgaagatcgaagaatgatgaagaacgaatgaagaacgtcgaagaacggtcgaaacctttgtgagattcctcacggaaaacgttacggaaacgtttcggaagcgcctcggcttagattttcttcacggaaacaatttttccaagcaaattcgaaagagagagaagtgcctaaggggctggaccatttccttcttgctttcctcccctatttatagcaaaataggggaggtggttgccgcccagctcgcccaggcgagctcagctcgcccaggcgagcagggttgcttcctccagaagcaaccgccttctggaggaatcttctggagggcccaagtgggcctgggtgctatttgcacccccatttttactaagtacacccccc

SEQ ID NO: 6538 - DNA, 400 bp, Glycine max
agcttctatggagactggatctttgttcttcaatgatgtccttcaatggtgattttccaccatggagatgcagcggaagataaagaaaaagaggtgagaggaggcgctatccactagcgaataagccatggaagaaggagcttccccaccaagagagtgccatggataagaagcttagagaggaaacttcaatggaggaaaagaaagagagagagagagagagagaggaggcggcaagaaattgaaggaggaaaagagggagagaagttgaactttgaagtgtgtctcacaagactctcattcatcaaagttacaacaagtgttacacatgcttctatttatagcctggatagcttccttgagaaacttctttgagacgctcccttgagaaacttccttg

SEQ ID NO: 6539 - DNA, 350 bp, Glycine max
tctaggtacaaagaaactccttgagcctttgttcttatgctaaaattcgtattgctcgcttagcgcatagtcgcgcttagcgaatcaataagacgtttggttttaacaaagccttgcgcttagcccaacctcgcgctaagcccaattccaaattttcaaattccaaagagttttggggcttagcacaacaggcctgcgcttagtgttgtctgaaacttaaaattgttctgcaatttgtgcttagcctgagatgtcaggcttagcgctaaatcaagctctaacttacagggatagtctaggcttagcacatcgagcgcgctaagtgcaattctatgagtttcaaaaatagt

SEQ ID NO: 6540 - DNA, 395 bp, Glycine max
agcttgacagatttctagtatctcacttatggtttgtttaatggcctgacaccacccaatccaccttggataggaatttctctgatcactgccctatcttgctgaggtcaagattcattgactggggacctaaaccttttagggttctggattgctggtttcaggatagctcttttaaaagaattgttcatgactgctggacgtctacgcagattggagggtggggtggttatgtgcttaaagagaagataaaacgcctcaaaagaagattaaaggagtggaataaggagcactttggggacacttttaagaaggtcaagcagattcaagaggagcttagtaggctggaagagaattctattgatagacatctgtctcccttggaggtctcgtat

SEQ ID NO: 6541 - DNA, 213 bp, Glycine max
  unsure (1)..(213): unsure at all n locations
gctctatatctacatagatgtctgtatttatggaattgacgttatatgccatttttgctttaagagtaatgtcccactaaaactaactttccaaatgtttgccttcgcaggaatggccccgaggaagcttgcctcanagatgtccaagaatgacaacgcggccgaatgaactagttccgcccccgagtacgacagtcaccgctataggagcgt

SEQ ID NO: 6542 - DNA, 354 bp, Glycine max
  unsure (1)..(354): unsure at all n locations
tttctatgttcatgtttggaaatgaaatatttgagttggatagggattggaacttattagaagggcaagaataacaaaaaatcatgattttgtagaccttgtttcaccatggctaaaattattttctctatggctaaaatttgagtgaggtctctggaccttgttttaccatcaataaaattattattgttgcaactaaaatttttgctgtagctaagattattttctttgtaactaaaataacatattttcgcttcagcaagaatttgtcaagttataacacaattntgagtaagggatctgttccttgtcttcgtgaggtgaacttcaagctcgccgaggcaaaaatgcatc

SEQ ID NO: 6543 - DNA, 425 bp, Glycine max
  unsure (1)..(425): unsure at all n locations
actaagcttatgctganacatctacaacagacctcctcaacctttcatcaaaatcagccacaacagaacaattatgacctctcctgcaacaggtacaatcccgggtggaggaatcatcccaaccttagatggtcgaatccttcacaacagcagcaacaacaacaacaaccttattttcaaaatgttgttggcccaagtagaccatacattcctccaccaatccagcagcaacaacagcaatagccccagaaacagcaaacagttgaggctcctccgtaaccttcccttgaagaacttgtgaggaaaatgacaatacaaaacatgcagtttcaacaagagactagagcctccattcagagcttaactaatcaaatgggacaattggctacacagttaaatcaacaacagtcccagaattctgacag

SEQ ID NO: 6544 - DNA, 419 bp, Glycine max
  unsure (1)..(419): unsure at all n locations
agcttatgagaatttcaagctttatattctatgtatttttaatnnatcatgataaaaagctttcaaaaaggaacttccagcctggtcaataggttttattatttagttatagattaagattgtttcctataagctgaaatccaagtggtctagaccattcatcatcaaagaagttatgccacatggaatggtgatattggaggatccagccaccaaaaggacatggaccgtgaatggtagcagaatcaaacactacttaggtggtgatttcgagaggctaacaactattgtccaactacaagaggcttgaaccacaacaaagacgtccaacttaaaagacattaaagaagtgctcctgggagacaacctagtatttctgaactttgcttttaattttctattttcctaattacatatat

SEQ ID NO: 6545 - DNA, 412 bp, Glycine max
  unsure (1)..(412): unsure at all n locations
nttctataagcactaataggagagaaaataaaaatatttgcttctccatatgctaatgagtagaagttttctgatattacttctccaaaagctaatttttaacctatgcataaactagttttagtttatggataagcttatttcattttttcttttattttcttctctcataagtatttatggagagatttatccaaaaaaaaataccatgaagaacataaaattagtcagcttaacctcaaaagtacaaagaaggttaagtcaattcataaactatcattatgttgtaacacttacaatttggaattcatctaatttgcctcctgaacaagattggaaaatgaaagtagcacaaacagtaacgaataggtcttgctactatagtggagagaggaaattctgatggtcccac

SEQ ID NO: 6546 - DNA, 404 bp, Glycine max
  unsure (1)..(404): unsure at all n locations
agcttgtaatagttgtctatgcaatattatctttttcttttctgcatctcttcccctaccccaaagttttcttcgataaactgtaagtacgaatctcactatgtctggctagttcttgtgaaggcaccctcaaggggccttagttatcttcatttggaaaatgcgaatatgatttagaaccctactgcttgtaaataatattttttttcctttctttccttttcttgttttttgaaaacctgngattggtaaacctgcaaaggtgtgcccttgataattgtttttgaaaaactatgaaagtcctttttggttaggctggtgcttggaggaaaataagagctacataagacccaaaagtaagtgtgggcagtttgcgatcttcagtactcagcttaatatccaga

SEQ ID NO: 6547 - DNA, 378 bp, Glycine max
tgcctcaaagaggtccagtaaggacatggcagccgatggaactatttccgctccggagtatgatagtcaccgctttaggagtgctgtacaccagcagcgcttcgaggccatcaagggatggacgtttatccgggagcgacgcgtgcagctcatggacgacgagtatactgatttccaggaggaaataaggcgccgagcggtgggcatcactggttactccgatggccaaagttgatccataaatagaccttgagtggtatgccaatgcttggccaacagatgagggcgtgcgtgacatgagatccatggtaaggggtcagaggatcccatttgatgccgacgctatcggtcaactactaagatatacgttggtgttgg

SEQ ID NO: 6548 - DNA, 403 bp, Glycine max
  unsure (1)..(403): unsure at all n locations
agcttcaacatcagaccacttccatgtttntttttctacttcacatggacttgatggggcctatgcaagttgaaagccttggaggaaaaaggtatgcctatgtggttgtggatgatttctccagatttacctgggtcaactttatcagagagaaatcagacacctttgaagtattcaaggagttgagtctaagacttcaaagagaaaaagactgtgtcatcaagagaatcaggagtgaccatggcagagagtttgaaaacagcagagcatatagagtattcaattccagaaccagaactgtgatggaatccatcaatgtggtggttgatgatctaactccagcaagaaagaaggatgtcgaagaagatgtcataacatcgggagacaatgtagcagatacagc

SEQ ID NO: 6549 - DNA, 443 bp, Glycine max
  unsure (1)..(443): unsure at all n locations
ctcgcanaatggggtcggtcaatacttccgagtatcgaccatttattttatatacagttggtcactgagcgtgacctaatggtactataacccctgcatatctcgaagggcaaagacttggagaagacataaaagggtgtataatgaacctcagtatttatatatatcgaagggatacacnaatcaccttcagtctcaaaggggcaaagcctatatgagacgaaaaaggtgcacaatgactctggtagtttagaccaaccggagggtatatatgcccctcagtcatgaaggcaaagtctgaagagattaaagtgtaaagaattggtatttagacaactggaaggtacacagcccatcagtcttgaaggggaagtttgaagagattaaagtgtaaatgacttggtatttagacaactgaaaggtacatagccccttgattttga

SEQ ID NO: 6550 - DNA, 419 bp, Glycine max
agcttctagtcgtccatagattcttcttgtggtacggtctagcaaacgttgcatctgtgcattcatcgcatccactaacagacgttgagcgccgtccaactgatggtactcgtcaccaccaccacctgctccagccataattcaacaggaaaaaaaaaatgtgcaataaaaattattaaggtttcaggacctcacaacactctactcacgtctcttagatggtagtacactcgtgtttaatgctctcaataggcttttgtgtaatgtattccctcttgccttttaccactcgtgtttcctcttaagttcctggatggaccaaattagacacacaaggtaatataaaataaaaggaaagacaatataatgatcacaaacagatttgatttgggataacaacttggacttgatttggataa

SEQ ID NO: 6551 - DNA, 418 bp, Glycine max
tcttatccaaggcaattcttggtgggaatcttcttcttccttggcttattccctagtggatggtgcctcccctctccccttctcctttgccttccgctgcatctccatggtgtaaaatcaccattgaaggacctcattgaagctcaaagatccagcctccatagaagccccacaagcaagcttccatcaataggttttctaaaatggctcattttattccatgtaaaaaagttgatgatgcttcccatgtggctgatttgtttttcaaggagattgtgagactccatggtttgccaaggagcattgttagtgatagggactctaagttcctaagccatttttggaggactttgtggagcaagttgggcactaaattgttattttcaaccacttgtcacccacaaaccgatgggcaaat

SEQ ID NO: 6552 - DNA, 414 bp, Glycine max
agcttcacacgcggaatatgttcaccttcttcgtgatcatcacaattctaattcattcaccaaaaagttcttcgccccttctttgtccccattctttctctttaatatactttgtccatattttcctctttctcttcctatcaaacatccatggcttccttgtcttctagtacaaaacagagcaataataaccaagagggtaaccgattttttttacccttttgtgtttttatttattatttattttatacacttttgttgtattgatcgtaatttagttactatacattttttttgtacccacttttaatattttttcgtgaacttaatgtgcagttgatgagaaaccaataccacacgatcaaaacgttctgcaaaagcacgttgcgttcttcgacaggaaccacgatggca

SEQ ID NO: 6553 - DNA, 319 bp, Glycine max
tgagatgaggaagtgttgaagggtgaaactttctgtctttattgttttccacagagtggtaccttgagatatgtcgcgggggtcaggagaccttggggacgtcaggtggggtgctattgcccaaaaccaagcttgaccaatcccgacccaacccgggcatagtcggtcagtgaaaacctgtgatgtacctaatcaggcgagctcctgacaatcaacagataaaaggaacaaagaccacaaagcaaggaggcttgtgctggctggccagctgtgaattatgagtgatatatgggttgtggcctctggtaatcgattacca

SEQ ID NO: 6554 - DNA, 414 bp, Glycine max
  unsure (1)..(414): unsure at all n locations
agcttgtncaagcctttgcattctatttttatcagtatgttntgattggtggaaaatgatggaatatatttttttttttggtttaaaacaaaggtgccaaatttgactagtttgtatgatattattaatttaagaatttaatgtgatattcacttataagataagttatttaatcataaatcattattgatatgattttaaagattgttattataaaagaataaatttatcatatcgtgatttatgatttgatgataatgtaaaattattttacattatcattatataatttttcttctctaactttacatcttaatgcacaaaatggacagaatataattattatcattttcaatttttcaaaacaattttttttttatcatttatatgtattagatgtataaattaagtaac

SEQ ID NO: 6555 - DNA, 361 bp, Glycine max
tgaaagacagtaatgaccagaacaaaattgatccatctgacacaacagaacttataatgaacagttacatcatacttcaatagacacaaaccacaaaagcttatcataaagcttggagccatgtgcaggagccccaacggcattaatgaccagccaccaggggttcctctccgcgtagaacggcctgtaactcccctcggagtcaaggttggcgcggaaggggtggtgggcccacttggagtgttcggaggggaccacgtcggtgtgggagtagaggaggatggattctacggttgggtccgggccttcttatttagaaagaccagtggcttccctggaacgaactacatggtttgggatt

SEQ ID NO: 6556 - DNA, 416 bp, Glycine max
  unsure (1)..(416): unsure at all n locations
agcttaaagtatgcccgagtcattcattccttgagangnngnngaagtattggcgatcagaatttccattccttggattacggggttgaaccaagctcaagcttttacaaaaaggttcatcaagtcaagttgaaatatggaagtaaccatcctgcaaaattggggcaaaagatgaatcgagtcacatcactgcttcgtctactgccaaacatatttaggattattgatgtccttgttacttccagtttcaccttgacaaagatgtcatggaccatgttgaaaatctaaattgattcaaccccatatcctgcgtaaaaattcgcaatacttcgactgtacatcattcgcatgcatccatgcttttcattggttgcattgctcattgcattctttccttgaaaaataaaataaaataa

SEQ ID NO: 6557 - DNA, 404 bp, Glycine max
tctatataagctgaaccattttatcaataaacacatgttgagttttatttagaaaattagagtttttctcttttatcttagtgagagtgattctcctaaattcttgagtgattcaagaacaccctggctgtatcaaaggactttcacaacctttgtgtgttgccctcgctggaaagagtgagtctttccttcctttcatcttcacccttgttctttcaaaccacaattccagaaaatccacctctacccagaattatctcgtggccgtaactcccattttacgcactcaaattaagtgattcttgagcctaaattgactttcaaaacgagacctttcacctcgttttggaatcacctcatttggagccctgtagcttcagttattgccatttctatatttctgt

SEQ ID NO: 6558 - DNA, 419 bp, Glycine max
  unsure (1)..(419): unsure at all n locations
agcttgtacttggtttagactatgatttttcatgatttgggacttgtaggattcaatttgggcagaattggatgagggaaagtgtgatttcgaaaatctgcactttatgcagaattttgctgtcaaataggtgcagccgaattttggctttgtgcataaaatgttgtgtatttgctggttgtggaaagagtagtacagattgggttctggacgttttctagtagatcccaacggtcataatgtagatttatgtgctagagactttcagtaaaagtttcgagtcgatccaacggttaacgaattggaacaaagaggaatgttgaaggggtgtaatcgattaccaaggggtgtaatcgattaccangcttataaatggaactggaatgttgaaggggcctctggtaatcgattatcgggct

SEQ ID NO: 6559 - DNA, 403 bp, Glycine max
tcaggccaaagcaactcaaaatctaggtatctatatcttctcaatttagtggattttcaaggtttgggaagtgaaaatgagaatggggtaattttggagcaaactctcatctcacacaagtctataacattaatctaaacttgctcaaactggttttacgatgaaaactctaccgaatcaaaatttgactcctcaacacccaatttaccctagaaatggctcttgccttcactttggtcactcattttcctcctttgcacagcccaagctttctcacagtcctaaatgacatttcaaactaggattaactcactctaacctccaattaccactaaatccagatttggcttttcaaatccccaaagcatcacacttttccactcatataactacattctcactt

SEQ ID NO: 6560 - DNA, 431 bp, Glycine max
gatcttaagtcaccgcggctgcaagcttgcaattgacattttttctattcatagggacatcaagcgctaaccttttttcactcaactgtaacaatgcttgatgatgataatgcccaagccttttgtgccagatttctgtgtgattctctatgagagagaaaacaacttgctcctccttcaatggatttagagcaaaactttttcctttcatttttaccttgaagatttcttgaccagctacatctttaattaagcaatatttgtcttccaatacaactttaaatcctcgttcaatcaattggccgacacttaataagttttggtcaattttcagaatgaataggacatcagcaatacatcttgtgcctgcagaacttgtgattgcaactgtcccctttcctttgactaggatataatcaccattacaaatt

SEQ ID NO: 6561 - DNA, 396 bp, Glycine max
tctaaactttatacaagaatgaagctctgataccttttgttagacaattggcctcagatatcttaagaaggggggttgaattaagatattgcaaactattttcccaattaaaattctatttcaatttcaatgcaagttacaaattcccttaaaaatgaactcttaaataatgattcaaatcgaacaatctgaatataaatataaagcaataataaataaaagagtttaagggaagagaaagtgcaaactcggatttatattggttcggccacacccttgtgcctacgtccagtccccaagcaacccgcttgagaattccactatcttgtaaaatccttttacaagttctgaacacacaaggacagtccttcctttgtgttcagatttctttacaac

SEQ ID NO: 6562 - DNA, 403 bp, Glycine max
agcttgtgaccaaccatattggctattttatcaactaaggagttacacttgatcgaccttcccaatcatatttcattaatgtagaaatttcacgtgccaacccttttactccacgcaattttcagagcatgaagaatgaatgacgtcgacccataattcagtgagtagttgaacagccctgtgctatatatatatatatatatatataaagaaaaaaaagacttgtatcatttcattcataataagactttcaatccagcttggaacaaactaaaaagttgatgttctcttgcaagtgaatgaataacttgattggctggcgctgataaaacgcactgagacgtttggaaagagaagaagcaactgtctacaattctgaataatggaaccatattcagaaaaa

SEQ ID NO: 6563 - DNA, 366 bp, Glycine max
ctgaacaatatacttgtcctttatttaactgtctttttgcttggcgaccacgctcaacaaagtactttcgacacctactatacgttgatttcaccaatgttgttatgggaatgttgcgacaatcctttaaaaccttattgatacattctaaaaggttcgttgtcatgtggccatatagacgtccttctctatcgtaagccatcatccatttttcctttgaaatgcgatcaatccatgtaggctgcataaaattagttatgaataacaattttaagtataaatgaaagttaaataaacatgaccatcaaatatgaaatcttacccaatttcttcaacatttctttttgtttggcattattgaatttt

SEQ ID NO: 6564 - DNA, 404 bp, Glycine max
  unsure (1)..(404): unsure at all n locations
agctntgaagaagcaagacanaaanctttctgttatttatatcnnnncacncatnnccgtaaagcttcatgaaatccttgtatagatactaagctctcaaacaccttgtaaaccttgagagaaaagactaaaatgttgagtatttaatccgtctataagatgatcacgtattagtcagtgtgcaatctttcaacaaatcttgttgatttatttagagttagcgatgacttggtaggacaaagaatattggattaagtcaagcttggggtaaaatttgcatgtgtaagagccaaaagtgacaatgaaaaatatttgaatacttgtagctttgtgataagttagtaaaaacttggtggtttgtcaagaactggacgtagtcttggggtagaaacaaatcagtataa

SEQ ID NO: 6565 - DNA, 411 bp, Glycine max
ttgacacataaaatgcaataataatgccatgactctttagttaattagttgtcaaaaaggatatagtttcataattagcagttatgggtgcaatgttaatgtcgctggaatggaatggaacaccatgattggacccagcaaccaacttaacaaataggcttattattgttactttctatatatctcataactcttgtcattttcattggtaccccattactattaagcacttctttgtccaatacacgggtcatatatatatgaagtatgagtttaatttagatcatactacgcaaaattagcagtatttaatgacctgaaaagaacacataaattgaaggtataggcaaatatcaaactactccatcaaataacgaccccttgaggatgaacaagcccccacacatgtga

SEQ ID NO: 6566 - DNA, 408 bp, Glycine max
agcttgtatatgcttgtgagtggaatttccatttgtataagcactccaacataatctagaagcaaattctgtggctgaccgttgtatcatacttgaaggagataatcgaattacagctcccaaggtagtgtgtgtgtgtgtgtgtgtgtatttaactatttattcacccagcaaggaaaaaattgatttaccaaatcagctggccatctccctgttgttctcctaccagagaaatgagaatcagtctcaggcataatccatctaaagacaccccacactctgtgtcagttatgccttgattgcccttaggttccctatcactggtaaacatatttccaatttaggaggattaactataaaattgattaccaacatactgatatggtaaacatgttcatttgatcaacc

SEQ ID NO: 6567 - DNA, 408 bp, Glycine max
ttcttgacttcaggtttttggtttatatgatacttgtataaactagactccacatattcctctggtcttattgttaccacatatggcagggctatggctgaattacgggttcttaggctatttggaaatcctcttgagtttcttcctgaaattttgcccctccacaaacttcgacacctttctcttgcaaatattaggatcgtggcagatgaaaatttgagatcagtgaatgtgcaaatagaggtagcactttgtaaactagctagactaccttgctgacattattctttcgaaacatatcacatgctttttctggtcattgcagatggaaaacagttcttatttcggtgcatctaggcataaactcagtgccgtcttctctcttatattccgattttcttcttgtca

SEQ ID NO: 6568 - DNA, 417 bp, Glycine max
agcttttacatccattaatcaacaatttatctttcatatgagatcaaatttcctcttcagaactatacttactaaaatctagagttgtccctcgtcagggtggacgtggccaaggtaggctctaagatctcgcacgtcggacagagagcagcctttgttaaaaggacaagaggggggacctgcaaaataaaggacttcgacactgaagtaagtacgagagttaggtgagaagaaattttgtaaaagggtgagatagaacctggtacttatagagtggagtggaagctgcgggtccttatttgttgggattgttacggtgttgtaacaacccttgcagataatgactagcttgtagataattgtagcttacagataatgtgtaccttatagataattgaatacctgccacgagataaa

SEQ ID NO: 6569 - DNA, 415 bp, Glycine max
  unsure (1)..(415): unsure at all n locations
tgtaggattatggggtacccatcacatgtggtactatgtgtcggtcgggctatggtgcacaacaaattttccacatccacaaatcgcgcataaacccaccatcccctgttgcccacctccaactgagctcatgtactcccaagtagcccatatcctcgtttctctcaacaccgagtccccatcaatcctcccaagcttccccaacatccaagtaattcaacattcaaacaacacaaactatcacagccaagaaaacagggcaaaggtagaaaactctgcccaaaacaccaaccaaaatcacagcttttctcacttaaagaccccagtaacaattccttcgttccagtttgttaaccgttggatcgactcanaaatttcactggaagtctcttgtacataaacctacattttgacc

SEQ ID NO: 6570 - DNA, 413 bp, Glycine max
  unsure (1)..(413): unsure at all n locations
agcttgtccacaaaaataggaatttgtagtttatcatttcagtttcttaccaagtaaaatggatcatttttaaggtccaacgccttanaatgatcacctttcaagtaaaaagaatcacttgattcacgcataagaaagaactacataggtctgatttcctcatcacaattgaggaatacgtaggagcaaagggaaacaccctcgtcgaccacaaaaataaaaaaatataatatatataaaaagggtataaaggatataaggacataaaagggaacgtaaaaatcaaagtcatgtttgcacattcgattaaaggctgccatcccttgtgacggacgtgtggggtgctaataccttccccgtgcgtaaatacaactcccgagccttttacttaaaagttcgtagatcgcgtcttt

SEQ ID NO: 6571 - DNA, 414 bp, Glycine max
cggttcatgtcacaaatatgctatagcttgaggaattgtgttattctgtcttaatattattcctaaaattatatttattattggaatattctatttcctattaattagtaattgattgatcttgtaatcaatattgactccttcttcatattataaataacatgaggtgtggtctactttgacacacaacacaacagttaaaaatactgttataagtagtaactcattgacctattactttgacgtagataaatgatggtatttttataactacataacaaaggcattacatttaaagtttgttacagggagtgtgactttacagttgcctttgtatgtcattgggttgacatactatgaatttgagaaaacccctttccgattgctattgctattcaaatattcacggtactt

SEQ ID NO: 6572 - DNA, 422 bp, Glycine max
agctttagaaaaaaaaagtcacatgtgtttgataattgtcaaatatatcattctttcatttaaaataaaacgtttatttgctttaggccctatttgctattgggctgaccttgaacagtgtatttttatgttttcaatgtgaaaagaaaaaaaaacattctagatatttctagtaggatattaatagagttattactactttaatattataaattcatattgaaggtgggccgtttcaaggacagaaagtgaggaagaatgaatggcttgtctgggtactcttgtcgccaactttggtgttgaagtgttgccgttcgagaagaaaaatggtttgtgagggtgctacagaagaatcatcaaaggtttgggcgttaggctgagggggtttgggagcgtgaatgacgaaatgaatataatgtttc

SEQ ID NO: 6573 - DNA, 393 bp, Glycine max
gctcagcaatcatatgatcatagtgcatgctaactgtgtttccttctttaattccaatccccactcggacttgcacaatagcagattttgaatatgatagaaagaacgatccacaaattaacatttaagttttatagttattccagaccaactggggaagtttatatacccataactagatcagcctgcttgtcttgcatatatgaccttgccgagtatatctccgaccttgggccgatgtacttatacatgaaaaatgggtaggaagaacctacagatatggagagcaacatcacctgataaaggtatgtgattgactcatcggaagatcttctcccatggtaacaaggatgtgccattcaacacgatactgacccacatttatttctgtaa

SEQ ID NO: 6574 - DNA, 437 bp, Glycine max
gattcttaagcaccgcggctgcagctcattctacaccaatttatagtttgttaagctgcacaaaaaagaaagcttcttgatcatgagggagctaacaaaaattttcaaacaggtgaaccttcttctagtagttctgacttgcaacagcctcctatccctcttcaatttccaccaagagcaattccaaacaaaaagatggaagaagtggataaggagatcttggagacctttaggaaagtagaggtgaacatacctatgctagatgccatcaagcaaattccaagatatgccaagtttctaaaggagctgtgcacccacaaaaggaggctcaaaggcaatgaaaggattagcatgggtagaaatgtgtcagcattgataggtaaatttgttcctcacattcctgagaaatgtaaggacccatgtactttctgtatacc

SEQ ID NO: 6575 - DNA, 412 bp, Glycine max
  unsure (1)..(412): unsure at all n locations
tggagaggatgcttcaatggaggaaacgaattaggtgataaagagagaggggggagcacgaaattgaaggaagaaaaagggagagaagttgaactttgagttgtgtctcacaagactctcattcatcaaagttacaacaagtgttacacatgcttctatttatagactangtagcatccttgagaagctttcttaagaaaacttccttgagaagcttctttgagaaaacttccttgagaagctagagcttagctacacacacccatctaaaaactaagctcacctccttgagaagcttccttgagaagctagagcttagctacacacacccatctaaaaactaagatcacctccttgacaaaatacagganaatacaaacaaaaagttcttactacgaagactactcaaaat

SEQ ID NO: 6576 - DNA, 408 bp, Glycine max
  unsure (1)..(408): unsure at all n locations
agcttgtgaaccactcgtaattataatatatcacttggttgtagctaaagcacctagtatatgtagtatatattaaaagataaagggtgagaggaataaatttaaaatataaatatgaataattaagattaaaggttatttaattattacataactactaaaaaaattacaccattttgtattttaattttaatcctttatgattatatatgtatgcgagtaaataattcatatactgatggagcataagatttttattctattattaaatcataaattattatgtataataattttgttaatttttataataattattttaaaaatcaaaattttcataattnttcattaattaacaatattattctatactaatgtgtgtaaaaattaatatctatttctatatat

SEQ ID NO: 6577 - DNA, 380 bp, Glycine max
tgtcagaaactcactaaccctaatcctatttatcatgatttccctaaaagctttgaggcaaatcgctaactcctattcttgtcgtttggttgtattttgtcaaaatcccaaccctgtaagcttctcgcttctttgtatcactgcaatcaaaactaaagcaaggttgtcgtcctgtttgactctcggaggtggtggttgaaaaacctcgtgtaatctaacgagtcaaggtagaatatgtgtcttctctctcctgcatgttaatcaaacgagtcaaggttttcattcaacaacagcaacaaaaaagagtcaaggttttgtgatgtgcaataccagtcccgagaaaaatgattatgagaggtgacaagttgaaaatcaaaaag

SEQ ID NO: 6578 - DNA, 415 bp, Glycine max
  unsure (1)..(415): unsure at all n locations
agctagttctgtgaccttcattctactttattatcttctttcgggttatgaactattatgggaaacaacaataataactgaattgggatcctttattgttgtgtaggaaaacagtgcatgtcaatgaaaatttcatgtaatgttttgtttcaattggccgcgttataataaaaaaaattacatgtgcaacattcatctttccctgttcctttagtcaatgttccttttttcgttgtttctattgtacatcatatataggtacaagtatgagttggctcgacaccatagttttcattcttttaatgcaaccttgtcaaaaagatcatacttctctagtgtaaacattccaaactcaagattnttcaactntgtaatatttttcagcatccattggtccctcaaattgatgttttac

SEQ ID NO: 6579 - DNA, 390 bp, Glycine max
tgaatttaatagtttggttgacacatcacagtcatttattcctgtcaaaatttcaatgtatgaagattggaaaggaaatgcagtcaaacaatagccgcgggagcaagaaaatgaagcaatattattcatgaatgcaacaaaacaagactgtcaataacaaatatttcaacgatcagaaccatggccactaatgcaaatatcttctttcttggtcaatgaaatacaaaatctcaacacaatcaaattaaccagctcactgcccaccaatgcaaatttcttcttgcgtcgttattagtattaaacaatgaaagaaatcaagaaataggtggcaacacgcacgtatatatatcatatatcaaaaaattaattgacaataaatagaatcatttt

SEQ ID NO: 6580 - DNA, 416 bp, Glycine max
agcttctaagagtcatccaatttaactacattctgcatatcatgcacagacgacttctcaaaatccaccatgtgcttcacaaccaacaaattcaatggaaggggcacactcacctgctatgacatctgatgtatcacctccaccttcaatgaaaggggtacgctcaccatgtacatcacaaccaacaaattcagatgcaggacgtgctgatagatcttttgcttcattagagacacagagaaatgaggccaagccaattttatatcttgatgggcaagggtatgttgctctatttttttacttatttgactatggcttttcaaacttgtgacatttacatgtaatatttgcagattcttaccttctcgctctgctgctaatgggattgaggatatcctcaagaagaattctactga

SEQ ID NO: 6581 - DNA, 410 bp, Glycine max
  unsure (1)..(410): unsure at all n locations
tctagagagntttagactactctagaggtcttcgttctttctagataattttacacatttccaaaaagctccagaattttctagaacctctccaattaaggaaggatcccaacaaaagatggatgatggcttctaatggaaactatttcgtattaacacagtgatcaagaaaaaagacaacagaaggatagaaataaacaaaaagtgtgaatattaatgaggtgactaaaatattgggatgtccaaatatcaatgctctttccgtatcatcttatgaaaagctggatgaataatgagtattctcttgcaagcaacaagctagctagccatatttatagcccttattagtccccctgataatgtaatatccgtgagtgtggcgatccaacatgggtggtacatacagtgat

SEQ ID NO: 6582 - DNA, 417 bp, Glycine max
agcttttatatatgagaaatttatgattgtttatgaaagaatgaaaaaatagatacataaattaggaatagagaatgcagattatagttagagatctcgagccagctgagtttgaaagagttgcaaatcttaacaatgtgtggtatagagcaatttgctttttgtttccttggttcggatgttacagaacaagaaaatagaacgggttgagacagcaataagcatttgttacacagttcttgcttggatgttttctttaatttggttttttaccattgaatactgatgagcacacacagttcatgcttacatgcaaataaacaaggcaaccctgctattattgttctgacccttcctgtaaataagtacgatggtctccaccatgtgcaaattttgtgtacagttactattaaatca

SEQ ID NO: 6583 - DNA, 391 bp, Glycine max
ttaatggaagtcgttattcagcggctggttattgattctgcttcatcaggcgatggtcaatcttgggaaaaagattaatcggtttgataggctcttcaatttgatgaatcacctttctcttcttcagatgttccttcatttctttaatgttgatagacgctaaagtcccatagatgttctcgaatcgtctaattttatcctcatccatctcttcaaatagaacatcattcataacctcttcatcaacattgaacattggccttggtctaactggtgcaacatcaggatctatctcaacaatatcatcttcactttccttcaaggaggcttcaatgatagactggagtagatcttcttcataagactcacattcttcgggctccatatcttc

SEQ ID NO: 6584 - DNA, 405 bp, Glycine max
  unsure (1)..(405): unsure at all n locations
agcttagagcatgctttctatttgttttgctngcagcagagtgtttgaaacggtttctattttggaaattaattctagagtagatgaatagacacagactttgcagatgaatagacagagatttcagtcatcattgctctctgggagtttcactttttcatttttactactcttaaatgtaatttattttgagatgtatataaatataggtgttggtgagtgctttttcgctcaagcatttcaccaaaatctattctgcatctaaagaaaaggataagggctntatgtttcaaaaatgttttagatacttaaatatcataaggctggtggataaaattacaaagcataataaaaaaccaacaaacaaaattctttatatagttaatggtgcttgccatacaatgt

SEQ ID NO: 6585 - DNA, 287 bp, Glycine max
  unsure (1)..(287): unsure at all n locations
ctcagctttctgtcggaccctttttcctctcagngttttttaagagagagnggccttgaaaccaggagcaggtttccaagctctcgctgaaggtaattcagtattctgtgtggcaacagaactgactgcctttaactcattttcgataaactgtttaatgttgcttcctgcaatattagtaggtaggccactaacttcttgattatcatctgtttctgcagaagcagttgcagattgtttatccttacccattgttgttgcataaatgttacatgagctggtcaccc

SEQ ID NO: 6586 - DNA, 368 bp, Glycine max
  unsure (1)..(368): unsure at all n locations
agctttaaaatnngttttaaatctgtttatataactgctggaatcgattaccatatatgtgtaatcgattacacagtgcaaattttgaattcaaattttaatagccgttgtaaatcagttttggccactggtaatcgattacatcctctggtaatcgattaccagagagtaaatttgtttgaaaaggactttttaacttaaatttcttggccaaaccttttgctacttcaattggaattcccttcctatttaatataccctttctaagactctagagactgtcttgatcatccatcttgaatatctctaatttctttgtcttgaataaagctttgagacgcatgtgaacctttggcatcatcaaaaca

SEQ ID NO: 6587 - DNA, 301 bp, Glycine max
gacctataaaactcagcttttttgaccttgaacatttttcttctcctcttttataaccatgctatgtgctcgcgactggtccctttcttcccttcgcaacttgagttcattattgctaccccatagagctccgcgaaatttgttccggccatactcttccttgcgagccctcttggtctctcgttcaagggctcttgcggtaattgcattctcttcccgtaacccggcacactccttccgaacgtgtgtagcaaccaacttgaacttctccttggcgagttttgcctttcctaactcgctt

SEQ ID NO: 6588 - DNA, 417 bp, Glycine max
  unsure (1)..(417): unsure at all n locations
agctntaaattggtttgatatatgctttggttatatgtttaatgcttggaatgataatgtttttcatgtttattgatatttatgagcttgggtgagtctgataaatgctaattatgaatatattttgaggttaaattatataggaatttgtaattttctctcttaattcttcttttttgagcaaataattgttaaattaacatcatttaagtttttgtgcagagaatattaaaagtaaagaatttatgatgcttagtaagtaatataaaacccaagaaagtaaggataattaaggaaagtatggctaattaaggaaataaggctaattaagataaagagaccaattaaggaaaggagactaattaaggaaagtagcactaattaaggaaagcatgctaattaatgaaagcaaactaa

SEQ ID NO: 6589 - DNA, 421 bp, Glycine max
  unsure (1)..(421): unsure at all n locations
nttcttccttcttatcttcgcaacaagagcagcagctgcgatctccaggttctagtggatcagatggcaccatatcccaatggtcaaatactaactgggggaaagcctttctcccagttttagcccttagtgattcattgaatttagatgactcaataacaggaaaatatgccttgacattgtaaagtggggtgccaggcctctggctttcctcaaacacatgccctcttttctggttaagaacactgtatacaccaccaagagcctgttcaggtgcctgtatttccaccagatacacaggttcaagaagtcttggttttgctgtcagcatggctgcatagcacgctcttctagcagttgaaatgatctgaccacctctctgtgaatggcatcagcatgaagaatcacatcacatatcttg

SEQ ID NO: 6590 - DNA, 406 bp, Glycine max
  unsure (1)..(406): unsure at all n locations
agcttgtctaagattctcaaaacaatttaagattaactcacaaganacaaacctcagattcaacgagctatccagngtgtcaatctctaacagaagcccccctccccaaaataaaaagaaaagaaaactatttgctgctacccacgaggaattaaaattttttattctgtctccaaaaagatggatggggaaaactatttgctgcttccccctttcccattgtgtccatcatttgtattcaattgaactttacttttctgtcataaaagaagaatggatagaaaggaatatagaagtaaaagtacatctgagggaggaaaaggaatgcttctgagaagtatagaaattaaaaagaacattgtgcctangtggcccaaataaacaaggctgcccacaatcagtgata

SEQ ID NO: 6591 - DNA, 417 bp, Glycine max
  unsure (1)..(417): unsure at all n locations
tcgggttctataagtcataccccaaacgcctatnctttattcgagttgcaaaatagttgtctaaattcgaccaaatccagatttaacaattggcatgaatgcatgattggataacttgaattagatcaaagaaaatttaaataaattaaaggtttaatcgtactttttattcttcaatttctatttaatttttttttgtcaaattttatatctagaaaattaattttgcatattttactccaatttttttttaaaaaaatttacaaattttaccttaataacttttgagaagtgaacatcttacactaatatacaaatcaaatcactcttagttagctttaataacttttgactaaataaattcattctaaaatataccatttgagtaaaagtgtttataatgaaagttatatttac

SEQ ID NO: 6592 - DNA, 413 bp, Glycine max
  unsure (1)..(413): unsure at all n locations
agcttgccgatatagcagagcttgcatttgatttttttcaagngagcgtccacctatgtcagatatagcatcttggttggagcaaattgtgaaggacggattgatcttatagcattaatcattgccctgtgagaaacttgtttcgaattttgatccatccacaatatcttctttttcataaatttctgtgagtaatgctctcttctgcgattgtaaattgtcttgagtttgttggagattgcttatctcctttgtagcagatctttgggtttacttttcctaatcttcacgaagtgaaggacatggcattattgcaacatacacacatgctgtgaattttttatcctctcatataagcctaagaccatttccagcatacagatagaatcaatttacatgtacaacagtgactt

SEQ ID NO: 6593 - DNA, 391 bp, Glycine max
gcttgcaagagaacccaatacacatgaaaatgcgagactttgatacatttactttatcccatattagacacctgtccatcgataacaacaggaattcacatgggctaaaggaaatattatctaagtagttaaacttacatgaaaccaaaagtaagccagcatgttgataacaacaagaatggcaaaatccggccaaaacctgcaaaaaaattgcaaatgttctgctgtaccatgttggaaataatactgaaagatattcaggtcagagaaagggctaaaaaaagttaggcttccttaaaatcccaaaaggattctgataccactaaaattgacatgaagttatacgtgtcacttgcaagtcaaggcaaactagagaacctttctcaaatca

SEQ ID NO: 6594 - DNA, 415 bp, Glycine max
  unsure (1)..(415): unsure at all n locations
agcttagcaaacatgcttatctattatttgtttcnttttaatatgaacttgactaatttaatttagagtggtgtatttcaatgttcagtatattggttctgttcatatattttacattgtaatatttaaatagttatatgtttgttattgttaaattagacataagtggctgtacatttttgtgtacatatcatatcacgacttttgttattgatgtaccaaatgagttgttactttattgtgattttataattatgtgataatttttcaccagtggtaatgttccattctttataacatgatggagaaaaaattgatattttatgtgataaatgagagggtggctgacatgggtgagttagttattggcactgctgagttcagaatgggaacaaaaggcataatangtcttgct

SEQ ID NO: 6595 - DNA, 408 bp, Glycine max
  unsure (1)..(408): unsure at all n locations
tctctaaatgtaggatataattgaccattgactgtatggatctcttcataatcgnttggtcctttaacaaaaaccaacatcatactaagataatacaactctccgatacttaggggcacccagataagccttccaaatgtatagcctcttttacgtggcttccaatgtctatcctttgctacgtatgtaaatttttttatgaattgcacatatgttagatgctttccttcattgaaaaggctattagcttgtagtcatgatgtaaacatcgaatccttaacaattggctttgagagtaaagcctcaatatcatcatcatcttcaaatattattgaattttcactaggtaaataaaagtacaatcttttaacagtaggtgatctctcgtgtatctggaatgaaatattc

SEQ ID NO: 6596 - DNA, 423 bp, Glycine max
aagcaccgcggctgcagcttgagtgaggctggctgaatttcattgttttttctaagattcaaaagcttaaattataggagagcacgaatcctaaaattaaccatttttttcttttccatttacattcttctcaactcaactcacttgccctttgtacttagctttatttaaaacttacaatgtttttttttattacaatctatttactgcctggaatacatcctcaatctgcaaaatcttgaatatatggggatggtctcttaaggctacaataccattggggtccccagaaatgtgttgagggtgtccacatcgaactttatcaagtgccctctcactttcacctgctttggtgagttatcttcaaggtcatagaggtttgcgtagaactccttgaccaccacgacatcaatactgccatca

SEQ ID NO: 6597 - DNA, 404 bp, Glycine max
tcctagatatggagagctaaatcctctgttggttattcttttgttgtacttgatgtaaatacctgtatatctatttaatgatgttttatgttttctctatgctatcagtacatcattttagtgtgcttttgccttgatcacgtagatgcatgctttgttaggatcattcaacggtggaaactggtctgattcttaaaacttgataggacagagctagtttatcatattatcacaaaggatcggggtacaataatctagttgtttgtatgtttgtcttaatgtggttctggtcgagtttagtccaacaagaggaatctgaggacgatccttaatcaggattaggctagactatcatgaggaattggggtttagcatttcagtagacaccatagaacacatgagca

SEQ ID NO: 6598 - DNA, 433 bp, Glycine max
  unsure (1)..(433): unsure at all n locations
gatccttaagcaccgcggctgcagctaagacatatcttatttgaatttatagaagatttttttttgtttttttttaatttttattttgaaaattttaaatatgaataaatctaaatcattgaatgattagatgatagagataagctcactttacttcctaaattgagaaagctcactttggaggatctaatgcaaactttagagttgacattaataaaaatgaaaataataacttaattaagattctaaatcttttaaaaatttatgatgctttaatttaatcctttatttttaattatgtccctcataaatcctctataattttttttattaggtaatttttccattagtattttatttgtttgtttattttctcatttaacatttctaacttctatgagtttttatttaaatnttaaatctatcccattat

SEQ ID NO: 6599 - DNA, 410 bp, Glycine max
  unsure (1)..(410): unsure at all n locations
ntgccgaataaacaagttccttgtgctcgattctcttataattttgttttaattttaaatacttggtgacccggtgcgcttgccggtatatcacttcccctttgatataagtgtttgtaaatttaaagaaaaaagaactgtgtggggaggcgaacaagtatttttggtgccgttgccggngaaacttattttcatttggaaagtttagttcaatttaaggcattgattcattttattttttttcctttgattcattgattatttttgtgaatatttagttactgtagaatttattgttcttttgaattggttaactgtttttttgcttgtgttgcgtgcaaggaaggtcttttgcgggtgttttgattcccaagacttggaaactaatgctagttgcaggaaaagaaatg

SEQ ID NO: 6600 - DNA, 397 bp, Glycine max
  unsure (1)..(397): unsure at all n locations
agctntgatgatttccagattatttctttcttataccctgaggtgctaccgattttacattcatctgggatgttaataacatttgccaacacacttccaatgtcctttttcattaatgggtgaaattcttacgagtttccctcaaggttttaaattacatttagtgacggttatacagaactccaaaatcttaatatcccagaaaattgcaggcaagtgcagttgcagactgtaatttaaaactatcactcccagtaaatgacgtgggccccacttaagttactgggtttcatctcttattttgtgggtcctatgtaaattccactcaataagggtgttggaaacaatttgtagatagtgtattggtagcatttatggaggatttgctttcattttc

SEQ ID NO: 6601 - DNA, 402 bp, Glycine max
  unsure (1)..(402): unsure at all n locations
tctcgacactaatatcaatctgcatacaaattttttcttatctcgagagaactttggatccaaacttcaacagagctcattgttcctccataattatgaacactgataaaaataaagcataataacttacaagtttggagtttgttatataagcatatgaaaaaaaataaaatagactntatatgtcaaccttttcatttcatttcatagttgaggaggcaagggaagcagaaagtgatttattagaattttagaatagtagtcacacacatatatattttaaataggaaaaacacgctcgaattcaaatcctcctctattctatttatactcgcccatccttctcacatcttcttcactcccacgcagtaataattacctagtttcttaatttatcactcc

SEQ ID NO: 6602 - DNA, 417 bp, Glycine max
  unsure (1)..(417): unsure at all n locations
agctnttgtcactccacccttatttttcttcaagttgaccaaagctaacacccctgacaaccttgtgaaacttgtgcaccccgaatacaatggtgtctttgaatcactttctattttgtcatacaaaggtgcatgtgcatgctcaaaatagtcttgtccaagattgcgaattatgtcttcaatacaatctccgatgcattcatcaatcggctcagtgcaagaaatagttggcatgtctggcaattccctatgccatatccattttgtgtaattcagaatgatgtcgtgacatataagatgtgatataatttcatttactgactggcgtctcccattcacacatttaacacatggacaaaaacaatttcccccaaactttcagcattacattctgtaaattgtaggaattgttcaacc

SEQ ID NO: 6603 - DNA, 390 bp, Glycine max
  unsure (1)..(390): unsure at all n locations
ngatgtgagaaagtgtggaagagttagtctttctacttttgtttgttgaccacataatggtacctggagatatgttgcggggatcaggagaccttggggacatcgggaggggtgctattgccctaaaccaagcttggctaatcccgacccaacctaggcatagtcagtcagtgagaacctgtgacgtacctaaacaggcgagctcctggcagtcaaccaataaaagaacaaagtccacgaagcaagggggcttgtgtggcggctggccaactatttattttgggtgttatctgcaaatatgcctctggtaatcgattaccattcgtgggtaatcgattacagggtttaaaaatggagacaggatgttaagtagcttctggtaatcgatta

SEQ ID NO: 6604 - DNA, 405 bp, Glycine max
agcttgtacaacgttagtactttcataactatttaatcaactcaatgggtatcttagtggataatagatgggagtggaagtttcaatggaggagaaacctttttgaccatgaagttgatatggcagcagcttttatcgcagacattgctgagtttcaaattcaaccagcaagcagggaccttctgctatgggggcttgatactggtggaccatattccacaaaggcagcttatagcttcttgaaggatggtgacagccaggttactgaagatagtgacttcaagtcaatctggaatctcaaaattccacctagagcaagtgctttttcttggagattattcaagaactgaatccctaccaaggttaacttaaggaagagacatgtggagctgcctttctataact

SEQ ID NO: 6605 - DNA, 409 bp, Glycine max
tagatctgatggcgtcggtgttaatgcactttctcttatctatgacgtggtggaggcggcggcatgcggaggaggcaggtagtgctcacggttgaggatgacgggcatcactgacaatgaaactgaagagaggtgatgataagatatgaagggtgtaacataatactctgaaattatatcaatctaaaagtattattttatttgcattatacattagaaaatttactttttcaccctagactgggtctaagtatttcattctttattaggtttgcactatacatagtaatgtaaaatatatgtatatgtatgcatgttctttgcctgtgcatggattgccactcattgtgcatcattcatttgcatcttcatacactttattgggttctttatctgtgtaggatgctat

SEQ ID NO: 6606 - DNA, 434 bp, Glycine max
gggatccttaagtcacctgcggcatgcaagcttgactgagattctttttattttaatatgccagctaaaatatttttggtacctatagtttggcaattgccagctaaaaaatacacgctcacacaaattgaaacatctaccccctcccacataccaacccagttatgttaatcataattaactttaattatgatgattatcattataaatacataaatattataaaacagaggaaagcagcctggataccaggttcttctttgattcttgagaggtggttggcaattttagcctaacaaacaactcctggataaatgtactgtcatccttcaacaaagagacaatctaaaaataatagagtagacaacaataaggacatcattcactaaattaaatgatatgtctttattcctagttaatcaaatcttagatag

SEQ ID NO: 6607 - DNA, 398 bp, Glycine max
tgtttgatacattaacttgttttatagtagcttgtttttcataagttatttcaagtactttatgaaaaataaattaacttataagttattaacttttttttcttcttaatatcatcctcactaatttattttaaatttatttttacacttttattcaacttaaaaatcatttttcttattttaacattcttctatttattatttattttctagttattatgaaatttagaattctaccttttgtaattattttgtttaatgttaaactatttattttaataaattaataaattgttttttatttaaaacatttggtcactaaaaaaatttgatacaaaaaatcaaaactgtgaagaaaaaataatttttattttttggtttaaaataatattattaat

SEQ ID NO: 6608 - DNA, 412 bp, Glycine max
  unsure (1)..(412): unsure at all n locations
agcttcagcggtatatattagtctcttctgaaagacatcccaagcaccaaaaaagtaaataaataataataaacacaaaatttaatttaaatctagtgcttttaatctttttaatttaaattatgtacaattttagttctttaattattttttagtagatcatgtttgctattttaaaattaaaacagagttggtcttctaattaattttctttgacttacaactttcaaaaccttattttccattcaaataattgagaaattataatacatttaagatatgaaataatttttgaagttgaaagtcataaagttaataaaacgttaataaatcttcaaagatttaataaggtataacattaggatttgaccaaggaaaatgtttacaaataactattntatgtaacatttaa

SEQ ID NO: 6609 - DNA, 324 bp, Glycine max
tgtgccatgtctaatccttacccttcattatgagatttcactaacataaccaaccattgctagactagcaaccactggatttcaacaacctgccagtactcccattggactttcatcctaacctcaattagataagcaacaccactggatttcaacttgctagccactgttggacttataactgtaaaggggttctatggtttagactgcatagatacaaaatttcaccttacagagggcttacactcaggaagatacaaacttatacttccatactagatctattacatattacaagctccatacagaagtgagttactctta

SEQ ID NO: 6610 - DNA, 413 bp, Glycine max
  unsure (1)..(413): unsure at all n locations
agctntagcaaaatgttatatttcgttattctccaccaacagacacctgtaaccttcaacataaatatatatgactataatggtttatttcaatcagatacattttgctctaaggacttttccaccattaatgtattatttaatttaatacaaaacacaattaatgtataaaatttaatgatatattttaattaataaattcatataattaattttaattaatttcacattaatgttgggacatgtgtcaaaaaagaaaaagaaaatcatttaaaagattcaagcccccttttgttgtattaccaccaaaacatttgattattttttaaaatctctctgaatagactcactacgttcatataagaagtaaatgaaattatcaagaatgatgtacaaaanagggaaagagagat

SEQ ID NO: 6611 - DNA, 289 bp, Glycine max
taccagaagcgccaatcagcttacttttgttgctggttattatgcctgagctatcatgagtaaagatcgtttacccactcattaatacaactagcttattgctagcaaaatcgagtcatattcatagtcctgatgctttcaatgttaattcccttattgtggtaatgcttcttctgatgatgagatggcttttgatctgaggatgaatcttattcaccctgaaaaggatcctgcagtgcaagattgaccaaagttgaccagaaaaagctatctgtgtccatttttttac

SEQ ID NO: 6612 - DNA, 406 bp, Glycine max
  unsure (1)..(406): unsure at all n locations
agcaccgcagctgcagcttntggtctaaaaaaaagggttttctttttttattattttattcaagctcagccacatgtccttatttgattggagcaaaaagggcccactttctctttttgactgtgacccatactcagtcacaaaagtggggaaaaatctgacctttgaaacgctaaaatcctgcctcgttttgcgtgccatttctctgattccagtttctcgcgtttctctgcgtccgtcggggccagttttcgaaagcaagcaatatatgtatcaaaacgctcagaataaaaccccgagcgtggttcagaggttggtttcgtcaaattccaagttgcacgcaaaacgatgattttaaactaattaattaagaataacccataacctctcagttatggatttctct

SEQ ID NO: 6613 - DNA, 409 bp, Glycine max
  unsure (1)..(409): unsure at all n locations
tatggttaatctgccaaagttttccagagaggagtggtcttagtaagatttgcagagggtcagagaatggtttataacaacaaaaaagcagaaggctttggtaacggagtaaatcaagtgtagaaggaaaattcatacgcaagtgttgcgagaaagcagggtcaatttgaacagaataaaaacaggtgagcctataaatataagggagatgtgaataggaaaaagtctgttcatatggctttctctcctaagcaaaaagttctaaagagttagaaagggcctatgtgggtagagtaaccactaaccaaacagagggattcatattttactgggaagaagatgcaattggaaggcattatgatctctttgtcccatatgattgaagatctctanattttttaatgataaa

SEQ ID NO: 6614 - DNA, 379 bp, Glycine max
agctaccacattggaatgtacctgttatgatactagtgggatacctaggtgatttactgcccaacaggtcactatcaaataggggaagacacacactagctagaatgaattgaagtgtgcgtagtgaccagtttggcgccacatcattgtaacttgcctctagtgaagtttgggttgggtgcgcaacggagagctcgcatagtactgttcaatgaactcttttcaggacttcaatctgtccatctgattggggaggtaagtcgaacttatccgcaactttattccacttatatgaaacatcgtttgccagagcctgctaacaaataaaaggtctctatcttatacaagactctgacgcattccatgatactttcaaaca

SEQ ID NO: 6615 - DNA, 418 bp, Glycine max
tctattattgattgattctttacaattctttgcgtgttctttttctcctacttggaaccttcaacctttaacattattttctcctcctgcactatgtataaggaatgaaggagtaagtcatttaaaaattattcccataaaaatattccagtttaatgttaattatataagaataatataaatacacacgcacatatataattaagaaccaaaatatgaaaagaaattactattcagaaaacatatattaacattagataggaaaatcatatatctcaccatctcgttcaagaaagccaattttttttctaattgtaatagggatcctagctaacccatgaccataacttgattagttgattcatgtaaattttggaaacaattgattctaccagccaataaaaaaagaagagaaaat

SEQ ID NO: 6616 - DNA, 424 bp, Glycine max
agcttcttatccaaggctcatctgtgtgtgattctctttcttccaaggcttattccctagtggatggcgcctcctctctcctcttctcctttgtcttccgctgcatctccatggtggaaaatcaccattaaaggacctcattgaagctcaaagatccagcctccatagaagccccacaagcaagcttccatcaagtgtgtttcatatttcaataacaattgtggattatatggcacaacaaatcgattatcaagttcaataccatttttagcactgtacgcccatcatttcttctcctataaattggaaatccatcttggtcaacaattgttgatccatggaattttttagggaaatatctaatacacttcccattgaccatacacagtgatcttttatttgcaaacccacatggtccatgaat

SEQ ID NO: 6617 - DNA, 414 bp, Glycine max
ttattggcttaacttgagctttaactccttgtttgttccattgccaactatcttaacttctctcacctacctatctcttcaacacaataacctcttgggctctattcctaactcatggggtggtagcttgaaaaataacttctttcggttttgaaaaatgatcatagatcataacttgtcgagtggaagcattcctgcttctttgggtggcttgagtgaactcagagagatttatcttagtcataaccaatttagtggagttatcccaaatgaaataggaaacctttctagacttaaaactctagatttttctaacaacaccttgaatggaagcttgcatgccgctctctctaattttattcaataaatacagatagcaagtacaaaacaaacccatgctatactaccatatgt

SEQ ID NO: 6618 - DNA, 413 bp, Glycine max
  unsure (1)..(413): unsure at all n locations
ntgaagggaagagagagatcgatcacgagcacatatctatggtcttaaaagaagagttagcagcttgcttaaggtccaaaaggaacttgactcagcgtttgtgcgagacagagatcaacatgttggctatcatcaccaagtatcaataagaactaagtctagccacagcccacgagcatagggtggcaaacgagtatgcccaagtgtacgcggaaaaggaggctagaggaagggtgatcgactcgttacaccaagaggcaaccatgtggatggaccaatttgctcttaccttaaacgggagtcaagaacttccccgattgctagccaaggccaaagcaatggtggacacctactccgcccccgaggagatccacagacttctcgactattgtcagcatatgatagatttaatg

SEQ ID NO: 6619 - DNA, 368 bp, Glycine max
  unsure (1)..(368): unsure at all n locations
gatccttaagtcacctgcggctgcagctttagatgttttgtttgtgttgtaaaacttatgttggtcatgctagcagcgaaaatggttccatttggtccctggcaggttctgccatttgggcatggcaaagtgttaacagaaatagtggtcactatttgagttgtgatgtttgttggaacctggcgagggtatctctcangtaagcctctcaagcttgtaatgaagtccaacaccgcaggcgtgtcgttaaagtctggaaggttaggcaatgaaggagatgaaggaggagtgtaattaccactgtactttactctagcagtggttgttgtgttatcaaaggcgacaccaacaccactttgatatgccct

SEQ ID NO: 6620 - DNA, 410 bp, Glycine max
  unsure (1)..(410): unsure at all n locations
tcaggtgacactataaaactcagcttttcctcacctgcaganacttcatttatatgttattctngnanganaagaaaaacactcaagaaaaggaggctaaaaagaattcaaaaaacaaaattattatgggaaaaaagagggaaagcacaacttggtgaaaggaaagtagttaaactgaatcaacaaaataagatgataaaatcattcaaggatttcagaagtaacacttttcggatgtcaaatcaacagtacaaaactaaaaacaaataaaatcctatatttaacttcaacttctattacaataatcacattcatgcatccactcataaaaatctatagaagcaacactgttcttacctcttccaaatcttggaccatagaccaaactaaaaacaaataaaattcttttt

SEQ ID NO: 6621 - DNA, 404 bp, Glycine max
agcttatcatgaggtgagcttatttttgtaggggtgtgtgtagctaagctctagcttctcaaggaagttttctcaaagaagcttctcaaggaagttttctcaagaaagcttctcaaggaagctacctagtctataaatagaagcatgtgtaacacttgttgtaactttaatgaatgagagtcttgtgagacacaactcaaagttcaacttctctccctttttcttccttcaatttcgtgctcccccctctctctttctctccctctttcttttcctccattgaagcatcctctccaagcttcttatccaaggctcatcttggtggtgaagctccttcttccatggcttattccttagtggatggcgcctcctctcacctcttctcctttgtcttccgctgcatc

SEQ ID NO: 6622 - DNA, 416 bp, Glycine max
ctcagcttccaattaggacccactaccgagctttgatatctatcctgaaagaagtgtatcaacagcttttcatctttagaatgggcgcccatcttacggcagtacattttgagatggtttttgggacaagtcgtccctttatacttgtcgaagtccggcactttgaacttcgggggaataacaacatcgggtactaagcaaagatccgtcatgtctgcaaacggatagtccccaaatccttccacagccctcaatctttcctcaaggagatcgagcttcctcctttcttcagttgccgggggcggcccttccatggacaaaactattggcgaagctgcgatgttgggttgaggcaacgtgcctggtgccggcacttcggggatcgggggatagaactcgacatcccttcgagcata

SEQ ID NO: 6623 - DNA, 415 bp, Glycine max
agcttgcccagagaaggagttcacggttgaaatgcttaccacctcaaaagactggaaaaaggtctctaatgactcctctacggcttcgacataaggcatagaggatgggcagctcaccaagatgtcctcctcgcctgatacgataaccagatgcccttccactacgaatttcaacttttggtggagtgttgagggaacaactcctactgagtggatccacgggcgccccaacagacagctgtaggggggttaatatccattatttggaaagtaacttgacaggtgtgagggcctatctgtattgggagatcgatctctcccctaacctctcggcgggtgccgtcgaaggtgcgaaccaccattgaactcggctttaagtgggaagcgttgaatggtaatttctccaaagtgcttt

SEQ ID NO: 6624 - DNA, 411 bp, Glycine max
tgtaggattatggggtacccgtcatatgtggtatctatgtggctatcgggcgatggtgcaagtcgactctccacatccacaaatcacacataaatccaccatcccaagttgcccaccttcaactgagctcacgtagtcccacgtagcccttatcctgattcctctcaacaccgggtccccatcaatccctccaagcttccataacatccaagcaattcaacatccaaacatcatgaattatcagaaccaagaaaacagggcagaggcagaaaactctgcccaaaacacaaaccaataccacagctttccttactcaaataccccaataacattctctttgttccaattcgttcaccgttggatcgactcgaaaattttactggaggtccctagtacataagtctacatttt

SEQ ID NO: 6625 - DNA, 417 bp, Glycine max
  unsure (1)..(417): unsure at all n locations
agctntgagggtgcgcagcttatcattttttcatagtggagtaccgataatgtgtctaccatcacgattatcgtctccctttccattattgggggtaccacctgngccgccagatccctccaccttttgggcatgtttttgaaagatccgtccccctttttgcacatgttctgtagttgcatcctattcagaaccatatcaaaattgtactgatactgcctaacaaaggcaaccattangtccttccaagaatggactcaggaaggttccaagttagtgtaccaggtaacagctaccccagtaagactttcttggaaggaatgtatcagcaattcctcatcttttgcgtattcccccatcttctaacaatacacctttagatggttcttgagacaagtagtccccttgtacttgtca

SEQ ID NO: 6626 - DNA, 412 bp, Glycine max
  unsure (1)..(412): unsure at all n locations
tgtaggattatggggtacccatcacatgttgttctatgtggcggtcgggcgatggtgcacaacaagttttccacatccacaatgcgcgcataaacccaccatcccctgttgcccacctccaactgagctcacgtactcccacgtagcccatatcctcgtttctctcaacaccgggtccccatcaatcctcccaagcttccacaacatccaagcaaaacaacattcacacagcacaagctatcacagccaagcaaaacaaagcaaaggcagaaaactctgccaaaacaccaaccaaaaatcacagcttttcccactcaaagaccccagtaacaattccttcgatccaatttgttaaccgttggatcgactccaaaattntactggaagtctatagtgcataagcctacatttt

SEQ ID NO: 6627 - DNA, 419 bp, Glycine max
agcttctaaacttaatacaagaatgttgctctgataccacttgttggacaagtggcctcagatatcttaagaagggggggttgaattaagatattacaacttatttccccaattaaaaattctatttaaccttctattcaagttataaattcccttaataatgaatttcttaaatattgattcaaaaagaacaatttgaatatgaatataaaacaataataaataaaggaatttaagggaagagaaaatgcaaactcagatttatactggttcggccacacccttgtgcctacgtccagtccccaagcaacccgcttgagagttccactatcttgtaaattccttttacaagttctaaacacacaaggacaacccttcctttgtgtttagaattctttcacaacaagagaccctcggtc

SEQ ID NO: 6628 - DNA, 527 bp, Glycine max
  unsure (1)..(527): unsure at all n locations
acaccgcaacaccgcagaacccataaattttcacaccaatctctcttctaattctntaaagantataacaagacagtacggagannnctgactcgatcgctcgaatgccgtgaccaatagaaactcagcatgcagagaacggagagacgaacacgattgcgctctgtacagaacacnangcgagaggccacaagaccaaaacgaacaagacgaacggaaacgacgcgacaaagaccgacgagggggaaatgataacacacacccacggagagccaggcccgagaccagacgcctagcaggggcggaccaacaacgacgagagggcgcaagcggaacgggaggcaacaggaaggcagagcaaccgagcacacgcacaggcaacgagggaagggggccaagtctctccaacgcaacaagggagagaagagctcggcccgaggcaagacccggccaaaacaagtgggaccactacccgggcccgggagaacccaaaaaaccgacggggacagaacacaagacaaacggcg

SEQ ID NO: 6629 - DNA, 284 bp, Glycine max
  unsure (1)..(284): unsure at all n locations
gagcttaccagaagtttctatctgtggactgtgnagcgggagaagaagcctgagctatcatgagtaaagagcgtttacccactacattaatacaactagcttattgatagcataataaagacatattcatagacccgatgctagggacgttaattaacatatcgcgggaaagctccttctgaggatgagatggcttttgagctgaggatgaatctttatcacactgaaaaggagactgcatggcaacattgaccaaaaacgaccaaaaaaagtggtgtgtgaca

SEQ ID NO: 6630 - DNA, 314 bp, Glycine max
tgcaggagtatggggtacccttcactcgtggtactatgtggcggtcgggcgatggtgcacaacaaaatattcacatgcacaaatcgcgcataaacccaccatcccctgtggcccacctacaactgaactcacgtactcccacgtaacccatatacgagattgtctgaacaccgggtgcccatcataacttccaagcttccccaacatgcaaggtattcaacattcaaacaacacaaactatcacaggcatgacaacaaggcaaaggcaaaaaactctgcccaagacaccaaccaaaatcacatgctgttctcac

SEQ ID NO: 6631 - DNA, 411 bp, Glycine max
  unsure (1)..(411): unsure at all n locations
agcttgctgacttactgttttggagctttcatttgctagctgctggattctgtctctttttggttgacagattcttacaagtaaatgagtgtgtggttaaaaaaaattcttttacaatacaagagaggaaagtatcatgatgcaattgatttggcctaaaatattcagagacataacttcattgaagatggctccctagtaaaaagagaaacgaaaacagtggtatcacaattgcctggtgtcccagttacgagttgttgcttgtttgaagaattatggatagatttgcataccttggcaagttgacctagtatgagcatagtctgggtttatagagttaatcttgtgagtggttntagtgtcaatataaatccagggtattctgtatccgtttccttagttcctgtatat

SEQ ID NO: 6632 - DNA, 382 bp, Glycine max
tgtataatattaattaatgtttcatgtcacgactaattggaaatatgtgtaaagttaacaaagatgaaaatttagcagtatttctgttgaagttgttattttttactacggtaaatgcctttagaatcttttccatcaaatgttgaggatgatagtcatctttaagttaccaagttttataaaatgtatcttaggattaaacatttagatgcacacaccctgctgcaatggttgcatgttaaaatagaggcttaagaatgagaacagataaggtataggcaagtttttggaatttttttggttcgggagagagtaagacatctaaaaattgtggtgctatgcttgttttctggttgggtatctctaaatttcttattcataa

SEQ ID NO: 6633 - DNA, 412 bp, Glycine max
agcttattttataaaataaaattaattattgtggattacatagattatggtgcacaaaataaatgagaagtgaatatattttacaatatttaagctttctgtaattaaacgtggccttaattttcaccatacattttggctgtttttttacatgaaagaaaaatttgaatcaaagttgtatgaagaagggttatggcctcttagaacttttactttatcatagattcatagtaataatgcatttggtttattaggctaactcaaatctctaacaaatggccatgcattgaaactgtaggctgatgttgataacagtgggacaattgattacggcgagttccttgctgcaacattgcaccgcaacaaaattgaaagagaagataatctatttgcagccttttcttactttgat

SEQ ID NO: 6634 - DNA, 328 bp, Glycine max
  unsure (1)..(328): unsure at all n locations
tattntagaagcaagcatgttctcttattccaaggtgctcagaaaggttgtctcagaacatttgtcatgaatgaagaacctaaaagattccgtcaagcccatttgtatgataaataatgtttccttctaagtacttgtttatgccaatgaacaagacctctaggccttaaaaagaagatttatcagaggctataaacagagcatccaacattagaatgaagttgtatcagagtctacattagaatgatgaagaacctgactctgatgtctgaactttagaatggttcagaatgcacctcagaagacaacatctcactttccatatgat

SEQ ID NO: 6635 - DNA, 442 bp, Glycine max
agcttaaggctattacttgacctttatgcataaacactcctccatggttatcaaactctcgagttaactcgctaactcttacgagtttacaaattcaattgtcctctgcgagtcgactcttgagtaaactctttttttagtagactctaggcaaactctataaactctgagtaaactcgttaaactctcgagtttaccaccaagtcaatgagttagcaagttaaaaaaattagaccaaaatgtaagtcattttttattgttttctttctgtatagtattcagcataccttcatttagtgtaatattctcaaatacaaaattctcacctttaataatattaaacctttattctctaataacaacaaactctcgatgagaatgatctaccactactataatctctgcagttattatctagtagtgatatattattactagactt

SEQ ID NO: 6636 - DNA, 432 bp, Glycine max
  unsure (1)..(432): unsure at all n locations
tactcaagctttgcatcatatcgttcgctggncttgcctttctttgctgttatgcttgttgcctattcgagctattaaatcttggatggctggacatgaatgcttcgatggacctttcttctttgcgtatggaagcatgaagtagccggacacttcttactttagaagatggaagataccacgagtgctacccgatttattaagaatgctacttcctatcttattatgaattacacttgttatgtattctgaatcatgctacttactttgtacttttttgggattttaagaatatctgaactctgttgctatcgtcatcattgaactatgaactcacgttgtcaacttataattggctttacatctacattctatatgatttagctcctctagcgatatatttaaaagcggactattgatttaaagcgttct

SEQ ID NO: 6637 - DNA, 441 bp, Glycine max
agcttactcagggccatttcctgcgaaggcaaacatttggaaagttagttttaccaagaaatgctactcttaaaacaaaaatggcatacaacctcctccaataaacacaaacatcaatgtaaatttagagcgaactcatgaacatacttccttacgaacattcactcgcacaagatattcttctaactaagaaaaatgcacccatgcacaatcaaggcaccttcgttacctagatcacttatatgtacttccaaggcgtatttgctacctacatcacatgcatttcctttgctaaatttacatacatgcatactcaaagcactctgtctatcaaaaattgcatacgtgcacattctggtatttctaatacctatacatacacaaacttcatgatgaatctatgctacctacacaataaggtgctacatttcatgctttatt

SEQ ID NO: 6638 - DNA, 447 bp, Glycine max
cgtggcagataatgctgaggtggattccttgcatctcagatggctgccaagcgaacaggtctacattcttgccaataaaagcaaagtaagaggtatttgcatcgataattaaatacccgattgtaaagttcctcgagagctggccttgaccaaaggtgctcattaggtcgacatagcctttagtttctagtctttttcctgcgaagccaaggagtgaaccgacgtgaggctggatggtgtcaagagagatttcaagcctttggaatgttttccaatataagatgttagtggagctaccctggtcgatgaagaccttacacactatgaagttggtgattatgatggagataaccatggggtcgccttggttgatagggttgattcccttgaagtctctgtcagtgaaagtgattggaggaagacttcatggtgatggtgtgtcaacat

SEQ ID NO: 6639 - DNA, 435 bp, Glycine max
agcttgaacgaatgtaagacacatcttcttcaaccttggtgattcttgactccatctcattgaagcacatgcccacttgtaattccaaagtgtcaaacctttcaccaacaaaggtttgaagaccatcaaacctatccaaaatctttgaaagaagagatgaatcttctccatcatgtccttcttcaccaacatgtcgagcatcctttttaacccaagagccatcatgctctttttgataaccaaaggatgctatgactgaagcacctataaggaaggatctcttgattggaacatatggttcataatcaagagggatgttaaagtgttgaaggaaaagggttactagatgaggataaggcaatgaagcattcaatcgcaattccatatgcatgcgatatctaacaagatatacctaatccattcgtagacctttat

SEQ ID NO: 6640 - DNA, 451 bp, Glycine max
gggcttctatggaggctggatctttgagcttgtatgaggtcctttaatggtgattatccaccatggagatgcaacggaagacaaaggagaagaggtgagaggaggcgtcatccactatggaataagccatggaagaaggagcttcaccaccaatatgagccttggataataagcttggagaggatgcttcaatgtacgaaaagaaagagggagacaaagagagaggggggagcaccaaattgaaggaagaaaaatggagagaacttgaactttgagttttgtatcacaagactctcattcatcaaagttacaacaagtgttacacatgcttctatctatagactacgtagcttccttataagttctcttaagaaaccttcttgagaagcttctttgagaaactttcttgagaagctagagcttaggtacacacacctgtagatgcacttgc

SEQ ID NO: 6641 - DNA, 441 bp, Glycine max
agcttaaaggatgtgagatcttgaaggaactacctcctgagattgtaaaactctataatgagatagaaaccttgaggggtaacctatgcaaatttattggtggtcatgaagcctttaacaaaattattaaggtgcaaagaaaccccaaagacaaatatggccatggtttcaaaggtaaaaaggttattcatggtgaagaagttattatttattatttttgtggaaaggtgggtcatgaaactcatgagtgcaaggatctccctggaaaggaaaacccatcataagggttctttagttcttaccagcacccccaagctaacaaagaaaaaggacctaaaaagatttgggtacctaagagtaaaataatttctgttgtagatctccttgataacatgaaagaaacatcggtcatggtacttggatagtggctactcatgacac

SEQ ID NO: 6642 - DNA, 447 bp, Glycine max
  unsure (1)..(447): unsure at all n locations
ntgagccaaaatcctgactcaccataaaccttgacccagggtgagaatgccaatccttaccttcgaaagcaaaaaaggaaatgaaggaaaattccccaatcaaagaatgggagaaagcaaaaaaaaggaaaagaaggaaaattccccaatcaaagagtgggagaaagcaaaaagaaaagaaaggaaaattcccaatcaaagaatgggagatagtaaaaaaggaagaataagaaggaaagaaagctcctgatcaaggatcgaaagaaaccagaagaaatgtgcacagaggtctttggaccagacaatatctgaacagtacagaattgtcaccaaatgaacaaaaaggaaggaaaggataccacgacctacaatggtcttctccctttaattaccaaccaaaatcccgtgcgctagcgacctatttttcctcgccccgcactaaacaaa

SEQ ID NO: 6643 - DNA, 422 bp, Glycine max
  unsure (1)..(422): unsure at all n locations
agcttagcttctataatctccccctttntgatgatgacaaaacctggaatcaagaaagcatatacaatttctattgttcgttcattcattccaagctccccctttgttttggagattatgcctaatttttctgaaatctgaaactttatctttcttgatttctctaaaccctgtttctctccccctttggcaatatcaaaatgccaaagtgcccagaagaacaaatataatttatctaggaagagaacacaaaaccaatcataatatcagagcaatcaacattcatacagaattcaatcatagtgtatttaatcagagcaaaatatccaaccaaacaaaaacaatccaaaaccataaatataccaagtcagaggtcttaaacatagccaaaatgcacggcgtaaaaattataactaagaaaa

SEQ ID NO: 6644 - DNA, 422 bp, Glycine max
  unsure (1)..(422): unsure at all n locations
tcgaagagaagagagagaccgatcacgagcacatagcatggttgtaaaagaagagttagccatttgctcaaggtccaaaagagacttgtctcagcgtttatgcgagacagagaccgacatgttggctatcatcaccaagtaccaagaagagcaaaggctagccacgggccacgagcatagggtggcggacgagtatgcccaagtgtacgtggaaaacgaggctacaggaagggggatcgactcggtacaccaagaggcaaccatgtggatcaaccgatttgctcttaccttgaacgggagtcaataactttctcgattgctagccaaggcccaagcaatggcggacacctacttcgnccctgaggaggatcacggacttttcgactattgtcagcatatgagacatataatggcccatataa

SEQ ID NO: 6645 - DNA, 422 bp, Glycine max
  unsure (1)..(422): unsure at all n locations
agctntatactgataatttaatttttaccgaataaagtttgttctaataacataatctactattaattgttagtacgtaatttaatatatatatatatatatatatatatatatatatatatatatattatgagtatttttttataaaatatttttgtgcgagggtatatatcgttcttgataaaagcgaaggatttaagagaattagagaaacgcagggaggttgacgtgaatcaactgatatgaagaagaccaataatttgcaaattagcatggttcgcactaagacttgctttaaattntataatcaatctaaactgttacttgtctgtcgtcaaaataaagtttcaactaacataacaatattgtatntagatttctttaaaaggaagaattattgtttacttttttttcaaagatac

SEQ ID NO: 6646 - DNA, 434 bp, Glycine max
  unsure (1)..(434): unsure at all n locations
tggtctgaatntggtgtaggttaaggtatatgtccatgtctatgaatgacataattggtttagtttgatgggctaactcaaaaatgatgggacaagttaggtagttcaacttggaaaggtgggatgggtttgcttttgtgcgggccactatgatttttttaaaaaatttatgtgaatgctattaggtgtttaagcttaagtttgctactatgtatattttaaaagtttttattgttttccaaaaatataaatacatatatattattattgttagcttattttataaactcaattcctttggtactaagaaaaatttaggttcaaatcaagtagggagataggccaaaatggactagccaggcttgcttttccacctcaacaattatataaaaaagtgggtcctttcctttatttccctccattccgaagatgga

SEQ ID NO: 6647 - DNA, 441 bp, Glycine max
agcttcctcggggccattcctgcgaaggcaaacatttggaaagttagtttttaccaagaaatgctacccttaaaacaaaaatggcatacaaccccctccaataaatacaaacatcaatgtaaatttagagcaagcttatgcgcacacttctttacgaacgttcacttgcacaagacattcttataactaagaaaaatgcacccatatacaatcaaggcaccttcgttacctagattattcacatgtacttccaaggtgtatttgttacctacatcacacacatttcctttgctaaattcacatacatgcatactctaagcactttggctatcaaaaattgcatacgtgcacatcttggtatttctcatacctatacatacacaaacttcatgatgaatcttgactatctacacaataaggtgctacatttcatgctttttt

SEQ ID NO: 6648 - DNA, 440 bp, Glycine max
tcaacctagaggagacggaccattccaagtgttggagaagatcaacgacaatgcctacaagattgacttgcctagtgagtataatgtaagtgccactttcaatgtgtctgatctatctctttttgatgcagatggaggagccttggatttgaggacaaatccttttcaagaaggagggagtgatgaggacataaccaaggaccatgaagcacttgaaggtcccatgaccagaggcagacttaaacaagcccaacacgtcatagagacaaggctggtcatttgtatagctgccattgatgatgattgaaggcccaagtgcataaagatgaaggcccagaggcagaggcactaccaagactactaattgttgctgaaggcccaaactaacttgaaggaccaagttaaatagagtcttagttataatttatctttattgtaat

SEQ ID NO: 6649 - DNA, 422 bp, Glycine max
agcttctatataagctgaaccattttatcaataaacacaagttgagttttattcagaaaattagagtttatctcttttatcttagtgagagtgattctcctaaattcttgagtgattcaagaacaccctggctgtatcaaaggactattacaacctttgtgtgttgccctcactggaaagagtgattctttccttcctatcatctccacccttgttctttcaaaccacaattccagaaaatccacctctgcccaaaattatctcgtgaccaaaactctcatttcacacactcaaattaagtgattcttgagcctaaattgaatttcaaaacgagacctttcacctctgtttggaatcacctcatttggagccctgtagcttccgttattgcatttctatattctgcccaccccactaaccta

SEQ ID NO: 6650 - DNA, 442 bp, Glycine max
tctatataagctgaatcattgtatcaataaacacatgttgattcttattcagaaaattagagcttatctcttttatcttagcgagagtgattctcctaaattcttgagtgattcaagaacaccctggctgtgtcaaaggactttcacaacctttgtgtgttgccctcgctggaaagagtgattctctccttcctttcatcttcacccttgtgctttcaaaccacaactccagaatatccacctctgcccagaattatcttgtggccataactcccattttacgctctcaaattaagcgattcttatgcctaaattgaatttctaaacgagacctttcatctgcttttggacttccctcatttggagccctatagcttcacttattgccacttccatatttctgtccagccaccacttaccctacgtattatcatcccattca

SEQ ID NO: 6651 - DNA, 436 bp, Glycine max
agcttctagaaataagataaaaagaactaattttgataagcttttaggtggagcatattaaaataaactaagttcatagaaaggtaataagacaccttcataagcccaaatgagatcttctaaacaccctctttatccatataactctcaaagtattacttaacaaaatttcaatgaatccttcaaatatgggaactgtcatttcaatcaaagaaaccaacaaagtccaccataaaaaagctgtcttcactctttagactgttttacaaattcactagaaaatattttaggaagaagatatcatcaaatgatgtaaagcgtgctagttaactatgcaatgacacaagccgtccaaatgcacccattttaagatcttagtgatcaatgtgtgacaaagatattaacctttaaagaccaggaagagagagagtgaaat

SEQ ID NO: 6652 - DNA, 457 bp, Glycine max
  unsure (1)..(457): unsure at all n locations
cttgatgcaacacttggagatagtgtttntccatgttgagactggacggtccatcactaggcgatccaaccttgattttgatgattacaagatataaattattgatgaactaatggatgattcttaagtgaacaagacttaccacatatgagcacacttggtattactttatatcctacaagctcttattagtacgcatccaatgagaagtggaacttatttgtattaaagatctatatcaatgtccgacgcgctattagttaataggtgtccattctttgtgaaaaacagtgttcatacactatgttgttttcttcgtgtccaatggactcaatcacttacacgtattattttatactaagtataagcgacgtccaacattgtactgaaattcatgttagccaaacagggaagtgcataaacttatctctcgtgatatcattattgcctttcttat

SEQ ID NO: 6653 - DNA, 436 bp, Glycine max
  unsure (1)..(436): unsure at all n locations
agctntgcttaatatgtattatatctggatcattttatttatatgaaccctaattttattttggagagaaactattttgatcaataaaattgtaaaacccctaaatttatgtgttatggtcataaagtttttctcctctttagaattaataaaaggcctctacacttgatttacggttgtataattttttttttgttgcatttgctggcatattattctatttggaataaaggttttacgtatttggtgttggcatttagtacgtgacacaatttcataaatatatatattttttgtttatatgaataagtaataagacaatggtcttttgtcttatatgaataaatttttttttgccaactggttttttttatgaaatggtgataagctgataatttatgttattcatgtggttggtataaatttgtgatagtat

SEQ ID NO: 6654 - DNA, 426 bp, Glycine max
  unsure (1)..(426): unsure at all n locations
ntagtgactgtgtgtgaccataaattatatattgagtgtccgcatggatatgttctacgattggttttgcatgaatatgtaattgtcataacatatgattcatagaagtgatttgggcattctttctttctttacatttttaagccattggccaaacagctgtcccaatgtacattatttttttcatttggaagccctttgagccagaaacttgatttttatcggaacactaacctgngatgaaagtttcctaccttaccttaggataggagagcaagggtgttttcaatagagatttctatcatttaatggctagttgtgggtcttgaaggaagttagatatttatcacgaaagaatagaagacaaagaataggataaaaaatcataattgggaaagagcacacagagaaaagatcaaaagagaa

SEQ ID NO: 6655 - DNA, 371 bp, Glycine max
agctttggctgcgcacgagctccgatttcgtgagtatttatagaagatgacgcattgtaatcgattacaggtattggtaatcgattacaggcccaataagccttctggtaatcgattacaggatgttgtaatcgattacacgctgcctgttcatgtgtaatcaattacactgattggtaatcgattaccagagcctatcctaggctagtttctaagagaatatctatatttatgctcaaatacatcctatatgtctaattttcactactaatacactaaattcaatcattcaattactatatacacaagaaatcataaattctatcataaaaacaagaattcaacaagatcaaccaatataatctacaatc

SEQ ID NO: 6656 - DNA, 428 bp, Glycine max
  unsure (1)..(428): unsure at all n locations
tggatgatgttgcgtgtactgatgtgtaccataagaggtctgcggnggcttgacctatgcgggtgccgaagtgacggcatgggtatctccctccttcctttttgccgagttgctccgactcttttagcatgggtacttgtggaggaaaggtaatcgaacttccctcttttcaaccctacttcaattctttccccggcgaataccaagtccgcgaagctggaaggcatgtagcctactaacttctcatagtaaaacactggcaaggtgtctaccatcatggtgatcatctccctttcaaccatgggaggggccacttgtgccgccaggtctctccaccgctgtgcgtattctttaaaggtctcaccttccttttcaaacatattttgtagctgagtgcgatcgggagccatatcggaattatactgata

SEQ ID NO: 6657 - DNA, 417 bp, Glycine max
agcttcctatagggaactagtacatgttcctgttctcctattatccctcaactaaaaacttattataatgagatttgctattgtgcaactaaagacaagtttatggcactgatggcatgataactcaaagcttcttcaaccataacacaagacaagacactctagttttcttgaattcaggatttgaatattacaaataaaaacaatataaccatttccctggtatactaaagtaagtactacaagatgcaaatcagcattctggaacccaaataataccaaaagtgcaataagagaaaattaaaacagaatatatgtaaataagtacgctaaagctatcggttcccagctattggttccctttgggactgaccttaatctgatgttggaaccatgtggctggtagtctaactactt

SEQ ID NO: 6658 - DNA, 442 bp, Glycine max
  unsure (1)..(442): unsure at all n locations
tggaggagcttgctgcccagttgcttcctccttaagcaacccaacttctaaaatgttccggaagggcctagactcaaattgctatttacacccttatcttgataagttcacccccctcatttttgtgtttttggctgttttctttccgaaatctcatgaaactttacggattccataacgacatccattttctttccgaaatgttgcgaaactttacgtattaagcaacaatgctctttttgacttccgaaatgttgcggaactttacggattgcgcaacaatgcttctttgtgacttccggaatgttgcagaactttacggattgtgcaacaatgcttctttnttacttccggaatgtcgtggaactttacgaattacctaatgatgggtgttaagtacctcgaggcggtgaagcgaaggttgcatgccacgtacaatggt

SEQ ID NO: 6659 - DNA, 414 bp, Glycine max
agcttgcctttcagaaccaagaaacaataacctggaaacacaatcatgttttctaggtcaaattgtagatatcaatagttgtatatgatcaaaggcatgatgctagtgatagtttaagtcaaggggtagatataaaaaattacacatgacttaaggatcatcaaaagatgaaatgttgtgacaacaagtgaagatagacgtgtctacaaagttgagaagcacacactaggagttgtaaatatctacgtcatgtagttgtaaatatattcaaaaggaaagaaagctaagccctacattagcaaggcaaccatgaagaagaaaagtagtccttcacaatctgcaacaatcaagaaaagatcaacaccattctgcagaagacttcctattctaaacaagtagcatgccttatgactg

SEQ ID NO: 6660 - DNA, 460 bp, Glycine max
  unsure (1)..(460): unsure at all n locations
tgcctgggcgagctcnccctgcactagatggctttttctataaatagccatgcaggggaagaggaaaaagatataccagcagcctaaaatcagtagaaaaacgtagaagaataagaagaagaggaaaagtggagtcgaggcgctgcagagttgtgaccgtggatcacttcctttatcatttctcttgttagtcttgtgctctacacaatgatcagttagtttttctaaaggattggatgtaatctttgtacccttatgtatctttttttatattatatatgtattaatcttttctactcattgttgataatttcattctactcttaatgcatgattctagttgatcactagtgtcataaaattggattttaagtgagactggaaagtattcttaanatttgaattggatgattntactctctatgttacgttgctaggaatagagcataacattttgatt

SEQ ID NO: 6661 - DNA, 363 bp, Glycine max
agcttagctcgctaattgagaatgcacttttggtgctaagcacgactttttgcgttaagtgcaaacccctctcgagttgggatttgccctaatctcgacaattcgcgcacagcacaattccctatcggattggaattgtgtttagggcgcttctcatgctaagtgagatgtcaaaaattgttattttgaatatcccaacaatcaaaacatgaagcatgggttatgaacctatagtcaaaatttaaaggtgatccaacggttaatgaatcgaggatcacggttttaccggaacaagtttaggtaaaatttgaaatctcataatttcaacctgatacaatcctaacccctaagggcgttggatag

SEQ ID NO: 6662 - DNA, 479 bp, Glycine max
  unsure (1)..(479): unsure at all n locations
taggaccttgaaactaagcttgaccctaaataagacccagaggaataccgaanaagtagtaacaagcaatattcacgtaagcaaccacagcctgccaccctgcgccaacagcaacacctgagagaacgggttgcacgttgttgatgacaatgcaaagggccaacatgggcgtgagctctaccacaatctttctcacttctgaatcatttgaaaacaagaaagggtactggttccggaagattatcagcaccatcgagagcatgacaccgatcagagttgaagtaatcacagcaacaagaagtgaaaactttgctgttcttgggtgacatgctcctagttcatttgacaccctcacactgcaaatgtaattnttggtcactgactgatttangtaaatcattcacagtttaatggttatgcacaataacgtacaacagtctatactattgttaactaataataaatcattgataatataa

SEQ ID NO: 6663 - DNA, 431 bp, Glycine max
  unsure (1)..(431): unsure at all n locations
agcttattctctattggacataagataatatatatttttgtattcctttttttttggtcctgcataagctctggctttgttattatttattcatacatatgttggttttgttgactatgaatgttgtattatgtgtggcaccactttttgtttctctattaagttttaaccttttccataccgttggtgattattggatatgactacaatttagtataaaggctaaaagagtgactcaactagacatgtaggtagtagcattgtgtaaattaaaaacttggtgtgtgtttgaattagtttatttttgtatctggaaatgctgtcagtcaaactgcttgagaacttctaccgaaaagctatnttatgaaaaaaatatagcatagccaaagaatgttctactaatttgttgcatcctgaaatctataattaac

SEQ ID NO: 6664 - DNA, 443 bp, Glycine max
tatccataaactacaccagtgctagtaaaataccactgtggctaataaaatgtacaatttaaaaataaaaaatgcttaaaaagtggagtttttgtccacaaacagtcaccagaggcaaagcaattgcaaagattcattaaatatgtacattaccttctattggaggtatattgaccctttcctttagtaataaaaactcgaacacaacgtcccaaatatactttattattcaattcaagaacttgtgattatagtagaaaattgattttcaggttcaagtcatagctgtcaacagcggtcgtagcggccactatagcgacggagcatagcgacacccatccgtgacggacacgtgtgtagtggcacggtttcgggtcgcggttggagcggccgctatcgcggcggagaggcgcgggttgcggagcagttttttgatcgctact

SEQ ID NO: 6665 - DNA, 419 bp, Glycine max
agctttacattactcctcatgcttctcaccatgtctaataatgttcgatttcttcgttctgccacaccattctgatccggagaaccaggcatagtgtattgggcaacaatcccatgttcttgaagaaatttcgcaaatgaacctggtgcttgtccatcctctgtgtatctaccatagtactccccacctctatctgatctcacgatcttaatttgtgttccacattgtttctcaacttcagccttaaaaactttaaaggcatctaaagcttcattcttagaatgaagtaagtatagatacatatatcatgaataatcatctataaaggttatgaagtatttcggactattagcatccatgtctggacaacatatgttggtatgtatgagttctaataaaatagaacttctctttgcacc

SEQ ID NO: 6666 - DNA, 465 bp, Glycine max
  unsure (1)..(465): unsure at all n locations
ntagtcaaacagaataatctgaaaatgtcaaagaattgggtgttgaaaaagcataacaagactttctgtgattggtttaaagatacaatctttgcagatgagaatgcttcaaaaacaataagaaagctaggagatgggcctaaaataaatgttataacctggcaaggatacgacataaacaggtattcattttacgcaaaagcacaagatgacaaaagtacaatgcagaacagcggggtcaccctaagggctgaatctcaacactttgcaagtgtcaatgacgccaatccctgtgtagcttccatcccttactttgggttcattgatgaaatttgggagcttaactatgtgaaatttacggtatgtgttttcaaatttaaatgggttgacagcaacaccggtgtgcgcaccgatgatataggatttacgctgatagacctaaagaaactcgcgtaccacaatgac

SEQ ID NO: 6667 - DNA, 428 bp, Glycine max
agcttcttagtcttacctgatgaattcatggctacttcttgcactcctctaatggcaatagcatcacttctggcactaaattgctgggagtttgaagccatcttctcaattaaatttctggcttcagcaggggtcatgtctccaagggctccaccactggcagcatctatcatacttctctccatgttgctgagtccttcatataaatattggagaagaagctgctctgaaatctggtggtgagggaaactagcacataattttttaaatctctcccagtattcatataggctctctccactgagttgtctaatacctgaagtatcctttctgatggtcgtggtcttggaagcacggaaatcttttttctaagaatactctcttgaggtcatcccagctcgtgatggaccttggagagaggtaatata

SEQ ID NO: 6668 - DNA, 375 bp, Glycine max
aactgacaacactcttgtgacaattccttcaactttcgatccttatacaactatagtgatatctctcgaggtggggatttttactttcatctatagaaatatagagaatctttaatgcatttcaaaatataaattaaagcatgtcattactgctaaaaaaatgatcgcgttacattagtcaaatgtctgaggcatactaatccacacacaggactataatctaaaaatatatgcttctagcactcactttttcccatgtagaacacaccaggacacccactcataaaacgtgttgcatacttacatgagctttgtagaaagcaacaatcgggtagtttgaatatctgagcggcacacatttagactacatgcagg

SEQ ID NO: 6669 - DNA, 424 bp, Glycine max
agctttgatcaaatgactaaaattaattggcaacacagatatgtatcatatggccaaaccaacatcactattcctagttagaaattccaatattctatattacctgctcattagctgtaggaggaaggcctccaacatacacccgcctagcatgtcatgtagcctgtaaattcagtacatcaaagataggccataatcagggaaagtcatgctaaacttaaaatgaaacttaaataatactgtagtcagtctcagcaagcctccatactcggaaagactaaacttaaaatgttgtgttgacgaagttagtgtgtttctactctttttctataatgactctttctcttctcaatgaaagagaatattttctcccagcagcacagtgatactaaacaaacaaaagcgcaataaaaagaaacacatg

SEQ ID NO: 6670 - DNA, 459 bp, Glycine max
tcctcggggccatttcctgcgaaggcaaacatttggagagttagttttaccaagaaatgctattcttaaaacgaaaatggcatacgacctcccccaataacacaaacatcaatgtaaatgtagagcgaactcatgcgcatacttacttgtgaacattcactcgcaccagatattcttctaactaagaaaaatgcacccaggcacaatcaaggcaccttcgttacctagatcacttatatgtacttccaaggtgtatttgctacctacatcacatgcacttcctttgctaaatttacatacatgcatactcaaagcattttggctaccaaaaattgcatacgtgcacattctggtatttctaatacctatacatatacaaactttgtgatgaatcttggctacctacacaataaggtgctacatttcatgctttattcaagagtttttgctacctaaagc

SEQ ID NO: 6671 - DNA, 398 bp, Glycine max
  unsure (1)..(398): unsure at all n locations
agctntgaaggtgcgtagcccaccattttccatagtagaatactggtaatgtgtctactatcattgtcatcgttttttcgtcattgaggtgccacttgagctgccaggttctccacctttgggcgtattctttgaaagatccgtgccccctttttttgcacatgttttgtagttgcatcctatccgaagtcattatacagacactgcctaacgaaggcaaccattatgtcctcccaggaatggactcgggaaggttccaagttagtataccaggtaacaactaccccagtaagactttcttggaaggaatgtatcaacaattcctcatcttttgtgtatgcccccatcttacgacaatacatctttagatggttcttggggcaagtaatccccttgta

SEQ ID NO: 6672 - DNA, 456 bp, Glycine max
tcctcggagccatttcctgcgaaggcaaacatttggaaagttagttttaccaagaaatgctactcttaaaacaaaaatggcatacaacctcctccaataaacacaaacatcaatgtaaatttagagcaaacttatgcacatacttctttacgaacgttcacttgcacaagacattcttataactaagaaaaatgcaccgatgcgcaatcaaggcacctttgttacctagatttatctatgtgtacttccaaggtgtatttgctacctacatcacatgcatttccttggctaaatttacatacatgtatactcaaagcatcttggctaccaaaaattgcacatgtgcacatttcggtatttctaatacttatgcatatacaaactttgtgatgaatcttggctatctacacaataaggtgctacatttcatgctttattcaagtggttttgctacct

SEQ ID NO: 6673 - DNA, 419 bp, Glycine max
agcttgctcgtcttgctgatatttatcatgcatacttttctgatgatgaccgaggaacaattagggatcaacttgaaacttatgtgcttcaagtgagaagaaatgcttctttttccacttgtgaagatgttcaaagtttggctatgaagatggttcaaactgagaaacatttggtatttccattggtttataaacttattgagctagctttgatattgccggtgtcgacagcatccgttgaaagagctttttcagcaatgaagattatcaagtctaaattgcgcaataagatcaacgatgtgtggttcaatgacttgatggtatgttacaccgagcgggagatattcaagtcacttgatgatatcgatattattcgaacattaaccgcaaagaagtctctgaacggacacttgtcttgt

SEQ ID NO: 6674 - DNA, 433 bp, Glycine max
tcgtttgccaactccctgtaaatattggctaggaaggtttgtttgctaaagaggcaatatgatcttaataaacatgttaatgaaccatatctatgcaatgtagtttgaagttccacggatggctaaagagggggagaattatattatctaaacatgcattttaaatcgtgtatattcgtcgggtgttaaccacagtcaccacaagtgacattatgtgctttcaatgtatttattcatgttataaatcttgtgggttgggtataccttgtaggcttgtactcaactacatcgtgtttaataaatctaatttataaaaaaaatgatcttaagaaacatcattaaggtataatccaggtaatagcatttctaataaaattttactttatctcaattgcattatatgggccctcggtggtgtggtcattcacaaaca

SEQ ID NO: 6675 - DNA, 435 bp, Glycine max
  unsure (1)..(435): unsure at all n locations
agcttcttcacatagtccgcctttgcttgatcttctttatgcttaaaaacagaaacattatgcttatgcaaaagatcaagaggagttagtgggttaaaaccataaacaacttcaaaaggagaacaattagtggtgctatgaacagctctattgtaagcaaactcaacatggggtaaacaagcttccctaagttttaagttcttcctcaaaactgtcctaagcaaagttcccaatgtcctattaacaactattttttgcccatcggtttatgggtgacaagtggttgaaaataaaaatttagtgttcaacttgccccacaaagtcctccaaaaatggcttatgaacttatagtccctatcactagcaatgctccttggcanaccatggagtctcataatcttctttgaaaacaaatcattcacatgggaagcatca

SEQ ID NO: 6676 - DNA, 450 bp, Glycine max
  unsure (1)..(450): unsure at all n locations
ctntattttcagtagatgaagatgaatccgtggccacctcatggactcctctaaggacaatagcatcatttcttgcactgaattgttgggagttagaagccatcttctgaatcaaattcctagcctcagtaggggtcatatcaccaagagctccaccactggcagcattaatcatactcctctccaggttgctaagtccctcatagaaatattgaaaaaggagttgctcaaaaatctggtggtgagggtagctcgcacacaatttcttgaatctttcctagtactcatacaagttttctccactaagttgcctaatgcctgaaatgtcttttctgatggcagtggtcctagatgcagggaagaatttctccaagaacaccctcttaaggtcatcccagctgaaaatagacctgcgagcaaggtagtatagccaatcttttgccactccct

SEQ ID NO: 6677 - DNA, 426 bp, Glycine max
  unsure (1)..(426): unsure at all n locations
agcttcagggttcatgactggcgtctttnttgatgcaaagaccatgctaggagcaagttaatgctcaactatgtggagttcaggcttaaaattttttatttgagtaacatttggaaaagtaggggaaatcccattttgatcactgtatattcctcgtgttttctttcttggtccataagtactcttttatttttggcatttggtcatatgtcatctatttattaacttactaggattgtcagtgacttgagaataatgtgtttggaaatgtcagtgacttttttccttctacaaggtgctggattgctgtttttaataatagttcacttttgatgttgctttatacccagcaatctggaacaaaaacaacgtgcttcctggaagctctgtgattacttgcagcatgaaatggccatagcccccagc

SEQ ID NO: 6678 - DNA, 467 bp, Glycine max
  unsure (1)..(467): unsure at all n locations
cgcanaccaaatgctcaccattattagaggagaaaccttcatgttgtttcatataaagctcatcctctaaatcaccattaagaaaagttgttttcatatttatttgttgcaactcaaggtcaaaatgagcaactaatgccaagattatacgaagaaaatatttcttagatactggagaaaaagtttctttgtaatctattccttccttttgagtaaatcccttagcaacaagtcttgccttgtatctatcaatgttgcctaatgaatcccttttggtcttaaagacccatttacatccaatggtctttgtcccattaggaatctctacaaggttccaaactttgttactctacatggaattcatctcatccttcatggcatcataccatacannnnactcttcacaactcatggcttgatcaaaagtttcacgatcattttcagctccaatattatagtcaaattcn

SEQ ID NO: 6679 - DNA, 420 bp, Glycine max
agcttaggaacccaaactttttatcttctatgcgagaagacatactcgtggctaggaacccaaaatttggttttagagtcataaaagcatgaaaattatgacttgcttgtgagagtttttactctaatttgggctgccccatgatcgatactttgcacctaagtgacgtgggaaatgcttttcaatggtatgtggatatatgtggggcatgaaattccttgccaagtgtgaatgattattatcctaaatggatgtatgatagcatggaattcccttttgaatgcaagtatgtgcaggatgtaattatctatccaatatgcagaaacaataatatttgtatgatatatattccaaatgtgtgtagttacgttgtaatagcaagtatttacgatataattaagtgtgagttttgactcatgc

SEQ ID NO: 6680 - DNA, 454 bp, Glycine max
ttgagaggatgcttctatggaggaaatgatagagggagagattacacagaggtgggagcactaaattgaaggaagacaaagggagagaagttgaactttgagttgtgtctcacaagactctcattcactcaagttgcagtatgcgttacacatgctcctatttatagactaagtagcttcctttataagctctcttgagaaaacttactttagaagcttctttaagaatacttccttgagaagctagagcgtagctacacatacccctctcataactaagctcacctccttgagaagctttcttaagaagattcctaaagaagctaaagcttagctacacacacctctctaataactaagttcacctccttgagatgagaagctagagcttagctacacactccctataatagctaagctcactctcatgacaagaaacatgagcatacagaaa

SEQ ID NO: 6681 - DNA, 399 bp, Glycine max
agcttctagcttgggtctgtttcgtataaagtaaggtatatgataccatgttcttactcttcttccacgaagcactatggaactgattttctcctccaatccattttctcacgaggggaatctgcttcgttccacctactctttgttaattgtgcttgcttgtgtaatcgctattgaataaattaaagtgcaagtgaaccatcgataatagagtgaaaaaattacattccatactattgctttcttgtactaaaaacatagcctgtgttgaccttagttattactgtgacaaccttgtgtagggcttactaagttacttttacttgtctaaacatgatggcttacacgagcatctcacagttcctgatttggctctaaaaacagtcgtttggggtgcta

SEQ ID NO: 6682 - DNA, 453 bp, Glycine max
tcctcattcgaaggcattgcattctacaagtgagaatgagcttgcggaataaaaggatggttgctatccttgctcacttccttatctttcgatgatgggtccctagtaatatttgttttcaaaatattctgatttgaagatcctccaatcatttaatatgtcttgatactgttttcaattaacttccacgtaggagtctcgaatatggacgttgttgagcatcactgccttttgttctttgccttggtcacatgtcttgtagaagtggcctcactagttgcatatatgttccttacaatcatgctggtcacttttatttgcatggccacttgtaatctttttttcttccttaatcaaagattatgttatctgacccaaatactccatttttctgtctttttttgtcattattcttccacaatcttctttaacaactaaccaatcaccatgcag

SEQ ID NO: 6683 - DNA, 416 bp, Glycine max
  unsure (1)..(416): unsure at all n locations
agcttatagaaatcaaacacgataataaatcatcctcacattataatagaagcatatgtgcataaataacaaataagtcataagtcatcaaaacataaatcatttgtctaagttacttgcatctagaagtcctaattctcttctaatggtgtagaaagaatctttagttagtggttttgtgaagatgtctacaagttggtttttagtatctacaaattttaaaacacagtcacctttttccttagactaagtgctaattgactatcaacacttaccaagatgagttctttttaacatagattgtttcatcacatcaaaataattttatttgaaataaaatataatagttntgaaaagcataaaaaatattntgaacaatcaatcaagtaattcaaacatatcaaacaagaattata

SEQ ID NO: 6684 - DNA, 462 bp, Glycine max
ctttatctctctattatgaaacatggttaacaaaaaaatatgatttatgaccgtgctttaagtgtttattgagttaagggaaagcccaaatctgtatataacgcaatttgggtttttatactatttttaatgccagagaaatatttgtatgctcctcaattatccatttctacagctttagtctgtccaagaatgtggccttttcttatgaaaaattatgttttttttttagaaaatacattctaagatgtcccccttgatatctttctacctagactacttttagtaactttataacgcactcttattagacaacgatgcagacattcctaataacatctctgaagcatgtgatggtaagactgatgatgctgattatgtggagccatcatttgctgttgggaaatctcctgaaaatgtgaatgttgcttctaatcaattgtggctttggtctaatgtatc

SEQ ID NO: 6685 - DNA, 433 bp, Glycine max
  unsure (1)..(433): unsure at all n locations
agcttaagctccttcaactgcacaatgctcttaatatttgaagagtatccttgtggaaccttcacccgacgaagacactgacaaaaacttatcttctcattcttggacaaagtatggcaggctgggggcaagtaaattttcttcccatcagaccttggatgcaactgtgattgtatacccatatcatctagatcttgacgggtattcaagccatccgtcgtcttgccttgaatgttaaggagcgtcccaatcacactcacaaacatttttctccacatgcataacatcaatacaatgtctaacgtcaagatcacaccagtacggaagatcaaagaanatggacctcttcttccatatgcaactctgacttttaatccttttttgggtcttcccaaatacagtattcaggtgttgaacccgctgatatacctac

SEQ ID NO: 6686 - DNA, 448 bp, Glycine max
cttgcttctacacccaaaagtgcgcccaccaagtgctcggtgaaatgcctcaatggtgttttcacctaggtttgtgaatatggcttttatattgggtttgtgcatgtatgagtaccatttttgggatgcgtacagcttgcgaaagttaggataaatgccaaaacatgacatacgactaggggcctaagcctttgtttttttgaaatgcaagaaggcatgaaagtgagagcatgttggtgaggtttcccctttaggccagcacttggtttgggctgcaccatgtcttctttgtacctagatggtgtgaaaatgttgttcaccatgtacatgtgtatgtcgaataggtagctaaatgctctgcaaatgtgcatatgtgtcgaaaatggcacgaaaatgcttctcaaaatacgaacatatgatatgaaattgcctttcaagaatatgaatg

SEQ ID NO: 6687 - DNA, 427 bp, Glycine max
agcttccgttattcaatttctagcgtctcgatatattatttcaccgaatcagacatccgagtgaaatgttatgaccattcgaatttgtcgagagcttcttttgtttaatttcgagcgtctagatgagttatgtcaccgaatcggacatctgtgtgaagagttatgaccattcgaatttctcgacatcttccgttgttcaatttcaagcgtctcgatatattatgtccccgaatctgtcttctttgtgaaaagtttggaccattcgaatttctggacaacttccgttgttcaatttcgagcgtctcgatatattatgtccccgaatcggacatttgtgtgaaaagttatgaccattgaaatttgttgagagcttccgttgttcaatttcaagcgtctcgatatattatgtcccctaatcagacatccg

SEQ ID NO: 6688 - DNA, 464 bp, Glycine max
  unsure (1)..(464): unsure at all n locations
tgtgcanatcaaatcactcctacatctcatctctagcatgcattttctttctttacccactcctcacgtttggttttttagggaaaaaacaccataactaaacgcgccgcaagggatccctatcgcaccagatccaaatctagaacgatgggtgatcaagaggagacacaggaacagatgaaagccgacatgtcggctctgaaagaacaaatggcctccatgatggaggccatgttacgtatgaagcagatcatggagaagaacacggccaccaccgccgctgtcagttcggctgccgaagcagacccgactctcttggcaactacgcaccagcctccctcaaacatagtaggacggtgaagggacacactgtggcacgatggcagtcctcacctgtgatacaaccgagcggcttactcttatggattgccgcccaactattcaccacccatcttgcaagaaga

SEQ ID NO: 6689 - DNA, 412 bp, Glycine max
agcttgaacaaatgtaagatacatcttcttcaacctttgtcattcttgactccatttcattgaagcgcatatccacttgcaattccaaagtatcaaacctttcactgtggcgtccctaaattaatgactggtttaatagtaatgatttaattaacaaaaaccatggtaaaatttttttttttttcttttccttatcatttctttctcttttcactaaaacaagttttcgaaggaaaatcctcactacagagtcctgaatggccagtacacaactctgttcggagtcatttctttctcactgctcataatctctaaactattttgctgtttcaaaagaaagaacgtaccatccattactttaggtcggcacgtgaaaataaaataataaaataccgtcgatgaactcttttac

SEQ ID NO: 6690 - DNA, 358 bp, Glycine max
  unsure (1)..(358): unsure at all n locations
tgtaacctgaatagaatatgtccaactttattttataacctatttgtttnttgcagccactatatttgtccttcctctagttctaatcattcaccatttttagttaagaactatgatgtccctagttcctagactatgtgtcagacatttaagaccttttgctttagtattgtcaaccatagagagctctgtcaatgattccttagtgagtctaaaaattttggggaaaaattgaggattattcgattaataaaaatagcgtttagtatgtgatagaataggaattcattttgaaatcgttttaagttgcgtgtatttagaaatgtacttatctttggcacaccattgtcaaatgccg

SEQ ID NO: 6691 - DNA, 397 bp, Glycine max
agcttcaatggcttattgaggatggagaggtgcaagttatgaagcaagtagagttggatatttccattggaaagtacaatgataaggtgctttgtgatgttgatcctatggagcccacccacttactcttggggagaccatggcaatttgataagagagctaatcatgatggtttcaccaacaagatctctttcacatatcaaggcaaaaagatagtgctcataccattgagtccacaagaagtgtgtgaggatcaaagaaaaatgatagagaaaattcttcaagataagagagaaatagatttagagagcccaacacttgagagttcacaaagtaaggacaaaaagagggaaacacaagagaggaaaaagatgagtgaaacacttgaagtgaggga

SEQ ID NO: 6692 - DNA, 325 bp, Glycine max
  unsure (1)..(325): unsure at all n locations
tattagtggacaaataattcaccccttcttaagttattgaggtcgctggtccaacatttgcgatatctaattctactcttaagttgagtaaaatgtacttctcaatacctgagattatttgttttgtttgatgcacgctgatgctaatggacatggaaagttgacactgncagagatgcttgatcatgagtatactttctaccacacacttcatgcagatggtcaccaccaaagtgatgatgatcatgatgagctgtgatgtatgaacctacttaccacacaagtctaacgttaacatataaatgaagcatcgatctagctgttt

SEQ ID NO: 6693 - DNA, 383 bp, Glycine max
agcttgccgccacggagttttccgactatgctcttgtgtggtggaacaagctacaaaaggagagagcaagaaatgaagagccaatggttgatacatggacggagatgaaaaagatcatgaggaagcggtatgttccggctagttactcaagggacttgaaattcaagctccaaaaactaacccaaggcaacaagggggttgaggagtatttcaaggaaatggatgtgctcatgattcaagcaaatattgaagaagatgaggaggtaactatggctcgatttcttaatggtttgactaatgatatccgtgatattgttgagctgcaagagtttgttgaaatggatgatttgcttcacaaagcaatccatgtggagcaacaatta

SEQ ID NO: 6694 - DNA, 344 bp, Glycine max
  unsure (1)..(344): unsure at all n locations
actcagcttgaattgaacacggatgctctcgaganaatcaagtggtcttaccttgccacacagatgtacgagtcggggaaataatatatcgagacgcacgaaattgaacaacggatgctctcgagatatttgaatggtcataacatttcactctgatgttcgatccggggacataacttatcgagacgctcgaaattgaacaaccgaagctcatcacaaattagaatggtcgaaactttccacgcgaatgttcgattcggggacataactcatctagacgctcgaaattgaacaacggaagctctttataaattagaatggtcataagttctcacaccgatgtt

SEQ ID NO: 6695 - DNA, 430 bp, Glycine max
agcttgactcttacgagtcagtttagttaaaggtaaagccaacttggagaaaccttctatgaatctccggtaatatcctgctaaacctacaaaactcttaatctcaaaaacagacttaggactctcccacttaagaacagcttctatcttagagggatccacagctatacccccttgagatatcacatgccctaggaaactaactttctctaaccagaactcacacttggacaacttagcatagagttgtcggtccttaagggtatgcaacacaatcctcaaatgttcttcatgctcctctctagtcttggagtataccaaaatatcatctataaatactaccacacaattatcaaggtaagggtaaaaaactctattcatgtagtccataaacactcctggagcattagtcacaccaaaaggcatgact

SEQ ID NO: 6696 - DNA, 394 bp, Glycine max
tatcgtaatcgattacaaaatttgttggaagcttgcagagttatgtctcgtatcggtttaatcaattacaaccttatcataattgattatgtcgcaacctacccttcatcgggaaggtgaggcgtgactcaacggtgagtcttcctaaaaagaaaatgcgcgggagtcgccaccaacgtttattcaaggaagatgttagaaaaaccaaaatggggtctatgaatttaagaataacggttcgggagttgtttacgtgcggcgaaggtattaacaccccacgcatctgtcacaagggacagcagcctttaattgagtgcgaaaaatcatgagttcaatgtttaatttattctccctttttatgtttttatacatcttgggtcgaaaagagcatgac

SEQ ID NO: 6697 - DNA, 433 bp, Glycine max
agcttgcatcatttaagtgaattgcccagctatctactcagaacattacatatgattatgataacaaagtaacttagcatgatgttggaacctgagtaacaaactttcaccaacaagaacagaggaaagcagtcagcagcattgtctccttgtcccaaatgatcttgaccttcacctgcaccgatcttgagaatcaacacaactcatgaaagacaggcattgaattgtagatcattgtgaccttgtcccatgtgaaattgactttcttcaactgagggaatcttgacaatcaactcaactctcaagaaagtctagctgtggaatagggagaagcaataccgtcactttacatggtttaacaaatttaacaatatcaacatgtgacagagaaatcatccaaccgagataaggatctcataaagagactccactc

SEQ ID NO: 6698 - DNA, 458 bp, Glycine max
ggtagcagaaaccccactctctatccattaggcatattaaagttgttcacatgctatcacaagttgtgaatatatgcttgtattcatgattttatacatcccccggtccattagcatatgcccactaacttaaggtaatacgctatatttgtctattggaaaataatataatttgtggccttgtaggtgtgtctgtaaatataaatatgccatgctaaaacactatttagaagcgatatataaccatagagtatgatagtagtattgagtctattgacaatgcaattcttacaaaaaaaatataaaaaggattgcttacatgcatcaatttttttttcagcaaacgatcaaaatatagtaaaaatctatacaatacattaattatataattattatctaaaacggaagcacttgtattattgaatcatatctcttccacagctcatgaatcactatgt

SEQ ID NO: 6699 - DNA, 435 bp, Glycine max
agcttcaagaaaaatggcctcagcaaacttcttatttccagaaggaaattcaatcaatagacctccaatctttaatggagagggttaccactaccggaaaacccaaatgcaaatttttattgaggcaatagacttaaatatttgggaagccatagaaatagggccttatatacccaccacagtagaaagaattgcaatagatggaagcacatcaagtgaaagcataacaatagaaaaacctagagatagatggtctgaagaggatagaagacgagtacaatacaattgaaaagccaaaaacataataacatctgccctgtgaatggatgaatatttcagggtttcaaattgtaatagtgctaaggaaatgtgggacactctacaattaacacatgaaggaactacagatgttataagatctaggataaacacatt

SEQ ID NO: 6700 - DNA, 452 bp, Glycine max
tctatagaaggttcgttcctaatttctctacaattgcatcacctctcaatgagttggcgaagaagaatgtggcatttacctgaggtgaaaaacaagagcaaacctttgctttgctcaaagaaaagcttactaaggcacctgttctagctcttcctaacttttctaaaacttttgagctagaatgtgatgcctctggagtgggagttggagctgtattgttacaaggtgggcaccctattgcttattttagtgaaaaacttcatagtgtcacccttaactaccccacctatgataaagagctttatgccttaatacgagccctccaaacttgggaatattaccttgtttccaaggaatttgtcattcatagtgatcatcaatcacttaagtacattacagggcaaagcaagttaaacaaaaggcatgcaaaatgggttgagtacctacagcaa

SEQ ID NO: 6701 - DNA, 443 bp, Glycine max
  unsure (1)..(443): unsure at all n locations
agcttctttggagcaatttccctgtgaggacacacttgcaaagttagtttgcaaggaaataccaatcattacaaacaagagccaaacaacacttaaatggtgcgagtgccaacatgcaatttagaaaacaatcacattggggcacgtgctattttatgatacatacctatatacatgcatttacacacacacacacaactactgtcatatacacacattttttcgaaaggcatttccatgttatatattcaacacatatacatatcttgaaaggcatttctatgccacccatccatcattnttttaaaggcatcttttatgctacctaaccaacatatatacacatttttgaaaggcatcttttgtgctacctaaccaacatacacacatattttcgaaaggcattttctatgctacctatccaacatacacacacacacaca

SEQ ID NO: 6702 - DNA, 457 bp, Glycine max
  unsure (1)..(457): unsure at all n locations
tcctcggggccattcctgcgaaggcaaacatttggaaagttaattttaccagtgggacactatccttaaagcaaaaatggcatataacctcctcccataaatacaaacatcaatgtaaatttagagcaagcttatgcgcatatttccttacgaacgttctcttgcacaagacattctattaactaagaaaaatgcacccatatacaatcaaggcagcttcgttacctagattatttacacgtatttccaaggtgtatttgttacttacatcacacacatctccttggctaaatttatatacatgcatactcaaagcattntgnggtaccaaaaattgcacatgcgcacatcttggtatttctaatacctatacatacacaaacttcatgatgaatcttgactatcttcacaaaaaggtgctacactttatcccttttttttcaagtttttgctacct

SEQ ID NO: 6703 - DNA, 381 bp, Glycine max
  unsure (1)..(381): unsure at all n locations
agctntgacgcacgtgatgtacctctaggtacaggccgcgttgatgatgcaataaggaaagagtttatgatgttgtcagtatcatctatttgggttttatagaggacccaacggttagaatgtcaataaaggttcattcattgttttgtttcatttcactttctaccatgctgagtaggctcattagttttgtttgcgtgtgctaattagaaagagaacaccatgctggtgtttgttctgttaaatctccttattaatggcttatgcaaaatttcactacccaatctgatatgcatgtccctggtaattaatgccttttatggagcatcaaagttctcctctgggttgaagtttttgcgtggagtgcctgttgtgactatc

SEQ ID NO: 6704 - DNA, 405 bp, Glycine max
  unsure (1)..(405): unsure at all n locations
tgcatgactcacattctgcccttctctcaagaaaattcttaattctttctgacatcatcaaaatcttcatgatttacacttcattcatgttgtcttanagtcatgtgttgtcatgataattgtcacattatgttctaagtttgtgctcaatcttgattttgttgactgaattctagatacatttgttcttgtattcttgcaattcttagcctatcattcgaattttgagtctaattcatgtatgttgtttagctcataacatgttctaaatcaattctctagaaatagtcttgctgttggacttttttgattcccaagtttactatatgatgcctatgaagaaattgacctgtggtgcttagttgtggctggatctgtgaattcaaaaaagtcttacgctctctt

SEQ ID NO: 6705 - DNA, 432 bp, Glycine max
agcttgtaggattatggggtacccatcacatgtggtactaggtggcgatcgggcgatggtgcacaacaagttgttcacattcacaaatcgcgcataaacccaccatcccctgctgcccacctgcaactgagctcacgtactcccatgtagcccatatactcgtttatctaaacaccgggtccccatcaatccttccaagcttccccaacatccaggtaaatcaacattcaaacagcacaaactatcacagtcaagaaaatagggcaaaggcagaaaactctgcccaaaactcaaaccataatcacagctttttctcacttaaagaccccagtaacatttccttcgttccaattacgtaaccgttggatcgactcacaatgtttactggaagtgctcaaacataaacctacattttgaccgttgggatctgct

SEQ ID NO: 6706 - DNA, 459 bp, Glycine max
  unsure (1)..(459): unsure at all n locations
ntgagctaaaatcctgactcaccataaaccttgacccatggtgagaatgtcaatccttaccctcggacgctaaaaagaatataagggaaatatccaatctataaaaaaaaaaaagagaaggaaaattcccaatgaaggagaaaaaagataagaaaggaaattcccaatcaaagagtgggagaaagccaaaagaaaagaaagataattcccaaccaaagaatgggaaaagtaaaaaataaaagaataaagctcccggtcaaagaaactataacaaatgtgcacaaaggtcttttgaccagacaatatctgaacaatacagaattgtcaccaaatgaacataaaaggaaggaaaggaaaccacgacctaaaatggtcttcttcctttaataccaaccaaaattccgtgcgctagcgacccttttatctcgccccgcactaatcaaataaaaacagaaaaag

SEQ ID NO: 6707 - DNA, 416 bp, Glycine max
agcttctcgacatattacgggactcaatcagacatccgagtaaaaaagtgattgtcgtttgaatttgctcatagcttcaacattcaattttgagcgttttgatatattacgatactcaatcggacatccgagtaaaaagttattgtcgtttgaatttgctcagagcttcggcattcaagtccgagcctctcgatatactacgggactcaatcagacctccgagtaaagggttattgtcgtttgaatttgctcagagcttcgacattcaagtccgagcgtctcgatatattacgggactcaatcagacatccgagtaaaaagttattgtcgtttgaatttgttcagagcttcaacattcaatttcgagcgtctcgatatattacgggacccaatcagacattcgagttaaaagttat

SEQ ID NO: 6708 - DNA, 429 bp, Glycine max
  unsure (1)..(429): unsure at all n locations
ntgagcanattcaaacgtcaataactntttactcggatgtctgattgagtcccgtaatatatcgagacgctcgaaatggaataccgaagctctgagaaaattcaaatgacaataactttttactcggatgtctgattcagtcccgtaatatatcgagacgctcgaaattgaataccgaagctctgaacaaattcaaacgacaatcacttttttactcggatgtctgatgatgtcccgtaatatatcgagacgatcgaaatggtatactgaatctctgagcaaattcaaacgacaataacattttactcggatgtctgattgagtcccggaatatgtcgagacgctcgaaattgaagaccgaagctctgagcaaattataacgacaataactttttactcggatgtctgactgactccggtaatatatcg

SEQ ID NO: 6709 - DNA, 416 bp, Glycine max
agcttgcaagcagtagatgcatatcatgggatgaatctgtaatatgtaaacctccggtcaaaacagaaaaaatatagagttgcactattcggaccaatcaaaatattccatcattaaaatgcatccataaaactagcaacacttctttcatatattcggaccaatcaaaatattccatcattaaaatgcatccataaagctagcaacacttctctcatatatctggaggtgcccatgtttttacttgagagggtcagatgtgtacccgtccaatgcggggtgttcggaagcaaaatatcgcttgttctattgcatgtgcacttatgatatgaccgccaatgttgtaagctgcctgcactacacagtggtactcattatttactactttccatgaggtatcaatagaagaaatgaat

SEQ ID NO: 6710 - DNA, 360 bp, Glycine max
tgcttcctacataaaataattccaaataagacaacatattgaaccacatacaacaataactcaattagagtacaaggattgatagctattatatatgcagaaaataataaatataatagaaaataacaacgcatagaataaaatctcacgaacttctctcccaatattttaggcaggatgtgaattaagtcaagaaatcaaatatcatgattacgcgatggcgggttaacgactctaactaaaccttccagcatttggtcaactttgcacatagttggcctcatttcaagatcctcttgaatgcaccaaattgtatctttacccacctttgttacctgccaatgtgatacaatgcttccc

SEQ ID NO: 6711 - DNA, 352 bp, Glycine max
agcttctagatgagttatgtctgcgaatcggacatcctgtgaaaagttatgaccatttgaatttctcgagtgcttccgttgtttaatatcaagcgtctcgatattttatgtcctctaatcagacatcggagcgaaatgttatgaccattcgaatttgtcgagagcttccgttgttcaatttcgagcgtctagatgagttatgtcaccgaatcagacatctgagtgaaatgttatgaccattcgaatgtgtcgagagcttccgttgttcaatctcgagcgtctagatgagttaggtcaccgaatcggacatccgtgtaaaaagttatgaccattctgctctgtcgagagcttc

SEQ ID NO: 6712 - DNA, 424 bp, Glycine max
  unsure (1)..(424): unsure at all n locations
tgccgccacggagtnttccgactatgctcttatgtggtggaacaagctacaaaaggagagagcaagaaatgaagagccaatggttgatacatggacggagatgaaaaagatcatgaggaagcggtatgtgccggctagttactcaagggacttgaaattcaagctccaaaaactaacccaaggcaacaagggggttgaggagtatttcaaggaaatggatgtgctcatgattcaagcaaatattgaagaagatgaggaggtaactatggctcgatttcttaatggtttgactaatgatatccgtgatattgttgagctgcaggagtttgttgaaatggatgatttgcttcacaaagcaatccaagtggagcaacaattaataaggaagggagtggctaagaggagttttaccaactttggttct

SEQ ID NO: 6713 - DNA, 435 bp, Glycine max
  unsure (1)..(435): unsure at all n locations
agcntttgcattgatcgatgtaatttataataataatgcagaagaagacagcatgggagacaccaaacaagttttgggaaaccaattacaattagctggcagtgaagaaggtgaagatgaagatgcaaacattggaaaggatttcaatgcacaaaagggtctgaggctctttggtgtgtgtatcacctaatgaaatatatatgtgcttttacttttcttcaaacctctactccagctctaggaaattaatttcgagaatatttctaccttgttagatatatatatatgtaccacttttacacaatattgtacactacaagcttcatatcttagtaattcgtggaatgctacttctgaataccaattggtatgcatggcaatatttccttgccccataaattaaatttcaggataataagtaaatagtttcatttt

SEQ ID NO: 6714 - DNA, 458 bp, Glycine max
gcatcacccgctacttcaatttttcctttatcactcctttttggtgtatagctagctttcggtatttgaacaatttttcaatataaaattattccctaaaatgaacactgcatgaacatgttccaacgttgcaactccacctttaacgtacgcatatattttaatactttgaaaataaaattaaggtgtcagttcatctcttatgttagcgcacagtgatattgtgtccataaaagactgcttatcattatagaatatttctattttacatcgcttcttgttttatttattggtgtaagtacttttcttatttcaatgcgtttttgtatgtgtgggtattattgcttacactatgaatacatgtacgcgcgtctgcatttgagtaaagaaaaaattgtgtgcgcgtttatatttttgctttcgtacttaaaataaaaaacataaaattctagctatat

SEQ ID NO: 6715 - DNA, 357 bp, Glycine max
  unsure (1)..(357): unsure at all n locations
agcttgaagtgaggaagtgtggaagggtgatacttcctactnttattcgttgaccacagagtggtacctggagatatgtcgcgggggtcatgagaccttgtggacatcaggtggggtactattgcccaaaaccaagcttgaccaatcccgacccaacccgggcgtagtcagtcagtgagaacctgtgacgtacctaaacaagtgagcctctggcagtcaacctgataaagaacaaagaccacaaatcaaggaggcttgtgtggtggctggccaactatggatcttgagtgatatctggaatatggcctttggtaatcgattaccaagggtgggtaattctatacaagggcttaaaat

SEQ ID NO: 6716 - DNA, 460 bp, Glycine max
  unsure (1)..(460): unsure at all n locations
tcaccttctggtcctcctcatagttgttgcatgagaaaacatgctctattttcatctcccactcaacgtatgcctccggatcattctttcctttaaatggaggaatgttgagtttaataccatcaattcggttttgtctatgaacaccatcattccctcttctcctcctttcttcttcattatgatctctattctacatttgatccaacctctcatggagcgcatcatctcgttgtttcattaacctctccaaatgttgcatcaaagcttgcattnggaattgcgaaagccccccttcatcattaagattaatacctgacatctcaaacaaacaaatcacacgtacaagacaattatagttgctgtttgaatacctcacccactcaagtgtatcacacaattatggctctcctctaatgaaacactcttgccttctaccactctaatctcccttgagttc

SEQ ID NO: 6717 - DNA, 368 bp, Glycine max
agcttagtgctagaggtgatgaacctttatcatgtcttggaaaaggtcaatgacaatgcccataggttggaactcccataagagtatggagttagcaccacttttaacatttctgatttaatttcttttgcaggtagagctaacgctaagagggaggaaccaacatatttgaggtcaaatcctcttcaagggggaggggatgatgcaatcctccctatgaaaggacaagtcaccacagccatgagtaggaggctacaagtggattgggctatagctgctgaagacggccctaaggatcttatgaacatgagggtagatttctgagcccatgggccaaggttgggtccatttatatttgtaaatattat

SEQ ID NO: 6718 - DNA, 306 bp, Glycine max
  unsure (1)..(306): unsure at all n locations
cgagaatggagaatngcactaagcaaccactacgcatggctgcaaactcgtgggtggaggtcgcatgaacgaaaacgcactttatggggctccgaaaaaagattgataatggagaattgcactaagcaatcactacgcatggcttcaaactcgtgggtggaggacgcatgaacgaaaatgcaattcatggggcctccaatcaatattgagaatggaaaattgctctaagcaaccactacgcatggctccaactcctggtgggatgacgcatgaaccaaaactcaatttatggggcttcgaaaaaag

SEQ ID NO: 6719 - DNA, 388 bp, Glycine max
agcttgaacttaacgagtgagtctatctatatgtatagaccacacccagagctgggctacgtaacaaaccttgatttatcagtgttcctagtctccaatatgatactccatggtgatgtgattattgttgttcaaaacgactttctgatcctatggtgaccttatgattcccaccatgaacaatttatgtattacggaactaacactatattaccactctcactactgctggacaattgccttgcaaattgctccacagtatgtctcactcttttgatttatattgacatcactgcataattgaatccctgccattcccggattatatgaaccatttactgccagtgtccagacattgctaagctaaatatctctattcatttagatc

SEQ ID NO: 6720 - DNA, 374 bp, Glycine max
tctacaaatgaagtgcttgcatcgtttgcatcaacttgatctatcactgaaatgttgtgacaccatctaccccgacatatatatgaatatgacacatctttccctatatgaaatttgatgaagatcagatttatacaaatcacatggataaaagagtcacatttgtatcactgctcatcaaataaaacctagtaaaaatatttctggctcaaaacaaggtcgtctaattttacaaaagagctcaggttatgtgcacaacaaaataaagtataatacatgttcgcaacatcatacaagtaaaataaaaagttatgcctcaatgtcacatcctactaaagcattgtgttgtctcaaccacttttagcacaaaactc

SEQ ID NO: 6721 - DNA, 408 bp, Glycine max
ctttgaagtattattctcttccaatatttttctatcggagcttctctgattccttttttattgaacataatgatgatgcaaattgagctataatgacttctaatatgcaagtgactaaataggttatttgacctatagaatatttatgtgaaaagatttaataacatctataacatgaaaaattaaagtttgaatcttagttataaaagatgatatacattcgatgtttaacaatactttgaacactattatcacaaccagtaggttaatgttacagacaaaagaaatggctttaattattttaaagcggtgttctatattttaatatacaaaataactgtttagcaaatgtttctagtgttatatcataacatttattatcatactagactctctttttcaatacac

SEQ ID NO: 6722 - DNA, 510 bp, Glycine max
  unsure (1)..(510): unsure at all n locations
ngatgntgcttggtggacattgacacctcatanaagcagtccttatcttatatgataaactatacaataacctgatcatacagcggtcgatctacacaacatatatcgcgtatctctatgaatagcatcacactatctcattgcgagtctctcttcaatcttaaccagctcacatacatcattgtgaacgtatatctttttcatatgttgccgcatcaatgtcacatctcgacagcgaatctttcatcgttcactggattctgatcgcactttcactantgtcccacaatatttagacacataatgtgactacaagccttctcatcgcttacaagactttcatatctgaatatactattgcaacagttttgttccatatacgcatagaattctgtcccacttttatattttgccatacttgcccatctattatatatacaagttctcgactgtttcacagtgtcctattttaccagactttggttcttatacagctgaattatccgtacc

SEQ ID NO: 6723 - DNA, 378 bp, Glycine max
aactagtaagatatgcaagatcatcttccttgacaactccgagaaatagattgccgtcaatatgaagagataacaatttagagagtgatccaagacttttaaatggattaccactgaaattattcatagagagatcgagatatcttaatgatgaaagttttccaaatgatctaggaagagcatcaccaattgagttggtggaaaaaaattacgtgtcaatatttttaaatgccccaatatgatctgttcgactgcctgatagtcgtgaactctgaactgcaagtgttgtgagtccatgggaaatacacggagcaagaatctcataaaattcattaacctgttggttgagcttgagatatgataaatctattaccctta

SEQ ID NO: 6724 - DNA, 447 bp, Glycine max
tcgatatcttgacttgagcgccaatatatttcttggagaatgcatgtcaattccttctttcctcgggacaatgacttccttgactcacctcgacctctctggtactggattcatggggaagattccatctcagatttggaatctctccaatttggtgtatcttcgcctgacgtatgccgccaatggaacaattccatctcagatttggaatctctccaatttggtgtatcttggccttggaggtgattctgttgtcaaacctctgcttgctgaaaatgtagaatggctatcaagtatgtggaagctcgaatatcttcatttgaggtatgcagacctatccaaagcatttcattggctacacactctccaatctcttccttctttgacccacctatctttgtcacaatgcacacttcctcactataatgaaccatccttgctcaactt

SEQ ID NO: 6725 - DNA, 414 bp, Glycine max
agcttttgaatcctagaaaaaccatgatttgttggcagcctaaccccattacaagcctagaaagtccttcggattcattttgtgtgttcattgttgtatgatatgatatgaaatgcaaaggttgggacttgcgttagttgtttatgatggaatgagcctaaacacttgagcttgagtgaaacaatgactgtgaggttttggttgatgatccttccttgatttctgccatccttaatagcttatttcagttgtgactctaatgtgtatgtttctatcttcgaaaagtttcatttttatgaaaagcaattgattgaagtagtccatgatattcagttcatatggttgaatttctctatgaagcaaacaccattttcagtgatcactatagtttgtcacttaaggacaagtgaacta

SEQ ID NO: 6726 - DNA, 453 bp, Glycine max
  unsure (1)..(453): unsure at all n locations
tcgtcctagaggtgatggaccttttaggtcttggagaggatcaataacaatgcctataagttggacctcccaaatgagtatggagtcaacaccacttttaacatttctgatttaattccttttgaagatggaactgatactgaggaggaggaaccaacaaatttaaggtcaaatccttttcaagggggaggggatgatgcaatcctccctaggaaggaaccaatcaccagagccacgagcaagagactccaagaggattgggctagagctgctgaagaaggccttaaggttctcataaacataagggtagatttctgagcccatggacgaaggttgggtccacttttctttgtgaatattagaataggttttccttcttttgggccttatattttgngcaatttatggttatatggtaccctacaaattaagggtacaagttaagagtactct

SEQ ID NO: 6727 - DNA, 423 bp, Glycine max
  unsure (1)..(423): unsure at all n locations
agcttataaagaaggttntagagggtggtgttagaaagtctcacatcgcctgcctcgatccttaaggtgtaggtttatatatctattggacaacttcacttaatattaattgattttaagttaaaatctaacatggtatgagagnttatagtccgtcttaattttcttaattgaccagatgggattggcttatcctgagagattagttcttgcttttagttttgttatccttctctttacttaccaaaaaacaaaagttctcttgctatcttttataacaagtattgaataaaaagtaaatacatgtaatgtcttgaaaatgtaaaacacattaattacttgtcataaaaagaataatagaacgatatatgtaatgtaagagacttttataagaggaaacaccttttttgttcttaaatataa

SEQ ID NO: 6728 - DNA, 458 bp, Glycine max
  unsure (1)..(458): unsure at all n locations
cgaactgtgtttctcactctacacgcattatancaaattatcaataatatatatatatatatatatatatatatatatatatatatatatatatatatatatatatggttccttaatatcttacttaaaaaaaattaaacctcgcctcctctaataacaattaaactcactgtatctgtatgcttctgactcgcggcacaacccaccaaatcagtatctgtatttactgactcaaaattttctattttaagaaacctacgcttttgttatgtgcccctctcacaatcttactggacagaaatacatttaactatttcgcatacatatacttataacacatagtataatgtacaacacaatgccactaaaaatataggagttcctgttcctatatagacgtctcatcgagaagacttattcaaacaagcgcgctcatcgcaatcactaaactcacttcc

SEQ ID NO: 6729 - DNA, 427 bp, Glycine max
  unsure (1)..(427): unsure at all n locations
agcttgttaatctacatgggttcttgaatccttggaatttatctctcttgattatatctttctttaatccgttatgagcttcatgatttatacttttggtcccaagggaagatgttttgtgatttatcttctcaattggagcaagggacgggtttggttggctttcatttttgtttcgagaatctacatgtgggtttggataactatgtgacacttctttcactattttctcgataattcttacatggaagatatatctcggtgttgaacatgttgcatttttttgtttgatgcacgttgagtctctgagtcttcatatggtatttctgtctcagttgaagattaaataataaataattcttgatgcagcgaattagaactgccaaaagcatnggataaataatttattcaatgagtttcctctgta

SEQ ID NO: 6730 - DNA, 446 bp, Glycine max
tgcttctacagcttggacttaaaatagattggtaagctttggggctgagaacctatataacggcaccaaggttttagtttagggaagtcttttcgttttggaagaaagaataattttaggttttgcaattccagtttttactattcacgtagcaataaaattttgttttctgcttcaatctgcaatttcgttttctactgattaatggaaggctaagtctccagcgttgttttctcttgaggatcaagcacagctctctttgaggttctattattactattaaattctgatcagtttttcctcttcaccaattattttgtattatttgctattaatccatgcatgctcagtgcttgattaattgtttctgcgcttaatttactttcatgcttaatgatcagtttcgttcatgattagttgtgagtgtaactggcattacactcaag

SEQ ID NO: 6731 - DNA, 447 bp, Glycine max
agcttatgaacgttaattaaagtctcaaaactctaaaccaatcaaacttctattctcaatcatccaccaaaattttaacagattcgatccacggcgatatggatcatcatcatcatatacatctaagaatcacaatgactttgaccagaaaatgcaaaaatttattacaatttttttttatatatatatgtttatgatttaggaggaggaaggaagcgaaatggaggaggcgctagtcttgaggaggaggctctgagcgcgtgagagctggtccatgagagagacgattcgcgcgtggtagtcacgcgcctggtaaactgcctctgcttcgagctccccgagctgggagcagagcctctcctcggcctcctcggccacgcgcagcctctcccacgcgctctggagttcgcgcttcatctgctcctccctctccttgctctctctgag

SEQ ID NO: 6732 - DNA, 426 bp, Glycine max
  unsure (1)..(426): unsure at all n locations
agcnttttcaaatttgttgcaggaacaattcgttttaaagctctccaagtgtacatttgcgcagcctcaggttgaatacctgngtcatgttgtatcagcacagggtgtggaaccagtcatggccaaggtccangctatacagcaatggctggaaccgcattcggggcgcgcactcaggagttttttgggtcttgctggtttttatagacgcttcattcgcggctatgcaaccatcgcagctcctttgaccaaattggtcacggcggaaccttttcagtggaccgacaaagctcgtgctgccttcactcacctcaagcaagtgttgacctccactcctgtcttgcggttgccggatatctctcttcccttcacggtggagacggatgcttctggaacaagcatgggagtcgtgttgacccaacaggg

SEQ ID NO: 6733 - DNA, 323 bp, Glycine max
  unsure (1)..(323): unsure at all n locations
ntggatctttgggaggcagtagaagataattatgatgttcgtgaactacctttaaatccaacggtggctcagatgaggaatcacaaagagaggaagaccaaaaaggctaaggctaaaaattgccttttctcagctgtgtcaaaaattatttttacaagaattatgaacttcaagtctgccaaacagacttgggattatctcatatcagaatatcacggctgtgaaagaaccacaggcatgtaagtactccacttggacagagaattccagatgccgagcatgaaagagactgaaacaatcaaaggctatgatgactgactatt

SEQ ID NO: 6734 - DNA, 430 bp, Glycine max
agcttatcaacgacgagtgggagagcgtagggtagaattggatcaagggtggaaggggagggcgtgcatggtggaagggattatgtactgctatgattatttggggaaaatcaaagggttcaatgtggggcgcgaggtgtgggatgagttgaacgggttggagaatggtttgcccatatttctgtgtggggctacaatgactgatttgggtgggaaattgtgtgtggtctgggagtgtcacgggaatgggcatgaaatatagatttagtgcactgagattggagtgaaaaataattcggatggtgaattgtggggtcaacttggttggttcgggaaggttctctctattcccaaaggctcttacattgtcaactgttcttctgtttcttgtgaccatacattacatgtaagcattcttgattttactaca

SEQ ID NO: 6735 - DNA, 394 bp, Glycine max
agcttagaagaacgctgttagtgtttctccaacattcagaggagaataacatcacatccacaacatcgttgttactaccaagatatgaagagtgaaacatgttttgcctagagaaacaatggttttgaatttttaaattttaatccaacggtattactagccaagagggaacccaagtttctatagctcaaaggttttaaattgtgattgctagtttacgacagttgttaatattgtgagaaattgcagataaatgcgatcaatttgattacaatcacggtcactgagaccctataaagtaaaaacccttaacgttgcggtctattctaattccattctagaccaattcttttattagggaatattctcatacatacactatttgagctctatg

SEQ ID NO: 6736 - DNA, 420 bp, Glycine max
  unsure (1)..(420): unsure at all n locations
agcnttgcgtctacaaatgtcatgtcctccccttggcctttttccatgtgggggatagatgtcataggtgccatcgaacccaaggctttgaacgatcatcgcttcattctcgtggcaatagattatttcaccaaatgggttgaagcggcttcctacaccaatgtcatgaggagtgtagtggtcagattcataaagagggagctgatttgtcggtatggactccctacgaagatcattactaacaatggcaccaatctgaataacaagatgacgtaggaaatgtgtgcggatttcaaaatccagcatcacaattccacgccctaccgaccaaagatgaacggagccatggaagcagccaataagaatattaagaaaattatttagaagatgacagtatcatacaaagatnggcatgagatg

SEQ ID NO: 6737 - DNA, 450 bp, Glycine max
  unsure (1)..(450): unsure at all n locations
tgccccgagaaggaatccacggaagaaatgcttaccacctcanaagactggaaagcggtttctaatgaatcctctgcggcctccacatacggcataaaggatgggcagctcaccaagatgtcttcctcgcctgatatgatgaccagatgcccatccactacgaatttcaacttttggtggagtgtagaggaaacaactcccactgagtggatccacggacgccccaacagacagctgtagggggggttaatgtccattatttggaaggtaacttggcatgtgtgagggcctatctgtactgggagatcgatctctcccctaacctctcggcgggtgccgtcgaaggcacgaaccaccattgaactcggctttaagtgagaggcattgaatggtaatttctccaaagtgctcttaggcatcacgcttanactggaaccattattgatgagc

SEQ ID NO: 6738 - DNA, 435 bp, Glycine max
agctcgcaatagccccaagcttgaacttctatcgaatttgggctgtcaaataattaagatgtttttcaaatttagatctgagatcacactctaattcaaaatcttaagattcatgttcatggatcttctccttaacttatatgatgtttaatcccttatacctgatgttatggtgtttaatctcttctaatcgatgtaaaatttcacttcacacttgtattagaaatatgattaagcaaaagtctcaattatacatcagaagaggaagtcgaaaatctaatcctttaaaatggttgaattttaagttattctaaaatcggaagtgaatgtttgcttagtctgttatgttatttttttaacacgattccttcagatttccaagttcccatttctatctctatcatagacagagcttcctttcatactgaattcaat

SEQ ID NO: 6739 - DNA, 466 bp, Glycine max
tgaggataaggaatagtttggaattgatcagagaatgatagttagaaacttgtaaacttacaaaagagtgaaaaaaaatagagaaaatagcaaccaaagtgcaacagacgttttattttgtaattttctgttttgatttgcttgggcttggattttgagaacctaaatataaatagacattttttctatttaggaaaaaggttttgcaaacctttcattggttatatatttattataccttataagtgtagctcttcattagaatttctacacatgcattacatgttaacatatgttacttaatatcacaagagaaatcaacctactatatgatactctttttagaactactttgatgatacttaaaaatgaactaattctaataaacaagagactcgggagagtgtgcaggccaattagctacttaaatgataaaatgatttatagtctacaactacacgaactc

SEQ ID NO: 6740 - DNA, 437 bp, Glycine max
  unsure (1)..(437): unsure at all n locations
ggatcttaagtcacctgcggctgcagctttaggttgttatgttatgtatgataatgtaacgactaacgagaggatacgttttggccaccggatctcatcttcttcggggtaacctaactaggtaactatttcaatgtttcataatcgtatttagtaaaaaattgtcctattttattgaatcaaaaatggatatgaaatcaagacctgttgcgccacgtttcaaaactccttcctttattagctgtcacaaatatagaatctatattaattatatataatattatatggacgttaactatttatcatatggatcttgagtctcttatttgctgataattgatatactttttaattatattcctaatgttttataattcttntaaatcattatctgtcatatttattatcttgtaactcttctttaattttttttcatg

SEQ ID NO: 6741 - DNA, 448 bp, Glycine max
tctgaagcaactgcttgaccacgatcgagtcactacttcctgaagctcttgttctgccgctgcttgagccttcatctccgccaaggtgagcttcaacactgctacttcattctctagagctgacatcttcacctccatcttcttgggtggcattcgacaggctcctccgctgattctgtcactgtctctatctctctagtcacagatcaatgttaatcccgcaggtcggaccaatttgatgcacaccagatttatagatgaacagaaataagaataaatagagaaatacgaaaggaatcaagtgtatgttattgatgaaatacgagaaatagcaataggggaaaacctactacccacagagcctagctcctttcagagaatgatggtattctctacctaacagaatgatacgcacaatcataatctcccctcacttctccctacatcc

SEQ ID NO: 6742 - DNA, 417 bp, Glycine max
  unsure (1)..(417): unsure at all n locations
agctnttaagctagcttcaaaatgacactaataatatatttaaaaaagataataaaaaaattgaataaatattttaaggatataaaaaataaaatataaaaagctataaaaattagaagttgacgttttaaaagacattactttatgtagattttaaaaaacattagaaactactaaaaaacgttaaaaactacttaaaaatatttgtttatgaacaatcaaataaatttttgggttagtaaaagaaaagtataaactagttatacacataaacaaattaaagaattcaatttgaattgtaagcatagaaatttacataagtgaaggctcaccttcaaaagcagtgctatagcatgcaacggcacaagtctgaattatggtattctcctgtctagtgaaaggttntgacacaacatt

SEQ ID NO: 6743 - DNA, 379 bp, Glycine max
  unsure (1)..(379): unsure at all n locations
tgtgtcntacaccgtttgcactggataactntatctttaattattttttttatatagaagtgtttaactggaattagaatatttgatgtataatgtttggattctctttgtataagtattgacaactctgtttggctatgattatcacgcaagcaaaggatgttgttaaaggtataaagaagcggattggaagtaaaaattcaaaagttcaacttcttgcactaactgtaagcaagagtgttgtaatacaaccttttttctcttaaactctgttgttggcattgctctaaattctttttgtatttaagcatgtttgcttcaattgcaccattttgaccttctaacacttacattcttgactgatttttgaatgatgatg

SEQ ID NO: 6744 - DNA, 418 bp, Glycine max
agcttataatattgtttccctgaacctcattgtttttttatgttagcgaaaccctattactcgccatcttgtcaataatacaaaagccatttactattctgttacaacactattgaggacaatactgtgggctaacattcagatcttgattaactgaatttaccttgtggataattcattcacccaaaaatttcccataattgtgtgtaagttggtgctaatttgatttataagaccatacgtttaattgtatatttggatcaattttttttcaagtttattagtctttctatttttaaaatcaagtaaatttactccttctatcaatattctgagggcgagccctgtggcaacggttaagttgtgccttgatgacatgttggtcataggttccaatccgaaacatcctattttatat

SEQ ID NO: 6745 - DNA, 361 bp, Glycine max
cggaaagaacatctactgctagcacggtgtatgtgactatttgcacagcaaaacagataaatttggaagaaacaatatttataatagttaaaactaatcaacagttaaatgacagatgtcacaatttaattgggtgggtcactatcttggctaagcccttgtttgttatagcatttttcatactaataaattgataaaaaaacatccttctacaaaactaattttattaaattgatgaaagaaaataatattattaatattagattcaaaacctaattaatatataatgcttgggtaattgagtcaaagtggatgacttacttctctgtttaaccatctagagttatttttgttatactaa

SEQ ID NO: 6746 - DNA, 435 bp, Glycine max
agcttcaagaattattttgatgatgccaaggaatttcaaagatcattcaagattaatttcaaggatgaagaaagcaagatgttaagcaaagctaagatctcaagataagaattaagatagactcttagaaaagtttttgaaaagcacaaatgattggccaagtgtgtttctatcttaacaaaaacttttccaagcattttactctctagtaatcgattaccagaggttgtaatcgattaccagtagccacaaagctattttcaaagtttttcaaagctgtaatcgattaccaaaactatgtaatcgattaccaatgctttaaaacggttaaaaataatttatgtagtgtgtaatcgattacacatcatatgtaatccgattaccagagcttttgaacgttgtgcaatttgaattttgaataaaattactgtgtaa

SEQ ID NO: 6747 - DNA, 399 bp, Glycine max
  unsure (1)..(399): unsure at all n locations
tgtccacaatananaatcactaaanaaggatttgaatagttcaatatctcagtttctcttaccaagtaaatggatcattcttaaggtccaacgccttaaaatgatcactttccaagtaaaaagaatcgcttgattcacccttaaaaagaactacgtaagtctaatttcctcttcgatggagggtacgtatgagcaagagccccgcttttgtcgacctctaaaaataaaaagaaataagagtttagatacacaatttcacacaattctaatgtaaggctgttgtgcttcgggacaaacgtgagaggtgctaataccttcctcatacgtagatacaactcccgaacttggaatacttcttatgaccggtttccttcggtttttccgacggttttcacaaat

SEQ ID NO: 6748 - DNA, 432 bp, Glycine max
  unsure (1)..(432): unsure at all n locations
agctntaagcaaattcaaatgacnaataactttgactcggatgtccgattgagtcatttaataattcttgacgctagaaattgaatacagaagctctcaccaaatttaaatgacaataactttttactcagaagtctgattgtgtcccgtaatatatctagatgctcaaaattgaaaacagaagctctgagcaaattcaaacgacaatagcttttgactcggatatccgattgagtcatttaataattcgagacgctcaaanatgaatacagaagctctaagcaaattcaaatgacnaataactttgactcgaatgtccgattgagtcattttataatttgagacgctcaaaattgaatgcaggagctctcaccaaatttacatgacnaataacttttactcagaagtctaattgtgttctgtaaatatcta

SEQ ID NO: 6749 - DNA, 339 bp, Glycine max
  unsure (1)..(339): unsure at all n locations
tctggtttcaatttgagtgtctagatatattacgggtatcaatcggacatccgagcaaaaagttattgtcatttgaattttgtgagagcttctgtattcaattntgagcatgaagaattattaaatgactcaatcggacatccgagtaaaaagttattgtcgtttgaatttgctgacagcttcagtattcaatttcgagagtcttaaattattaaatgactcaatcggacatccgagtcataagttattgccgtttgaatttgcttaaagcttttattatgaatttcgagcgtcttgatatattattggacttaatcagacatccgagtaaaaagttat

SEQ ID NO: 6750 - DNA, 400 bp, Glycine max
tagcttctcaaactagtattcaagtcaatttgtttaaagctttcaacaaatacttgttgtattaaaatataaaatgaatgtaaaacaaataaaacttctttcataaaatcaacttatgcaactctaatttttcataagctccctcatccaaattgctcataaacaccggtaaatctatcgaaactatgaaattattgccatagaaaactaatactactagggtttcataattaataaacttccacaagttaatccaaactataccttggtcttcactaacatgtccagattaacatatttttggacttgattattttctatatctataactcttcaagaaagagaaataaaaagtgtcctgaatgtagcatatccatgctttctgtctatgacacaacaa

SEQ ID NO: 6751 - DNA, 594 bp, Glycine max
  unsure (1)..(594): unsure at all n locations
gttcgttaccatcantcaatantcnnntgcagactattttcctntctcttatcattcatctanacnnncacccantagcagcgcggcgttgcattccattgatnaccgttgcaatatacgcgacactctacagtactctacgctcactatctaaccgatgagacggacagagcttgcatcctttctatctcgnactctcacattataggccacggataaccttaagagggttattatccagatacaactcggtgcttatagacttacatggacacaactcctattcgcttgctattacagaaagaagcacccttacttcgtatatcttggagctaatcacactagtcgagctatgtccgtatgtaatacaggtatctcagccttcaagattgtggcactttggagaacccttcactacactacacattatgaaacctgggtgtgcatataatctctgtacgcattaattgtgtgaaacgctagcaacccaataatctcttcctctctttctctttcgccctaataacctacatctcgctggtaatgcatttaccgatcaatctattctctcttgacacacatcactgctctccg

SEQ ID NO: 6752 - DNA, 345 bp, Glycine max
  unsure (1)..(345): unsure at all n locations
agcttcaacattgaatntagagcgtctcgatatattacctgactcaatcagacatacaagtaaaaagttattatcgtttgaaaatcctcagagcttctgtattcaatttcgagcgtctcgatatattacgggactcaatcagacatccgtgtaaaaagttattgtcgtttgaattagctctgacgttcagaattcaatttcgagcgtctcaatagattacgggactcaatcagacatccgagcaaaaagttattgtcgcttgaattagctcagagcttcacaattcaatttcgatcgtctcaatatattacatgactcaatcacacattcgagtaaaaacgttat

SEQ ID NO: 6753 - DNA, 352 bp, Glycine max
tagagctaattcaaacgacaataactttatactcggatgtctgattgagtcccgaaatatatcgaggcgctcgaaattgaatgttgaagctctgagcaaattcaaacgacgatatctttttacacggatgtctgatcgagtcccgtaatatatcgagacgctcgatattgaattctgaacctctgagctaattcaaacgacaataactttttactcggatgtttgattgagtcccgtaatatatcgagacactcgaaatggaatgttgaagctctgaggatcttcaaacgataataaccttttattcggatgtctgattgagtcccgcaatatatcgagactctcgaaattg

SEQ ID NO: 6754 - DNA, 419 bp, Glycine max
  unsure (1)..(419): unsure at all n locations
agcttggcggcttcttccaaaggtgatctcgtatggtgaaatgccggtggctaaatgggtagaagtgttgtatgaccattctgcccaaatcaagaaacaatcccatgtggatggtctctagtgtacaaaagctctcaagtattgctcgatgatgcgattcatggcttccgtcgggccgtcggacagaggatggtacgctgagctcatacagagcttggtgccgctcaatttaaataattcttgccaaaagtgactgataaacagtgggtccctgtttgagaccagacttcagggcatgctgtggagcttgctagaaatctccatgaataaccttgccatacttgaagctgtatgatgttgtggtagtgtacctangtggactccctttgaaaagcgatccacaatgactaanataactg

SEQ ID NO: 6755 - DNA, 442 bp, Glycine max
tattaggacctatgaaactcagcttgcatactattgtttgataaaacaaaaagaggatggtaagccttggtatttcgatatcaaacgatacatcaaggacaaggaatacccgcctgaggcctctaacaatgacaagaggacattacagaggttggcagccagtttcctcctgagtagggatgtcctatataaaagaaaccatgatatggtattgcttcggtgtgtgaatgcaaatgaggctgggcagatactaacagaggtgcatgaagggtcatttggcacccatgccaatggacatgccatggcccaaaagattatgagagttggatattactagatcaccatagagaatgattgttgtgttcacgtaaggaaatgccacaagtgccaaacctttgtggataatgttaatgctccacccgtaccggtgaatgtgttgtca

SEQ ID NO: 6756 - DNA, 441 bp, Glycine max
  unsure (1)..(441): unsure at all n locations
agctttaaagtgaattgtggtcatatcaaaacaatctcttcttaacattaatcattagaagaccggttgatgttattttaaataggtttaattgatataatgctcctaattaattatgcattgcgatgtttggttactttaatacttattgtacttggtagtcaatctcaatgttctttctttcttggtaatgcatcactattctattgcttacagaatctcntaatttttggcagcaacaatgtcaaaaattattaaagagatgttacccccagatgtacgtgttgcaagagatgcccaagatctattgattgagtgttgtgtaggtcagaattatgtttccattatatttgatatgttgccttaattgttatatttgaagctatatntatggtctaaattcaagtgtgcatcttagtcgtgcacaaaattgatgatttt

SEQ ID NO: 6757 - DNA, 463 bp, Glycine max
ctagtagacactggttgttcctttacttccatatgcaaaagtgttgtatctcaacataattgctttagaagtaatataataaccaagactagaactatgtcaggagacataataatgaatgatacagaaactgaaaaattcactatacaattatctacaaattgtgacatttttggcaaaaagatttttataaacaaggctgacatagtagatttgcaacctgctaaagaacaaatgatcctaggacttgattttattaaacatgataatatattagttactattacaaaagattatttattaatctctacaaactcacaaatgtcaaaaataatagatgaactcacataagagatacgagcaaagtgtggtgatacccctaccaaccctacacctaccctcaattcccaatgtccttttgacatacgtggtagttgtaaggtaaaagaatacaaaagcattg

SEQ ID NO: 6758 - DNA, 425 bp, Glycine max
  unsure (1)..(425): unsure at all n locations
agcttngattcaaagcacagaatcccataactacataatttagcttatccaattattggtcccattatctgtcgtttctttcttcattcctccatcttccttgcttgctttcctctaccacttcaacctgtacttctctacattttctttgcaattatctactcacaccatagacaagaattgcatgtctctcctatgcaatggtctccttgtattagttggcataacaagatctttatctgggtctaatactgttgctgaaagtgaatcttctaaatatgttgaagatggatcacaatcttcatactcagatgttgaggctaatgatgcaataatctttgtggagaacgaagccttggagataattctgagcctcatggacataagacaggaacataacatgcaatagatatcaagtactctga

SEQ ID NO: 6759 - DNA, 464 bp, Glycine max
  unsure (1)..(464): unsure at all n locations
ctcagcttgcaagctgtctctctcctattngtatatatatatgttatttgaatgaaataaaactaagcaactgagagaaaagtttttctcctcacatattcaaagctttaagtctaataatggcatgcataaaaaattaataggttgcacgtaaatatcttttcgttactctaaaatgtcaaaactgaaaattcacttattctcctatcaaattagatcctcttcagcatccacagcaaaatataaaaacgaaaggcgaaatacagaaacaatgaagagaggaagccaaataatgccccgtcaaagataacaaaaagcctaataaaattattccatccgtccatgcttataataacttttcaactaattcatatccgttaataaaaaaaattagtttagttaatcatattacacttatcaattacttatactattattttacaatatttcttctattcctctat

SEQ ID NO: 6760 - DNA, 436 bp, Glycine max
agtcttctttggaccttgaacaagcaattaactcctctttcagaaccatgctatgtgctcgcgactggtctctttcttcccttcgcaacttgagttcactattgctaccccatagagctccgcgaaatttgttccggccatactcttccttgcgagccctcttggtctcttgttcaagggctcttgcagtaattgcattctcttcccgtaacccggcacactccttccgaacgtgtgtagcggccaacttgaacttctccttggcaagttttgtctttcctaactcgcttttgagagcttggacttcttcgtcctcttccggtgcttcaaaactctcttcgctgacgacttttaacttggcgagccaatctaaacctcgtatatgaactttcagccattcgtggtacccaccaatgatgccattacgaatgcctct

SEQ ID NO: 6761 - DNA, 477 bp, Glycine max
  unsure (1)..(477): unsure at all n locations
aggaccttaaaactaagcttaatanaaccttaagttcaaaaactntataagagtcttgaactctttttattagctgaaataagcttctaattaactgttctaaattctgtcaaaaataaaaataaactcttccaaatgtctcttacagtgcgtttgaatagaaaattttaactaaggaaactaatttatcagagaatttgaatttctgtaatttacaattcattgtctgaatgttttttatgaaaaatttaaaattttggaattttaaaacagaattttgaacaactaaaaatctggaatttcaacttccttctacaaggtgagaaattgaaattctcttattacaatcttcttcaagacaccaccgtttagcttttaaaatattgatcgggtgtgagcatagaagaacacatataactagcacatcaattatatcttctctttttttgttcatcactctttccatcttcataattt

SEQ ID NO: 6762 - DNA, 390 bp, Glycine max
agcttaaggatggaatacttacttgttggtgatgaataaaagcgcaaaacggaatctaagaatgcgaaaagtagagatcctaggggtgcaaactcgtaaattccgtgggtatggcttttgaaaggggggaaaagaagtttttgaatgcaaaaacgtcccccctttcgtcacttttatattttggtgcaggggttgctcgcccaggcgagctaacctgctcttttttttttattggagaggaacattaaccatgtcccctccttccttatgggttagcgttttgcctaacttgaaattacttaagttagaattaggcgttgattacttatttttaaaacaaacaaatagtaaaagaaaactgcgaatacaaaggatactgggctgccttgc

SEQ ID NO: 6763 - DNA, 574 bp, Glycine max
  unsure (1)..(574): unsure at all n locations
ctttgctacctctccactcctttcatttagtatatgttgtttttcttnnannnncccagaacgggagtgattgttgcctgcgtgaccatanactcttaaccttccacaattcttaagatactcctcacaactgatatgagcaatagtctcattgttctattaacaaccttccgcttggccaatggattgtgggcgacaagtgggtgataataacaatttattgcccaactcgatccacaaagtcctccataaatgcacaccatcaagcctacgtataggatgcctatatttaatggtgatgctattaagggctctacaaacataacacatgtgccatgttccatcctttttaaggaccaataccactgggagagctcaaggactcattctatatcttacccaacctttgctaatgagttcattcacttgtctttgacactatttggatgctcgtgcatgacttttatatgctagcctattgggccgaaaacgtccctgaatgagataatctgacgctcaatttccctcaaaggtggcagtccacctggcacatttgctggaaacatcgcttgcg

SEQ ID NO: 6764 - DNA, 352 bp, Glycine max
agcttagggatggaacacttacttgttggtgatgaacaaaagcgcaaaacggaatcaaaaaacgcgaaaaatgatgaccctggggctgcaaattcgtcaatcccgtgggtagggcttttgaaaggggggaaaagaagtttttgaatgttaaaacgccccccctttcgtcattcttataatttggtgcaggggtggctcgcccagtctagcccagctcgcccaggcgagctaacctgcacatttttttatatttttttttttgaggggaacattaaccatgtccccttccttctcatggatcatcattttgcctaacttgcccttacttaggttagaattacgcgtctgttac

SEQ ID NO: 6765 - DNA, 456 bp, Glycine max
tgcttgtggagcttctatggaggctggatctttgagcttcattgaggtccttcaatggtgactttacaccatggagatgcagtggaaggcacaggagaagaggagaggggaggcaccatccactggggaataagccaaggaagaatgagcttcaccaccaagaatctccttggataacaagcttgaagaggatgctttaatggaggaaaagacataaagaaggggggagcacgacattgaaggaataatagagggagagaagtggaactttgaagtgtatctcataagactttcattcatcaaagttacaacaagtgttacacatgcttctatttatagactacgtagcttccttgagaagctttctagagaaaacttccttgagaagcttctctgagaaaacttccttgagaagctagagcttagctacacacactcctctcataactaagttca

SEQ ID NO: 6766 - DNA, 371 bp, Glycine max
  unsure (1)..(371): unsure at all n locations
agcttgcttctacagtaatcgattagattatctaagtaatcgattaaagtgttcttcctaacatctggaaataactcaagaacaatgtaatcgattagatgctcttagtaatcgattaaagtgttcttgttcacttgtgaacaactaaatgagagaaaagtaattgattaatccatttggtaatcgactaaagcttatactcttgaataaatcaatcattgtctcaaacaacagtgtaatctattacaaaactacagtgatcgattaaattgatatgagactcaactctnttacctttaaacaacatgtggtaatggatcatgaagaggcggtaatcgattaaaatatagagtttttgtctgacatgaaac

SEQ ID NO: 6767 - DNA, 382 bp, Glycine max
ctttgtggataactgggtggtgggtaaagagaaggttcgttattggctgagtaatgacattgttgggctggtgggttggccgtatacgaatggtagtcacagcatgggtttctccctctttctcaccctcttcatttgccccagtcttctcagtcgacctagtacgatgatcaaatttgcctcttttcggacccacatcgatccttttactggcgaagaccaaatccggaaagctttgagggtgtgcagcccaccatcttttcatagtagagtatcgataatgtgcctaccatcacgattatcggctccctttccatcattggggataccacctgagccgccagatccctccaccttatgggcgcgttctttgaagatccgc

SEQ ID NO: 6768 - DNA, 414 bp, Glycine max
agcttctgtccctgagaaactggttcccagaatacaacagggagtgaagattgctgaaaaccctatccttgctacaagtcctagggaagtagacacggagatggacaagaaaatccgcagtattgtgagtagcatttagaaagacgcctctgttcctgatgctgagaaagatgttccaacatcctccaccccagatgttgttgtccctgaagctgatgaagatgtcccaacatcttccaccccgaatgtttctgtgcctgatgttgagaaagatgttccaacatcttccggcccaaatgctgaagtactctcttcccccagcaaagagagatcaacagaggaagatgatcaagccacagaggagactcctgcaccacgggcaccagaacctgctccaggtgacctcattgatct

SEQ ID NO: 6769 - DNA, 437 bp, Glycine max
  unsure (1)..(437): unsure at all n locations
cgctctacatttacattgatgtntgtatttattggaggaggttgtatgccatttttgttttaagagtagcatcccttggtaaaactaactttccaaatgtttgccttcgccggaaatggccccgaggaagcttgcctcaaagaggtccaggaaggataaggcggccgaagggactagttccactcctgagtatgacagtcaccgctttaggagcactgtacaccaacagcgcttcgaggccatcaagggatggtcgtttctccgggagcgacgcgtccagctcagggacgacgagtatactgatttccaggaggaaatatggcgccgacggtggacatcactggttactcccatggccaagttcgatccagaaatagtccttgagttttatgccaatgctcggccaacagaggagggcgtgcgtgacatgagatcct

SEQ ID NO: 6770 - DNA, 352 bp, Glycine max
agcttatagtatttataagtctcattcaacaaatgtttgttgtctctaaacagatatatttcttcacttgagcttgcgtctgaagagtgtggccgttaaagcatttaattcttgcattaaatgcacatactccttcatgttgaaaaaccattcttatgagctattgtgtttatcactcaagtagaaaaccacttgctttaactcagagcaggtatgtcaccaaaagtgagtgtcttttgatggtgttcgacaactttcagatcttgaacttcatgtattcttcatagaattcgatagattttatgagaatgtttttataaaacaaatctcatgacatgtatcttctatcgtc

SEQ ID NO: 6771 - DNA, 448 bp, Glycine max
tgacatcaaaattagcgcttcaagtatctttagaaatttctcttttactatttcaatttatttaattacttctacgcatatcatgatcgatctgcatctttatgctaaacaatttacctaatttactgttaatccatgatgccatatattatgacaataatgctgtggcgttatttccaggtttctatctcaaaataaattaatcacctcttgggggtgatttcaagcaactttaatttcatagccatgtgtgcgccatcaacacttggagccgtatgataaagcgttcattaccttggaataaactttctatcatgttttccttgttgaccattcacttaatatttgtctcatactacagtacacgagaattatataatgcagacacatgggggtgcatgaattggtttgatgcctttggacatttactttgctaaaactcactatg

SEQ ID NO: 6772 - DNA, 441 bp, Glycine max
  unsure (1)..(441): unsure at all n locations
agcttgttcacaaccataggagttaaaaaatatataagcataacaaggagtaatcaatatttttacaaaggaattttgtaaaagaaaaatggagggtttgctcgcctggcgagcatgtctggcagaagttttttaaaaagaggggggtgaagccatttattcaccccaaaatcttccccaactttcaaaaacacagcagctcacgggattcacgagtttagcagccctaagtcaccattttttgcattcttgcttccgtttttgcactcttcgttcacccctacaagtaagtgccactttcctttgatctttggctttccattgaagtattttagtgctctagctacttattttttttgcaaaattcgtaaagcaacttatgtgtgaattcatggttgtttgcttgaattgcngggctgtacgggatggttgtacgcttat

SEQ ID NO: 6773 - DNA, 377 bp, Glycine max
tccatcatgcggttgtcagagcacaagagcttcaagtcagtgctccttaaacctccattaatagtttgctttaccttctctcccatcgttgtttcttcatttttctccatgtatctcctcacatgtcttgagctaaacgctgttaacatgattctttatagattccaccgattaaactcgctatagaagctatatgtgagtttctatgggtcaaatttcttgttgttggacttgaaccatgaattgtgtcgagtgcacgtgcctttgagttttgtcatgccatattctgtggctgaaacctagaccataaagttcttacaatactattagagtagaagagaacctcactattctagagggacttgttcacctattgt

SEQ ID NO: 6774 - DNA, 421 bp, Glycine max
  unsure (1)..(421): unsure at all n locations
agcttccttgagaagctagagggggctaagctcacacccctccaatagctaagctcacacccatgccaaaatacatgaaaataatgggaagcttccttgagaatcaaggaaggtagcttccttgggaagcaaggaataatgcttccttgaaaagctagaggggagctactcacaccccttcaatatgaaatacaaaaaaagtccctactacaaagactactcaaaatgccttgaaatacaaggctaaaaccctactactagagtactcttaacttgtacccttaatttgtagggtaccctataaacctaaaattgccaaaatataaggcccaaaagaaggaaaacctattctaatattcacaaagaaaagtggacccaaccttcgtccatgggctcagaaatctacccttatgtntatgag

SEQ ID NO: 6775 - DNA, 417 bp, Glycine max
tctatagaaggttcgttcctaatttctctacaattgcctcacctctcaatgagctggtgaagaagaatgaggcatttacttggggtgaaagacaagagcaagcctttgctttactcaaagaaaagcttactaaggcacctgttctagctcttcctgacttttctaaaactttcgagctagaatgtgatgcctctatagtgagaattggagctgtattgttacatggttggcaccctattgcttattttagtgaataacttcatggtgccaccctcaactacactacctatgataaagagttttatgccttaataagagccctccaaacttgggaaaattaacttgtctccaacgaatatgtcattcatagtgatcatgaatcaacttaagtacattagagggcaaaacaagttaaac

SEQ ID NO: 6776 - DNA, 416 bp, Glycine max
  unsure (1)..(416): unsure at all n locations
agctntacacctaatttatatcctaaacatttgctatcacaaactacttacatacatttgaaatacaccatacaaatttctactgtttcactcctatttatttatatgcatattggaaagctaattacatcctgtacatatttgcattcaaaaggcattccgcactatcatacattcatttaggaagacaatcattcacactttgctaggaatttcatgctccttatatttacctatgtatacacattattgcaaggtgttttccacgctacctctttgtaaagcatcaaacatggggcaacccaaattcgagcaaaaactctcacaagagaatcctaattttcatgtttttctaattctaaaaccaaatttggattcctagccataagcatgtttccttgcattgaagctacaag

SEQ ID NO: 6777 - DNA, 438 bp, Glycine max
tccttgagaagttagctacacacacccatctaataactaagctcacctccttgacaaaatacatgaaaatacaaaaaaaaagtccctactacaaaaactactcaacattccctgaaatacaaggctaaaaccctatactactagaatggccaaaatacaaggcccaaaagaaggaaaaacctattctaatatttacaaagaagagtggatccaaccttgacccatgggctcaaaaatctaccctaaggttcatgagaaccctagggccttctttagtagctctagcccaagcctcttggagtcttctatccaatacccttgtggggtaggattgcatcatcccctccaccttggaaaggatttgacctcaaatcccgaggttcttcatactctaagctccttccttcgacacctgtaaaaagaataaaaacatatgta

SEQ ID NO: 6778 - DNA, 435 bp, Glycine max
agcttgttcttcagttgatggatgttaaagggctcacaatttcacacgtcaagagccatcttcaggttaggaacatagaataaaattttggtggcgcatggttatgtttgatattgggtgttactaatattgggtttctctctttatccaaaccagatgtacagaagcatgaggggtgacttgggcagacaaggtactgaaccttctttttagtgatgatcatggctcctcaatgcttccttcttctgcttatatatagtaatcctatttgtctgtcatatatccatgtctgtcatatatatatgggaacttaatttagaccatgctttgtgcattgaatgctgattggtgtttcttctcttggcacatatttgaacttaaaaaacaaagcctatgaactctcacttacgcacaagtttgggatatctgctactg

SEQ ID NO: 6779 - DNA, 473 bp, Glycine max
  unsure (1)..(473): unsure at all n locations
gacctataaaactcagcttctttaaaaacttattgaaataagctaaaaagaacttgtatgaaggtcataagtcatttatatatatccaaatcagcttcattgaagctctacccaaaccccccctagataattaatctaatttgtacagaggaatgaagtacctttgccctgtgttgtaaaagcaaacttgtttcaacactctcacacattccagaggtgctacttgtttccttctgccgtgagctaacctataaatagagatactacaaaaaccataaaatacaatgcaaacacttacattgttataccaatgttgcataaacttaaccataaatgatatggacaaacaaaatatagagttctttgatggagtaaaaacaagtgacagatttcaagcatacggagttctatgatctgaagaanacacatattccaattgataatatgattattatcaggttggctcatgacta

SEQ ID NO: 6780 - DNA, 242 bp, Glycine max
cactaactactgcgtataaatcattcgtctgtggtgacaaatatatcgcttaaagaattatccgccgtcctgcgcactcattgtaatactgatgaaatttaatactttcttgacttcatgacaccatcattaaccgttgaagaacctgattctctcacgggaagatatccatgtccccttgtccataatattcgcccatggcgtaaaacgcgcataatgagtcgtccttttccgccactagt

SEQ ID NO: 6781 - DNA, 424 bp, Glycine max
agcttcacaatgccttagaagaaggtgtgtgtactttcaatttgtagcttctgattttgcctttcatgtataaatccatgtttttcaaatgtggctatatatgttctactattatgagatgtgcaaactttgtacttgataatactacataattgtttctttcctttgccagaatcaaggaatatgcagcgtatagctcgtaacgaggtacgaatgatcttggatgaacaagaaaagctgagtagtgaattggaggaaaaaaagcggaaacttgattcctgtagtagagatctaaacaaacgtgaggccctaactgatcaagagaagaagatactttatgaggacaagaagaagggtatgcatattatattctttggcctgtaaatatgtactcatctaaatataattattataccttggttct

SEQ ID NO: 6782 - DNA, 389 bp, Glycine max
ttgggcttctgtaacctgcaaatcatcttcctccctttaagtggacgtaccaatgatgtcccagtgatcttgtaaaatgttatagtgtaaggataatgtatccacaaagcagtaaatgatattaagttgatatgataaaccaatggcagaaataggatttttaaaaccatttggtatagtgatacatatgtatcggaaaggtgtatgggagtgaaaattgtatatatgacaagaagcaccagagtctaaaccatttatgattatgtcctgtaggctggaaaagaaaagatgttagtacgcataacaacaccagtattatgtggatctaatacgtggttctcacaatgtgacagataagcttgagctaattgagattgtggcaagcaaga

SEQ ID NO: 6783 - DNA, 427 bp, Glycine max
  unsure (1)..(427): unsure at all n locations
agcttttacaactaaattttgtgatcttaaaaagatcaagaataatcattttaaatttcagatggataaaaataaaagaataatttaaaggccaaaatcaaaattacctcatttaacaaaaactcaaaccatatttaattatattatttaatattaaaacactagtcaaactttcacttgcatcaatctcaatgagcatggttggatntcttgtatcatgaattatgctttctctcattcaataaccatcagtacgtctaaacaaatacataaatcaattatttttttggttaggggaagggacatttattagccctcaatacataactccatagaaaaagaaagcttaatccgacaaacatcgggaaggcttagcattttttctttttgaaacctcaaaactggtccagcaacccgcatgcaattg

SEQ ID NO: 6784 - DNA, 450 bp, Glycine max
acaagaaggacttcaaatggcagtgcgggaaggagaacaaagtacaaaaatgcatagaaatgagaagaaacctaacctttcatggctgacagttgcagaaccgcgagaatgaaaattacgttgtagcgtgatgagagtgaaggcgataatgatgttgcagcactatgagaggaggaaatgccggcagtgacaaagttacagtgtcgtgagaggttgcaaatgagagtgcgaaagcgttcaagttgttggatcaagtggccttggaataattaagaagggggggttgaattaattattaatgtaccttgcctaattaaaacttatccttcttaatgttactagattcaattaggctttactactatgttatgtaagttaaacaaaagtatagcgtacaagtaaagtacacatcgaatattaaaaagcgttgggaaaaagaagacaaacaga

SEQ ID NO: 6785 - DNA, 436 bp, Glycine max
agcttctgccatggtatctaatcgagggggactagctggaagacgaggtcgccctcaatgttcttactgtaagagagtgagccacacacaaaacacttgttattgtattcacggattctccgaataatcggtgaatatttcaaagtctgaaacatctaagataaagttttcgaaggctaactatgaagagtatctccacccaaaagctgccaataaatctctaacatcatctactataagtggtcataactccactgcctgcatttcccaatctggtaataatcaaagtccatggataattgattcaggtgcttctgatcatattgctggtaatagttctttattttcattcctctctccttctaaaattcctcatttcattattttaaccgatggttctagagtgcagcaacaagaatcgccatgtatcactcac

SEQ ID NO: 6786 - DNA, 549 bp, Glycine max
  unsure (1)..(549): unsure at all n locations
tgcttgtctcccactgctgtttactctccttcctccnncnnntnccgccggggtgatgatcatgccttncgnacatattaanctcatccttcttgtgacattgctgtaaagatacaggtggacattcatctagacccggcgatatgttggtgagaacacaatgcccgcataagatctcctaaaatgcgaaccctgatgctattgtctatcatggatgtgcacatagtgtcattacaacggatattgtggacaggcgttcgtgtagaatacaanagtgtccccggcttcaaataatgcgggatggtccctagacaatctgcacagcgttgcaacgcgtgttgactcctagctctcacacatattacaagatttatctatatacctgccttcaaaaaacatttctggtgaactgaacattaggtctagaacccattccgcgcttacccttaccgtgtcatacacaacgctacttgtcgagtcctgccattcttgacatcaaggcgcgacgcttgtacctgttattgtatttcatgcaagagatagactgtc

SEQ ID NO: 6787 - DNA, 437 bp, Glycine max
agcttcaaaccacagcaacacgaaatctaggtatccaaaacccctccatttaatggattttcaaggtttgagaagtgaaattgagaatgggataaatttggagtaaaacctcacctcacacaagtctataacatcaatttaaacttgctcaactggatttacacctaatatttcaccgaatcaaaatttgactcctcaacacccaattttaccctagaaatggctctttgttcactttggtcatttgttttttctctcttgcacagtccaaactttctcataagtcctaaatgaaatttcaaactaggattaactccctttaacctccaaataccactaaatacagatttggccttccaactctcaaagactcactctttgtccactcataacaccatattctcactttctaaccctaggttaactctacccttcat

SEQ ID NO: 6788 - DNA, 456 bp, Glycine max
  unsure (1)..(456): unsure at all n locations
ttctaagttntctagtttccaaactgtgttctttcacagaaaacaaaagtgtgctattcatctttttcattatcttctcctttttccaaaaagaattcgccaaggactaaccgcctgaattctttttgtgtctctcttctccctttctcaaaagaacaaaggactaaccgcctgaattcttttgtgtctcccttcttccttgtcaaagaattcaaaacgacacagtctgagaattcttttgattcttccctttcccataaacaaaagatttcaaaggactaaccgcttgagatatcttttgtttccccttaacaaagtttcaaaggactaaccgcctgagaactttgtcttaacacattggagggtacatcctctgtggtacaagtagagggtacatctacttgggttgttgtgagtgagaacaagagagggtacatctcttgtggattagttcaa

SEQ ID NO: 6789 - DNA, 398 bp, Glycine max
agcttttccaaagtggtcttcggcattacatttaaactcgatccattgtcgataagcacctttgcgacaacatggtccatacactttaccgacacatgaagagccttgttgtgtcctctcccctctacgggaatctcttcttccgcaaacgcgatataattgttggtggttatatgattaacgatgccttcaaaaccctccactgagatatcatgggctacatgggcatcgttgaggacttttatcaacagcgcacgatgaggctcatagtttatgagcagttcaagcaacgagattcttgctggagttttattcagttgctcgactaccttaaactcgctttgttggatgaggcggaagaactcatgggcctcttccaaagtcacggtctttccttg

SEQ ID NO: 6790 - DNA, 360 bp, Glycine max
gcttgggcttcattctttacgcgtaagtcaccctgccttcacttatctttccaaaacttgagtcttgacccatcacccaccttccatctgaaactgttactgaggctattgctgtgatgatactgaaaaacagacctcaagaccttccaccattcttcaagaagctatatgctgtctttgtggaatacggtccaccagattaaatccccatacataaggtccttgcttgctggtgaatttgaaactcaccattgctgtccataagctgctgccctattacttcttgggcaaaaaagtttctcctccatcgaaacttccacttccatctattatacactaagatacccattgacgtcgatt

SEQ ID NO: 6791 - DNA, 434 bp, Glycine max
agctttaaatagactatgaaatcgtgacactgcgcttagcgccagtctcgagcttagcttggctgaaggcacctgctgcgcttagcgcactgatctcgcgcttagcatgcggctttgatgctgatgctctaccagattctcctttgagttaagcgtgctgaagctacgcttatcgatggatatgcacttagcccaactgctgagcttagcccaattgctgctttttgcaattcaaaacttagcctctttttcacctgaaaatgaacagatttcatcattaaattcaatggaaatgttctagagacagcgttaaccataaaacaagatatatttacaaaatttactccaaaatgaccatatattggggaactatataagctttggagaatgatttctatacaaagttagtcgtataaagcgactaagaatcacaa

SEQ ID NO: 6792 - DNA, 440 bp, Glycine max
  unsure (1)..(440): unsure at all n locations
ntgaattccagtccanactccctttctataatctgatttcatgcttaaatacgtggacttgttcatgctcgtgcgcttatgcacttattgaccgcttagcgcacgttagtgatatttggcttagcgcgcctttctcgcttagcggatgaactaaagcggtgcgcttagtgagatgaagcggtgcgcttaccgaacttgtacaactcatcttcttctatagtcttcctcgcgcttagcccaggagtgttgtgcttagcggacgctcgctaagccagcatattggcttatcgagaatgtgaataacaacacttaccaaagctttcctaattaacctgaaattgagagaaaatgactattaatcacacaaaatgaaaatactaggtatctattacctatacttaacacaaaatacttataatactactaaataaccataaatt

SEQ ID NO: 6793 - DNA, 413 bp, Glycine max
agcttcgtactcagatccctcttgttggactatggttaacttaagccgcccttgtaggtttagactaatttaaattaagcttcatcctcagatccctcttgttggactaggctcagcttaaacagcttacataagtttagactaatttaacctaagcttcgtcctcaaatccctcttgttggacaaggcttaaattaaacagcattatcgtcacaacataataagaaaactaaaacttaatcctcagatccctcttgttggactaagtttcaatccggcttctatcaaggtctaaggcaacaatacattttccaatgctaaagtcacctaactagacatacaaatgggtgatcagaccaagagcatgcaaaaattaagcattgaaagaagcattgaacaccggaaacacaata

SEQ ID NO: 6794 - DNA, 368 bp, Glycine max
actatatatactcaagctttcggagtagaaacatgggaccaacttattatatttcataaacgaagtcgtatccaatctaggtctgagagaccatacaagcgtactatcgatcgttacatatgtgggccattaactctatcatatgcttgttataacgcgacaagcccatgactctcttcgggggtggagtaggtgactgccattgccgtggccttggctaacccgcggtggaagtctttgacttccgtacaatggtaacaacaaactggtccatccacttggctgcctcttggcgtacagagtcgatcaccatttctatagcctgttattgcgcatatacttgagcatactcatccgcgactctatgc

SEQ ID NO: 6795 - DNA, 435 bp, Glycine max
agcttgcccagagaaggagtccacggaggaaatgcttaccacctcaaaagactggaaagcggtttctaatgactcctctgcggcttccacataaggcatagaggatgggcagctcaccaagatgtcttcctcgcctgatacgatgaccagatgcccttccactacgaatttcaacttttggtggagtgttgagggaacaactcctactgagtggatccacaggcgccccaacagacagctgtagggggggttaatatccattatttggaaagtaacttgacaggtgtgagggcctatcggtactgggagatcgatctctcccctaacctctcggcgggtgccatcgaaggcatgaaccaccattgaactctgctttaagtgggaggcattgaatggtaatttctccaaagtgctcttatgcatcacgtttaaact

SEQ ID NO: 6796 - DNA, 381 bp, Glycine max
  unsure (1)..(381): unsure at all n locations
ctttcttctggntgttctgctaagatttccaagcgttaaacagaacgagaagggattggaacctcacatttactatctttgtgcgagacaaatttctcttgttaaaaaattatttcacaaatcccaacgttatggatgtgggaaaatgtgttccacacttggtgatcaaatttctcgacgatccaacgattaatgattttaagatcataattttattggaacaggtttaggtgtatgaggttaaaagaaagctccgtgcgagggacatttctctccccacagacattatttcataaatcccaatggtagagatgtacgaaataagtttcaaacctagtgttcaaatttcacgataattcaacgattaacgagtccaagatc

SEQ ID NO: 6797 - DNA, 360 bp, Glycine max
aataggcttgattgctcaggttgtcattacaagttcttactaagtaaaatggatcattttcaaggtccaaacgccttataatgatcaccttttaagtaaaaaaatcacttgctaataaagaactacgtaggtctgatttcctcatcgaagttgaggaatacgtaggagcaaagggaaatacccttgtctaccacaaaaagaagataattataaaaagggtctaaagaatataaagacataaaactggaacgtaaaaatcaaagtcatgtgtgcacattcaattaaaagctgtcgtcccttgggacaaacgtgtggggcgctaatacctttcccaagcgtaaatacaactacctagccttt

SEQ ID NO: 6798 - DNA, 449 bp, Glycine max
tgtcatctcgaggctcaggttctagccacttaagtagctaacggagcatggaacgagcagattcccgtgaagtgaatgccaacttgctacctataagtgcggctgctaatgagtcacattcaggggaagctgctgttcgtgaaacatcttctgtgccattcgaggatacaactaccataaaaaagcctaggctgggtttgcgacaccctctaccctcacaaataacgaataataggaaataaaatcatgcataatttttttctaaacacattgactctaaattaatttcaaaagataaaaggttcacactcacttaatgaaaacattgtctaaattgttcgaataaaaataaagttatcccggctcaaaacaaggttgtccctgttgaataaaaagaactaaaacagacagcgtaacacaattatatcgtttaccgagattataacatg

SEQ ID NO: 6799 - DNA, 404 bp, Glycine max
agcttgttaaattaaatattacaataataattacctaaaagtcataagtagtatttattagcaattttagtagttttttttgtgaatacaatttttagtagttgaaagtgtaaatattttttatattggttgcatataaaaattaaactataaaatgaataatataaaggaaattatagatagtagtataatacgtattgccttaataaattagcacgctgggcgtgtatacatattacatagagtggagaggaatcaggaaaccgacgtttgtggaaattatataaaaggtatgcaatagggttgggttagataaaaacccaaaacacaacacggcagtgaagttattagaatctgtgttgtgttgtgttgtgttgagcagagagagagaatgatggataaga

SEQ ID NO: 6800 - DNA, 443 bp, Glycine max
  unsure (1)..(443): unsure at all n locations
gttaaataatggtttatcaacatttaatattaatctacatcctgcaagagaaataatactgtattaagcatttcgagttttcctccctgatttgctcaaatccacgtgattttgaacaatatcttaataacagtatctaattacagtgtttcctaaaggcatatgacattgtacaccaatttctgggtcatcaattcgcaactaacaagcggatgttccgcacagaacaacaatatattttatttggtcaaattgaatttcaagtgtccacaccttgcatgtcaagaaggaagtngcttatattctggtaaacgtagtatgcctttaatttgacatccttgaaaatggtggaaggaatgaatcatgcttcttgattgaagatgggcatgggctatctgagtcgtaggcgaaagggacgttggactattaaggatatatgacct

SEQ ID NO: 6801 - DNA, 420 bp, Glycine max
agcttgtccataaaaaatagtttttttttttaagtttgtcatttcaatttcttactaagtaaaatggatcattttcaaggtccaaacgccttaaaatgatcaccttttaagtaaaaaaatcacttgctaagaaagaactacgtaggtctgatttcctcatcgcaattgaggaatacgtaggagcaaagggaaatacccttgtctaccacaaaaagaagaaaaatataaaaagggtataaagaatataaagacataaaaagggaacgtaaaaatcaaagtcatgtttgcacattcgattaaaggctgtcgtcccttgggacgaacgtgtggggtgctaataccttccccgtgcgtaaatacaactcccgagcctttcacttaaaagttcgtagatcgcgtcttttccggtttttccgacgt

SEQ ID NO: 6802 - DNA, 464 bp, Glycine max
  unsure (1)..(464): unsure at all n locations
tgccgcccagctcgcccaggcgagcaaggttgcttcctccagaagcaacagccttctggagggcccaagtgggcctggttgctatttgcacccctttttttactaaatgcacccctttctatttttttgtaattcttttttccgtaacgttacgaaactttatgaatttcgtaacgatacttattttccttccgcaaggttacgaatccttacggattatgtatttactcttttttagctttcgaaggagttacggaaactcacggattgcgcaaaaacacctcttttcgacttccgccacattacggaatttcacggatcgcgtaaacctgcttcctttagatttctgagacgtctcgggacttcatttattgtgcaacaaaggacgccaagtatctcanagcggctaaccaaaggttgcatgtcatcaagtaataatccccggacgaaattagggtatgaca

SEQ ID NO: 6803 - DNA, 440 bp, Glycine max
agcttgccaaattccaacgctcctgcctacaatttttttagggttaattacaaatttgatttttttttaattttttaaattcataattttgatttttaattttgatatttagttttataaatgtgtaattttgatatttttgataaattatgagtattagatatttaaattaattataaattaaataaaaatcattaatttttaataaaagattactaatattaatgtaacgttagtatcgatggaaacattacatgccaccgtgaagtagagaaagtgtttacggaaaagaataagaatataacattgtgaaaaattagaataaattttttttaattcaatttttttaaataattaatttaataactcaattaatcaaaattatttgtttataatttatcagaaagattaacatcagttatttattagattagagaaat

SEQ ID NO: 6804 - DNA, 462 bp, Glycine max
cttgacgattaatgagaagtccatatttttgaagaggtcactgcaaacatcgagaagggagggtgaaaaaaatcgtaggagagctagacaacatggagttcagtggggccatcttggtattttgtttcctctatctgcattagttgcttatgctaattgttgcttctttttgttttctttggtcttgtaaggccaacttctccaaggtgttgaccgcgcagaacaaggttttctccttgattttttcttgttattttatttttgacttgaatttgctcgtttcgtcagattgttaactgtaaattgttgtatttgaattgatgatgatctgatagatatgtgtggtgaaattttgaatgtgacacgaatgtttccttggtgcattgtcaaaaactaagtgttttttcggtgtttcgatagaatttaaataggacaaaaatgttgctaatgcaatagctggag

SEQ ID NO: 6805 - DNA, 431 bp, Glycine max
agcttgatacttctacttgtgatgaaaagattaataacataaaagagaagatgtacaagctctttgatgaatatgtgagtgtaaagtcaagttcatctactgcatcaagttctcaacaacctactgttgaagaagatttcagtatagaagaaaatcaagagatggatgatccatataatgttagtcttttcttttgtttaattatttaattgctttattattcaatttatttaatttaatttttctcttatattgtcataggaatatatcaattatgtgagccaaaatgtaaatgtcaatgacaagtctgaattatatctctatttggctgagacaccgcttgaaccaaagttttttcctaagttggatattctgagttattggaaggaccgccaagaacgttatccaaatctttgtagattggcatgtga

SEQ ID NO: 6806 - DNA, 460 bp, Glycine max
  unsure (1)..(460): unsure at all n locations
tgatgttcctcgatntgacgaccatgatccactaggttggatcttcaaaatctcacagttcttcgactatcaaggaactccacaagaagagcgtatcacggtggcttccatctaccttgatggcccagcactcagctggtttcaatggatgttcaagaacggatttattacgtcttggtcggcgctgcttcaggcgatcgaaggcccgttcgctccttcgttttatgatgatccatgcagaacattattcaagctggttcaacggagctcagtaacggagtacctcaccgaattcgagaaactagcaaaccgtatcactggcctttcaccttcagtcctgctaagctatttcatctcaggccttagtccagaaatacgccgagaggtacaagcctttcaacccatatccttacctcaagctacgtccctagctcgcctccaagaagacaagataaatgat

SEQ ID NO: 6807 - DNA, 417 bp, Glycine max
agcttgtgataaaatctagagagatatcattctatacgacttctaggatcggaatatgttgcagcaaccccgctggagacaacacctggtacttgttatgttgataaacgtcacattggcggatgtactccattataatagctttcattctcttccaaaagaagctggaagacaaccgcttatacgtcttcgtgaatcccgaatggccacctgtaaccgtgtcgtgaaattcggccatcaaagtaggttaggcaacatcaaacagctcttgaagaataggaaaccatcgtgcagagtatagtgtggcagagaatcataatcagattgcaattgggagctcaacttgaccaactcaaggtcattttgcacttcgttcttgatagcagggaaatccacccaataaggactaatggagat

SEQ ID NO: 6808 - DNA, 468 bp, Glycine max
  unsure (1)..(468): unsure at all n locations
ctaattntcatggtttggttgattaccataggattagggtctaacagtatttgtaatttaaaaacacacttaaaggtaatttagtttcatacaattaaaacaggaaccagtgctcgacagattttatgtttttggcagaatctgagttttaaagtgttacaaacaagttataacatcactataatatgaaattaagttaaagttttaatgtattaacctatggaacatcaaaagagagtattttgaggctcaattcacaataaattcgtgcaaatcaatggatatgccactgctctattgtagcagggtaaacataagcaaaattccataagaatcatgggtatccatggttcccatgttcacaagtaatttctattattatagaagatccaacgacaaattcaaatgcttgtaagatatgacctctgaacttctcagcaatagatttggtcaattgagaactaaaca

SEQ ID NO: 6809 - DNA, 402 bp, Glycine max
  unsure (1)..(402): unsure at all n locations
agcttctttgaganaacttccttgagaatctagaacttagctacacatacccctctcataactaagctcacctccttgagaagcttccttaagaagattcctaaagaagctagagcttagctacacacacctctctaatagctaagttcacctccttgagatgagaaggtagagcttagctacataccccctataatagctaaactcacccctatggcaaaaaacatgaaaatacaaaaaaagtccctactacaaagactactcaaaatgccccgaaatacaaggctaataccctatactactagaatggccaaaatacaaggcccacacgaaagaaaaacctattctaatattacanagattagcgggctcatacttagcccatgggctcgaaatctaccc

SEQ ID NO: 6810 - DNA, 411 bp, Glycine max
  unsure (1)..(411): unsure at all n locations
tgngaggattgatggggacccgggttgagataaactatgatatgggctacctgggagcacgtgagctcagttggaggtgggccacaagggatggtgggtttatgcgtgatttgtggatgtggaaaacttgttgtgcaccatcgcccgaccgccacctattaccacatgtgatgggtaccccataatcctacaagcttgagatgaggaagtgtataatggtgaaacttcctgcttttattcgttgactacagagtggtacctgtagatatgtcccgggggtcacgaaaccttggggacgtcacgcggggtgctattgtccaaacccaacttgatcaatcccgacccaacccgggcatagtcaatcagtgagaacctgtgatgtacctaaacatgcgagctcctggcattcat

SEQ ID NO: 6811 - DNA, 395 bp, Glycine max
  unsure (1)..(395): unsure at all n locations
agctngacctgtcggagttatcatgaattcacccagtgttccattgctcactactcaagccctatctttcaccgccaacatcgtcggaagtccctctcaacctgcctccggcattagaggagaatcaacaatcatcaccccacttgcgatactggatgcaaagtgaataatatcgatgaggacactaagttacttgtacttgtgcaatggacaggactgcttccggaagacatgtcatgggaatcttgggagaaattgaaggcaaaatacaaccttgaggacaaggttgctttggaagcacaaggggatgttaggaacagggcacacacaataaaaggcagcagaggagcaacaaagcaacacagaaacatgagcaagcacatagacaaaggaag

SEQ ID NO: 6812 - DNA, 504 bp, Glycine max
  unsure (1)..(504): unsure at all n locations
cgcggctttgatcctccctagcattacggaactataaaactaagctntctaacaagcttctttgagaagctagatccttatctatccacacccctctattaactaaattaatttccttaaaaataattacggatgaaaataacgcaacaaataatcaaacatcaaacataattactaataatatatagatatatatatatatatatatatatatatatatatatatatatatatatatatatatatatatatatatatatatatatatatcagggtgtcacaatccccgttagaattggagctcgtgttggagttggagatagagttctagttagagctcacaccagttccctttggagttacaatgaatgtccgagaatgatgatgagaaagcaccactccccactcaagttcgccttcatgaattgcgcaaaatatgtgtgtgcgcaacatctattgttctctactctcagacataaatcgcgacagatatccccattctaa

SEQ ID NO: 6813 - DNA, 432 bp, Glycine max
agcttgtaatcgattacacacatactgtaatcgattaccataggagattttcagaaaatattctcaacagtcacatctttttgtgtggttcttgaatggctatcaaaggcctatatatatgtgacttgagacacgaatttgacaagagtttttcagaacaaaaaggtcttatgctcttagaaagaaaaataattttatcctcttacaaattccttggccaaaactcttgtgattcaataaggaattatttgagtgctcaaattgttcaatctatctttttatagagagatttcttcttctcttcttcttcattctgaaaagggattaagagaccgagggtctcttgttatgaaaggattctaaacacaaaggaaggattgtccttgtgtgtttagaacttgtaaaacgaatttacaagatagtggaacactc

SEQ ID NO: 6814 - DNA, 572 bp, Glycine max
  unsure (1)..(572): unsure at all n locations
tcttcccatctctcctcttatatatgtttatcnttctttacctcttcanntctctancccgcgcggcngtgattcattcctgctctacgtgaccattaccatactctagctcgtagacagcacatgttgatattatacatctatattgtcttcaatgctatcatgactggtataactattcttacacaatctgccaactgtgttgttccatagaatcaactattgattttaaacttacattgtctcctctacaaatcatcaaatagaaatgctctctgctatcactattttaccgctgagcgcctcatatattaccatctcacggaatgactacgatgaccgctaccctgtgacttgtgtttttagatgcactcgcataaggtagttgttataataaccgacagaggtgcaaccgccccttcatcaaacttaccctaatgcatactatgatttcaccaatgaatatattccatggttctacttgaacaactattccattgggactccattcccaaaatcagtaattatacattaactcaccatgttagtcgacactctttattcttacctcc

SEQ ID NO: 6815 - DNA, 410 bp, Glycine max
  unsure (1)..(410): unsure at all n locations
agctngggttcctaggcctagaattgcattctggcactcattataaatcattcatgctgtccctatacatataaaacagtcccacaacccaaagctcacaaaaccatgctcatatctcgttgaggcatttcaccgagcacttggtgggcgcatgtttaggcacgaatatcaagagaatggggacaatgtggcatgcgccatcacttcagaatacaccctaggccaaggccatcccttacaacccctcaatttaacaaaaacaaacaaccatttgaggataaatccctcacgttttttagcaaacacatgcaatttagagcaccaaaatacatcaatggaaagctagaaagccaaagaatgaggtacttacttgttggagacgaataatagagcacaacggaatcaaaaac

SEQ ID NO: 6816 - DNA, 455 bp, Glycine max
  unsure (1)..(455): unsure at all n locations
tgcttctacactgctggtatgttgccccagtgttcttgagcccaaaggacatcaccgtatagcagaaaggtgcccacagagtgatgaaggttgtantttccatatcctctagtgccatctttatctaattatagtctgaaaacccatccatgaaagaaaaacagggcaaaattggtcgtgttatctacgagcacatcgatgtgtggtaaaggaaagttatcctttggactgactcagtctaaatcctgatagtccacacacattcgtaccttcccatccgttttatggactggcacgatattggtgacccattccgagtactgagcaacggccaagaagccaacattgaattgcttcttcacctcttcttttattttcagcgacatctcgagcttcattctcctcatgctttgctttaccggggagcactcgggattcagaggtagtttgtgcta

SEQ ID NO: 6817 - DNA, 371 bp, Glycine max
  unsure (1)..(371): unsure at all n locations
agctntgagcaacttcaaacaacaacaactttttactcggatgtctgattgagacccgtaatatatccagacgctcgaaattgaataccgaagctctgagaaaactcaaacgacaataactttttactcggatgtctaattgagtcccgtaatatgtcgagacgctcgaaattgaataccgaagctctgagcaaattcaaacgacaataacttcttactcggatgtctgactgagtcccgtaatatattgagacgctcgagattgattatcgaagctctaagcaagttaaaacgataataactatttactctgatgtctgattgaatcccgtaatatatcgagacgctcgaaatgcaataccgaagctcta

SEQ ID NO: 6818 - DNA, 367 bp, Glycine max
tcaacattcaatatcgagcgtttcgatatattactggactgaatcatacatccgagtaaatagtctactgtagtttgaagttgctcagagcttcaacattcaatatcgagcgtttcgatatattacgggactgaatcagacatccgagtaagaagttattgtcgtctgaattatctcagagcttcggtattcccactcgagcgtctcgatatattacgggactcaatcagacatccgagtcaaaagttattggcagttgaatttgctcaaagcctcgacatgcaatagcgagcgtgttgaattactacgggactcaatcagacatccgacgcaaaggttatctgtcgttctgatttgctcagagctt

SEQ ID NO: 6819 - DNA, 373 bp, Glycine max
  unsure (1)..(373): unsure at all n locations
agcttctcaaggaagttttctcaagaaagcttctcaaggaagctacctagtctataaatagaagcatgtgtaacacttgttgtaactttgatgaatgagagtcttgtgagacacaactcanagttcaacttctctccctttttcttccttcaatttcgtgctcccccctctctctttctctccctctttcttttcctccattgaagcatcctctccaagcttcttatccaaggctcatcttggtggtgaagctccttcttccatggcttattcccaagtggatggcgtcgcttcttacctcttctcctttgtcttccgctgcatctccatggtggaaaatcaccattaaaggacctcattgaagctcaaagat

SEQ ID NO: 6820 - DNA, 416 bp, Glycine max
  unsure (1)..(416): unsure at all n locations
tctcatggaagctacctagtctataaatagaagcatgtgtatacactcttgtaactctgatgaatgaaagtcttatgagacacacttcanagttccacttctctccctcttttattttcctccattaaagcatcctcttcaagcttcttatccaaggcacattcttggtggtgaagctccttcttccatggcttattccctagtggatggtgcctcccctctcctcttctcctttgccttccgctacatctccatggtggaaaatcaccattgaaggacctcaatgaagctcanagatccagtctccatagaagctccacaagcaagcttccatcacctcacttgctcgaaatttccagtctttattcactcatggcccagacacagatgccacaaagaattatcattggatgcat

SEQ ID NO: 6821 - DNA, 425 bp, Glycine max
  unsure (1)..(425): unsure at all n locations
agctnttaccaccctctgtttcttggatcattgaaccaaatggaattacaaaatcagagtttattgtttgagagaaacaccgttgaaaaccttaatccaattacaaagatgcatagtcaattgaacaaagattcaattaagaaaaacacacaaatcataaaaaagattagggatataaagatacatgactcaaacaatttatattgtttagtcattttttacctacatcttgttaaattcgacaaccccagccaaatctttccacttaattcatttttagttcaaatcacatcaacacatacatcaatactcagccattgttgagtcctacaataataagagtaaaaacaaaacctctttggtgaacgctacaacatagattctaataagtatttaagtcacaagagatttgtgtcttaagacaa

SEQ ID NO: 6822 - DNA, 451 bp, Glycine max
tgtgcttagagagagcttagcctcttctttggttttttgactgaaaaccaaattaatttttatcaaggaagctattctctcgtgatgaatcctccttcggcttatcgattcttcatggaccatggcgtcattctgtttatcttcttcatcttatctatattttgtttttctgttcttgagttcttggaaggtcaataatgtgattcttgaatttgcatccagaacgatccgaaccaagtgtccatggcttggattgcatcacatggtaatcatagcttgaatccgaagagaagtttgaaattatatccatcaatttggtgcagttctatctttttggtttttgtgattttcagaaaaatgagaaactgattttcatttgcttcttgttcgttcgatctttttatttaatcttgcatgtgcctttgatttacctatctttctgttgaatttg

SEQ ID NO: 6823 - DNA, 429 bp, Glycine max
  unsure (1)..(429): unsure at all n locations
agcttcctccacgtgttcctccatacctagaacttcaaaccttcgattctcactcgattcttcaccaaatcacgtcccgtaaagcctaatcttcctctttttcactcctctttcacttccaccgatcaaaatccagaaaaacttcatcaaatggcagagccatcaaagaagagaaagggatcatcttccaccgccaccgctgctgcccatcgccgtcacggctcatccggagcacccacagcacctattcctccttctttgtcatctccaagatcatcaacattgttttcatccgatgatcaacgtctacggtacctttctcaagtttnctctagaataatcttagaccctaagtacctagacgtagagttctttaatgatgaaacgtttgattgctatcaagttgttcaaaactctggtcttgttgat

SEQ ID NO: 6824 - DNA, 425 bp, Glycine max
tctcctttcttaagaaacttctagaaaccctagtgatggtcaagagacagaaccaaacccaaaccacccaaggtgaccctgacttcaagaacaacccatcatccgcttcatctgaggatggttcctctagtgacagatagtcagacctacactagtgtccaacattgctgcagaagtcacctcgaaggacaaagagcccaaatttcatatcaaacactttttcgatattgaattgttggagaatgttggatacgttatcaaggcccaccttatgttgtgtagcatccaccatttcttcaaggaccccaaggtggtggtgcctgaactcattcacgagttctcgaggactactaaagactatcataatagtcattagaggatattttgttggcgaagctcttggcattactgtgaagttgtctgta

SEQ ID NO: 6825 - DNA, 367 bp, Glycine max
agcttcattgcctaacaagccatttttttcagcaagccccaagagactcaacataacgatgcacaggtcaaagttgagtatgtgaaaagattgtatgaccaagtaaaggtgcaaattgcaaagaagaatgaaagttatactaagcaagccaaatagaagcatcaccggatgacgccgatcgaacattttctaatcgattgaatagaaaaaacaacagctgacatcggtcgtgaaatagccccgactgatatccttctgtcgacattgcacaatttcttttacaaacactagccgataatgttttttatggtagaggaaagtttttgttttggtgttgcataaaaaaaatacaatgtacggcggctgg

SEQ ID NO: 6826 - DNA, 367 bp, Glycine max
ttacacagattttagtaatgacccactaacctatttttttaataacttaatgccattaaccttgggaattaaaaaaaaaacttaatggctgagtgtaactaaaattgtggcaaccaaaagtcacccccaacagccaacaagtcagccaccatttggtctcccaaaaggctgatgcctaggttgccaattgggcccttattacaacttgaactaaacctactaaaaagcccttttagttgattaacccaaaacatatttttggtcagccaactttacaaggattgggccattatttagacaaactaaacactctaaaattgagacaaagtggtgtcatttagtccttctccatttgggccatgataca

SEQ ID NO: 6827 - DNA, 364 bp, Glycine max
  unsure (1)..(364): unsure at all n locations
agcttgtcatcaattaaacttattcattatgacttctctgcaagctactaacacttaagtaatcgattatgatcagcctgtgatcaagaacaacaaagatttttaaacatagaagacattttctgactgtagaacctttcttcttactcctacatgatgatgcatgatgcacatatgaaatgatagagactagatgcaacacacaacacaacaatcaatacagatttcactcaaagagttgggcatgtaaaagacaaaactttttcaagctttaaggctaagtcttcatgttgctccccctatctctaacaaattagatattaactaagggcttaagtcattaagtgtagntaagttgaaaaag

SEQ ID NO: 6828 - DNA, 365 bp, Glycine max
  unsure (1)..(365): unsure at all n locations
ttcaccctctaatgggtctcttcctagccttgtgtctttctctcgcacttgccatgattctctctttgtatggcacccaatatggggtgcanagtggtggttatgtgaaatctgacatgggttttgatgattaccctgtttccaagcttcaaaaccttgtgatggttgctgggcattccatttacactattagtagttgcggcaaaattgataaagaggattcttggtttttggagtcttatcagaagaatccaggccaagctgccacttttgtgacacacattcatgaggggattgagattgtggcaagggatgaatctgctttgctgctcttcaatgggggagagactccgagagatgctggc

SEQ ID NO: 6829 - DNA, 296 bp, Glycine max
agcttcttgcagataagatttttttgtatttttctcacaaattttattataacataaactaagtttattgaggattgaatagcaacagttctctgatgcaaatatacatgactatttaacttggtctaataataaattgtattaattatgtctctaagtatgaaaatgaagctcactcagcaagttttgatcctttcaaagcttcaagtacttgatagcagtttgaacatccttatcaccccggccactgaagttaaccacaaccttggcttcattatcaaggggtggacacactt

SEQ ID NO: 6830 - DNA, 365 bp, Glycine max
tttatttatctccccagcctcccttgctctaccctgtttgtttttcttcttcttagtgaagctataaagctatgctttttttcttcagacaaatggcatagaactaggtagagataatgccagcagtgaaatgtgaagagattaacacaaatttatgacattatcaatattcttacagcctgactacaataacttatcaaccacaactaaagtatttccataacaagcaggttttcattttatttccaaattttacctttaaatgcatggggccacttaaattttattatttggaccttttttggacctggaccggaaataatcttaaacccttgcaaggccaccagaattaactttccacattt

SEQ ID NO: 6831 - DNA, 313 bp, Glycine max
gatccttaagcacctgcggctgcagctacctgttatttaacatttatctctctagtaagtggcatccatacttaaagtgaaaaacaattttataagatatattgagtgtccaacgctttgttaaataattgcattcacttattgcgaaaattagtgttttcacacagaactgtttttagttatatccaatgaactttaaattatatgtacacttattttatatcctcacaaatgacgtccaacaaggtactaaaggattataatggaagtgtacgatcttgcttttcaaattcccactctaccctcttttatt

SEQ ID NO: 6832 - DNA, 365 bp, Glycine max
tgagagcactgttttgcatgccaagattgtgcattcttttgtctgttgactgccaggataaagcaaagatccaaaaaaagaaaaagaataaacaaaagaagctttctttatagcaatcttagctgaatgaaatatttttacctaaagctcactttccaaatcaggccacggttttactctcatgcattaccatgtcgttttcctagctcccctaggtgtgtaatttgtatcatctgcaatgaatcataataaaatcatgaaaagtaaagaataatatttgtgaaattttctgatagaagaaacaatcgtgttgtctacacggtagccaaaatgtacattgaactagtataaattaattggtgatg

SEQ ID NO: 6833 - DNA, 357 bp, Glycine max
agctttatatccaacgcacattttttgtggtgaagctccgtcttccatggcttattccctagtggatggagcctaccctctccacttatcctttgccttctgctgaatctccatggtggaaaatcaccattgaaggacattattgaagcttaaagatccatcctccatataatctccacaagcaagcttccatcaagcggtaatcacaccacaacagcttcaagtaagcgctccttaaacctccattaattttttgctctaccttctctttcattggtgcaacttcatttttctccatgtatagtgctaaatgtggataacatgattctttagagattccaccaattatacttgcta

SEQ ID NO: 6834 - DNA, 358 bp, Glycine max
ttgcatagggattttatcgttggaggtagcattttcttagttgacaccgaatacaaatatgataaagccacctcctacaatccatgctcataaccaaacaacatcatcaccatcgaccatcacaacctacgccaccattgacgatgactatcttaaacgttcactttcatatatgtccaggttatatcatatgttaaactctttccatagcctcataatctcttttcacaacatgttcacattcctctctgcctaaccttactggatgcgccttcacggtcaatgttgccctccccccactcccttgttaaaggccttaatcctaggcgcgtgtctgacatacgcaaagctccatgtc

SEQ ID NO: 6835 - DNA, 369 bp, Glycine max
agcttgcctcaaagaggtttggtatgacaaggcggccgaaggaactagttccgctcctgagtatgacagtcaccgctttaggagcgctgtacaccaacagcgcttcgaggccatcaagggatggtcatttctttcggagcgacgcgtccagctcagggatgacgagtatactgatttccaggaggagataggtcgccggcggtgggcatcactggttacccccatggccaagttcgatccagaagtagtccttgagttttatgccaatgcttggccaacaaaagagggcgtgcgtgacatgaagttctgggtgaggggtcagtggatcccgtttgatgcagatgctatctgccagctcctgggatattc

SEQ ID NO: 6836 - DNA, 365 bp, Glycine max
tgggaaatcttttaaagtgctgttggctttgttttctgaagagacagtgtcgggattcatcgatcaatttgagaagtgcgttggaatggtgaaggggttggaggagccatttctggtggaagtgtttctcaaggggttaaaggaagagattagcacaaaagtaaggcttcatgagtcaaagaacttgatggaagccatggttaaggctcgaaaagtggaggataagaacaaaattttagggaagttacgcgtgggtaatgggagggggagtaatttgcagaaactgttcattcaaggcagaagggggtaagagattggcagccagcaaacaataaggtgactgaccttcagaatgttgtaaaaac

SEQ ID NO: 6837 - DNA, 369 bp, Glycine max
agcttgcccagagaaggaatcctctgatgaaatgcttaccacctcgaaagactggaaagcggtttctaatgactcctctgcggcctccacataaggcatagaggatgggcagctcaccaagatgtcttcctcgcctgatacgatgaccagatgcccttccactacgaatttcaatttttggtggagtgtagagggaacaactcccaccgagtggatccacggacgccccaacaggcagctgtagggggggttaatatccattatttggaaggtaacttgacaggtgtgagggcctatctgtactgggaagtcaatctctcccctaacctctcggcgggtgccgtcgaaggcacgaaccaccattgaact

SEQ ID NO: 6838 - DNA, 366 bp, Glycine max
tgaagtgagaaagtgtggaagagtcagttttcttacttttattcgttgaccacagagtggtacctagagatatgtcgcgggggtcaggagaccttggggacgtcaggtggggtgctattgcccaaaaccaagcttgaccaatcccgacccaacccgggcatagtcagtcagtgagaacctgtgaagtacctaaacaggcgagctcctggtagtcaaccgataaaagaacaaagaccacaaagcaaggtggcttgtgtggtggctggccagctatggatcttgagtgataattggaatatggcctctggtaatcgattaccatgggtatgtaatcgattacaaggcttaaaaatgaaaacaagaagt

SEQ ID NO: 6839 - DNA, 332 bp, Glycine max
  unsure (1)..(332): unsure at all n locations
agcttggctttatttnccttattattcatattntccttaattattttcctttccttaattattcatattttcctcacttagttttcttcccttaattaatcctgttttcctcaattagctctgttttccttaattagttcgctttcttgactttattttaatcactaagcatcataaattcattacttttaatattctctacacaaaacttaaatgatattaaagtgataattattttctccaaaaggaaaaattatgagaaaattttttcaaaattctatttaattaacccccacatttattctttattaacaggtatcatcacccctctt

SEQ ID NO: 6840 - DNA, 361 bp, Glycine max
tgatattaatccaatcaatgtggattgttttttatcactaagctgttattataagcttttgacaattaagcgaacacaagtgaaagggattttgtgtcacgtacttttcatgtaacctatgtaaactacatggatattgattagcattgttaatatctctatatgtcctttagccggaatgatatcgatatctacattaagtagaatattgtgcatctatacacaaacatacaaaaaatatgaaatattatttcgtttgataataaacattattttttattgctttagtcttctggcacgatatatataggggcccgtcttgtaattttttttcaagtatgtgtgcaactgaaatattctg

SEQ ID NO: 6841 - DNA, 246 bp, Glycine max
agcttctcgacttcccctttcatctatgtcgagtgtcatcattaatcttcattgttagggttagctaagcgagcttggaacatgctctctcttcccataaactcgcaaagcgagcaagggggttcgatgagcaagccttataacatattctctatacaagtcctttctcagctagcatacaggatcactaagctaccacatatagcgactaatttttctgttgcaaatattgtcactaaactccta

SEQ ID NO: 6842 - DNA, 363 bp, Glycine max
ttggatttgatacaagagggcttagcaattagtgatacctaggaaaaggactaacaaggatggtggcagaggccgttgactttttgttatattgttgtattattagtatattttgatgcattatgcacaattattgttgctttaacatattttttagtttatgttgtggttaaattactttttttttttgcgttcaacaactgtttaaacaacacgtgcctagtaacaagaactattttttcaattgattcataaaacaaacattaacatgaacaactaaaaaagcactaataatactaaattttcttaaaaacaatcaacgtatgatttttataaagtaaaaacaaatatgactacatagat

SEQ ID NO: 6843 - DNA, 369 bp, Glycine max
agctttctcccaagtcctttatgtcatttcaagctaggattaactcactttaacctccatttaccacagaattcagacttaaccttccaactctcaaagcctcactcatttttccactcataacaccacattctcactttccaaccctaggttaactctacatttcatctctaacagttttccatgggcaatttcagcatacaaacatcacaaacatcatcacaaaaccctaaaacagaatgggtatgtctaactcatccaaacatggcaatttcaacaagctttcaacaagtttcttcacaaataactatcatgaagcagaaaactagcaagactacccatcatatctcccagaaccccatacccacg

SEQ ID NO: 6844 - DNA, 370 bp, Glycine max
tgcttgtggggcttctatggaggctagttactttgtaagcaagtggattagtccagttttaagaacatatgggatatcctcatcagggtattggatacacaggctttcgtaagtgaaatcaggtgcagccatttcccttagagtcctctcacggggtggaggttgtgccatgttcttagaatgttcaaaatcagaatgttcaaaactataatgctcaaaatcaccaataacagaatgctctggatgctcaaaaggtactaaatgatgtctaactaatctatgaaatgtcatatctatctcaggatcaaagggttgtaagtcagatggattgcctctagtcatacactatattcaacatgcacaactagtt

SEQ ID NO: 6845 - DNA, 361 bp, Glycine max
agcttacttctcattatgtaactatggatttctttccctaaattaaagcaacccaatccaatgactacttgtagagcactagttattgaacatgaatccagcaggtggaaatgagatagaagtggaaaaaggtggattcaacagtcttttaaattaaatagatgacactaagatggcacatgagaagaagactgaacaacggatgcaatttagcttgctcaaattaataattcaaccaattaatatggagacaaaatttatgaatcattattcccctgctatcaaggtagaaataaaaaaaaaattataaaataaggccaatggagattgcatgtgcattctgtacataatttgcatgtgc

SEQ ID NO: 6846 - DNA, 361 bp, Glycine max
ttgaacaatatacttgtccttcattttactgtttcagggcttggaggccacactcaacaaagtactttcgacacctactgtacgttgatttgaccaatgctgttatgggaatgttgcgacaatcctttaaaaccttattgatgcattctgagaggttcgttgtcatgtggccatatcaacgtccttctctatcgtaagccatcgaccatttttccttagaaatgcgatcaatccatgttgctatggctagactcagttcatgaaatttttctaaattttgataaaaaaatatgcttgcaaggagtgtaggctacataaaattagttatgaataacaattttaagtataaatgaaagtaaaa

SEQ ID NO: 6847 - DNA, 252 bp, Glycine max
agctttagaagttgtatgttgtttcagtcctgtcgagagtcctttggcttctgttagtaccagaacggtcattttttttcgatgagtcaattgtatagctttctccttgcgaaatattgcaggtagctcataactgacttccgttcgactgagatgtggctgggactaccttattttgaaatactttacacatgtttgggatgaattttttacgggaaaacaattttttttttatcaatagccccccccgaa

SEQ ID NO: 6848 - DNA, 360 bp, Glycine max
  unsure (1)..(360): unsure at all n locations
tattttcattaatataatctnttatatttaatttaaaggataattataaacattaagaatttatatatgagaaatgatgactataaatatagataattagttgaacctaacaattttaaggatgctataaaaaaaagggagggatgtgtgtggagaaaagtaaccaagaagaattaaaaacaattgaaagaatcaaattcccaaaattataattggttaaataatcaattaatgaataagtaaccaacatgtgattagacacaaatgattaatatgttaaaattaaagttaaattatttgaataatatttaagtttgatatattctaaataaaaaaaaattattaggttttttatttgta

SEQ ID NO: 6849 - DNA, 368 bp, Glycine max
  unsure (1)..(368): unsure at all n locations
agcttctcacgtccatgtgctcttggttcttgctctgngtctgtgactgtgtgcaagcgtccactacacagtaagcgcttgcacgtgctggctgctgttcctgtacgacagcactgtattcctttgtaccaagtgaagattcccatccttaaatcattggtcccactctctgcttcttttcacgtgtcctgccactatgccgttaattacaccatcatcaccgtcagctactctatgccaccccacacatttttttttctacccaacccctcctctaattaaccacactctcactcccatcgcgcgtgtacatcaacccccacatcatatcttattcatcacacctcacatatacacaaatataaaat

SEQ ID NO: 6850 - DNA, 366 bp, Glycine max
tcttaagatgatggatggcatcgaagaggtttgttgttttgatggatagtacaaaaatctacaaagctgttggtgggaagttgttgacgaaaggaagaagctttattggatcccatgagcaacacaatgcatttacttcatgtctgataactttgagaagaatatacccgtttaacaagagaaaattctaaagtgtagaagaattatgacttatatttattcgaggtcttatttctctattgcatcgcttcacaaacggaagacatttgctgagtctaggcttaactcactttgtcacttaactttagggtacctcaatgctttaaatcttggatagcaacacatagcagttggcacaaaaaatgc

SEQ ID NO: 6851 - DNA, 359 bp, Glycine max
  unsure (1)..(359): unsure at all n locations
agcttttcctctagctactttgttatgtttttaaagcattngagagaaggagaagggattgaaactccattcaattgtccctatacgagggaaatttctatcaccatagacattatttctcaaatcaccacagtgggaatgagaggaaatgcgtttcaaacgtggtcttcaaatttcacaatgatccaacagctaattagtccgggaacatagttttattgggataagtttgagagtatgcaagaaaaacaaaaagttacgtgcgagggacatttccctcaccatagaaattatttcaaaaatcccaaccgtgagtatatgcggaaataatttccaaacatggtgttcaaattttacga

SEQ ID NO: 6852 - DNA, 369 bp, Glycine max
  unsure (1)..(369): unsure at all n locations
tgccaattacctgttaactgcagccttaaagtttacttatttctttnnccgnaaagaacaaaaccaaagtacaatattgtctcatggacacaaaacaagttgccaatatgccctgaagtcagcaaaatcaaattatttaacttttaatgcaaagacattgataacagactcatggattgagttactgattcaagtaaggtcctaagtaaacttctcgatgtgattccttgacgcagtttgtgatgtattgttcacattctttacgtttgtgctttgcatagtgtatagcatggggctcaaggaaaccataaattggagccaatcctatgcttgtactacaatcattcataaacctatttcatgcatggt

SEQ ID NO: 6853 - DNA, 291 bp, Glycine max
agctttcatgcaaaacacgactttctttttttccatgtaatgaccacaaatacaaattttggaactgctaacaaaagcagcttcgttctaaattgctaaacaaatttatagggagtcacatagcacctaatttggttgtaatctgcccaaaagaagcatcttcatattgaaacaccgaaggtttcctatgattttcgcttacaaatttaaacatgttctattaactataaccaacgcattcatagttgtcaatcaaatacatttggtgaccctgggggtggataaaaaatg

SEQ ID NO: 6854 - DNA, 366 bp, Glycine max
taagcggtgatcaaacttgctctttggaacaatctttatgaacatatcagcaggattgtgtagagtgctaatcttatgaactttgattcttctttctaaccgaatgaagtgatatctaacatctatatgcttggttctatcatgatgaacttgatccttggccaagcatatagcactaaggctgtcacagtagatgttagcatattcttgattaattccgagatcatttatcagacctctaagccaaattccttcctttgcagctttagtaagagccatatatttagcctcagtagttgagagagcaaccgaaggttgaagtgttaccttccaactcaccaagcagccaccaagggtgtaagcata

SEQ ID NO: 6855 - DNA, 281 bp, Glycine max
agcttcttatccaaggctcatcttggttgtgaagctccttcttccaaggcttattccctagtggatggcgcctcctctcacctattctcctttgtcttccgctgcatctccatggtggaaaatcaccattaaaggacctcattgaagctcaaagatctagcctccatagaagccccacaagcaagcttccatcatatttgcaagggatttttgctacctatctaacatatacatattggcaagggattttggctacctatctacttcatatacatattttc

SEQ ID NO: 6856 - DNA, 368 bp, Glycine max
tgtaggatttgggtctctctaggagaagaagattatttgagaaagagagtcccttgcaaatgcaaaatctgaattgtgagggttagggaagggtttatgacctttataattatccttttcatattcaggctttctcttagcacacccacccccttagcacacatcaaagcccatttgatcaagcctaaactcattaaaattcactaaacatgaaaacataagcaccacatccccacataaataattaatttacttgaatcacttaatttaaatttaattatacttgataattaattaaaattacttaatcaatcattatgaaaacacacgatgttacatgtgctatgagtggaggtgggggtcatgag

SEQ ID NO: 6857 - DNA, 355 bp, Glycine max
agcttgggaggattgatggggacttctttgtttatagaaacgaggatatgggctacgtgggagtacgtgagctcagttggaggtgggcaacaggggatggtgggtttatgcgcgcattgtggatgtggaaaaatttgttgtgcaccatcgtccgagcgtctcctagtaccacatttgatgggtaccccataatcctactagcttgagatgaggaattgttgaagggtgaaactttctgcttttattgttgaccacagagtggtacctgtagatatgtcgcgggggtcaggagaccttggggactgtccgtggggggctattgcccataaccaagcttgaccaatcccgacccaac

SEQ ID NO: 6858 - DNA, 371 bp, Glycine max
  unsure (1)..(371): unsure at all n locations
ttgaagatttggtggtcccatgaagtagntgttccttattttaagatttggnggtcccgtgaagcagctgttccgtatttgaagtcgtgttagtcattgttgttcctatttcgtcggaggtacgcatttattgttttttttttgcgttttctgggtagttgtttagagaagatgaacagtaaaaagctattccggaagaacttttaactacaggaggaagtagttccggaatgagaatgttgaatttctggaagaagtacttcttccggaatgttagtttcttaacaaatttttttaattttgttttaaaatttatatatatatatatatatatatatatatatatatatatgaatattatcatttataat

SEQ ID NO: 6859 - DNA, 351 bp, Glycine max
agcttgtagggttcaccttttatctgtcgtcatatgctaaacttgatcccatatctacttgataattcaatggtagccataaccctagccaaggttcatcaacctccatttctccgagaatacgactcgaacacaacgtgtgcttgtcacgaagaagccccggggcgttccattgagcattgtacggctctgaagtgtagggtgcgaggtctaattgatgctggctgaaatttgaggagaatcgcgtgtaaatcctgacattgacaagagatgccacacatggggcaattttgaaagctggtgttagatgtctctaatgactcaccacgattttcaactttcaccggaatg

SEQ ID NO: 6860 - DNA, 363 bp, Glycine max
tgttcgcacatcgttcgcgtgtatgacattcatctcacaagtttgaagttgaggagaccttcaatcctattacacaacgtggccgacaaaagtgggcagttaacttgaatggtcattattgtcaatgcagaaggtattctgcgcttcactatccatgttcacatattattgcagcttgtggttacgtgagcctgaactactaccaatatatagatgttgtttatacaaatgagcacatcgtaaaagcttactccgcacaatggtggcctcttgggaatgaagcgactattcctccttctaatgacgcatggacacttatccctgacccaacagcaattcgtgcgaaaggtcggcctaaatcaa

SEQ ID NO: 6861 - DNA, 297 bp, Glycine max
agcttcgtgtgcccaacttcctgtattatttacaaattatccctagattaaccttatctgattacttggttttctcactttgtttagaggtattggacatacctttttattataattttttgaagttatccacataagactattatatattattggcgtattgctttagtactgattgaaagattttctgtgttcttaaaaagaccctagcagcaactaatctggatgatgaagacctcatctgatagcatgcaaaagctacttatttgtttttttagactggatgagaaaaatgtt

SEQ ID NO: 6862 - DNA, 363 bp, Glycine max
tgtatgaagagagagattcttctcatgaaactgaactcatttatctatgtctttaaaactgcacaggttagtatcaagttcaacccagctaagtgacacccgaatacttcaaccagttactttgatcttacttgtttccttttctcattttgcagcttacaatcacagctatcataacaatgacagtcttcatacgtactcagcggactgtggacttgataggtgcaaactatttattgggttcattgtactatactcttgtccgcctcatgactaatggagttgcagagttgatcatgactattactagactccctgttgttgataagcagaaggaattctatctctatccagcttgggctt

SEQ ID NO: 6863 - DNA, 263 bp, Glycine max
agcttgccactcagctcgttcatctattaaagttgcttcctccacaagcaacaaccttctggaggaatcttctggagggcccaagtgggcctggttgctatttgcacccccatttttactaaatacaccccctgccttttttggtgattcttttttcgtaaagttacggaaacttacgaatttcataacgatacttgatttcttttcgttatgctacggaaccttgcggattacataagtatcccctttttgtcttacggaaa

SEQ ID NO: 6864 - DNA, 358 bp, Glycine max
tcaagaaaagggcaaactcccttccaaaattcttttttatgcttaaatatgtggctttgttcatgctcgtgcgcttagtgcaattctgaactgcttagcgcgcattagtgaatttcggcttagcgcggcttttctcactcagcggatggattgaagcagtgcgcttagcaggatgacccttcgctcaaggaacatgcacaactcatccttcttccagattcttcctcgcgcttagccgaggattattgcgctcagcggttggctcgctaagccaatttgttggcttagcgagagggtgaaaatcaacacttcaaaacttgcctaattaacctgaaattaagagaaaatgattattaaa

SEQ ID NO: 6865 - DNA, 365 bp, Glycine max
agcttgcttccttttgatttcttacacgtctcgggacttcattcattgtccaaggacgccaagtgtctcgaagcggccaatcaaaggttgtatatcatcaaataataatccccggacgaaattagggtatgacagttgcccctctttacttacctctcatcggagataagaggaaagcaaagataggacactgatttcgtccgtcctgccctttccgtgatgacgactctcgcctctactccttcgtttttcttctgcacaaaacaaaatacaaacaacaacctgaacaacgaatataatatacatataaaaatatacacatatttggcgaaggaaccgatccggaaaacaacaaaagaacgtgt

SEQ ID NO: 6866 - DNA, 370 bp, Glycine max
tgggtgatgttgcgcgtactgatgggtaccattatgtgtttgctggggtttgacccatgcgggtgttgaagagacggcatgggcatctccttccttcctttttgcccctgttgccccgattcttttggcgttcacgtttgtggaggaaacgtaatcaaactttcctctcttcaatccaacctcgattctttccccggcaaacaccagatccgcaaagctggacggcatgtaacccactagcttctcatagtagaacactggcagagtgtctaccatcatggtgatcatctctctctcaaccatgggaggagctacttgtgccgccaaatccctccatcgctgcgcatattctttaaaggtttcaccctct

SEQ ID NO: 6867 - DNA, 360 bp, Glycine max
agcttcaccggatgacgtctatctaacatttcctaaccgacgtcatgcaaatttcgttcagggattgaattgaaaactcgttaggcgacatctgtcgtgaagtagcgaccgatatttttcagccgacattgcacaattcttttataaaagctcgctggtcgataatggtctttttacggcagagtaagttttcttgttttggtgttgcataaaaaagttacaatgtacttcggctaggtttttcgtgcgagttcaaccgacattttgtttcggccaggaaaacattagcccacctcttgcaaaaaaatatttgcttaccgccttcatgcatatttcattcaacgagtgaatagaaaactc

SEQ ID NO: 6868 - DNA, 361 bp, Glycine max
  unsure (1)..(361): unsure at all n locations
tctttgttagacctcgatcggncatcttccatgccgaggtcgaccgtcatttttttcgatccatttcggtgaataatatttttttgccgagatgggcaaaatgccagtttcggccgaataaatgggaaaatgccagtttcggccgaaacgaaaagtcggttgggctcgcacaaaaaaacctagccgacctacattttaaattttttatgcaacaccaaaacaagaaaacttcctgtgccgtaaaaaaaaaacattacatgacagcgagcgttttgaaaaacaaaattgcgcaacgtcggctgaaaaatatcagtcggggctttttcacgaccgatgtcggctattgagttttcaattcaat

SEQ ID NO: 6869 - DNA, 311 bp, Glycine max
agcttgccacccatctcttccattcgagcaaggttgcttcctccagaagcaatagccttctggaggaatcttctggagggcccaagtgggcctggttgctatttgcacccccatttttactaaatacaccccctaccttttttttggtgattcttttttcgtaaagttacagaaacttacgaatttcgtaacgatacttgttttctttccgtaatgttacggaatcttgcggattacataatcatcacttttttgacttacggaaagggaccgaacctcactaattgtgcaacgaagccttctttttattt

SEQ ID NO: 6870 - DNA, 361 bp, Glycine max
ttatatagactttagagctttgatttatttagtgatcccagctagccattgtctaatagctttggcgcctaacatgaggtcgttattgtgcaggaagagagagtgggaccacaaacactttctgcagcatatcttcagagaagtacagttttcttgtgtcgtctagtgctcaaagctgactttcatcgcacaaattgaaagaaatgttaacaacataagacaaaaggaattaagaatgtcaagacaagacaatttaaatatttccttttgtgcgctagggcacgcatttcttaccgagcctatggacattactttcttgtcattgttttcagtacttgaggattgagtaactattccattg

SEQ ID NO: 6871 - DNA, 364 bp, Glycine max
agcttcttcccactaaacaaggttcttcttttccttgaatagttcaacacttcaactttcatccgtcttgagggaattttttcattatagtacagtttgttgcccttcttaacaacatcccaaatgggtagacgagggcacaccttatctgcaacaattttgatctcgacggcctttgagatgtgcaaccctagttgatacgaagctgcttgattgagaatgtacatattggcatgtattcctcaaggatagagtaatctactgaggttaggtcaagatctgctagatgaacaggtaagagcttatcgataggcgtctagagattgacacttttttggaactcactatttggtggttccacctc

SEQ ID NO: 6872 - DNA, 374 bp, Glycine max
ccttgaatctcagcttctactacggtcctgcccctgctgaaattgtcttatctccagacaatgcaactgtggccctgaactgcttgggggtaggccacgggaaagggctgggatcttggctctgctgatgcagggtgtatcgataaaagctctcattcagctgcacctgaccactatgattggccgcctactggtcggtcatatgctgcatatatgcgtgcatctggagctccatcctttgcatgtgagcagagatggactctagagatggtggctgccatagaggtggcaatggtgcatctgtggctggctgctactggtcctccccctaatgttgtgcctgccttggcatgcaatacttttctttgaagacc

SEQ ID NO: 6873 - DNA, 349 bp, Glycine max
agcttcatgatgaatcaagattgatttttagagttttgatgataacaaagatgatgacaaaaaacttaaaagtcaagaacacttcatgataacaaagatgatgatttcaagaatcaagaatcaagttccaagattcaagttccaagaatcaagatcaagattcaagactaaagattcaagaatcaagagaagactcaatcaagataagtattaaaaagttttttcaaaaactgagtagcacatgattttttctcaaaaaccttttttaccaacggatttttactctctgctaatcgattaccagattgttgtaatcgattaccagtagcaaaatggttttcaaaaaagc

SEQ ID NO: 6874 - DNA, 368 bp, Glycine max
tgaaggtgtgtagcccaccatcttttcatagtttatttctggtaatgtgtctactatcattgtcatcatttttttctccgtcatggaggtgccacttgagctgccaggtctctccacctttgggcgtattcttttgaaagattcgtgccccctttttgcacatgttctgtagttgcatcctatccgaagacattatactgacactgcctaacgaaggcaaccactaggtccttccaagaatggactcgggaaggttccaagttagtgtaccaggtaacagctacccgagtaagactttcttggaaggaatgtatcagcaattcctcatcttttgcgtatgcccccatctttcgataatacatctttag

SEQ ID NO: 6875 - DNA, 260 bp, Glycine max
agctttatgttcttagattgttttatcttgctcaactgattaaggcttctaatttgataaattcagtcttgaggatggagcaagatgttgagagtttgtctttcatgggcacacacacagactgcatgcgcaaaatatatttatttatttttgttccttgtagctatctatcttttctttagagacactcctatttgagacactttcatacactaaggatagctttcctactccacataatgagagacttgattatcctt

SEQ ID NO: 6876 - DNA, 367 bp, Glycine max
tggagaggatgcttcaatggaggaaaagaagatgtagagttagagagaggggggagcacgaaattgaaggaataaaagaggtatagaagtggaactttgaagtatgtctcacaagactctcattcatcaaagttacaacaagtgttacacatgcttctatttatagactaggtagcttccttgagaagctttcttgagaaaacttccttgagaagcttctttgagaaaacttccttgagaagctagagcttagctacacacacccctctcataactaagctcacctccttgagaagcttccttaagaagattcaagctagagcttagctacacaccccctataatagctaagctcacccccatgaca

SEQ ID NO: 6877 - DNA, 267 bp, Glycine max
agcttgaaggcaaactggatgctttgttcaacttggtaacccagctggccttgaatcagaaatctgtacctgtcgcaagggtttgtggtttgtgctcctctgctgaccaccatacagacctttgcccttccatgcagcaacctggagcaattgagcagcctgaagcttatgctgcaaatatttacaatagacctcctcaacctcagcagcaaaatcaaccacagcagaacaaatatgaccttttcagcaacaaatacaaccctggat

SEQ ID NO: 6878 - DNA, 364 bp, Glycine max
tgttttgtttgcaatatttatgttatgcttggtttgttctctatatagaataaagtttgaactagttggaaatgaacatgaataagatgacattacatgttattttcatgtcacttatccatatttgatctatgtcatcaagtataagtgacaatgatgatcattgtggcttagtcacgttagattgtgatgaaaaccacagtgattcttgttatataagatggaccagattgtttaaaggaagtctaaaagtaaatagcatatgattgtatgcctaaatacttttgtagtataaatggctaaagttaatatgaagcccaagtgagagattgttaggaattttataattcctaattaattaatt

SEQ ID NO: 6879 - DNA, 371 bp, Glycine max
agcttcgcacttgataatgcagttacttgaacagcgctaggcaatgacattcatggtgctccaagcaaaggtggagtatggaggattgccttgagagtccacacttaggcaatcatgaaactcaactccaaactcgaaagtgaaggacacatgaacaaccctaagcaagaacattcaaggggctccggaaaaggaccgagaatggaggattgccttgagggtcctctcttaggcaatcatggaacacaactccaaactcaaaagtggaggacacatgaacagccctaaacaataacattcatgtggcttcggaaaaggatgagaatggacgattgccttgagggtcctctcttatgcaatcatggaacaca

SEQ ID NO: 6880 - DNA, 373 bp, Glycine max
  unsure (1)..(373): unsure at all n locations
tctagccaaatggacttaccttgaattaattttttttatttcccttttgagccttgtttccctttccttgttttgaagctcactacaagccttaagtgaaaaaccatgatattaccatatccttaaggaattttggagctttggaattgttttgggaataagtgtggggggtttttgtttcattggacaacttgttttgttggctatgcttcatgatgtattttgggccatacttgatgtacattgtatattggttaaatgttggacatgctgaatgaaatgttgtttctcaaaggccaaagagtntaaaaaaaaaaaaatagatataaattcgaaaaaaaaaaaagaaaaagaaaagaaataaagttgagtg

SEQ ID NO: 6881 - DNA, 396 bp, Glycine max
cgggatcttaagcacctgcggctgcagctaataattgaaaattgctttgtgagattttccctggatcctactagggtcaattttccttggcacccttaatcatgttcaatttgttggtaagtttaggtcttttaatccaaaaaaggaaacttggttaccatgtgagagttatttggataaatgaaaatagttttggttgttatatgcatgaatatttcgattcttgtttgcaacaatgtattataaaaaagtacctaccacatagagagtggctatgcaatttggaatgcatcaagaagtttcagattgtgtgattgcattctttggcaccaaagctattgcattgaaaaattactaaatacccaaaattacctttaaaaattgccaacaatattt

SEQ ID NO: 6882 - DNA, 372 bp, Glycine max
ctcagcttaaggtgatttttcataatttgtattttgtcgttatttaaaacttcagttttaaaaagtttaaaacaaatttagatgttcagaaccaattcacttaatcaaaatcaacttgtttgtgacaaagttgtttagggttgggtttcataaaaaagtaacatgaatccaacctaccttctcaaggaggaagctacagggtacaaattcaataaaagggacaacatttttttgtgtgtgtgtgcgtatgtgaagggtaaaaaagttggccaaatctatgttatcttttttagttttaagtaaaggtttcatagataaaaaattgaaggtaaagaaattttgaattccatcagaactaattttttatttggt

SEQ ID NO: 6883 - DNA, 367 bp, Glycine max
agcttgtagaatggctagtcattatacatgtcagggtttggtttggttcaaggataaaagggatgccccacattatttccatgacacaaatgcaaagatgatgatttggaaattttatgcaaaactggtcatgcatgcacctatgtggacgctcaagtgtcaaatttttatggtcatgtgatgctagggctcaggattcatttcctctattttaaatcaacccaatgtttccaaaatatgctcttttatcaatttatgcatttatcctagttcatttcgtgcgtgcggggaaattttcacagcattcacccttcatgtgtagacacgttttttcttcaaaatcggttatgatctatgaatttttttt

SEQ ID NO: 6884 - DNA, 363 bp, Glycine max
tgatggtacgctaagcctcacatctcatgctatgcgtatattgcagaaaattctgtgttgcagaaagcgctaaccgcaactgatcaaggccgtacctgaatcaaataaacatgaaaatgcagtaactaggaagtgatcctaggtcatttcccaatgagcaatgataaaccaaatgttcataatacacttgcagtaacagtaacgattgggggggtggtttgtttgttttgtgatttaaaggaaagaacaagtaaactggaatacgaaactactaatattaaaaatgggttgtttcctctgattttgaagccattctcttatcctgggttatggagaattcgtccctaacagttaaccacttaa

SEQ ID NO: 6885 - DNA, 69 bp, Glycine max
agcttgtaatagtggtagttactcattaaactacaagaaaaacactaaaatgcggggggggggggggga

SEQ ID NO: 6886 - DNA, 364 bp, Glycine max
ttgatggtgcgtagcccaccatctttttatattttagtaccgataatgtgtctaccatcacgattatcgtctccctttttgcacatgttctgtagttgcatcctatccggaaccatatcagaatagtactgatactgcttaatgaaggcaaccattaggtccttccaagtatggactcgggaaggttcctaagttagtatatcaggcgacagttgtcctagtaagactttctcaggaaaaatgtatcagcagtttctcatcttttgcgtatgcccccatcttccgacaatacatctttagatggttcttggagcaagtagtccccttgtacttgtcaaagtctagcaccttgaacgtgggaggg

SEQ ID NO: 6887 - DNA, 273 bp, Glycine max
agctttgaattttagtcattattctccttgaacatatcctaatactcatgcaccttttacattcaaaaccagaaacttagattcctaggcatgagtcatccttttggcactttagtctagcttctacaaactacccacacactcacaatgcgcacaatttgtttcgcaaactaagttccacaatatcatgcgcaaatgccattgaggcatttcaccgaacacttggtaggcgcctgttttagcatgaaaattaaaggtattgggggaatgagg

SEQ ID NO: 6888 - DNA, 361 bp, Glycine max
tgaaatgaggaagtgtagaagggtgagacttctttcttttattcgttgaccacaaagtggtacctggagatatgtcgcgggggtcaggagaccttggggatgtcaggtggggtgctattgcccaaaaccaagcttgaccaatctcgacccaacccgggcatagtcagtcagtgagaacctgtgatgtacctcaacaggcgagctcctggcagtcaacagataaaaggaacaaagaccataaagcaaggaggcttgtgtggtggctggccagctgtgaactttgattgatatatgggatatggcctctggtaatcgattaccaagggtgggtaatcgattacaaggcttaaaaatgaagaca

SEQ ID NO: 6889 - DNA, 353 bp, Glycine max
agctttgagccaaaatccttacttttcataaaccttgacccagggtgagaatgtcaattcttaccctcggaagcaaaaaaaaaggggagagggaaaatttccaatcaaagaggaagcaaaaaagggagagaagggaaaattttccaatcaaaggaaaaaaagagaggaaagggaattcccaatctaagagtgggagaaagcaaaaagaaaataaagaaaattcccaatcaaagaatgggagaaagaaaaaagataagaataaagggaagaaagttcccgatcaaaaaaaaataatatgcacaaaggtctttggaccggacaatatctgaacaatacagaattgtccccaatga

SEQ ID NO: 6890 - DNA, 372 bp, Glycine max
tcctcggggccattcctgtgaaggcaaacattttttaagttagttttaccaagaaatgctacccttaaaacaaaaatggcatacaacctcctccagtaaatacaaacatcaatgtaaatttagagcaagcttatgcgcatacttctttacgaacgttcacttgaacaagacattcttataactaagaaaaatgcacccatatacaatcaaggcaccttcgttacctagattatttacatgtacttccaaggtgtatttgttacctacatcacacgcatttcctttgctaaatttacatacatgcatactcaaagcactttggctatcaaaaattgcatacgtgcacattctggtatttctaatacctataca

SEQ ID NO: 6891 - DNA, 353 bp, Glycine max
  unsure (1)..(353): unsure at all n locations
agcttggagcgctttcctctgtctcaacagaagtcaggtgggaaagaaatcatactatgtgcacgaatcttatacccagtgggttattgataggaccaagagctgtggcctaccctagcgcttacccagatacctattgtccaccatcccaccatcatccttgcctatcccctttgatactaaggaagagtttcatgaacaattaaccaaagaaaggcaagagaaagaaacttggaagaggagataccaggagctcgagcaagagaatgagattttgaaggggaagatagatcaacagagccgtgagctttttatccacaaccanatgatgattgagaaggacgacttgcttt

SEQ ID NO: 6892 - DNA, 359 bp, Glycine max
  unsure (1)..(359): unsure at all n locations
tatccaaacatggccctaatgggattctcgaattctggatacaagantacttttgtatttggtgcttaatttttttattgctaatttctgtctttgaagtctcaaatatgatagttctttgggaagcatcaccatttgttctattgttgataagctgagccaaacttttatggtatttacccaagtttgatgatcccatgaatggtgattggttttatgggtatttagaggccatatcacatttagtagtctggtcatattatctttgcataaacatgttctattttagagttattctgggttggggtttaagaaatgaatgtgtttagtgtgcttccttatagccttttgaatgtgag

SEQ ID NO: 6893 - DNA, 287 bp, Glycine max
agcttaagaatactattattatttgtaaatgatgaaactagacttgtacagatatataagaagattaatttttctctaccaaagtctctttgggaaaaaacattaaagaatgcaatttatcttttagggtgccaattaaagtagtcactacgaacccctataggtatgagccagggaaatcccatcattaggcatttacacatttggggatgtccagttaagtttgagacgggaatgcaagacctactttacgaaattgagtttgggcgggaaaaaaacaaaaaaaa

SEQ ID NO: 6894 - DNA, 362 bp, Glycine max
  unsure (1)..(362): unsure at all n locations
tttgacaaaataaatgttactnntctatattnatttcattnccattttatttatttttctaaaagcttatgaaatggaagataaaaaacggagataatccatttccagaatattttaggtttaagttccggcatttttcccgacagacttctataatttccattaaaaaaatctttgaatttgcttcattcattcagttttaaaagatgataatttgcttcattcatttttcccggcatttttctaatgtttacttgggagctttacatatgtatattttcagtgatacactctctgatcatgcaatccaagaaatcatagctgtgagaaatatattgaacttcaagtatgggatatacact

SEQ ID NO: 6895 - DNA, 365 bp, Glycine max
agctttcacccaataattccccttttttgggagaaattttctttgaaccaaaatatccttttatgaatgatgctctcctaaaacctaagacaaggtagaaggagataaactgtacaggctcaaggttcaatcaagcaatcatactttcagcacagaatgggtgcaagggataaattaatcatgcacaaggtaagctttttggctaagtggctatcttcaatcaaaacatggccttcatcatattcaaattcatgcattcattccataatcagagattcatgcaaaaatcattactcaatgttagtcgttctctcacaattaaagatcacactctcaccgggttgtggctaatgtgttccttcaca

SEQ ID NO: 6896 - DNA, 366 bp, Glycine max
taagctccttcaactgcacaaggctcttaatatttgttgtttatccttgaggaaccttcactcgacgaagacactgacaaaaacttatcttctcattcttggacaaagtatggcaggctgggggcaagtaaattttcttcccatcagaccttggatgcaactgtgatcgtatacccatatcagctagatcttgacgggtattcaagccatccttcgtcttgccttgaatgttaaggagcgtcccaatcacactatcacaaacatttttctccacacgcataacatcaatacaatgtctaacgtcaagatcacaccagtacggaagatcaaagaaaatggaccagttcttccatatgcaactctgac

SEQ ID NO: 6897 - DNA, 369 bp, Glycine max
agctttgctgatttagttttcgtcgactcaaaggatcaaagtgggtctgaaaagaggaaaatttaatcatcttgcttggacgaatgagaaaactggggcaaatgaagagggtgagaatgaaggaggaacccatgctgtgactgctgttcctacatggccaaacttcccaccagcccaacaatatcattactcagccaatatcagctccactcattacccaccacccaatcatccacaaaggccatccctaaatcaaccacaaagcctgtctaccgcacttccaatgatgaacaccaccttcatcacaaaccaaaacaccaaccaagaaatgaattttgcaacgaaaaagcctatataatccaccctaat

SEQ ID NO: 6898 - DNA, 365 bp, Glycine max
tacttgtgctactgactatgagtgcaaagaggtttatttataatgcaggcaatgcagggaggttgaagtactgtgcagagggtgaatgaaaatgctcagatgaagtaaaatggtaactgcctcaggcagttgccttatttgttggcagtttcaaatgactcgcttagcgcatggactcgctaagcgagtcaacatgacgcttgagttttaaagctcatgtgcttagcggatctactcgctaagcccaatacaaaattatgaaattccagtgaagtttttgggcttagtgcgaaggtacgcgctgggcaagttccgcagctctgattggtcctgtaactctcgcttagcgggcctaggccgcgctt

SEQ ID NO: 6899 - DNA, 329 bp, Glycine max
agcttgtaggattatggggtacccgtttcatgtggtactaggtggcggtcgggcgatggtgcaagtcgactatccacatccacaaatcacacataaatccaccatccccagttgccaaccttcaactgagctcacgtactcctacgtagcccttatcctctttcctctcaacaccgggtccccatcaatccctccaagcttccataacatccaagcaatttcaaaatccaaacatcatgaactatcaaaaccaaacaagacagggcagaggcagaaaactctgcccaaaacacaaaccaataccacagctttttttactcaaatacccc

SEQ ID NO: 6900 - DNA, 366 bp, Glycine max
tcttagtttaagctgatgaagatgaattcgttgtttctttatgcactcctctaatgacaatagcatcatttctggcactaaattactgggagttggaagtcatcttctcaattaaattcttggcttcagcaggggtcatgtctccaagggctccaccactggcagcatctatcatacttctctccatgttactgagtccttcataaaaatattggagaagaagctgctcagaaatctggtggtgagggcaactggcgcatagttttttaaatctctctcaatattcatataggctctctccactgagttgcctaatgcctgaaatatcctttctgatggtcatggtcctggaggcagggaattttt

SEQ ID NO: 6901 - DNA, 334 bp, Glycine max
agcttctaactgtaactggtctttattttaatgaaacaaaatacttgttttggtgtattgaaatgtgtattttttgtttaacaagtttctaactctaatccaaacacacacataaagcctacaccaatttggatcgatagagtgacgatatcatgtttaacaatatatacacgtagatttgtttatttctgattttatttcgggtaactacatcagctttatgttggtggataataagattttgccagaagtcaacatttaattatggatggacggggttttcaaatctatttaaatatattgggcaaacaatggattgtatggacattttttg

SEQ ID NO: 6902 - DNA, 378 bp, Glycine max
gaatactaagcttctaccctttttgtttaagaatttcaacccttaatacttttagacaaaaagaagaatattttaacgggataatcattggagtttcggtagagaacaatgtttgtaggtcttcttggtacagaagacatggatgttagatttgatgtccaattgtccacaatccaccctctttgtgtcccgtgtatatcttcttaaaatagaaaacttaaaattctaatttaggaaatacaatagtcagaataataaagaatttgtcttattttgaatatgggcttactgatagcctaagtatttaataatttaacactaaaccttatggcaataaagtgtgatataggtagtaaataatttttgtgtagtcctact

SEQ ID NO: 6903 - DNA, 369 bp, Glycine max
  unsure (1)..(369): unsure at all n locations
agcttagcagaggatagggaagttctccttagcagatgactggcggtagggctgtagccgaagcaggacccaatctcctacttgataatgcatctcgcgatgtttgtgatctggttgtttcttcatgaggtcctgngctttgagcagcttcttgtgaatagtttgaaaggttgcatctctgtcagtcaagaggctctcgacagcttcgatatttgatgtgctggagatatactcagggaaattgaatggtttccggccaaatgtcacctcgtagggagttgtacccgttcccgcgttccacgaggtgttgtgtgaccattctatccatggaaggaacttgccccacctattgggtcaccggtgaacaaa

SEQ ID NO: 6904 - DNA, 371 bp, Glycine max
tgacataccgagatttgatggacacgatccgttagggtggatctacacaccggaggaagacaggatcaccgttgcgtccctgtaccttgacggcatcgcattgagctggtatcaatggatgttcagcaatggctttatcacgtcatggaacggtttcctccaagctttcgaatcatggtttgctctgacgttctacgacaatccaaaaggcgctctattcaagttgatgcaacgaggaatagtgaacgagtatctaacctaatttgaacggctagcaaaccgcgtggtaggccttccacctccatttctcttaagttgtttcatctctggattaaacccaaacattcgacgagaggtgctggcgcttcagc

SEQ ID NO: 6905 - DNA, 255 bp, Glycine max
agctttgagtaaattcatatgattataactttttgctcggatggctgattgattcccttaatacatcgagacgctcgaaattgaatgctgaggctctcgccaaattcaaacgacaatgacgtgtcactcggaggtctgttgtatccccctagtacatcgtgacgctagaaattgaattttgaagctgtgagctaattcaaactactattactttttgctcggatgtgtgattgaggcccttcatatattgggacg

SEQ ID NO: 6906 - DNA, 355 bp, Glycine max
tcagaattcaatttcgatcgtctcgatattttttatttctcaatcagacatctgaggaaaaaagttattgtcgtttgaatttgctgagagcttcaacattcaattttgagcgtctcgatgtattacaggacttaatcagacatccgagttaaaagttattgttgtttgaatttgctgagagcttcaacattcaatttcgagcgtctcgatattttacgggactcaatcagacatccgagttaaaagttattgttgtttgaatttgctgagagcttcaacattcaatttcgagcgtctcgatattttacgggactcaatcagacatccgagtaaaaagctattgtcgtttgaatta

SEQ ID NO: 6907 - DNA, 371 bp, Glycine max
agctttactatgcagagaatattttatgtaaataccttcatctgacttagcatcaaattttcctaagttatcttttccattattcaatacaaaacatttacaaccaaagatatgaagatgtgagatgtttggttttctgccattgaacaattcatatggagttttctttaaaatgggtcttattaaagccctatttaaaatgtagcatgcagtgttaacggcttcagcccaaaagtattttggaagaagagtatcatttaataaagttctagcaatctcttccaaagatctactttttctttcaacaacaccattttgttgaggggttcttggttgcaaaaaaatatgctcaatcccatgcttatcacaaa

SEQ ID NO: 6908 - DNA, 362 bp, Glycine max
tcctgttcaatccaaccgaatcaatggttaatggtttttaacctgcgattcttgatattagcacaacttcagattaatggttataggagagagcttagctatagtaccttaggtgcttatagtggtattctctaattaaaattgatgttttatgtcgataactggcaccaacctgtaatattgagttttagtgcataggttgttgaggcaaaattcctattttaattggagaagaacactaaaagcacacaagatactgcacttaatattgtccattatattgttaaaatgtgtatcaatgcctttgcgaatgactactgacttcacaacatttataataattagtataataaaaagtatat

SEQ ID NO: 6909 - DNA, 322 bp, Glycine max
agctttattcaagacaaattttatatatgatattcaagatggataatcaagacaagtctctagtcttagaaagggtatattaaataggaggggaattccaattgaagtagcaaaaggtttggccaagaaatttaagttaaaaagtctttttgaacaaatttactctctggtaattgattaccagaggatgtaatcgattaccagtggccaaaactgatttacaatagctattaaaatttgaattcaaaaattgcattgtgtaatcgattacacatatattgttatcgaataacaacaaattttgaacgttttaattaaaatt

SEQ ID NO: 6910 - DNA, 363 bp, Glycine max
taaagcttagtaacctctaacttgaggtgtagtatttaaataaggacatgtttcatgtaacatatgctagatgcattaaacgtttcataggaattgatgtctaggaaatagcatccatttatcattagcgttgtaaattgcatcatggtgtgtgtttgtgtgaagttgagtgtctttccacctgaagctattccatcatatctcattttaacagttttcacctggacaagacttggtagatgtagttccttaagggtaggtttggtttctaagaaggggagaggaattgtatagaaattttcactattagtgtgagttccacacctctttcactattagtatggtttagtatgaatctaaata

SEQ ID NO: 6911 - DNA, 216 bp, Glycine max
  unsure (1)..(216): unsure at all n locations
agctttcattttcattattatttcntttaatcctacgggacacaagtggacatccgagtgaaaagttattgtcgtcagaatttgcttagagcgtatgttttctattacgagcgttttgatatcccacgggacacaattggaaatcctagttaacaaatattgtcgattgatttttctaaaagctttcatttttcattacgagcgtctcaatattct

SEQ ID NO: 6912 - DNA, 361 bp, Glycine max
ttgaggaaattcaaacgacaataacttttgattggttgtccgattgtgtcccgtagtatctcgagacgctccaaattcaaaacagaagctattagaaaaatctatggacgataactttttacacggatgtcccattgagtcccataatatatcgagacgctcataattgaaaacagaagcgctgaccaaattcaaacgacaataacttttgactcagatatccgattgtgtcccgtaatatatcgagacgctcgaaattcagaacagagctattagaaaaatcaaacgacgataactttttacacggatgtccgattgagtcccataatatgtcgagacgtttgaaattgagaactgaagc

SEQ ID NO: 6913 - DNA, 345 bp, Glycine max
agcttcggtagttcaattttgttcttctcgatatattatgcgcctgaatctgacatctgtgtaaaaagttatgaccattttagtttatcgggagcttccgtttttcaatttcgagcgtctctatatgtgatgagctcgaatcggacatccgagctaaaagttatgaccatttgaatttctcgagtgctttcggttttcaatcttgagcgtctcaatatattatgcgcttgaatctgacctccgtgggaaaagctatgaccatttgaatttctcgagagctttcgatgttcaatttattatgcatcggaatcggacattcgtgtgaaaagttatgaccatttgaat

SEQ ID NO: 6914 - DNA, 368 bp, Glycine max
tgtatttaaatgtattttaaaaaaaatttttttattttgtatttcttattccttttattattagtacatatatgtgaggggtagagggcgtcgcagttccattgtgggaacccaacgagtttaatcacttgaggcacgatgagttaaaataattttaaaaataattgagattttgaaaacgattgagtagctgtgtgcattgcatagtttataggtagagtctgtgtgttaaaatattttctgcgttggacctgaatcaagagggagaggccctaacaaacttctcgaactctaggtattgggagtaaatacactcgatttgagtgttcttttaagtctgtatcgatcttacatggttggagcattct

SEQ ID NO: 6915 - DNA, 355 bp, Glycine max
agcttggcctcctttagattttttttctccatatgatccatgtcttcaggaacaatagcaacttccatctctgtttgtctttgggaaccatccaaagacaaaagctcagttatatgttttgctgttggtgattgagaatttcggtattagggtcgagtatttttaaatgaacaaataagattttaattttaagatagtgtactaaaccaaaatacttttagggttctttattttcaaactaacaatctttatattttcaatttaacaagcaatgtatcctttttagaaacttattacaagaacaaattttatattcattacaaaatgattatttggattaaaatatatgattcat

SEQ ID NO: 6916 - DNA, 373 bp, Glycine max
gacctatgaaactcagcttgtaatgaaaaccttactcattgtttttgattgtaatattaagtagtaccaaatgattgtatgaatctattcttttgttgtgttatacacaattccatcatactatccattttctactgaaaggcttctgcctttggatacattggtggtcataggttcttgtgatggaaacaccctctatatctatggaacaaggctatgcacatgtaaccctcttaaactgcaaaatagtgggagctccattcactgggctgccaaacaacactttggataggcctcgcgtggcttcaacacttcatcagcatcaatcacccgcacaacaattggtagaaatcataggaaatctaaagaaaaa

SEQ ID NO: 6917 - DNA, 316 bp, Glycine max
agcttttgtcactctacccaaattttgctttcaaattcaccaaacctaagaccgctgataaccgtgtgtactttgtgcatcccatatacaatggagtcgtaaaatcagtatctaagctttcatagtaaggtgaatgtgcttgcctaaaaccctcttgtccaagatcacgtagcatgtcttctatacgatcaccaacttcttcgtcaactggagcagtcagagggcttgatgacatttgtggtaattcaccatgccaaatccatttcatataatttggactgataccatcccatataaaatgtgtttttatgtcatc

SEQ ID NO: 6918 - DNA, 361 bp, Glycine max
tgcttgtggggcttctatggaggctggatcttttttcttcaatggggtcctttaatggtgattttccaccatggagatgcagcggaagaaaaaggaaaataggtgagaggaggcgccatccattaaggaataagccatggaagaaggagcttcaccaccaagatgagccttggataagaagcttggagaggatgcttcaatggaggaaaagaaagagggagagaaagagagaggggggagcacgaaattgaaggaataaaagaggtatagaagtggaactttgaagtatgtctcacaagactctcattcatcaaagttacaacaagtgttacacatgcttctatttatagactaggtagct

SEQ ID NO: 6919 - DNA, 330 bp, Glycine max
agcttctcagatctggtcatggttagacttggcaactgccttcattaggaagtaccaatacaacacggatatggctcctgatcggaaccaacttcagagcatgaccaaacgggaacatgagtccattaaaaaatatgctcaaaggtggagagacctagcagtccaagtcatcccacctatgacggagagggaaatgatcacaattatgataaatacgttgcctacgttctactacgagaagctgataggatatatgccggctaactttgcagacctcgtctttgccggagaaagaatcgagtccggactgaggaaaggcaagtttgaata

SEQ ID NO: 6920 - DNA, 367 bp, Glycine max
tagctacacacacctatctaatagctaagctcaccttcgtagatgagaagctagagcttagatacacaccccctataatagctaagctcaccctcatgacaaaatacatgaaaatgcaaaaaagtccctactacaaagactactcaaaatgcctcgaaatacaagactaaaaccctatactactagaatggccaaaatacaaggaccaaacgaaggaaaaacctattctaatattttcaaagataagcgggctcatacttagcccatgggctcgaaatctaccttaaagctcatgagaaccctagggccttcccatggatctctggcccaatctagttggagtcttctatccaatgcccttgcgggg

SEQ ID NO: 6921 - DNA, 304 bp, Glycine max
agctttggataccccaaggatcttttttaaaattacttgggaaagagagccatgagggtggtctcatgggccactttgggatcgacaagaccttgtcttactcaaagaaaatttttattggccctatatgaagaaagatgtccataagcattgcactaagtgtgtggcttgtttacaagccaagtctagggtgatgcctcatgggctatacacacctttacccatcccatttgcaccttgggtagacattagtatggactttgtccttgggcttcctaaaaccccaagaggggtagactctatc

SEQ ID NO: 6922 - DNA, 377 bp, Glycine max
actaggcaatactcaagctgcaattacgggtctctgtaaggactacagagtgccttgcttctgcaccaagggcctcaggccccctactaattgagctttcatcaaaaagtactgcctccccaaacaagcgcagggtgaaacaccacaacagcctggggatggccggcagcgggaaacagactcaccgccatcacctctagagtccacctcagctcatccacaaaaaggttagagcgttgcttacgacccatggtcgaccaataggcgaccaagtccaaagccaaaggttagcagagtactaggtccgtgaccgacaatccatcaagcgttcaactcaagacgttaaagaagcgctactatgagacaacctagtacct

SEQ ID NO: 6923 - DNA, 313 bp, Glycine max
  unsure (1)..(313): unsure at all n locations
agcttagaattccaggagaaatttcttcaatttatacagaccccaattcttaccctgattttaaaatccacaatgggttaatttactttaaggataacatctgagtgaattctgcaaatccttatatncaaaatttgctactcgaaattcatagcacccgcattggaggccacctatgtgttgcaaaaacactccatagattgcaatttaatttttattgggaacatatgcactgtcatgttcaacaatttgtttgacagtgccctacatgccaacaaataaagcatgttttctggcgaccttccaatttttt

SEQ ID NO: 6924 - DNA, 368 bp, Glycine max
ttagcttctttaggaatcttcttaaggaagctttttttgttgtgagcttagttatgagaggggtgtgtgtagctaagctctagcttctcaaggaagttttctcaaagaagcttctcaaggaagttttctcaagaaagcttctcaaggaagctacctagtctataaatagaagcatgtgtaacacttgttgtaactttgatgaatgaaagtcttatgagacacacttcaaagttctacttctccccctcttttattccttcaatttcgtgctcccccctctctctttctctccctctttcttttccttcattgaagcatccttccaagcttcttatccaaggctcatcttggtggtgaagctccttctt

SEQ ID NO: 6925 - DNA, 290 bp, Glycine max
agcttctatagaaggttcattcttaatttctctacaattgcatcacttctcaatgagctggtgaagaagaatgtggcatttatctggggtgaaaaacaagagcaagcctttgctttgctcaaagaaaagcttactaaggcaccctattgcttattttaatgaaaaacttcacagtgccacccttaactaccccacctatgatacagagctttatgccttaataagagccctccaaacttgggaacattaccttgttttcaaggaatttgtcattcatagggatcatcaat

SEQ ID NO: 6926 - DNA, 367 bp, Glycine max
tgtagaattatgtctcatattggtttaaccaattattgtcttatcataatcgattacacaattgtttttgagataatgactgatttattcaagagtctctactttaatcgattaccatgtcatataatcgattacttccctttctataagtgtttcagaagtgaacaagaacactttaattgattactttgagtatctaattgattacattgctcttatgttctttccaatttttgagaagaacaatttaatcgattaaaatgataatctaatcgattacatcattgaattgattgattaccttgtagatttaattgattacagccagttatagttgttttctctataaataaccaacttgtgctat

SEQ ID NO: 6927 - DNA, 348 bp, Glycine max
  unsure (1)..(348): unsure at all n locations
agcttcatgatgatgaatcaagttgatttaagtagttttgataatgacaaagatgatgacaaaaagcccaaagaatgatttcaagattgagtcaacaagttcaagatcaagtttaatttcaagtttcctgagaagaaatcaagaagattcaagaatcaagagaagtttgatttcaagattcaagagaagatgaattcaagattcaagagaagaaattaggaagacttcacaagggaagtattgaaaagatttttcaaaaaacaaacatagcacagttttgtttttcaaaagagtttttctcaaaattttctaagttaccagagnttttactctctggtaattgattac

SEQ ID NO: 6928 - DNA, 372 bp, Glycine max
tagctccggaccaaaaaacaacacatttcaatttatttattcaaaaaacatataaaaaattttgcagggatgaatttcaaatttttcgatatttatagagacaagaaacatattttaggctatgatttttagctagcagtgtcccttactaatgtttattggttaaagatgattcatttaattttaatttttaaagaattattactaaaaaattatttctgttcaaaaataatataaagcaaattacatgtgtccccgaggtttaaggaaattacatatgtctctcttcattttgtaaaatctacacatgtttcccttgagatttgaggatattacacatgtttcctttctgtttttaaaacctacactaat

SEQ ID NO: 6929 - DNA, 303 bp, Glycine max
tgctttatatataccaatttttttattataatctaatatatattaaaaaaaaggaaaatataaaaaaaaaaaaaaaaaaggtatatacctacgcaacaagaaacacgatgatgatgtgattgaacttgaagaaggattgttgagtactaagttgatgcattaatctttacacaattttaatgcacacaccatcaaacaacttcttataacatacattaaatatccttttgtagtgatatgcataataactagtttattttattgaacataaaaacttatgtgcgctctaaatgaaagattgat

SEQ ID NO: 6930 - DNA, 364 bp, Glycine max
tataatggaatgataaacttcaaatttatttctttatgaaaatccaaacaacaaaatgtttgtaaaccataagatatagaacataagctaaactcttactaaattaagatactatcaggtattacacccatatgagtagtgtgctcatgaaaaaactttaaatgttagacctttagtaagtggatcagttagcatggaatgagttcctatatgttttatacaaatatgtatcttctgaattctttatttaacaaccaaatattttatgtcaacaaacttttatttggttgaatccttaatatgaccattaagatattgtctcaataaacacccgatgactacttaatgttggtgacaacaggca

SEQ ID NO: 6931 - DNA, 327 bp, Glycine max
agcttaagggaagaagatgtacttatttttaatcagttctgcataattctagttgggtacaacttttggctcgttgaggtagtattcaatttcataaaatgttgtatctagagcattttgggtgggtcacacgtttgttgactcgctgggctaaatgttctgtctgggatgtgattttggctggctaggctttaatctagttgtttatatgatgattatttaaattttccttaaactcttcctttctttttttttatgattcaaatgactttaaaatatttttgcaaatatattatacttattagtatgaagagtatgtcattcttg

SEQ ID NO: 6932 - DNA, 362 bp, Glycine max
tgtgcaaatcaaatcactcctacattttatctttatttgcattgtatgttggtctcgtcctttgtcacgggaagccggaaggtccatatcaccttcttaattgtacacatggggcactgcgcccccaaatgcgcaagtaagaagagataatttttcgggctctcgtgtccgtaaaatgcattcatatcatgcatcgcataagcatctcttcataacatcataatggacatatcctgcatttgtccgttatcatattccagcctcacattttgcatggtcatggcatcatcatgcatatgcgttcaacaaactttttggtctgcaaaattgcatgccatttgttttcatgtttgctcatcctt

SEQ ID NO: 6933 - DNA, 313 bp, Glycine max
agcttggtgatgagccaattcataaaaaaaaaaaaaaaggcttggtgatgagccaattagactatgcacattgcattcattaactaagggttttttttgttctttttttagagcaaactactcttgtatcagtgagctctttttcaaattacacataacattacttttttttctctcaaattacaaacatcttatatatttgaaaacattacacaaacacagtcagacccctaatattgtttactaacactccctataaaggaagtgtctttattgattaaaaaaaaaaacaaaagatgtttgggtgtttttt

SEQ ID NO: 6934 - DNA, 364 bp, Glycine max
tgcagtcgtcacaaatgtgtatgtactctattttttattattatgtggatgatttgtgtattttgtaaatcataaccaagttgtgcctcaaaatagcttgtgaattctgtatataatttatgtgaataattattttagaactgacctgaaaatccaatttacacctgtgatatcgcaggggatggaagacttaagatgcctctgagcccaaaaattgcaagttcacaacaaagcccgtttggtctagggcatggtcttgacaacaacagtggtggcgtcgagcttatgaagtcttcattgtacccatcagctagtaatgtctcacatagttattcctcaaacagtttagggcagatgcagtttg

SEQ ID NO: 6935 - DNA, 301 bp, Glycine max
agctttcaacaagagtcttcacttatattcatcatgaagcagaaaactaacaaaactacccatcatatctcccaaaaccccatacccacgaaaatcaaaggagaaagaagtccacccaaacctgaaatttcgaaggcccactcgtagacacgcacttcacgactccaaaaatgctctcctttcgcgatttggagcagaaatgatggccaaaggttgaagctttgtttggagcttctatggagaatgaagaagaagaaaatggcctcgcgagggagagagagagctgtctgaaaagtggggg

SEQ ID NO: 6936 - DNA, 342 bp, Glycine max
tccttgagaagattcctaaagaagctagatttttcttttcacacctctctaatagctaagctcacctccataggatgcgaagctacagcttagctacataccccctataatagttaagcacacccctattccaaaaatacatgaaaggacaaaaaaatccctactacaaagactactcaaaatgccctgaaatacacgctaaaaccctataccactagaatggccaaaatacaaggcccacaagaaggaaaaacctattctaatatttacaaagaaaagtggatgtaaccttgacccatgggcttaaaaaactaccctaaggtgcatgataaccgtagggcc

SEQ ID NO: 6937 - DNA, 369 bp, Glycine max
agcttgtaggattatggggtacttatcacatgtggtactaggtggcggtcgggcaatggtgcacaacaagttttccacatccacaaattgcgcataaacccaccatcccctgttgcccacctccaactgaactcacgtacttcccacgtagcccatatccttgtttctctcaacaccgggtccccatcaatcctcccaagcttccccaacatccaggtaaaacaaaattcaaacagcacaaactatcacagccaagaaaacagggcaaaggcagaaaactctgcccaaaacaccaaccaaaatcacagctttttccacttaaagaccccagtaacatttccttcgtttcaatttggtaaccggtggatc

SEQ ID NO: 6938 - DNA, 366 bp, Glycine max
tcttatacaaggctcatcttggtggtgaagcttcttcttccatggcttattccctagtggatggcgcctcctctcacctcttctcctttgtcttcctctgcatctccatggtggaaaatcaccattagaggacctcatttaagctcttcatccagcctccatagaagccccacacgcaagcttccatcaagtggtatagagcacaagagcttcaagtaggtgctccttaaacctctgttaattttttgctttaccttctcttctattgttgtttcttcatttttctccatgtatctcctcacatgtcttgtgctaaatgttgttaacatgattctttagagtttccaccgattaagcttgctatag

SEQ ID NO: 6939 - DNA, 300 bp, Glycine max
agctttgaaggacattgttttgttggccaacaacaacaacacttgctcctcataagagagtttatcatttgcattcaacaattgacctactagctgattgaacctgttgatgtggtcatggagatctcctcccatctccattttgagttgatacaactccatctttaaacaaaggtgattggttagcgactttgacgcatagatattatcgagcttctcctacaaggccttcggtgttgtctccttcaacacgttgcgttttatctcgggagcaaaggcttaccgaaatatgctcacaac

SEQ ID NO: 6940 - DNA, 360 bp, Glycine max
tagcatttttttttctgaaatgagagatgtaatttctgaaatagtcacagaaagtacaagtccagggaagtactgaattataacatgtatagggaggaagttactaatgattaatatgagaaataagaacaataattatttactattaaatcatatttgaatgtttgagattgaaagataaatgcacaatacctttttaagtagtcatgtgactactaactaacttttaatcttgatatgatcgaaatttataatgctcacattcttaaaatgagattgttctagttatatatatccctcggattgggatgggaaggagtaaaagcatttttcaccacaatcaagtcttttagcagggat

SEQ ID NO: 6941 - DNA, 113 bp, Glycine max
gtcgatctgtccctctaataattattcagtttgacatctttgattggatttgttgccgttctccgcctcttttattcttatatgagtaacgatacttcctttctacggtcact

SEQ ID NO: 6942 - DNA, 313 bp, Glycine max
agcttagcacctggaattcagattctttatttaccaacctatcgatgttggggagagggtacacgtctttggggcatgccttgatcagataagtgtagtcagtccacactcgacattggccgttggttttttttaccatcacaacattgatgagcctggtggaaaacctgacctatttgatgaagttgcttatcgacttcttctttgaaggctttatgtcgctcttctcccatcttccttttcttctgtgatataggattggcctgggggcagatatccaatttgtggcaaattatgtcgagatggatcccca

SEQ ID NO: 6943 - DNA, 365 bp, Glycine max
tgccgcccagctcgcccaggcgagcaagggtgcttcttcctgaagcaacagccttctggaggaatcttctggagggcccaagtgggcctggttgctatttgcacccctttttttactaagtgcaccccctttctattttttggtaatctttttccgtaacgttacgaaactttacgaatttcgtaacgatacttatttttcttccgcaaggttacgaatccttacggattatgtatttactctttttttagtttttcttgaaggagttacggaaacttgcggattgcgcaaaaacacctcttttcgatttccgccacattacggaatttaacggattgcgcaagcctgcttccttttgatttttg

SEQ ID NO: 6944 - DNA, 322 bp, Glycine max
  unsure (1)..(322): unsure at all n locations
agcttgccaattgggaagactgttcgttatctcttgngatgggattgaaccccaatgaatgccccattgagcaaagcaccaccacatgcaggggtaacaagaaccttgtcatggacatggctcagcactttgttccccaacaccatcaagttcccatctgcaacagatattcctgcccctacagccatctttgatgatttgatgaatcaaacacaagctcaaaaggaaattgcagcacacagagcaccacaacccctctattgttgtttgttccaaatcaaatacaaatgagttaatgcaacaagggaaggaaaaggaaagg

SEQ ID NO: 6945 - DNA, 366 bp, Glycine max
tatatacaatgaggctataagctggacactatttaattttgtgtagctaactaacttctcccaaacttgttaagtatgctaagagttactgcgcagatcacgacaacttacattcttgtctaaggaacgacaatatctttttaacaaaagttgtttaacaattttatatataacacatgtcgatatatataattctctcaaatatatacttgtagaaaatgctgataattgacctgaaggattgtatcgtgatcatgtcgagaataatacgaatcccattgagaaaacccattatgctttgatcttgcttcgctgggtactccacccaacttgactgcatcttctattcgtcttttcatatctacg

SEQ ID NO: 6946 - DNA, 290 bp, Glycine max
agcttaataattcaatctatggattgttacattcctcccaccagtggtatttaaaatttcatgaggtcatttcttcattcagctttgaagagaatgtcatggatcactgtatataccagaaggtcaatgggaataagagttggttccttgtattatacgtagatgatattctgcttgtgactaatgataagggtatgctatatgaggtgaaacaatttatctcaaaaaacatttatatgaacgatatgggaaaagcatcttatgttataggcattaagatccctaaaaaa

SEQ ID NO: 6947 - DNA, 369 bp, Glycine max
tcaagctgacagagagttgagaagattggatattctcactttaagctgtgagttttcattgataatttttacattcgttcaagcttccttactcgagaatgtctctgaaattgctggtttttttaccatatactcgatctaaaatttctgcttaaatgtttgtttttatgaaaatttgtttaaaggtgttaattacaaggattaagccatatatagtttaagtgtaagcttctaaggccaaagtattattttgaaacaataattgttttctcaagactgccttttaaatagtgtagtaccctatacctagcttagagatgaaattgtctcaaaatatgcacaaatgggctgatcacacacactgatcag

SEQ ID NO: 6948 - DNA, 327 bp, Glycine max
agcttgatcaaaacaattatctattctttccaatccactcaaatcatacaattgctcattcaaatcattctcaaacactcatttcatgcaaaacaatccactacatatcattttcaatcaattcattggtcaaacacgcttttggtacaaacaaacaactcaaagtgctgaaatttatataattgaaatttaaaaaaattgaaatataaaatctgaaattaaaatgactgaacataaatcataaaataattgaaaataaactaaaatgttcgagatgcacaaatttaaatgtcctgctcctgtggttgctcctatgcatgctcatta

SEQ ID NO: 6949 - DNA, 367 bp, Glycine max
tgcctcaaagaggtccaggaaggacaaggcggtctattgaactagttccgctctggagtacgacagtcaccgcttcaggagcgttgtacaccagcagcgcttcgaagccatcaagggatggtcgtttctccgggagcgacgcgtccagctcagggacgacgagtatactgatttccaggaggaaatagggcgccggcggtgggcaccactggttactcccatggccaagtttgatccagaaatagtccttgagttttacgccaatgcttggccaacagaggagggcgtgcgtgacatgagatcctgggttaggggtcagtggatcccgttcgatgccgatgctatcagccagctcctgggatatccg

SEQ ID NO: 6950 - DNA, 341 bp, Glycine max
agcttagaagaaattcaaatggttatatcttttcactcggatgtatgattcaggtgtatcacatatcgagacgctcgaaatcgaacaacaagagctctcgagaaattcatattgtcagaacctttcacacggaggtccaattcagccgcatcacatatcgagacgctcgaaatttaacaacggaagctctgaaaaaattcaaatgctaataacttttcactcggatgtccgattcaggcgctttacatatcgagacgctcgaaattgaacaacagaagctctctagaaattcaaatggtcataaattttcacatggaggtgcaattcaggcgcattatata

SEQ ID NO: 6951 - DNA, 374 bp, Glycine max
ttaacctcatcgtccctcacagtctttagatttggttttcctatccaatccttgtgttcggactctcagccacttatgatagccgccgatgatcccattactgcttcccctaagctctctgtcctttcttcacgccgcatcccatgccttgcgaactccttggagtacctttgcattggggtcactgaaaccccgtgtaatgaaaggcgtgatgctttcgtctaatggcgctcctctcatggggtagccaagctgtcttatggcgaggacgggattataattaatacaaccccatgttctcatctagggaacatttggacatccttcgcatgaagatacaatcctgattcttccttccttctagcgagggaacc

SEQ ID NO: 6952 - DNA, 345 bp, Glycine max
agctttgtcctcagatcctctcttttggactagacttagaccaaacaacattattgtaacaacatatttaaaaccaaaacttaatccacagatccctcatttaagactaagtttcaatcctgcttcattcaagttctaaggcaacagtacatttcccaatgctaaagtcacctaaccatgcacaaaaatggttgattagaccaagagcatacaaaatttaagcattgaaagaagcattgaacacaagaaacacaatcaattagatattaaagtaattacatcagctgttttttagaaatccccaacaagggtgtttagcccgcccttacagaaaaaccctaaaac

SEQ ID NO: 6953 - DNA, 362 bp, Glycine max
tggaaggatgcttcaatggaggaaaagattgatgtagagaaagagagaggggggagcacgaaattgaaggaataaaagagggggagaagtagaactttgaagtgtgtctcataagactttcattcatcaaagttacaacaagtgttacacatgcttctatttatagactaggtagcttccttgagaagctttcttaagaaaacttccttgagaagctttcttaagaaaacttccttgagaagtttctttgagaaaacttccttgagaagctagagtttagctacacacacccatctaaaaactaagctcacctccttgagaagcttccttgagaagctagagcttagctacacacacccatc

SEQ ID NO: 6954 - DNA, 310 bp, Glycine max
agctttacagcagattttattaatgactctactaacctagaattaaaataacttaatgccattaacctagggaattaaaaaaaacttaatggctgagtgtaactgaaattgtggcaaccaaaagtcacccccaacagccaacaagtcagccaccatttggtctcccaaaaggctgatgcctaggttgccaattgggcccttattacaacttgaactaaacctaactaaagcccttttagttgattaacccaaaacatatttttggtcagccaactttacaaggattgggccattatttaaacaaactaaa

SEQ ID NO: 6955 - DNA, 377 bp, Glycine max
ctatagaaactcagcttataatatattattacgctcaaaataatttttgattctctcgagaaattcaaatggtcataacttttcacccggatgtccgattatggcgaatcacatatcgagacgctcaaaattgaacaacggaagctcttgagaaattctaatggtcaaaacttttaactcggatgttcgattcaggcgcatcacatatagcggcgctcgaaaaggaacaacggaagctctcgagaaattcaaatggtcataacttttcacactgaggtccgatcctggattataatatatcaagacgctcgaaattaaacatcggaagctctcgagaaattcaattggtcatcacttttcacacggatgtccgattc

SEQ ID NO: 6956 - DNA, 307 bp, Glycine max
  unsure (1)..(307): unsure at all n locations
agcttcaacatcagaccacttctgtgtgctggaactacttcacatggacttgatggggcctatgcaagttgaaagccttggaggaaaaaggtatgcctatgttgttgtggatgatttctccagatttacctgngtcaactttatcagagagaaatcagacacctttgaagtattcaaagagttgagtctaagacttcaaaaagaaaaagactgtgtcatcaagagaatcaggagtgaccatggcagagagtttgaaaacagcaagtttactgaattctgcacatctgaaggcatcactcatgagttt

SEQ ID NO: 6957 - DNA, 366 bp, Glycine max
ttttggagtataaacatgggaccaactcattttatttcaaaaaagaagtcgtatccagtcaaggtctgagagaccatacaagtttcctaacgatttctaattatgtgggccattaagtctatcatatgctgacaatagccgagaagcccatgaatctcttcgggggtggagtaggtgtctgccatcgccttggccttggctaacaagcggggaagttcttgactcccgttcaaggtaagagcaaaccggtccatccacatggttgcctcttggtgtaaagagtcgatcacccttcctctagcctctttttccgcatatacttgagcatactcatccgcgattctatgctcgtgggccgcggctaga

SEQ ID NO: 6958 - DNA, 236 bp, Glycine max
cgctttattaagaatgattttatatattttactcgccaacttcagaaggataaagtggataaaattaatatcaatttattctgacatttatcttttacaggtatttacattcactttattaaaaaaaagttaccttataggaacaagatctatttttgaacgaggacagaatattattcatctcaatatattagaagaaataagattatttatccagcactgcgatggactcaaaa

SEQ ID NO: 6959 - DNA, 363 bp, Glycine max
tgctcgtcttgctgatatttatcatgcattcttttttttgatgaccgacgaacaattagggatcaacttgaaacttatgtgcttcaagtgagaagaaatgcttctttttccacttgtgaagatgttcaaagtttggctatgaagatggttcaaactgagaaacatttggtatttccataggtttataaacttattgagctagctttgatattgccggtgtcgacagcatccgttgaaagagctttttcagcaatgaagattatcaagtctaaattgcgcaataagatcaacatgtgtggttcaatgacttgatggtatgttacaccgagcgggagatattcaagtcacttgatgatattgata

SEQ ID NO: 6960 - DNA, 364 bp, Glycine max
agcttcaagctgttcaattgctttatattactgcacagaagggcagaggtctgtatggtggtcggcagaggagcataaaccacagagtcttacgactagtacagatttctgattcaaggccagctgggttaccacgttaaccaaggcatctagtttaccctcaagcttcttagttttagatgatgcagatgagtttgtggctacttcatgcactcctctaatgaatatagcatcatttctggcgctaaactgttgggagttggaagccatcttctcgattaaatttctggcttcaacaggggtcatgtctccatgggctccaccactggcagcatctatcatacttctctccaagtcactgagt

SEQ ID NO: 6961 - DNA, 371 bp, Glycine max
tgaagtgaggaagtgtggaagggtgagacttctatttttattcgttgaccacagagtagtacctagaatacagaagaagcaacaacaatcaatttaacaatattctttaaacatgcaagacacaattgattgcaacaaaataaataagataagggaagagagaatgcaaacacagttttatactggttcggccacaacccgtgcctacgtccagtactcaagcaacccacttgagatttccattatctttgtaaaatcctttacaaagtctgaaccacacagggacaacccatcccttgtgttcagatgctttacaacaagagactcacagtctcttaaccaatctcattgaataagaagaatggaagaag

SEQ ID NO: 6962 - DNA, 306 bp, Glycine max
  unsure (1)..(306): unsure at all n locations
agcttgctaacccatggtttcttctatatatctcccacactttttggggtgggctattcttggatggccttgattttttcagggtccacatggaccccatttctaccaactacaaaccctaagaaaactatattactaacacanaaggcacacttctctatatttgcgtagagggtatttttcctaaggactgaaagaacttgcctgagatgtcctacgtgatcatctaggctcctactgtacactaaaatatcatcaaaataaacaactacaaagctacctatgaaatcccttaagacatgatgc

SEQ ID NO: 6963 - DNA, 359 bp, Glycine max
tgggggacgttttggggtgaaaaatatgcacctatgaagcttcacccctgccttcctttttatgttttcatgtacagggtgctcacccaagcgagctaactctacatttttttttgcaagaattctttgcaaaattttgactatcctctgggtttgcgcttattttattttaattcataggattatgaacaaactaggcatattcaactatgacttaagaaacataggtgaataaataacaagcagaaatttaaaaggtactaggttgcctcctagtagcgtttcgttaacgtcttgagcttgatgcgggatgatgatatgttgatcacaagcctaacacctgctcgtacctgccccta

SEQ ID NO: 6964 - DNA, 305 bp, Glycine max
agcttgcatttggaattgcgatttccccactccatcattaggattagtacctgacatctcaaacaaacaaatcaaacgtaacaagacaattatagttgctgtttgaatacctcacccactcaagtgtatcacacaattatggcttttctctaatgaaacactcttgccttttaccactctaattccccttgagttcttaggcaattcaagagattatggccacaacaaagaacaattcaccaatatgtgtaaggtaaggctagacaaggaaaaggttaaccaagaaaaaagctaacaatgttttt

SEQ ID NO: 6965 - DNA, 360 bp, Glycine max
  unsure (1)..(360): unsure at all n locations
tttggtatcaattacgagcgtcttatatacttcgggacataatcggacatccgggtaaaaagttattgttatttgaatttgctcataggttctgttttcaattacgatcgcctcaatatattatgggattcattcggacatccgagtaaaaatttattgccatttgaatttgctacgagcttccgatttcaattacgagcgtcttgatatacaacgaaaaacaatccgacatccgagtaaaaagttattgtcgttagaatatgcttagagcttctgttttcaattacgagcgtctcgatatattacgggactcaatccgacatccgagtaaaaagttattgtcatttgaatntgctcata

SEQ ID NO: 6966 - DNA, 293 bp, Glycine max
agcttgagcagaagaccctagtgtgctttgtgtcaacctttgataaaaatcttatatggttagctagggtttagaatgatactaattttgccaaggtcttcctccagcaaagtttggcgatcttggaagagaatatgtaaaggcaccaagaggcactaagcaaggtggcgtccttataggctgaggttgccatatcgagggccactacttgtacattctggagaatggagcgccctaaagtagctaatgccataatcgccttcgctaaagctgtgaattcgaaccatcaacta

SEQ ID NO: 6967 - DNA, 365 bp, Glycine max
ttaaaatttaaattcaaatttctaaaggctgttatttaatgtttaaaatttctggtaatcgattacaagccttgtgtaatcgattataggctttaaattttaaattcaaaatttgcaaatttgtttcagaaatgaatttgtccactggtaatcgattacatcctctggtaattgattaccagagagaaaataccacatattttaaatcacaaaaagcttttgtaaaatatcctttggctaaacctgtgcatcatcaattaaggaatgctttccaagattctagggactaagttcatcatttttcttgaatttctgtgttcttgacttggattaaacttgagaagcgcttatctttggtatcatca

SEQ ID NO: 6968 - DNA, 295 bp, Glycine max
agcttttgaagacaaaattggtgttctttagtttttttgaggactaaattagggattgctcaattatttttatttaaaagaaattgtgtttcctatgttttcattgctttctctttgatattatatatttggattttttatattcttcacgacaaaagtaaattatatatattccttgagcttatgtcaaaagggtcattggcaagtctctatcaaaagtatcggttaaacgattctcaagtttctgcatacacaaggcagattttatgtggcttggaggatcttcatgatcata

SEQ ID NO: 6969 - DNA, 367 bp, Glycine max
tgattttccatgcagtaatgactccaaagctttatctctcctcctcctcttatggcccaaaagagatcttctcccatcagtgttctgttcagtatcttcccattaacatttataatttgagcatcaattatattatcagaagctaagccgtattttctgaaaattgtaccaaacccacctccactcaaatgccctccaacaccaacagtggagcaacttccagctgggaaaccatgaacctcacttttcttttcaattgcataatagagttctccaagtgttgcacctgactcaacccatgcagtttcttcgtccatgttaatggttatggacctaaggttgaaaagatcaatgattatgaatggaa

SEQ ID NO: 6970 - DNA, 259 bp, Glycine max
agcttttactccttccagatgattgtttttttttctaaccatccagataaattagtagagtacaactgttttctatattacgttagatcaccttaaacgtgaatccatacatgattaacccccttataaagtgggacatgattccgttcgacttaccttagaaagtgggattttcctataacaaacacgctacactgcgtatgtttagcagactttcaaatgaaaaccacaccagttgtctttaaactcttgcattgaa

SEQ ID NO: 6971 - DNA, 371 bp, Glycine max
  unsure (1)..(371): unsure at all n locations
tagaattaatgtcattagccattacagcnggctaatttttttcctatagangnnaaaaaaacgtagaatagatttggatgaactgaccctagaaatggtttcagcaggaggagtaccaagaaggtcagttatgagatccaattggtgcactacattttttccaggaaacaatggcttcccactgagcatttctgcaaatatgcatccaatgctccaaatatcaattgcaggcgtatactgcaaaagacaaggatttgaaattacacactagtgcaatacttaaatatattcaacttcataaatcatacacaatcccggtagaggaggattgaagaggtaaccgatctagtgcgtaaaaggctttgcaaaag

SEQ ID NO: 6972 - DNA, 375 bp, Glycine max
agcttcgacatcaagtgatgatattctttttaagacttaaaaaaaataattgaaattatttaacttataataatatattagaacacatgtgatggtactctatttgaacaattttatagctagttcaaaaaaataaaaacaagtatattaaaatgaagaacttgttcaataagggttgcacatgtggcgtaaaaaatatatattaaggtccatttatgttttgataagacttacattaaattttttaaaagtagttttgttttatatactaaattttatacttacgttatctagctattaaaaaactaaaaaatatgatgactaattgattaagatcaattttcaaccatgcattcactcactaataacataata

SEQ ID NO: 6973 - DNA, 370 bp, Glycine max
  unsure (1)..(370): unsure at all n locations
ttataagcaccaaccaaaatggaaactatgttttngttgatagtccaaattaggatatccaaccaaatatttattttttctcttttatcttcttatccgataattgattaaggatcatgtagtctagtcagtgttgttctaattatcattcatttcatttgcagaaagaaagcaattaataaacaaaaatggttttttagttgctgtcttactcataattcagacaggttgataataagcattacaaaattgcagagataaattattatgctttttcactatcttgatcttttatgtgcagaaatatttcaattattatggtttttccacaggtttacaatcacactacataacatattcacatgaaaca

SEQ ID NO: 6974 - DNA, 369 bp, Glycine max
  unsure (1)..(369): unsure at all n locations
agctttgctgatttagttttcgttgatgttaggatcgaagtgggtctaaaaagacgcaaatctgatcatcatgctttgataaatacaaaaaaactacggcaaatgaagatggtgagaataagggagaaacccatgttgtgactgccattcctatacagccaagtttcccaccaacccaacaatgtcattactcagccaataacaaaccttctccttacccaccacccagttatccataaaggccatccctaaatcaaccacaaagcctgtctaccgcacttccaatgacgaacaccacctttagcacaaaccaaaacaccaaccaagaaatgaattntgcagcgaataagcctgtagaattcaccgcaa

SEQ ID NO: 6975 - DNA, 111 bp, Glycine max
ttcttttgggaaagagaatgacaacacctgtgcttataagaaactgctccaaataacgtttaatgctaagctcatacatgaaaatattaaaagtgattgttttaaaaatat

SEQ ID NO: 6976 - DNA, 272 bp, Glycine max
agcttgaaataacaagattcttttctctgaaaccagttccattagaagccattactgaacctttttgaaattcctgcatattgcataggtatagtagttgtcttattctaataggatttagttataatgttatgaacaaggttgtgatttaatttgttggatattttatgtaatgaagacatagctaggtggattttagcaatatctttagtgcaaaactttgtaaaaaatggcaccactatttaaagaatatttgctaacgtcacctaacg

SEQ ID NO: 6977 - DNA, 362 bp, Glycine max
tgtctctctttacttgaggtatgtaagattattatttgcagccaaatgtcttcagatttgttagctttggtttgtagtcgtgccatgcttcaaatggagtctttttctacaaagcttttgttggtaacctattcagcaaaaaaactgttgtgtgtgcagcctctgcccaaaattcctttggtagccctttgtcatgaagtaagcaccttgtcatctccataattgttcggtttttcctctcgacaataccattctgttgcggagtgtatggtgctgtcaattgatgttcaatgcctgcatctacacaaaacttgttaaaattttcagaggtatattcagttccattatcggacctgatcacc

SEQ ID NO: 6978 - DNA, 316 bp, Glycine max
cccgggatccttaagcacctgcggctgcagctttgaaactttggtttgtggacttcaccgctaacgagcatccataagctgtcgcaagcaatcaaagcgattcccttccttattctaatagaaaaggtaatttgggccctcccccagtctatagctatgctatctctatcactgctaaagtcaacttatctttgtcttcaacctcactctcttcatcaaatatggccatgatatcctcatcaagggattcaggaagcatgggctgataatcatttatggggtgttgagccaagtgattgggcagagcgcccccttt

SEQ ID NO: 6979 - DNA, 360 bp, Glycine max
tttctctcttgctccgtttttcagctctgttatgtttctccccttaaaagaactcccttttttttcgccaacttcagtcttttaagggctttttgatcctgaaggctcgcttagcgccattttctcgctaagtgcgagttagtgaattctcacatagtgagctgggcacgctgagtgcaagaagggacaaatgactcgttgagcgagctgatggcgcgctgggcgtgtgcatgaatgacagattctcttccaaattcttccaactcgctaagcgagctgagtgcctcgcttagcggatgttacatgctaagcgcatatacctcgcttagtgagacaccagctgcttcaacctcttcttct

SEQ ID NO: 6980 - DNA, 365 bp, Glycine max
agcttcttgaatgggatattatattcattcacatagatttaaggatgaagatattgtacgtgatattttttggattcatcctgatgcaatgaaattattcaatgcatgtaatttggtattttttttttatagatagtacctacaaaacaaacaagtacaggctgtcgttacttgacattgttggtgtgacaccaacaggaatgacattctctgctgcttttgcctatttggagggagaacgcctaaataatgttatttgggctctagaaaggtttcgaggtatttttctcacatgtgatgcactccctggagttattgttatcgacagagatctatcattgatgaatgcagtgaaagttgttttt

SEQ ID NO: 6981 - DNA, 367 bp, Glycine max
ttagttgattttaggaatcggaaattaattagtgtaataatttcattaggactagaattaaaggaaaattggtactagtaaatcataacctctagccattcttatcataactcaaaacctctctttacattcaattattttctttcttataaaaaccaaaatcataaaaatatttaaaatccctttttaatcatctcaactgttagtttaataaacttgaccaattgggaatacaattgatcctttgggttcgatatccagacttttcaatacattgttactattgtgtagggtacacttactattgtgtgagcctaacatattttacgcattaagtttccgacgctgttgttggggactagttgcg

SEQ ID NO: 6982 - DNA, 227 bp, Glycine max
acatggagtttttttgtttttgtcatttgccgaaatacattcagctaccacagatggcaactttctctgcccttgtgttaaatgtgtcaacgggaggcgtcattctctggatgacattaaatcgcatctgatatgtgatggctgtaacccgacgtacacaaagtggatatggcatggtgagttggttggtcatacaacaacatgtccacctcatccggttgatctac

SEQ ID NO: 6983 - DNA, 368 bp, Glycine max
ttgcataggactgatggaaaaaatatacattgttttgataacaaaaggaattcaagataaatattactaagtgaaacacaatgtttattgagtttttatcctttgctcagtaaagtcattgtattgggtattactccatcgtaaatgcactccttgagtgatagaatctgtgattcttcaaactgttgtttgtgaaagtcaagaatggcttagtgacaaaacaatacttgggtattcttagattcagggacagtccaagggttttttgccagtaatgacctagaaaatacttgtaaatctagaagtgacaggttagaatatttattgtaatcaaacattgactagaggaatcctttatagttttgtaa

SEQ ID NO: 6984 - DNA, 361 bp, Glycine max
agcttgtagaatgtccttacattatacatgtcagggtttggtttggttcaagggtaaaagggatgccccacattatttccatgacacaaatgcaaaaatgatgatttggaaactttatgcaaaactggtcatgcatgcacctatgtggacactcaagtgtcaaatttttatggtcatgtgatgctagggctcaggattcattccatctattttagtcaacccaatatttccaaaatatgttcttttatccatttgtgcattcatccgagtccattttgggcgtccgggaaaattttcacagcattcacccctcaggtgtatacacattttttcaaaaactaactatgatcaatgaattttt

SEQ ID NO: 6985 - DNA, 367 bp, Glycine max
tctcaaggaagttttctcaagaaagtttctcatgtaagctacctagtctataaatagaaacatgtgtaacacttgttgtaactttgatgaatgagagtcttgtgagacacaactcaaagttcaacttctctccctttttcttccttcaatttcgtgctcccccctttctctttctctcccactttcttttcctccattgaagcatcctctccaagcttcttatccaaggctcatcttggtggtgaagctccttcttccatggcttattccctagtggatggcgatgcctcttacctcttctcctttgtcttccgctgcatctccatggtggaaaatcaccattaaaggacctcattgaagctcaaag

SEQ ID NO: 6986 - DNA, 320 bp, Glycine max
  unsure (1)..(320): unsure at all n locations
cccgggatccttaagtcacctgcaggctgcagctaacaaaggttgttattgggtggaattcctagagcaattcccttatgttatcaaacataaaaagggaaaaggtaatattgtagacgatgctttttctcggcgtcatgcattactttctatgcttgaaacanaattgattggtcttgaatgtttgaaaagcatgtatgaaaatgatgaaacttttggagaaatttttaaaaattgtgaaaaattttcaaaaaatgggttctttatacatgaaggctttcttttcaaaaaaaaaaaaatgggtatgccttaatgttctc

SEQ ID NO: 6987 - DNA, 359 bp, Glycine max
tcaccgatctctctatgttgatgatatagtgatttcagggaatgatactactaagattgtccagctaaaagagcacttattcagccatttccaaaccaaagatctgggatatttgaagtatttcctcggtattgaggtggctcaatcaggagatagtgttgtgatctctcaaaggaagtatgctcttgatattctaaaagaaacaggtatgcaaaattgtagacctgttgatagccctatggatccaaatctgaagctcatggcagattagagtgaagtttatcatgacctcgagagatataggcgacttgtgggaaaactcatttatctcaccattataagacctgatatctcctttg

SEQ ID NO: 6988 - DNA, 356 bp, Glycine max
agcttataataagttatattattattttattgaaccagtccaaggaccacaatattgggcccagtatacacaccttgttccaccacataaaagggtccaaagaggaagaccaaagaaaaatataaggagatctgtagatgatgaccatgtcacaggacataagctaaagaggaaattggctgagtttacatgtggaaggtgtggccaaaccaatcataacattagaatctgtaaaaatattggagttcctgttaggccaaaaaaatatgttgcaccatcaacttcaaatgaggatgaccacctattatctcaagatgaaacagctttgaatgaagctgaagaaactgttgctcatg

SEQ ID NO: 6989 - DNA, 363 bp, Glycine max
taagaccccagctcatatcctcacagtgtcttttatgtggaacaagtgcaccagtatcagttcctctcttagccttacaatcatagaagggaggagcatggaagcatggctccatcgacatggcacgttgacaaggaggatcaggagctgttccattctcgggcttgtacagtatccacggtttcaaccctccaagcccctgcgccacgtagccgaaagtagaccacgagctcgtgaccaacatatccatcaagctcaagaggtaaatttctgcccaagctttttggttgtgcatcttcttctctgtttgttgatacccttcatggcttggctggtaaatgccaacaacttctcctgtcacag

SEQ ID NO: 6990 - DNA, 307 bp, Glycine max
agcttagtaaagctaagcactatcaatctccttctttggcaaattttgtctaaaacatacttagacacttcctgagcaggtacgagcagttatgcaagtgggatcagcaactttcattatcagagtaatcaagcacagcggaaattctgcaagttgcaagtcgtttccaggatgtcaagacatctcacatgacatcagctttcttcttctgctccccctgtctccatgctcttactgcagcatcttctatcaactactaatctttttcaggatggcaaaacatctcatgtgacatcagcttttcctt

SEQ ID NO: 6991 - DNA, 365 bp, Glycine max
tctaaactttatacaagaatgaagctctgataccacttgttatacaagtggtctcagatatcttaagaaggggggggggttgaattaagatattccaaactacttccccaattaaaaatctatttgacttttttttaattgagttataaattcccttaacaatgaacttcttaaatattaattcaaataaaacaatttgaatatgaatataaagcaataataaataaaggagtttaagggaagagaaagtgcaaactcagatttatactggttgggccacacccttgtgcctatgtctagtccccaagcaacccgcttgagagttccactatcttgtaaattccttttacaagttctaaacacac

SEQ ID NO: 6992 - DNA, 283 bp, Glycine max
agcttaaagtatgcccgagtcattcattcctatgagatgttgttgaagtattggcgatcagaattgccattccttggattatagggttgatccaagctcatgcttttacaaaaaggttcatcaagtcaagttgaaatatggaagtaaccgtcttgcaaaattggggcaaaaaatgaatcgagtcacatcactgcttcgtctactgccaaacatatttaggattattgatgtccttgttacttccagtttcacctttacaaagatgtcatggaccatgttgaaa

SEQ ID NO: 6993 - DNA, 364 bp, Glycine max
ttttggagtagaaacatgggaccaactcattttatttcaaaaaagaagtcgtatccagtcaaggtctgagagaccatacaagtttcctaacgatttctaattatgtgggccattaagtctatcatatgctgacaatagccgagaagcccatgaatctcttcgggggtggagtaggtgtctgccatcgccttggccttggctaacaagcggggaagttcttgactcccgttcaaggtaagagcaaaccggtccatccacatggttgcctcttggtgtaaagagtcgatcacccttcctctagcctctttttccgcatatacttgagcatactcatccgcgattctatgctcgtgggccgcggcta

SEQ ID NO: 6994 - DNA, 358 bp, Glycine max
agcttcattcaccccaaaatctttccatcgttcaagaggcatatgagctcacgggattcacgagttttgcagccctaagcccccatttttgcgcttttgattccatttttgcactcttgctcactccatacaagtaagtacactattccttggttctttggctttccattgatgcattttagtgctctaaattgtctatgtttggccaaattcgtgagccaattcatgatggattcatgcttttgatttgttgaaataggggattgtatgggatggtcgtacgccaattgtgtattctgaaatgaatgggcatgtcgcattgcccctcttccttactttttcatgcctaaacatgcgc

SEQ ID NO: 6995 - DNA, 364 bp, Glycine max
ttttcatatgataactttgtgtttacgaaaaattttttattatttctaaaatcacaattcaattcctcttattgtaatagtcacctttacaatgttttttttctctttcttacctatttttatctaaccttgaatttttgtttacaaaatggattttggtaaaatagtgttttcaaaactttcatttgtcccttcatgcaatgcttgtcaaaacttttttctataaaatgataccatcatttgcaaaaggtttttgatttttcttgttaagaaacacaattcaacaccccttattgtgcttccttgtatttacagttttgtatttgagctcaaccactaacgagttaagcatctgatagtgtct

SEQ ID NO: 6996 - DNA, 372 bp, Glycine max
agcttggctaaaatggacacaatttatcaaaaatgattttttaatcagttttttttttcattttagatcaattttctttgaggatataaatttagttgatataaaaattcgatatactttttataagagttggatattaagaaagtgaactttctggattacttgtgactacaacaaatataaaaagtttattaaaaagaaacatgcatcaccccaactacaattctcatttctttcttgatgtacaatacaatccaatacaaaaactaaaattatagaaccaataattttactataacatataatacatatgagaaaaatgcaatataatgcattaccattaattaataactaaaaataactacaatctat

SEQ ID NO: 6997 - DNA, 370 bp, Glycine max
tgccacaataatttcgttgctgatgctttgtctcgctttcatgaaccagcaactgaggctttttggatcctcaatttccctcatttccagttccttaatgaccttgaaagggaattgtccaatatggtggaatttgtcactttgctcaaggctgtccgagataaaccacatgatcaccttgattttagaatccaggatgagctactcctttacaagggccacatttgggtgaataaaagcaattcctttattctgcttctgttggaagagtaccataaatcccctctaggtgaccacatgggcctggctaagaccttgagtcatcttcaacataatttcttctggaatggtatgaagcaagatgtccgag

SEQ ID NO: 6998 - DNA, 360 bp, Glycine max
  unsure (1)..(360): unsure at all n locations
agcttgtcgntcctttctctgctcaacggacgccctttctcctctcgttcccatcgtaacccccctatcgctgcctcgcctcttcctcctccgacgaccgcagtgccagtgccaaacgcagcggctaggactccgtgctgcaccagttcttcgaggtcgccaaccgagtcgattcctactggaagtcccttgggaacgccgtcgctgacgaggattgggattaggatcactggcgtcgacatttcgaggaaatcgacgagcaagagcgcctcctttcgattttcaaattacacgaatttcaatttgtgtcttctcacgtgcttttaacgaagtttttgggttagtcattattctgaatcg

SEQ ID NO: 6999 - DNA, 366 bp, Glycine max
  unsure (1)..(366): unsure at all n locations
ttagaatcaaactctgtttctctcttcttttcttcattctgctttccctttccgctttttctcttccttttccttgccaatatttcgtggcttttaactgttgatgatcatggaaggctaaacactcaatcaatccaagaatccactccaagcaagggtgaatttgagttctagtttagtatttctaatctttgtgaatgttcatctttttcttcaatcctatttttgattttcatgattatgattatgcttagtattgaaaatggattangttacggattcatttcctaatttcaaaatttaataacagattgtttggatgattttcctacctaatttgggatttcaaacaatttagggattcat

SEQ ID NO: 7000 - DNA, 287 bp, Glycine max
agcttctatagaaggttctttcttattttctctacaattgcatcacctttcaatgagctggtgaagaagaatgtggcatttacctggggtgaaaaacaagagcaagcctttgctttgctcaaagaaaagcttactaaggcacttgttctagctcttcctgacttttctaaaacttttgagctataatgtgatgcctctggagtgggagttgaagctgtattgttacaaggtgggcaccctattgcttattttatggaaaaactttattatggctcccccaactaccc

SEQ ID NO: 7001 - DNA, 364 bp, Glycine max
tgaaaatttagtttttacaagaggataattatttacatatgggttttaggaaatggagagaagtgagctaatacgaagcatctggaagaaaggacataatgaatgacataaatcaatacaaaatattttttcaagcatatcctacaatatagtaaaaaaacacgcatatatacaatataatatcaaatcaataagttgtcttaagtcataaaatgggggcatgtaagcaagtgaaaacataaaaataggtacatgtggttggtgatacaacctattttacactcaagttatcaagtcttaatatttatggagtaattaatgaaaaacaagtttgacatactattttacactcaagacaaaaatt

SEQ ID NO: 7002 - DNA, 314 bp, Glycine max
agtaggtgtcctttatttcctattatattctcacactctctaaaagcttgttaagcttttttgcttacttttacttatgtcatttccttgtacaaatgctcaacgtgtagcatgcttttgatcaaaggttgtacttacactcaaaaaaacctttcttttcgttaaattattgaaattcaaatcttagagcatattcaaaaacaatataagaagaggtaaccttaacattcaagctacataagaaatgggtctcacccattgaatcatccaaaaataaaaactaatattgtgaaatatacaaatgctgccttttt

SEQ ID NO: 7003 - DNA, 363 bp, Glycine max
ttgaacagaaacattactttgtctggagacatgaaaatagacacaaggaaaagatcaaaaactatatttcgaacacaagtaatatacaaagtaaaatttagccaacctgtcattaactccttcaagcatcacatactcaaatagaactttgtagttctttttgaagcaaagctcctctcgaagtgtctgaagaagcaactccagcttgtactttcgatttataggcatgatccagtttcttacctgacattagatttaaatatgagcaatcctccctttcttcccatccttacattttcatgtctaatttcaagggtgatataccaacaaataacagtaaagtaataagaaatttacctcatc

SEQ ID NO: 7004 - DNA, 347 bp, Glycine max
agcttgaatggagcttatttcttttggtatctagagcatcttcatctaggtcatgttcttttgcttcctctatgtttttgtttagtcaattcacattaattccttgttattcatcttattctccatgtatatcctccattgtcttgtggtttggtgctgtttagagtacattcaaaaaataaaccgattaaatcttagatctacacttgttcttgcatttcaatggttcaaattttatagatctacgcttgaatcatgtttttgtgtcgattttaggttctatcatttttcattcataatattcttgtgctgaacctttaaatctaaatttttttcccaaatattga

SEQ ID NO: 7005 - DNA, 367 bp, Glycine max
tatgctgcaaacatttataatagaccccttcttctgaaaaaccaacaacagcagaataattatgatctttcaagcaacagatacaatccaggttggataaatcatccaaatctgagatgggtaagtcctccacaacaacaacagcctgtccctcccttccagaatgttgctggtccaagcaagccatatgttcctcctccaatatagcagcaacaacaacaaagacaacaagcaactgaggctcctcctcaaccttccttagaagagttagtgagtcaaatgaccatccagaatatgaaatttcagtaagagacaagagcctccattcagagtctgacaaatcagataaggcagaaggctactcagt

SEQ ID NO: 7006 - DNA, 359 bp, Glycine max
agcttgtaggattatggtgttctcatcacatgtggtactaggtggcggtcgggcgatggtgcacaacaagctttccacatccacaatgcgcgcataaacccaccatcccctgttgcccacctccaacggagctcaacgactcccacgtagcccatatcctcgtgtctctcaacaccgggtccccatcaatcctctcaagcttccacaacatccaagcaaaacaacattcaaacagcacaagctatcacagccaagcaaaacagagcaaaggcagaaaactctgctcaacacatcaaccaaaatcacagcttttctcatgtaaagaccacagtaacaattccttcgatccaattcggtaa

SEQ ID NO: 7007 - DNA, 365 bp, Glycine max
tctcaagcaagatcacatcaatacgttcttttctttattcatatttgatgcctttgaatagtggtggctcgtttgtggaatatccttcttccatatttattttgactttaggatctttcctctgtatttgtgaaaatacacaacctgagaggtcgggctctgctgcctattgaaatacatcaaaccacactagaaggggggttgaatagtgtgttagtcaaaatataaaaccttttagaaatggaagatgttataataaatttataaaaaccgtcgttcagtgaaaaaaggtggattgttgtccaacgaggtgcaaaacttgtcttttagtaaaaaccttgtgtgcaaagtgtgatagtaatgga

SEQ ID NO: 7008 - DNA, 364 bp, Glycine max
  unsure (1)..(364): unsure at all n locations
agcttcatgtntttctttttcttctctaacttggaaattttggatttgttttgaaatgatgtcactttaagtcacttattgtaaacgtcaatgaatagcctcgactgtcgatggttccttaattcatttaaaaagcttaacgaatgtttgatgaacataaaagattaactcaacatgttcatatgagacaataagctggaattttaaaaccatcaacataatggtctcaacaagaactaacaatatgtcaaattgcccatagttgagaatgatggagaagctgggatcaaagattatcaattggctattcaaattcacgttttttttaaaaaaaaattgtagttctcttcatgaagtcgctgag

SEQ ID NO: 7009 - DNA, 379 bp, Glycine max
ggacctataaaactcaagcttgcttaagagtttagctctgatttttattttgtacactttctgttgccattattatgaaacacaaatgcttgatattttgtgatgtgttataattttttcctcccttgtgtaacatctgcttccttttggggatatttggtggcaggctgaaggtatttcttatttacactcatctttgaacagtgataattgtgaagagcaatctgcacgcacagatgcagcaggtgaaacacaattggataagcaaccttctgcagaaaattcaaatgaatccgaagcaaatcgagatgataaatctgatgagacttttcttaataactcaattcagagttctaatattatggtaatgcactggtac

SEQ ID NO: 7010 - DNA, 283 bp, Glycine max
  unsure (1)..(283): unsure at all n locations
agcttattnctatgttaaaacctttttatcactgccaaaaccgcatgggtgttcgacatagatgagactacactctctaatctcccttactatgctgaccatggatttgggtatgactttcttttgtttgtctatgttattgctagttatttacttacagtaaattacataaactttcttagatttaaagaaattatacctgtacgtctttcttccttttttgacacacctacacacttttctttaattttaaaacatacacaaactttcttaaatattattc

SEQ ID NO: 7011 - DNA, 462 bp, Glycine max
  unsure (1)..(462): unsure at all n locations
cacctacaacctacntcatactgattgctaatcatcacccaaacacaacaagggnttgatcatgatcctgccacccccgggacacaaaccgacgcagcagcagcagcaaagataatttcatgacctaaacgcgctcggactatagatgactaaaccgaccaattcgctacacttaaaggagaacgactgtacctacgaaaccgcacagaacaaaaagaccggaccccaaacacgcaacgcgcagttgaatgacctggaataagaatgacctatccgcaccaacccagtcacgatgatactttgaccaaaacctatacaaacatctcagaaaagataaaatcatgccaacagcgcaaaaaaaacgtgaaaaacaccaccatccaccccatcaagacgaacgacacaacaacgctgagcccaacacgcgccaccaaccagacgcccacaaaaagacgagccacc

SEQ ID NO: 7012 - DNA, 322 bp, Glycine max
attaacctcatcatttcttcttttcttataaataaaaagttaaattacttatttgctttttataattgcataatttttattttttttagtctttataatttgaaagtgatttttaatccctataatttatattttaattctcttttaatctctctaattttaaaaatagtttttttaatctttatagtcctgtatttttcaaagcataatactaaaagagaattaaaatataaactatataaactaaaaataatatttttaaactataagaactaaaaagaattaaaatgtaaattgtagggactaaacagaatcatcaaaa

SEQ ID NO: 7013 - DNA, 352 bp, Glycine max
  unsure (1)..(352): unsure at all n locations
agcttgtaggatatggngtacccatcacatgtggtactaggtggcggtcgggcgatggtgcanaacaagttctccacatccacaaatcatgtacaacccaccatcccctgttgcccacctgcaactgagctcacgtactcccacgtagcccttatcctcgttcctctcaacgccgagtncccatcaatcctcccaagcttccacaacatccaagtaattccacatccaatcatcatggactaacaaaatcaagcaaaacagggcaaaggcaaaaaactctgcccaaaatacaactcanattcacagcttttcacatgcaaataccccagtaacatttccttcgttccgattc

SEQ ID NO: 7014 - DNA, 433 bp, Glycine max
  unsure (1)..(433): unsure at all n locations
agcttgagaacacctccaaaagttgcatgttatatccacttcctgttccaaccatgcaaatcttgcctgaatattctgaccaaaacccatcaagactaaacattattgaacttggaaaacgcttgcggttctttaatcttttgccacgtgtgaagtttcccacacggtaataggaactggcagttgttactaacaaggtagctccaactttgtgtatgccaaagacatcagtttcatacacactcttgattcgaagggtaacttgtttctgtctcagtttctggaaggtgtcagcaccaacaattttgtcaccaccaaggtagtaaccaacttggaatctaccatgtgggaagtctttgaacttggactcattgnggtttgagtttggaaccatggaagcacagtgatctgtgtaagtgagttgagaagcata

SEQ ID NO: 7015 - DNA, 402 bp, Glycine max
  unsure (1)..(402): unsure at all n locations
ggatgcatnggtcaacttggtaacccagctggccttgaatcagaaatctgtacctgtctcaagggtttgaggtttgtgctcctaagatgaataaatacagacctttgcccttcaatgcaacaacctggagcaattgagcagcctgaagcttatgctccaaataatgacaatagaccttctcaacctcagcagcgaaatcaaccacaacagaacaagtgtgagctctccagcaacagagacaacccaggacggaggaatcaaccctacctcagatggaacagccctcagcaacaacaacagcagactgctccatcctgacgagatgctattggcccaagccgaccatacatacctccaccgatacaacaacagcaacaaccccagaaacagccaacagatgag

SEQ ID NO: 7016 - DNA, 455 bp, Glycine max
  unsure (1)..(455): unsure at all n locations
agctaggaggaattgactacctctactgaggatgttccaggcaaatattgagggatgctcgagggaggcttaccataagttacttcatatggagtcatctgggtggtatagtggcacgttgtattataacaccactcagtcaagcttagaaatttgccccattgagatagttggttataaatgaatgctcttaaatactgctggagcacttggttcagaactttagttcggccattgctctgaggatgataagttgtgctcatgcgcaacttggtcccattgagcttgaagagctcttgccagaagcgactcatgaagattggatctctgttggaaattatacttttaggaaagccatgaagcttgcataccatgttgatgaanagttaagtaacacggtgggttgtgaaattggtgggtagcatgccgaaatgagcttcctttgagaagttgta

SEQ ID NO: 7017 - DNA, 372 bp, Glycine max
cttgctacaatgttgtcatctcaatgacatgctcatgcatagtacgtgagccatcaaacttcatagtggtcaacatactcattaatgtcccagcaagagactaataatttgtttaggagtgctctcccactaacctgataaattctttagcattttcggtcttggggataaatgtcttaatgttattagccgaagtcattctcatgagcatcagggtgagtctattagatctggcccaagctatagaatgggcttgcacttcattgctactagcctgagtaatagtcgcaggcttttcattcaatatagcatgactcaatattcaaaacacttagatgaaattggacatgctcaatctaatcagaaaagacc

SEQ ID NO: 7018 - DNA, 432 bp, Glycine max
ttaatgaacccttcactagtttatgaagaagaactagacttatctttgtttgagtgaatattataaactaagtgtttctatttatctcttaagctatttgattggtattctctttaacttatattgacacactctatcacataagtgttaccttgaaaaacctttgtgaaaatactattttatcaatcattggatgacagtgtttttgcttttattggtcttgttcattggacgacgctatcagtaactcggattttacaaatctttttatgaaatacaaaaacttgcaagaatattttatatttatctaacacacttcaagaagcatggacacttcaagtcagactgcccaaaactagagaaatccaaggacaagtacaagtattacaagttcaaggaaaagaagaagttcgtgagcacttgggagaatct

SEQ ID NO: 7019 - DNA, 223 bp, Glycine max
  unsure (1)..(223): unsure at all n locations
gcctcagcaaattccttatttccataggggaattctatcaatagacctccaatctatatatggagagggttaccactactggaaaaccaaatcgctaatnngtatcgaggcaatagatctaaatatctgggaagccattgaaatagggccttatatacccaccacagtagaaagagtttcatagatggtagtccatcaagagaaagcataaccataaaaaaac

SEQ ID NO: 7020 - DNA, 386 bp, Glycine max
tgttgtattacatgattactgacactctcttcactgtcaaattatgttgtgctaattatgacatttactagatcatcaaagataaaatgattgtcttggtctgtgaggttttatatcttcagagtctccttctatgtactttaggtgtacaggatcaaattatcgaattccaacactataccgatgaaccgaaaccggcgctctaatgtgaagaaagctcctcaccctgactcataggagaataatgaacatgtttgggtgacattaaattcaacttatctcattattctgggctgtttattataggcatatcatctggttttgcacacatcaagtcgactctagaagctaaaattggagactttagtctcatgctcagacactta

SEQ ID NO: 7021 - DNA, 393 bp, Glycine max
  unsure (1)..(393): unsure at all n locations
atgtngtatgactcttcccaattatcgtttacctgctcgaggacccattgtttttccaaccatgctttacgatatgtgatggtgtatccgaacttttgtcttacaaatgtgatgaatgaaggagtggtcaattgctcgttttcttcaaccatcgcaaggatactttttcctacaagtttcaaattcatcttattgtgatcttgtgaaatggttgtcatgacgcatgtgtgaggcccttttatcattctaatttcccaaacttttagattttttctttcggacgctctaagtttccactgacacctttcagctgggcaacataagacccatgtatccttcgcacacctcttggctttgaaagttacatggttcttaatgtgccatacttttact

SEQ ID NO: 7022 - DNA, 280 bp, Glycine max
  unsure (1)..(280): unsure at all n locations
tctnagctatgttgatggtctactccttatggaagtggcctctgactgaccatctgtatgcagaggagacctcgtatgtgttgtcatgtactctatgcaaanntaaagtataataaggtaaggacacaagaattcaacatatactcaatacaaaacaaatatgttattgccacaaaaaacaatacattactttgaaacaaggatgttatgtaggaatggactgccaataaccttatcatgatcaatacgagctgtatgtatatcatcgacgtcatgatct

SEQ ID NO: 7023 - DNA, 430 bp, Glycine max
  unsure (1)..(430): unsure at all n locations
ggatgcaagcttcattgatttatgtatttaagttatcaagtgcatctatttatcattattgagatttagggagaagggagattatgatttaggagggtgtatatatagtattactcaaataaaagacatgaatttaaaatgtggaatttcttgcctgagcaaaagcatatggtaaagcagaatacattccagctgctctttccctataaaagactattcgctcagcagcaaccactggctgcactgaataagcattcttaatgccaataaggaggacagcaacatacatggagcccaaggcgtttaaaagatcttgttgcttttcactgcaataattgacgtgaaagcttcctgttagatcaaatagtagcaacaaaacanatgagattaaaaataacatttgcaagcttcttgttngatcttacatttt

SEQ ID NO: 7024 - DNA, 445 bp, Glycine max
  unsure (1)..(445): unsure at all n locations
cttgaagagttggaaactgtaatgcatacataaatttcatttatatcatatcttgatctcagattatctaggactccaggaacatgctagtattcaagctttgtcatatcatccactccacttggtgggacttctgtatctctatgataaatactggaagctntaacaacaacctgcaaatctcaagacaaacaagagcaatgcaaaaattcacaaatcgtaaacattagaaagtttcaaatatgaagttaacttaaaaatgtatttatagtataccaaatacaccaaataaaagtacagacatcgtgcaaaacaagaacaagtattttcaaactttcaataagacacatatctttattatgatatgcttcaaaggttcccaccggtcattcatgtncaagatatcaatgtactcgaagtaaaccagtcagattgaaagaacatg

SEQ ID NO: 7025 - DNA, 451 bp, Glycine max
  unsure (1)..(451): unsure at all n locations
ggatgcaagcttctagaaaaacaacttctagtaaaaggaaagcatcctccacaactgctagtgaaaaggtaattttagttttaaaatatatttttgacttaaatttgtgttttagtttctcaaatttaggcacttttagttttggtctccttgatagaaatatgttctttttaatcactcaaattcaagaaatgataattttggtccctcagagactcaaagaacagatttttaattgaaggataaaaaaaaatattttaaatttaaagaactaaaaacatatttaaatcttatatttcattaaattttattttataaatcttaaccaaccttttataaatattatcttttatttgtttttactctttcaaacatccaacattagtgaaaagaaagaggtctagacaagcattacaatacaaatcagttntgtttctctcttatttgacac

SEQ ID NO: 7026 - DNA, 439 bp, Glycine max
  unsure (1)..(439): unsure at all n locations
tccacaacaattacaagcggtatgtcctccccactctntagtcatgcaaatagggggatgccccatttgcaaaggagtacacgagccattgctatgcatagcccaagaagattcttccaggggtataaactacatgggaactcagaatcgccatggattccaaggctacaaccaaggaggacctccgggattcaaccaagggagggatttcacataaggctcaagttagaggaatcattcggtgaaccagtttaacaaggagcaaggaagtcaaacggcccataaccccaaccaagggatatatctttatgagaagtgtcacaacctacccttcggcaggagggcgacgcaagggctcacgggtgcatcttccaaggaaggaaaacgcgcggagtcgccaccaacgtttattcgaggaaaacgtcggaataaccggaaa

SEQ ID NO: 7027 - DNA, 432 bp, Glycine max
tgcaagcttgtgcattgaataaaatgaaaaataattgtcatagttacaaggcttatgtggcataattccaacaaagaagaaaaaagataaagacaaaggcaacatagacacaggcatcatcgccttgctccacagcaccctgcctttcatcagcagcctcctcctccgaatcaatctccttttcatcaagcaggagaccctccttcacatcttgaagggattgatgagatctaagtcaaggtccttcgcaaagaaatcagcctacttgacagccttctgaaagcctttttcatgttgctccacgaccttcttatacaaaatcaactcttcctctaactccttgctagcctcaatttccttggcagcccgcagctcggactccttcaatctagactctgactccctcagccaagcctctaacttagcaatcct

SEQ ID NO: 7028 - DNA, 243 bp, Glycine max
gacacatgaaataagcttgatcaacaatagcaggtattgaggaaaaagcatatatatatttctttggtaaaggaaacattcaaccctaaatagattattcattaaacttaaaaaccaactcattcttgtaacactctgaaatattactaattataaatcgatgtgtaattgtatttatcgtgtaattggactatatggctgacttgaatgagtaggggaatggcctgaattaaacaagtgtga

SEQ ID NO: 7029 - DNA, 339 bp, Glycine max
  unsure (1)..(339): unsure at all n locations
taagtttggattcatactctcttttctattttgaattgtgtgcatagacacacagatgtacacctctgtcctgaaatatgctgcgtaatatgtgaaaactaagggttatactactgttacacagaacccaatactccataatgcttacattcaaatacagttggttgaggagaaaagttgtcaagtggaactcttaacaactaaacctcctcacagaacatttgctgtccaggtaagccagatgctcaacaaaccgaaactcttaatatttggtgaactatngcactgtatntaatcattacacaatgtatttgtatacctatatcttcttgtaactat

SEQ ID NO: 7030 - DNA, 399 bp, Glycine max
tcactatgtacttcttccaagtttccaaccagcaaaatctgccatcgggaaccgttgacattacatgatgcttgctgtaagagcaccttgttttagccaactgctccataccgagatttcaatgacgtcacttgcgaaaacatgatctgatgacctgacagcgtctttatcacttagccttgttttatgagattccagaatgattgaagtattgaatatactgccctaatgaaggcgtgaattgatcttggtccctgcttgtaccagcctcctgtattactatccctccattcggggacctcaggatatatgcatgcccgtctgtaagtcgagatatcctggggattgatttgtataggatgcactcacccacgcggacgcccttaggagtactagctc

SEQ ID NO: 7031 - DNA, 418 bp, Glycine max
  unsure (1)..(418): unsure at all n locations
agcttctctctggccagccggtataactcatataaaggcatggtgatgaatcaatcgatccacggaaccgaataactcatataggcctcaaatcaaactaaggtacttagccacctaatgttgcttcctacatactctactatattaactgggaaacctttggaatccaaatgaagtagaaagacatagaagaaaacctgacgtaagtcgcagtactcatcatactacggtatgattataaaaggagaagaaaacaagcttacattaacattacatcacagcaataatttacaaaanaaaaaacaaaaaaaaaaactttatatttaatatcacaagtccttatcagggagaaacaatactttgatgcataattaaaataataaactaataaaacagcatcagtcaaacaaacaaatac

SEQ ID NO: 7032 - DNA, 187 bp, Glycine max
  unsure (1)..(187): unsure at all n locations
cccaaagaatgagggtatacctctgaaggcacttatgctgcatactgtccaatgctacaaccaaagggtaactaatatgttaactctttctccagccaacgcnncattgtactagctcaaccaatgcaaacacgaaaagagggcaatggcacacattaattcaaaagagtatatatatatcaccaag

SEQ ID NO: 7033 - DNA, 456 bp, Glycine max
agcttatgctacaacatctacaacagacctcctcaacctcagcagcatattcaaccacaacagaacaattatgacctctcaagcaacacgtacaatcccgggtggaggaatcatcccaaccttagatggtcaaatccttcacaacagcagcaacaccaaccttattttcaaaatgctactggcccaagcagaccatacgttcctccaccaatccagcagcaacaacaacaacagccccagaaacaacaaacagttgaggctcctccacaaccttcccttgaagaacttgtgaggcaaatgacaatgcaaaacatgcagtttcaacaagagaccagagtctctattcagagcttaattaatcagatgggacaattggctacatagttaaatcaacaacagtcccagaattctgacagattaccttctcaatctgtccagaatcccaagaatgtgagt

SEQ ID NO: 7034 - DNA, 470 bp, Glycine max
  unsure (1)..(470): unsure at all n locations
tgagcccgtaagctntccatggtgagcaaggtagagacatatctccaaaattaattntcttgaccaacagatgatgatgggggcatgttatttaaaccctaaaataatctctactacagaacgtagccactactaataattccattgtacagaagctgaaactatattttttttaataatggatggacgaattttttcagacttttcaatgagaaagcgaaagagtgcacatatgaacacagaagaaaatgaattagtaattgaaatcagaaacacactagaatataggttcttataccaaaagaagtgtacaaaaaatgagaaacaaatganaacaagaagaaaaaatacaaaaaagaaaaaaaaaatcttagcaataaaacttgcagaaatgaaaaggtctgataatttttttctttttctgcaagtgcaattagctactatgaacaagttcagtcatgctattactc

SEQ ID NO: 7035 - DNA, 362 bp, Glycine max
aatagattgctaattcaggaattcttttgatttttcttaattttagagaactaaatgacaaaatctaacactttcaaggataaatagattatctcaataagaaaatgacacaatagatgatttaacctttttcttaatatagggactgatccaatgtcttccttttccgggctattgcgtgcttcatgaggtattaataattagacattcttcactttcggaatcatgttatgaattaagagctcctgagccagctcggattaagaatgacttcggcttaagatacatgaattaaattgttagcacaaaatgtattggcagataatcaaaatttaacccgtgtataccttctcgaaccaccc

SEQ ID NO: 7036 - DNA, 428 bp, Glycine max
agcttcaacatgcaacataaacgagagaaatgttagtcctaaatgattttcagtaaaatatgaactttccttcacaaaatgctcatttcaattgaagtatgtgaatagatttttttccccaaccttttctatatgttttatggttactgattacatattcaaattatacagctatgacttggacagtacaaaagaagaaagagatgctataagaactcaaaataggtaaacatatatattggatccccaaattcatgctcgatccatcatgtttctccagcatttaaaacttaatttgtgtgtacttccctcttctgtttggtgagtttagcataatgttgcttttatgctaaatccttaaatgcataaaggagtatgagaaactccgcagacaatgccgccaactactaaagcacaacaatgggagc

SEQ ID NO: 7037 - DNA, 447 bp, Glycine max
ctatcaatactcatgtaagtctctcagccattgaatgttttgactaatctctcatttttacctttcttaacactaccttgtccaacatttgtggcagctagtgttttatgaataacattatgtcaacttggtcttcaatgtctttagcaaattgagtatcaacttctttatcaatctcttccacagcaataaaagggtcttcaacattgtctcctgtggctgcatgcccaagaacatataagtaaggaaaattaaggcttgtcgaagagtcctttatcaacaggatgggactataagaaatattataaacataatatcaaaataaataaaattatttaaataataccaaaaatgtaatacaaaaaattaagatcatagtctctatttcaagcaatgccatgttcaaccagacattcaactgggactctatcattataagtagtccat

SEQ ID NO: 7038 - DNA, 424 bp, Glycine max
  unsure (1)..(424): unsure at all n locations
agcttattagtagagaacccaataacagtggttactagcaagtactcagtatgcaagcagttcttatacacaggctattactgttagntgcttagtattaagcaacttcgatctatagttaattntttcttatttctgccttgtgttgcagattgctccttatgatcaattgcagatgattgaacggctagttgatgtttttgaaccaagtgtacaagcatgatgaaaaaaaaacatcagatgggttgtactgatgtaggtgttggtatatggcaaaaatcatatatacatgtatgatagcctcaattcatagtccttcaacaagtaggggatattagaagtttgatagagcattctgccaaggtataggttggccttgagattcacttgaatcctcaacttctttccttggtttatgtcgtct

SEQ ID NO: 7039 - DNA, 458 bp, Glycine max
  unsure (1)..(458): unsure at all n locations
aaatataagctgataatatccctatttgcacaatacattacataattactagatttctaacaatatacatcaaatagttaactagattttgttatactttctttntggtggcagatgtgtgctaggacttggggcaagtgccctctctaccttaaaatttcttttggaatatgcattattggtccactacatattttaaattgccctcactaatcaataagttatataaacatggaaaaaaataaaattcttttacctgtaaactacaagataaaaaattatattgttttgaaccccagacctaagaaacccccttactcttttgtctattttgcatttggtatgtgagagtcattgccatgaaataattgtgtcctcgatccattcaccacctaacctaacctctgtcgcttgagcatgcctagataactcaattatatatacctatttatctcgca

SEQ ID NO: 7040 - DNA, 511 bp, Glycine max
  unsure (1)..(511): unsure at all n locations
gtttgaacccttgaganactgaatncnttctagtacccgggatcctttgagtcacctgcangtgcaagcttcgaaaggcctatatagaccagtcgagagtctatggcatgatattagaagacaagttgaaggcttgtcccaggtcaaagaggagtttgtccgaacaatcgagtatgatggaaaaaaacatgtgtgccatcattgaccaatacaaatgatagctaagtctagcttcacccatgagcaaaggctagaggatgagtatgcgatggtgtcggtcctgcaagccgaaagggaagcaagagagaggttgatagactcattacacagagaagcaatgatgtggatggataggttcgctttcaccttgaatgggagtcaagagctttcaagactactagcctaagccaaggcagtggcagatgtgtactctgttcctgaggaaagtcatgggctcctctattattgtcgcacatgatcgatttgatggccacataattangaaccattn

SEQ ID NO: 7041 - DNA, 411 bp, Glycine max
  unsure (1)..(411): unsure at all n locations
ngaccgctaagcgacagctgatccttggctaagcatgacccattgtcgctaagctaaattccttacggccagaactgatgttcatggatctgatcgccaatcatggtggctaagttgaccttcttgcagcctaaacttaatttgattgagctaagtgccattcatggcagctaagctcaaatgcttgctgcagtcatagcactgagcgatactattgtctgctcagtgccactcctttgcactcaaaatgcatgatnttagctaagcgggcccagagcccggcttagcgagagttgcaggttttctaatctgtagatctcgctaagtggtccggtacacgcgctaagcgaaaactctaaattgtaaaaaaataatataaanaaaaatatatagcttagcgcagggttcact

SEQ ID NO: 7042 - DNA, 418 bp, Glycine max
ggatgcaagctttgaattcattctatgcacccttaggggtctattcttgctttgtatgttttcatcttcatctcgtttactttgggttttcttttcttcgttttaaatgatttcgaccgatcgtttatgccgaaacctcactcaatgaatgataaaatgaaattcaactgatcatttgtgttggaatctcgtttaattatcgttaaaataaaattcaatcggtcgttcatgttgtaacctcgtttaatcgaaaaataagtaagttccaatcggacattttactttgaaagtgtagaagcaattgcctttggtgttttgatgatgatcataatgatatgatgcaattgatgcaaatgggcttttcaagattaaattcaagacaatacttcaagattacaagtcacaacatctagatgat

SEQ ID NO: 7043 - DNA, 513 bp, Glycine max
  unsure (1)..(513): unsure at all n locations
agggttgtgaatgaanccctgannnncatgaacgctgcatacgtccactatagaatctcaagctggcttctacactccaatggccaaaggttacttagggttaaacttgtgaaaaatacctgacatcatggaccatagcttgaaccaaactgtttttatgaccaaaattagggttgggaggggaatgaatgcccaaattcattccagaccaacattggtcatattggattttgaaccaaaaaattgggccacctttgaaacccatgattatacccaaaagggtgaaaagctgaaaattttaccatgaaccttccccaacacattggacccacgacaatgaaggtgaatggtatcagaatggccaacataagggtagccaaagaatccgactacaaaatttaaaagaacctaaaaattttaccatggaagagaacttcaccatatggagaatagattcaccttttattttgtaataaaagccttatggtgtattcaccagatcaaaagtttccn

SEQ ID NO: 7044 - DNA, 449 bp, Glycine max
  unsure (1)..(449): unsure at all n locations
ggatgcaagcttcccagatccgatcatggaaggacttggtaactgccttcattaggcagtaccagtacaatacggacatggctcccgatcggaaccagcttcatagtatgactaagcgagagcatgagtccattaaggaatatgcccaaagatggagagatctcgcagcccaagtcgtaccgcccatgacggaaagggagatgatcacaattatggtagatacgttacccacgttctactatgaaaagctgataggctacatgccagctaactcacgaaggcttgcggttcttgctccctcaagccacttttggttggcctttgctttcattnttggtgttattattcactctcacaagtaagtattcaatccttgatgttnttagcttcccattggtatattntcttcatctnttggtgctccaaattgtgaggatgtgcttatattt

SEQ ID NO: 7045 - DNA, 383 bp, Glycine max
ctggcattggaattgcgaaagccccactccatcattaggattagtacctgacatctcaaacaaacaaatcaaacgttacaagacaattatatttgctgtttgaatacctcacccactcaagtgtatcacacaattatggcttttctctaatgaaacactcttgccttttaccactctaattccccttgagttcttaggcaattcaagagaatatggccacaacaaagaacaattcaccaatatgtgtaaggtaaggctagacaaggaaaaggttaaccaagataaaggctaacaatgttttaggcacaaatgaaggaacaaaattagaattaggaatcaagtacaatcctcatgcaccatatattcctaaagagttttttttt

SEQ ID NO: 7046 - DNA, 450 bp, Glycine max
  unsure (1)..(450): unsure at all n locations
ggatgcaagcttagccacacagttggcaagtgtatcagctgcttcctgtgtggatgcctcagcatacacacgaacaacatcttcagtgccagatggtcgcacaaagcatcgaccttgggggtccttagctgtaaatgcagaagaggaaagagtatcaagctgcaatattagtaaactgaaattctgcactttaatctttcacactaaaaggctttcatggatggatgaaactgacaaatatctcgcagtcagtgaaattttgccaagccacttggacttgataacagtaatagtataatcccataaacaagacaccaacttttcagaaatataacattcaattntggtattatttaggcctccttgcctccctcactctgcccattcttggtggtttcacaaataanagcaagcaagcaatgataaaaccaaaaaacaatgttgtctttg

SEQ ID NO: 7047 - DNA, 75 bp, Glycine max
  unsure (1)..(75): unsure at all n locations
gcgtcgtcgagngattgtagtaagggcttattcttcgacttagagtattagcagatgttctggaactcgatggaa

SEQ ID NO: 7048 - DNA, 276 bp, Glycine max
agctttcgattcattctatagtacccgagtggtccacattgtgattcgagcatttttattctcgctttgtgtactttatataccccctgttgacgtgcttaagccattttacttaagacatttctcgcttaacttaaaaataaaataaatttccaccgaacgtttgagattgattatccattaacttcgattaaaataaattccgaccgtttggtcgtgccgcaaccactgttggaaatcacaagaggtataaaagctatataattatcaaaaaga

SEQ ID NO: 7049 - DNA, 354 bp, Glycine max
  unsure (1)..(354): unsure at all n locations
gttgatcatgtcaaaatttgaggcttctgatctatttcatctctggagagaagagcagcatctagatactatctttttcaatttgtgaatatatttcttgggaacatactttaccgggacagcaatttgaacagctggactctttcatcaccangcaagccaatgagtaagtcattcaagatacaaggtttttttttctttaaaaataatactttttaattgcatatattcctttgtttgatgctactatgtctgctcacaaaagttacacgctatgaaattgtgctatgggccactttcatctgtagaagggaaacatctaccttgaaactcttatttactttacaacctatg

SEQ ID NO: 7050 - DNA, 328 bp, Glycine max
gctatatatacgttataatatatgcctatgatgtctactcggagactctatacatttcactcatctcctcattgcatatcattactaatcataactaactttttatatattctcttgaacctcacattacttaactgtttcagatcaagttgtctaaactactgagaattaatgatttgttcattacacttttaaaacttaagttatcattcatacatttagtaaaatgtaatatgaagctatgaataactccaaaataattttataggaagaaataataatatttagcatttaatgataactaatttgcagtagatcttattttatg

SEQ ID NO: 7051 - DNA, 382 bp, Glycine max
  unsure (1)..(382): unsure at all n locations
agctntgagaaattgagaacatgacaaaaacttgtgacagtaatatccaagatatacaaatgggtgttggtcaatgtaccacatttaatagtacaaactanaagaacaagaaaaacagaccaatttctaggcgtctcagaaaaaactttaaacaagacagttcacctaataagtttttggattagtagtaatcatatttgtgtaaataaatagcttaccagagttcattggactccatcgctggaaccgaaaaggagatggtatgttgagaacagaagcaccagaaacactgttatgcctggaaatgggaagatattgcctccgganaaaccttggcatccaattgccaatacatgataaagcacanagaagaagaataaaa

SEQ ID NO: 7052 - DNA, 68 bp, Glycine max
tccatggctaagcttattgtttctactgtagtggataaggttatcatcatattgacaacaatgctcgg

SEQ ID NO: 7053 - DNA, 140 bp, Glycine max
cctaagcgagctcataaatcatgaacatattccttataggggtatcttaggctattcctaaatggggctcgaataaaccaatatatatttttatggctacctgaagcttgatcctaaatgatgggctagcttaagctagc

SEQ ID NO: 7054 - DNA, 244 bp, Glycine max
  unsure (1)..(244): unsure at all n locations
taatcggatattcttcatcgagaatttcggcatcgttatgcttattatttgtgctgaaaaattcattaattaacgcgaattcatanaatcaaataatgaattcttaatacgacgagaaaattaagatgctaacatgtctgtaaatggcgacccgtaattgattgcattgtaaattgtaatggcatcggtggatggtcatgcatttatacgatatgatatgccatcggaaaattcatgataagac

SEQ ID NO: 7055 - DNA, 310 bp, Glycine max
agcttatgattgtcgaaatggacaaacatgatctcgtgttcttgaagaattgggtctgcctcaagaacctcatttttctcattataggacgtatagcaatggtggaaactaatgttacgtagaacggaaagcgatctcccatgtttgctcctaataaagggttgcacaaaggtgatttgctattaccttacctctttgttttaggtatgaacaaactctcccacattatcttgaaagcagtggaagcctggaaacctttttgcatgggaagaaagggcctcctcatctcgcacttcatgtttgcggatga

SEQ ID NO: 7056 - DNA, 375 bp, Glycine max
tgtctgatttatcatggctcaagttcgcagcagacgaaggctggtgatcatttgtttctgtgtctaacttatcattgccaatggcctccacaacactgatcatcattagtgttagcactcctgccaagatttatatcattaagtagagatctaatattttcaagtctgtggcgcatgagatccaacctatgggatttctgacccttgatgaaaaatctcttgcactgatctttggactgtgttcctacatgttgtgcaatcatcctaaaatcctcaccgaaagatgatacagcttgtagaaatgttgccttctctctatctgtccacttcacaagattcatcaacaatatcctgatgaagaaggaagcgatcaca

SEQ ID NO: 7057 - DNA, 382 bp, Glycine max
  unsure (1)..(382): unsure at all n locations
agcttatgctntacggaattaaggtttgcgcgatattggcaagaggttgtgctcgaagagctcacgccttgggtgaaccccaatggttgggtccctcggggatgaagatgacatggatggctctgttggttccgtcatggcaacgccgagggaaaaatcatgagaaaatgagagagaaagagagagagagagaaagttgcagatctttgattcgagaacaagtagagggagaagagagagatgtgggtgtgttctggtgagtttaatgagagaacaatgagtgaggtgcgacaacaatgaacgaaaggagagaagaagcttatgcacaagtgagaggaaagggttagtgtgtgagagacagagagagagttccattaaacac

SEQ ID NO: 7058 - DNA, 466 bp, Glycine max
ggatatggcttcacctacgaaagaatcaaagtgggtctaaaaagaggcaaatctgatcatcatgctttgataaatgcaaaaaaactggggcaaatgaagagggtgagaatgagggagaagcccatgctgtaactgccattcctatacagccaagtttcccaccaacccaacaatgtcattactcagccaataacaaaccttctccttacacaccacccagttatccacaaagaccatccctaaatcaacaacaaaacccacctaccacacaaccaatgctaaacaccacctttagcacaaaccaaaacactaaccaagaaacgaattttgcagcgaaaagcctgtaggattcaccccaaattctggtgtcatatgctaacttgctcccatatctacttgataatgcaatggtagccataacccctgctaggtttccctcaacctccattttctaaggatacaactc

SEQ ID NO: 7059 - DNA, 361 bp, Glycine max
  unsure (1)..(361): unsure at all n locations
tgcagctttaattntgttctctacaaaatntgcattttcaanttataagncatagaagagtgtgaggatgataagcattataaagatgatgcatgagtgagaaataatttgaattgaaaaccgcggatgataagcatggcaaattattagtgaagcattaatttaactacggtaatagaaaatgacttgtgaggaatgataatcatgtcatatggaatcatgatagaatatacacatgcatactagttgtttttttaaaaaaaatgatcaaagacttccaatatatttttttgtatcatnttttctctatagtagtgttcataccatgcctttcgaggatcgagggtaagatgatttaata

SEQ ID NO: 7060 - DNA, 85 bp, Glycine max
atgattccattgcctgggaattcttggattggatgcttaattccattggcttcccagcccagttctatacctggatcatggaatg

SEQ ID NO: 7061 - DNA, 232 bp, Glycine max
tgcagctagcaagtcttctctcaattgtgggactttgtaagtgtattgatttatgtccatagtttggtatgtgctaatttatgttacatcacatgcttatgtattgtgattggtcttgctgcatatttcagattctagttttgttccaccactagtttatgctgttcttggaagctcaaaagaccttgcagttggacctgattcaattgctttttctgtgatgggattcatg

SEQ ID NO: 7062 - DNA, 441 bp, Glycine max
  unsure (1)..(441): unsure at all n locations
tagaacctaatataatatttgttttcccggtgctccagtgtatgagccaaagaatgtattcaaatgactggaaataggatttggattctcttatgtgagctngcatgagtgatgaaataagtagtttggggagggatttatttttttttacgagagggaaattcaatccaagagaaacatggtttagaaactttgttcaacgaaggagtctaagcctctaaggatatatccaaaaccctcaaaatgagattaaatgataacttgtactcaagtgataaatcttaaagaagttagagagataggctgaactaggaaacatactatgaggatggccttgatctcgttcatggtcattgatgctgaatcactatcactccttgtaagctncaacagatatngcatgaaatctttctctcttgacttattgtctccccctcctgt

SEQ ID NO: 7063 - DNA, 437 bp, Glycine max
ggatgcaagcttgcaaaatatattaaggaatgaaggttttaggggaatgtaccgtggcctttcaccaacaatagtggcattacttccgaattgggcagtgagtttcttttccttttgccactctaactacattgatcaatgtctattgcaactaaagatgcaaggctctgtgaagcagggtttggatttacttttgttttgccttgtttcagcattcatttcccttccatcttctcatgtcatatgcacaaactatacataaacatagacgaaacataattgataagcccaaaatttggagttacacgggtctcatgaatagctgatgattatcttcaaatcaatttttatttgtcttataatcctctctaggatacagtctttacaagctacctgattgttcattaccactagtttggaaaattcttggtctcctt

SEQ ID NO: 7064 - DNA, 409 bp, Glycine max
tctcccgcaattatctataaatagggggagaagtgaagtatttaagggttcagccccttaggcacttctctctctttcgaaatagatgatgtataatagttccgtgaagaaaatccaagccgaggcgcttccgtaacatttccgtaacgtttccgtgagtgattacgcgaagattctcgagcgttcttcaagattcaccgtttggtcttcagtttcttcagtcttcaacgggtaagtacctcaaaccaagcttttcgattcattctatgtacccgtggtggtccacatttcgtttcatgtatttttattctcgcttccatttacattttataccccgctttgacgtgcttaagccatttatataagtcgtatctcgcttaatctgaaaataaaataaattccaccgatc

SEQ ID NO: 7065 - DNA, 400 bp, Glycine max
  unsure (1)..(400): unsure at all n locations
agcttgaaattaaacaacggaagctctcgagatattcaaattgtcataacttttaactcggaggtccgattcaggcgcgtaatatatcgagacgctcgaaattgaacaatggaagctattgagcaattcaaatggtcataacttttcacttggaggtctgtttcaggcacataatatatcgagactctcgaaattgaacaacggaagctctcgagaaattcaaattggcataactnttcactcggaggtcagatacaggcgcataatatatcgagacgctcgaaattgaacaacggaagctctcaagaaaatcaaatggtcaaaacttttcacacggaggtcagattaggcgcataatatatcgagacgcttgaaattgaacattggaagatctcgtgaa

SEQ ID NO: 7066 - DNA, 399 bp, Glycine max
tattggatagaatactccaagaggattgggctagagcagcttaagaaggccctatgattctcatgaacctcagggtagatttctgagcctatttgccaaggctgggtccactcttctttgtaaatattagaataggttttctttcttttaggccttgtattttgatgcaatcctacccctcaagcttattggatagaagactccaagaggattgggctagagcagctaaagaaggctctaggcttctcatgtacctcagggtagatttctgagcccatgggccaaggctgggtccactcttctttgtaaatattagaatagtgtttccttcttttaggccttgtatttgaccattctagtagtataggaatttagccttgtatttcagggcatttggag

SEQ ID NO: 7067 - DNA, 363 bp, Glycine max
  unsure (1)..(363): unsure at all n locations
ggatgcaagcttgcttgtggatcttctatggaggctggatctttgagcttcaatgaggtccttcaatggtgattnttcaccatggagatgcagcggaaggcaaaggagaagaggagaagggaggcgccatccactagggaataagccatggaagaaggagcttcaccaccaagatgagccttggataagaagcttggaaggatgcttcaatggaggaaaagaaagagggagagaaagagagaggggggagcacganattgaaagaataaaagagggggagaagtagaactttgaagtgtgtctcataagactttcattcatcaaagttacaacaagtgttacacatgcttctatgtatagact

SEQ ID NO: 7068 - DNA, 413 bp, Glycine max
  unsure (1)..(413): unsure at all n locations
cttgatggtgtcgagaagaaatcacatgtttgtcatcatcaattatggggagaatgtgaatgtatgtatacatgattttgatgatgccaaatattaatcaaacaagggtgcttcaaatgataagcatttgcttcaagaataattcaagagtgcttcaacaaacaaagccttgtttcaagattcactaaagaccaagccttgccttaaaacaaagtgctttcaagacatgccaggctctggtaatcaattaccaggaagtgtnatcgattaccagaagacatcggtgagaaatagctgatgaaaaacgttttgaatttgaattttcaacatgttatcgattaccatatgtctgtaatcgattaccagcaacgaaacttcgtgaaatcaaattcaaaagtcntaacccttcaaat

SEQ ID NO: 7069 - DNA, 409 bp, Glycine max
  unsure (1)..(409): unsure at all n locations
agcttgtngatatttttttttttgcgaaaatattacaaaccattgggttaattatgtctttggtccctaaattttttataaatttcacttgtagttcctaagaaaattttttttacatatttgttacctataattttcttctgataatcgtatgaaattatgttagtagtgaactaatttacctcgtcagtaaagaatctgacaggacgatcacataataaactctttcaaattagcatatggtaaaaaatttatgtggattaaaagaacactttacaagaaaaaacatgtgtattacatgtttgattntcaagggaaaaaaacattatggagacaaaagtaattttatgaaaggatcatgactcttacttaacaaataattgtggaaaattataccaacaaaaaacac

SEQ ID NO: 7070 - DNA, 404 bp, Glycine max
  unsure (1)..(404): unsure at all n locations
ntacactnttctatgtntttggtgttttggattggtttaaaacgggttgagaatgaattatgatacataaaaatgtgtgtttgagtnaattggggtcttgagtttaaaatgatgattttgatgaaaanttgcaatatttagatttgattcgagatgcggtgtgttggatttgatggaaaattgtttggcattgttgtgagatgatttggattttgaaaagcttntaacatgaaaaattttaagagaagatgaactagtttaaagttgctctacataattttcgtcgagtgcagcttttggctcattgagctaaaatttaactcttttataatggttttggaatatcctggctaggaattgtgatttggcttgctgagctagaattctgactaggcaccacgatt

SEQ ID NO: 7071 - DNA, 419 bp, Glycine max
  unsure (1)..(419): unsure at all n locations
agcttctcccctattttgctataaatagggggagaagtgaagaagaaaagggttcagccttcttggcacttctctctctctcgaaattgctgaggaaaattatttccgtgaagaaaatccaagccgaggcgcttccgtaatgtttccgtgagtaattacgcgaagattctcgaccgttcttcaacattcatcgttcgttcttcgttttcttcagtcttcaacgggtaagtacttcaaaccgagcttttcaattcattctatgtacccgtggtggtccacattttgtttcatgtatttttattctcgttntcatttactttntatacccccttttgtcatgcttaagccatttatttaagtcatttctcgcctaatctaaaaataaaataaatttccaccgatcgtttgaattgtatcat

SEQ ID NO: 7072 - DNA, 133 bp, Glycine max
  unsure (1)..(133): unsure at all n locations
ctgtgcctgcttctttgttccctatgttcgtaccttacattgctgctattgacacaagggtgtgtngntttgatattattatttagaagttattaaggtacgtacaaatgggtaagaagcttgatgcttctcc

SEQ ID NO: 7073 - DNA, 192 bp, Glycine max
aggacgttcaatggaggaaaagaagaagggagagatagagaggggggagcactaaattgaaggaagaaaaagggagagaagttgaactcagagaagtgactcactagattctcatgcatcaaagttacaactagtgttacacatgcttctatttatggactaggtagcttccatgagaagcctgctggagaa

SEQ ID NO: 7074 - DNA, 446 bp, Glycine max
tcaagctttaaaaacttcgatgtcttgtatacactgtcttcttcctatgctttaattggaggtaacttgtgtctttctcacatataggacatgcgtggtggcctttgacgctatatctactcaaattcccatatgtcggaaagtcgttaatggtgcaaaaaatcattacacgcaacctgaatgtctcctgagcattcctgtcatacacatcaaccccttctacccacaatttcctgaggtcttcaatcaatggagcaagatacacatgaatgtcatttcctggctgtctgggaccggctatcatcatacacatcattatgtacttccgtttgatgcacaaccaaggaggaaggttgtaaatcatcagcaaaataggccaggaactgtgtgtgcagctcaagttcccaaaaggattcattccatcggaggcgagaccaacccttatg

SEQ ID NO: 7075 - DNA, 430 bp, Glycine max
tctcgttcagtgaatcgatgatcgatatctcgtaatcgatacattgttgttaagacaatgactgatttagcaggaatcctgcttttatctattaccaagtagattaattgattacttctttctcgttcaattgttcaaaggtgaacaagaacacttcaatcgattacttaggttatctaattgattacattgttcttgagttgtattcagatgttggatgaacactgtaataaatgactttgctaaaataatcgattaccttatagatttaatctattagagacgattataactgttttctctataaataatcagcttgtgttcacgtctacacatcataagatcattatagaatacgtaatacatctcaataattgcttatttgcctcaacatgagttaagattcatgctttcatatgtgaataaaaga

SEQ ID NO: 7076 - DNA, 374 bp, Glycine max
  unsure (1)..(374): unsure at all n locations
agcttgagaaagtcttctgattctatttatacattntttttactttatggcatgagatgaagtacaaagattggagcttttgcaaattnttattaatgaatagcttaaacactgtggtttaagctactttccttgatatttgtcttatgcctaacttcatctaattgtacaggttacattttattcttctctttggataactgcatgccttgtaaaagacaagtgaagagggcatttttgcttcattctcttatgatgcaatcagtaacttttgttgcatacaccttttgtacatagtcacagcatgttattgtcacttgnggaccagtgaactgttctttatttgcttaaggacaagcaaaactgtacatttg

SEQ ID NO: 7077 - DNA, 442 bp, Glycine max
gcttaggctattaattgctccagattgctgcatagaagggaaatggtttgtatggtggtcaccagaggagcataaaccacagagtcttgcgacaggtacaaattttattcatatggctagttaggataccaggttaaccaaggcgtctagtttaacttcaagcttcttagtttcagatgatgcagatgagtttgtggctacctcatgcactcctctaatgactatagcctcatttatggcgctaaactgttgggagtcggaagccatcttctcaattaaatacctggcttcagcaggggtcatgtctccaagggctccaccactggcagcatctatcatacttctctccatgtgactgagtccttgattaaatattggagacaagctgctcaaaacttgtgggagggaactggcccatgtttattaatctttccaggttcat

SEQ ID NO: 7078 - DNA, 209 bp, Glycine max
gctagagtgagtaccgtagagtgagtcaatttttgtaacacatccttgttaccctactattcttttgtataatggaagaatctccatatgggagaatcataagcatgtgctctcattactatctttaattactaagtgcctatgttaactgcacgaagcgggaaagaatgagtagtctgaaccatgatagtatgcacgtggtacggaca

SEQ ID NO: 7079 - DNA, 258 bp, Glycine max
aagagcatcgttgcgtggatccaagcagtgccccggtagctgacacaagattgaatggaagccggtaccgaaaaaagagctcaagaatattctaaccaaaacacataagcctttgacaatatgaacaagaatcacgtcatacacaaaaaaaaaaagcatagggagcatcgccatcggacgcaagcaagtgtaatgcattcgatggggcacaaatacccattacaaatccaagccatcgccatcgctaaagtacgagca

SEQ ID NO: 7080 - DNA, 390 bp, Glycine max
  unsure (1)..(390): unsure at all n locations
agcttactactcttcgtcttgttagggtgttcacaactcattgtgtctcattaacccagtttgtttcaaggttaattntgatgcgttcagggttaaaattagactctgtattttttaagatagatttgagttatgttttgagtcatctcaacatgcatgagttgatgtcttatttttgtttaaaaagtattgaattttaaataattgtacatcaataataaaaaaaaatattgatagataatattttgtgtacataatattatatttaattatgatgattntatttaatatataatatacattgtaaaatatattntaattnttttaaccaatatgttagttcgagtcgtgtcgagcaaactagtctgttatataacaaaatatgagatt

SEQ ID NO: 7081 - DNA, 409 bp, Glycine max
aacatttaattgatataatgtcatgtgtctgaatgaaagccaactgtcagtggcgatggaatttgtgctggagtgaagcacacgtgatgttagtgacattttcatctgccacttccactttctagtttatatatctttctataataatgatttacatttacaagttttgcactattattagtggccccttttaaacttggagtatatatccttctttttatttctatttcttcactattgttttactggccccttgtaaacttttttattaatggcgcagccaacaagtgccctaaggtcatcaccattagtcagctgaatgttccaatttaaataaggctaaactaaaacacctcatgagatagtggaaggatatagatttcataaatcatgagataaaataaatatg

SEQ ID NO: 7082 - DNA, 436 bp, Glycine max
  unsure (1)..(436): unsure at all n locations
ggatgcaagcttaagctccttcttctgcacaatgctctttatatttgaagagtatccttgtggaaccttcacccgacgaagagactgacaaaaacttattttctcctttttggacaaagtatggcaggctgggggcaagtaaattttcttcccatcagaccttggatgcaactgtgatcgtatgcccatatcagctagatgttgacgggtattcaagccatccttcgtcttgccttgaatgttaaggagcgtcccaatcacactgtcacaaacatttttctccacatgcataacatcaatacaatgtctaacgtcaggatcagaccagtacggaagatcaaagaatatagacctcttcttcatatgcaactcttacttttatccttctttgggcttnccaaatatagtatttaggtgtgaacccgctcatatacct

SEQ ID NO: 7083 - DNA, 441 bp, Glycine max
  unsure (1)..(441): unsure at all n locations
tgttatgttttacatgtnttcacccttcatatgttgtggcttatgtgtccacatnttgtttgcacttttaaagtcatgaactatggtatacttctttnttgagggcacataacagagcattgcaggatttggagtttagtaggagtctttgcttgtgagcgtttgtccatgagcttttgggcacttcatttagtatttcattaatgggaatgtggtttccattctccattacatcccanaggtcaatatgaatagactcaaaataagctatcatgtgttccttccagtagtcataatattctcttctaagtagtggaggcttattggtggagtactcttcttccatatctttcatttatcaagatnctcctttgtattcattagaaattctaacccaagaggcatagctcttatgccaactgaaatacaatangtcacact

SEQ ID NO: 7084 - DNA, 213 bp, Glycine max
tatatctactcaaattcccatatgtcggaaagtcgttaatggggcataaaatcattacacccaacctgaatgttctctgaacattcctgtcatacacatcaaccccttctacccacaatttcctgaagtcttcaatcaatggcgcaagatacacatgaaccgcacttcctggctgtttgggaccggctatcatcatacacatcattatgtact

SEQ ID NO: 7085 - DNA, 420 bp, Glycine max
  unsure (1)..(420): unsure at all n locations
tcttattttcagcagatgaagatgaatccgtggccacatcatggagtcctctaatgacaatagcatcatttcttgcactgaattgtttttatttggaaaccatcttctcaatcagattcctagcctcaacaagagtcatatcaccaagagctccaccactggcagcatcaatcatactcctctctaggttgctaagtccctcatagaaatattgcagaaggagttgctcagaaatttggtggtgaggacaacttgcacacaatatcttgaatctttcctagtactcatacaagctctctcaactaagttgcctgatgcctgaaatgtctttcttgatggcagtggtcctagatgcaatgaagaanttctccaagaacaccctcttaatgtcatcccagctggtaatggacctgggagcaa

SEQ ID NO: 7086 - DNA, 427 bp, Glycine max
  unsure (1)..(427): unsure at all n locations
aggatgcaagcttgaacctaattatcacaaccatcanatattttaatcnagtcacacaaccataagtaagttaaataatctcttgaataaatactaatgataaaactaccacctacgataacaaaaaaaaaattacaactgtcaactggaaatcaaggtttaaaaacaaaaagtctgcaacatcaaggtttccaggtggcagggagaggcacatagttaataacagaatcaccaaatcaaccaacacaaatctcaatacctatcaactaactaactgatcgactgtcttcaagcaaaaagctaacatttaacagaattttaccaacaaaccaaggcatcacaaatccgatcgaatataatacaatctcatttcaagccaagtgttcaaagatattaccaatctcgacgccaacaccctgcattccgg

SEQ ID NO: 7087 - DNA, 313 bp, Glycine max
  unsure (1)..(313): unsure at all n locations
tcataaatatggtaaccgattctnttttggcgatgaactgtatgaacttaggagaacccatgacattcatgaaagtgttgacatgcatttatactgatgggacaaaaatactactttcagtgtggacgttgtgggacctctacatagacaaacacaccaaagggcagccacaaccataagacaccatgtttttaccattgacgtctctgaagatatgatgcaccacaatcatcaattggtgggtctctggtaatataatcataatcttttatactaattattgttgacgtgctatctataatcactgagttcc

SEQ ID NO: 7088 - DNA, 378 bp, Glycine max
ggatgcaagcttgttagagttagttgatagttagcataattgccaatataaactgtcatgtaacaaagtttcagttggggtttcaagatttctctatcttagttttctcggctctcttctttttctctcaactccattaaggtatttagagcttaggttgaaacctagccttcattcatggcttccgcttcttaacaaaactagcatttacgaattttaaaaaagaagcaagtgactatctatgaaaacacgaaaggtattttatgtatccagatttatgtatattgtagaataccggctttagtttttttaagtatatccacgatatttgatctgctattaatggtggtgcacgctaaacagctatcacaattgtta

SEQ ID NO: 7089 - DNA, 434 bp, Glycine max
  unsure (1)..(434): unsure at all n locations
tgtcaagcccnccagcctggacaggtgttgtttgggttgctgctgtaaagttgtccaaggaggacattgatgcaatcctacccccaagggctttggatagaagactccaaaaagattgggccagagatgcaagagaagaccctagggttctcatgagccttagggtagatttcagacccatgggctaaatatgagcccacttatctntgtacatattagattaaggttttattatttttgggccttgtatttagggcttcatagtgtagggagggtaccctagtaatgtaggattntttaacccttgtattttagttcacttagactagttnttgtatagggtagttttaataattcacatacatcaaataatattatatctgtatatttataattaggaatatgattgttaacgtgtngaaatcatagaattc

SEQ ID NO: 7090 - DNA, 104 bp, Glycine max
  unsure (1)..(104): unsure at all n locations
agctttgatgggttgtgacatccagattgtttcnattggttgaaacttatattagtgattttatttcttaacgctggttatgttttaacgacttgtcacgatgt

SEQ ID NO: 7091 - DNA, 434 bp, Glycine max
  unsure (1)..(434): unsure at all n locations
tcatgatgatgaatcaagattgattcaaggagttttgatgactacaaagatgatgacaaaaagcccaagagaatgagttcattattgtttcattgaacaattcaagaatcaagagaaagattcaagaatcaagtttcaagtcaagaatcaagaatcaagaatgatcaagatcaagattcaagactcaagattcaagaatcaagaaaagactcattaaagataagtactaaaatttttttcaaaaacattaggtagcacatgaagtnttcataaaatcttttaccaaagagtttttactctctggtaatcgattaccagtggcaagtnttgtttcaaacagcttacaattgaatttacaacgttccaatcacattcaaaatggtgtaatcgattaaaatatatgggtaatcgattaccaatgtgcttgaacgttg

SEQ ID NO: 7092 - DNA, 421 bp, Glycine max
  unsure (1)..(421): unsure at all n locations
tttgctatcttacacnnaaatattcattaatccaacacacttctcatacaaataatcattcatttcgcccataagttccttatcannatcatgctcaagtattgaatgccatgcacctgaccctcaacttcttcaaatggaaaatgtggtacccatccctaagggaaatagcctaaagggtgcccacancgacacttcttcacttangaaaactanngcagtaagtgttgaggtcaccctgtcatgcacagtcaactcccccctccccccacagtgatcagtctgagtctcaagggagttccaaaccgagtgacatgcccccaagtacaagtatttntcctcatgaaaaactacgagtacttactaacanagtttgtctattttcatgccatatgaagtatgaaacatgggcaccatcaat

SEQ ID NO: 7093 - DNA, 219 bp, Glycine max
  unsure (1)..(219): unsure at all n locations
ntctttntctctctgcgttggtccttctaaaggtggcttcaatttctagatccaatggaaccaattcacctacagaagatctacgcatgcaaacactaataggaacaacagttaaccaattcaagaagaaaatanattatgaactaaacaaatattaacaaaaacaaaatataataaatcaaagattatgaattaatgccttcaaactgaactaaactt

SEQ ID NO: 7094 - DNA, 80 bp, Glycine max
agcttcgaccgtgctatgtgctctaggctcttgttctgtgacagtgagcactagcacgggctggctgctgttcctgaacg

SEQ ID NO: 7095 - DNA, 392 bp, Glycine max
  unsure (1)..(392): unsure at all n locations
ctggcacttgcgatggtgcgagtatatatatatcctgntagccctgacgatgattcacgtcaataagaacatattgtgatttttactgngcaaaactcgaactgtgagtctcgtcaactatctacatgatataaggacctttcactatgggtggaaattctacagaatgtgtataagtaccatctttaaaacatttcggctctattctcaattaaagccttgcatttttaagtgatggggaccttccaacttaaagtcaccatcaatattccttttttccacgtttgttaaggaacaaaattcttttaacttctttttaacccaagaaattatggggaggttttaaatgggaaaaaaccctggggaattaaatttggtttaaattattgcct

SEQ ID NO: 7096 - DNA, 458 bp, Glycine max
  unsure (1)..(458): unsure at all n locations
agcttggagaggtgcttcaatgcagganaagttatagagagggaaagagagagttgggagcacanaattgaaggaggaanagggggagagaagttgaactttgagttgtgtctcacaagactcccattcatcanagttacaacaagtgttacacatgcttctatttatagactaggtagcttccttgagaagctntcttgagaaaacttccttgagaagctagagcttagctacacacacccctataataactaagcttacctccttgagaagcttccttaagaaatttccttgagaagcttccttgagaagattcctagagaagctagagcttagctacacacacctctctaatagctaagctcacctccttgagatgagaagctagagcttagctacacacccctcataatagctaagctcaccctatgacaaaatacatganaatacaaaagaag

SEQ ID NO: 7097 - DNA, 416 bp, Glycine max
agcttgtaggatatagggtacccgtcatatgtggtactaggtggcgatcgggcgatggtgcaagtctactctccacatccacaaatcacacataaatccaccatccccagttgcccaccttcaactaagctcacgtacttccacgtagcccttatcctcgttcctctcaactccgggtccccatcaatccctccaagcttccacaacatccaagcaattcaacatctaacatcatgaactatcaaaaaccaagaaaacagggcagaggcagaaaactctgcccaaaacacaaccaataccacaactttccttactcaaataccccagtaacattctcttcgttccaattcgttcaccgatggatcgactcacaaattttactggaggttcgtagtgcataaggatacattacgacc

SEQ ID NO: 7098 - DNA, 404 bp, Glycine max
cctcatcaaactacttgtttcccgagggatattctataaacagacctcccatctttaatggagtgggttaccactactggaaaacccgcatgcttaatattatagaggcaatagatttaaatatttgggaagccatagaacaaggaccttatgttccctctataatagccggaagtgcaacaatagaaaaacctagagcagattggactgaggaagaaagaagattagtacaatataatttaaaggccaaaaatattattacatccgccttaggaatagatgaacactttacggcttcaaattgtaaaagtgctaaggatatgtgggatacaatacaagtaacacatgaaggcacaacagatgttaaaagatctaggataacactcctactcgtgaatatgaac

SEQ ID NO: 7099 - DNA, 470 bp, Glycine max
  unsure (1)..(470): unsure at all n locations
cagtcacctgcagctgcaagctttcatcctnttacagaactaggatggtttgatttgtaatgtcattcataattggcagatcatcaagaacagtgatgaacttttattgcttaggttttgattgtggtttaatcccacctacttgcattggcttgaatttggaatgtcctttccctgttgtatgactctgttatgcttggcatgggatcaaatgtgtgtgatgcatcttatagttgatataacatatgcataacaaagaagatcgaaactctagagccttaattgtccaatctggttcggttaaatgaagacacctttatttagtattttgatttttctctcatggagaaggagcattgagtagtacaacagatcacaagagtgtcagtcatccttattatgcgttgtgaagagtgtgttgtgacctgtgttaaagaaagtattgctagcactctccatataatgttaaa

SEQ ID NO: 7100 - DNA, 459 bp, Glycine max
  unsure (1)..(459): unsure at all n locations
ctgcatatcctcatcaggttgtctttatgagtggcacattttttacctttnttctggtgttttgttttcacctgaacaaacccctcttctataggatcatccatcttattgttccctgtttctttgaggtcagaagaattctgaaggacagggacatgatttgcaaccagaacatgttttctgtgaggagggacagacatattagtctagacattctttggattatcagaggggcttgctgtattggtatgtgggggcattgctgaatcacccacttgtggctgatccaaggtggggcaggctgtgatgagaacaggcttatttgcagtgacagttttacaattagtgaggcggtgcccaatcatcttgcagtgagtgcaaaaagaaggtctattttcatactcaaatctttgaacaagagtcttccctgttcgaagtctatatcgcactccatcgatg

SEQ ID NO: 7101 - DNA, 59 bp, Glycine max
  unsure (1)..(59): unsure at all n locations
aaaaaaaagccgagcggggcanaagggggcgcacccccgcggggggagggccacaaaaa

SEQ ID NO: 7102 - DNA, 489 bp, Glycine max
  unsure (1)..(489): unsure at all n locations
cctttgatttcgatttgcananttgaaaacgcgagggggagngaccgaggttgcaagcgagggaaatttgatatttgaaaaagcaganaagcggagcttttcaagaagagggatcccccgaccaaccatctttaaattanatctaacctgaaagggctgcttaagatgaacctagtgcaacaagagagatctgatgacgaaacttgggtgatgctatgctaatgagggatcggaggttagtactttaagctacgagatataacacacacgcctgagtgatgacagaaatatccttataggcatgaacttgtatgatagagagacgcaacactttcacctaatgatatctatcgtacttacaggtttactattctcagcctagactcgcttaattcttgtcttaaccatcaaaactagatgttatttcaacattgccatattatcgaatctaaccctgtgtaatactagttacctgagttcgaaactccg

SEQ ID NO: 7103 - DNA, 326 bp, Glycine max
tacagaagtgagttatgaacaaagtcaatatccataactaactcatcattgaaacttcataatcagacatgtctctcaaaatataaaccacaaaggtagttaaacagtgacactatcaatccaattctttagtcttctaattacaatgtctcatactttgtcgaaacgtctataattaaaggagacttcatctccatgatcaaagtcactttctgcaagaaaatcataccatgtgtgagcaatggctttaggagcaattccagtgttgagagattcaagaggccatcgcaatggaaggctaattcgtcttaatactatcatgtgat

SEQ ID NO: 7104 - DNA, 460 bp, Glycine max
  unsure (1)..(460): unsure at all n locations
agtcgacctgaggatgcaagctngcctgtccgatgcatcagtaatgatggtccgtgttatgttggggaacggttacgaacccggaatgggtttaggcaaagacaacggcggcataactagcttgataaatgccaaaggaaatcgtgggaagtatggcttaggctataaacccactcaggcggatataaagagaagcattgtgggaagaaagagcggtggtcaaagctcgcggttgacgcaagaaagtgaaagaagcccgccctgtcacataagtagaagctttataagtgcaggtctgggagacgaaggtcaagtggtcgcgatatacgaagatgatgttccgagtacattggatttggtacgaccatgccctcctgatatccagctgggaaattggcgagtggaggaacgccccggcatttacgcaacgagcataatgtaaacctttactgtttaaaag

SEQ ID NO: 7105 - DNA, 443 bp, Glycine max
  unsure (1)..(443): unsure at all n locations
tagttacttaagtacttactaataatgatattcaaatgatttataagtgccatttcaatgccattacaaattataaattccatcataatctctaaagtgaaatatntatttacacattgccggctntgatatcataaaaaaatgagtagtgataggctcacccgagcaagggacacttggctacacaaagttatcgtttagttctttgaagtttgaaacaaaatttttctcagaaacttcacacgactcttaacagttttcagcaatgttacaattcttctctgcgtggaaatacgacagacctatatataaataaaaaaagaaaaagcccaaatgctactacaattagaattttatttacgaatattacanaggcatagttctntatntctttctntggctcaagagaaagctctgtttccctgtaattgattatcacacat

SEQ ID NO: 7106 - DNA, 452 bp, Glycine max
  unsure (1)..(452): unsure at all n locations
ggatgcaagcttgtaaatntttgttatcaaagcagcttccatatggtggatggngagagagttacttgtcgagccaaaacaaggtacatttcattcttttagctttgaatatatatccccaaactatgaagataaaataaatgaaataaagattatacatgagaattatgctcacgtgctttaccctgtcaaataggtttatacaaacttagaaggcaaccgtgcaaacttagttcagacttcatgggctttgttgtcccttattgatgcaggacaggttagtaataaagctctatgttttgaatttttaccatatcataaatttaaacctcctaactccttaggccctatggaaaaaccctgcaaagtgcaatggtcctctagttagtaaagtgcattgtaccccttgtcaaagatgggactattacttgaacaacttaanaaatatttta

SEQ ID NO: 7107 - DNA, 444 bp, Glycine max
  unsure (1)..(444): unsure at all n locations
ggctctgcaataagagaagctgcaactagtntgacaaaacgtcttgcacaaacagctcatgagacctttggagatnttgaagaggcagttgttatagatgctacaaagactgcagtaacagatggaactgtccatcctctaacaagctatgtaattaactatgtgaagtttttatttgagtaagttcagctatgttgtcatctgatcccaattttgtagccgcatcaattatttctagccatttntgctgtgttcactgatgacaaaaatgttagtcattattgtttttgttatattgttttttaaaaattattttacagttctgcgggtttctgctcatggnacttttaatgcatttctttattagatatgcagagagatnggcatgctatgccacataattcaatctcttaagttctaggtgtttcttttgtagtatattga

SEQ ID NO: 7108 - DNA, 436 bp, Glycine max
  unsure (1)..(436): unsure at all n locations
tgcaagcttaataagtccatctatggattgaaacaagcctcccgccaatggtatttaaaatttcatgaggtcatttcttcatttagctttgaagagaatgtcatggatcactgtatataccacaaggtcagtgggagcactacaagaaaaataacctatacctatagacaaaaactgtcactataaataaaaaatccgtaggtaaatgtatgatagactttgtcctacagacatttcttctgtcaactttaagggggcgtataatgacggttaattgtctgtcactatagattctacctactatgtatagcgtgtaggtaaaagtcattaacttctacttacattatctaactgcaggtaaaagtctttaatatgaacatcacttgagactgcaagaaccttcttttccattaaccgatgccacanaactgtacta

SEQ ID NO: 7109 - DNA, 397 bp, Glycine max
tgtcatagttctaccattactggtgatgacttcaaaagagatggatcgtccattgaggtatgattatgtatgatttattggtgtgttcatattttactgcattttgttgtttttatgatttttcacttcctactacttttacgtttgatgttgtgataaatatcttaaggattacattgcagctaagagtggatttgactgttgatcaaacacaaaaggtatttgacaggatcctaacaaagttatgtcatattgccccaccagttcttggattacgcatgcaaaaaggaggtaagatgctgcattttttataccatgcactttcataccttaggtttgtatggaggtttttgtttttggcatcagagaatgagtaagaaagggaaatatgtatacc

SEQ ID NO: 7110 - DNA, 441 bp, Glycine max
  unsure (1)..(441): unsure at all n locations
tgcaagctntgagccaaaatcctgactcaccataaaccttgacccagggtgagaatgtcaattcttaccctcggaagcaaaaaaaaaggggagagggaaaatttccaatcaaagaggaagcaaaaaaggagagaaggaaaatttccaatcaaaggaaaaaaagagaggaaagggaattcccaatcaaagagtgggagaaagcaaaaagaaaagaaagaaaattcccaatcaaagaatgggagaaagaaaaaagagaagaagaaagggaagaaagttcccgatcaaaaaaaaataatatgcagaaaggtctttggaccggacaatatctgaacaatacagaattgtcaccaaatgaataaaaagaaggaaagggaaccatgacctanaatggtcttccccctttagttgccaggcaaaatctttgtgcgctagcaacctttt

SEQ ID NO: 7111 - DNA, 338 bp, Glycine max
  unsure (1)..(338): unsure at all n locations
ngagatgaggaagtgttgaagggtgaaacttcctgctattattgttgaccacagagtggtacctggagatatgtcgcgggggtcaggagaccttggggacgtcaagtggggtgctattgcccaaaaccaagcttgaccaatcccgacccaacccgggcatagtcggtcagtgagaacctgtgatgtacctaagcaagcgagctcctggcagtcaacagataaaaggaaaacaagaccacaaagcaaggaggcttgtggtggctggccaactgtgaattttgtgtaatatgtggattgtggcctctggtaatcgattaccaaaggtgagtaatcgatta

SEQ ID NO: 7112 - DNA, 394 bp, Glycine max
  unsure (1)..(394): unsure at all n locations
gctntgatattatcttagaaattgggcttattaccctacctcaaccccacaaaaccaacttgtaaggtgaggattgtctaagctttataagttctatttaagtcatatctctaggtggtgtgagactaaacatgcccccttaagactacaattaaagcaacccaaagagaccagaattaagggctaaggagggctagggcctangggtaatcacaattaaggcaactttacaacacatccagtcacgcccgaggctattggcctggagcatggcaatgcaaataacccaaaaatgggtctaggataaactntgataacatcttagatntttagcttacggcctaactcanaaatcttacttaccagtaaatttaggaaatataactacaaaatc

SEQ ID NO: 7113 - DNA, 190 bp, Glycine max
  unsure (1)..(190): unsure at all n locations
cttaagtgttattcccttttattctattgtcactctcttcgttttgattgagtctttgcaattccatctcatgttcctgatatctntccaaataatgtggcaagagacatactagatagatctttagattcagtaatggcagttacctttggctgtcattctctatttagacatcttagaaccttattta

SEQ ID NO: 7114 - DNA, 414 bp, Glycine max
gcttgggatactttctttaagaccaaatccccttcgttgaacttacatgggcgtaccttcttggtgaaagcgttcttcacccggctttgatataaccatccttggctcatggcggccaatctcttatcttctataatattcagctgatcaaagcgtgcctgggtccattccgactctttcagccctaactcaaccagaattctcaaagagggaacctccacttcaaatggaagcacaacctccatcccgtacactaatgagaatggagttgccccagttgatatgcacaccgaggttcgataaccatgcagtgtgaaagggaaaatctcgtgccaatccttgtatgacacggtcattttttgaactatcttcttgatgttcttattagcaacctcaacttcccccattcattgt

SEQ ID NO: 7115 - DNA, 183 bp, Glycine max
tgcatttggaattgcgaaagccccactccatcattaggattagtacctgacatctcaaacaaacaaatcaaacgttactttacaattatagttgttgttggaatatctcacccactcaagtgtatcacacaattatggcttttctctaatgaaaacaatctttgcttttaccactctaattcc

SEQ ID NO: 7116 - DNA, 80 bp, Glycine max
  unsure (1)..(80): unsure at all n locations
agctntacaaacattgtgcacgttatctgactttttcaagagtatgtntattatacgtgggtgttgcttcatatggagat

SEQ ID NO: 7117 - DNA, 165 bp, Glycine max
tgctgagctgctcaatgaccttgaactcgctgtgctgaataatgccgagaaactcgcttgacttctctagcgacactttcttcttgccacagccatcccttttctgcggaagacctttcactggaataatctcattcggagtgagggtagatttgccattttgtt

SEQ ID NO: 7118 - DNA, 428 bp, Glycine max
  unsure (1)..(428): unsure at all n locations
agcttgttgagtgttgaaggatttaattgctttgcttatttggattctgataagtaaaggggccaagctacttactgggcctctattttttacacctttaatgcttgttagtcctgttattatgtattcatatatgcacggccgtttaaactgtcatcgtaactgactttttaatagttgctgtaatgatggttattatttgcttattggcacagcatgttactctagctagcttagaaaggtgtagggtttggaatttagtgtctgggtaggatttattgattgtagtgtggtcatgtcattatgcagtgtttacagaggtttatttttagttgaactctataaagttaaggaaacaagagtccagaggtttattttnttgaatgatgagcaactcgattaactggtttcatatcacatcctttgag

SEQ ID NO: 7119 - DNA, 453 bp, Glycine max
  unsure (1)..(453): unsure at all n locations
gagaatcttaatttgtttgttaagttcaaatttgtgtttagaaaaataatgtttcatctattggagcagacattaggctgtggtgccaacgcttaatcaattattccctttatctttacttattgcatttatatgggtcacggctatgattctcatgatgcaaggaacattcatgtttcagtgaatgtggtgtttgccaaaacattctcttgccgtcttgcacatgaaaaacatttcacttttcccaattcaaccccacaatcatagaattgagaagtcgaacatgataaaccttttttcttcttttaattcgggcttcctttataaataattcagaaacttcatgtaatatttttcggcaggttcaaaaagcaacaatagagggagaaaaagggtaccaagacaacaaggcacacacattgcacgtggaaatatcattngagggagagaaat

SEQ ID NO: 7120 - DNA, 459 bp, Glycine max
gctagtcatcggagacatcataggctagtattttaataaatgtgggttttaaaaattcaccaaattgatagagaaaaatctaaaatcatacatcttatgcaaataaggcatgctagcccccaacattattgcattttgattccatctttggacattgtgagtttgaaaattagaaaacccaaagtttattagggcatttcatcaaacatacaactgccaactgatctggcaaaagaaatagtgagtagaaaatggaacttgcagacaaaaaacaaataagagaaagatgattttctctctatcattcgcagaacagaaaaattgaggaaacacactgcaaacaaatgtttagatttccttatgtgacattatactaactagtgaaacattagcagttaatttaaagctaatagagatgcagaatgtatataattaacaaaggaattatgcggctttgat

SEQ ID NO: 7121 - DNA, 455 bp, Glycine max
ttggaatcatgccgaaggtatgtaaaagtagttcatctctgttttcttccataactacacaagtaatgccaagattaatgtgtgtgatttgcataatttatgggaaataaggtcagtcattaaaagaaatgcctaaactagtggaggagactgcagtgactaaagagagcacacggctctacggacttgcaattgcaatatatcagcctccttataattatatttttctaatatgattccaggttgcaagaattcttcattgagtaacctcattgagtagctatatatgcatatagctacattgttgacatttttggcaagaatacatcttggtacctctaagctaatcaacatacaaacaagagctagaagagaaaaaaccatttttcacatagcctagaatgataaggaggttcatatagccttacattaaatatcagtcccttaatactata

SEQ ID NO: 7122 - DNA, 416 bp, Glycine max
  unsure (1)..(416): unsure at all n locations
agctngtaagtcattctattttgacaattgctcttatttcttgtttttcatcgagcttagctcaacttttaaaacttttcaacttgttgtcctctgttttcttcttctcttgcttctgttcttttgtactcacactgttgattttttaaaaaggcagggccaatatctttttttctaattgtttgtgttgtaccaggactcaatcgtcaataatactatctctttccttaacatacccaaaatcatataaatacataaattattcagtgcttttatcatagttatttaagcatctaaaaatattgctatatgcaacaccacatataagtacagaaattattcaacagttttatgtgttttcccatatatatagttatttgttaagcatctagaatgactattgcatgaatgtatgc

SEQ ID NO: 7123 - DNA, 440 bp, Glycine max
  unsure (1)..(440): unsure at all n locations
agagatcgggatcgcttggattactttcagtggaagatatgcggcagcaggttaatcataaatgtttcagtggaatttatgacgttggctatttttatgaacaagaaactggtcttcctagtttcagaagtcagaaccattatcttcccatagctgctatttttagaacctttatcttttaacaattgctgctttaaggacaacaataacaactgagccttttccccctacccactaggtgaggtcagctacgtggatcaacgacaccataacgttctattatgaagcatgtctataaacaaatcattgaccgttaaatccttcttaatggtttgccaacagtttttctcaatttctctctagcaatagggttctcctccatctgatctagtctccatacatgtcaaatatactcaaacaaatctcaagactctngaatg

SEQ ID NO: 7124 - DNA, 369 bp, Glycine max
  unsure (1)..(369): unsure at all n locations
agcttatgagtaattcctaaagagagaccctattctgngttttgttgagctgctcaatgaccttgaactcgctntgctgaataatgcggagaaactcgcttgcttcctctagcgacacttccttcttgccacagccatcccttttctccggaagacctttcactggaatatcctcattcggagtgagggtagttttgtcattttgttcttccaccacctttgccttccccttaacgtttgcgggttgagtcggcaggtcagggggtgcaaacacgcgaccgctgcgggtcacgccgctcagccccgtgatattagtcaccttggctgacaacgagctaatgtcggtggcctcttctttcctttcacttg

SEQ ID NO: 7125 - DNA, 438 bp, Glycine max
  unsure (1)..(438): unsure at all n locations
ggtcgctggagctaacccatcaactgtcctaactctntcagactggcgactcctaggctcttgaccttgacttgatagaacctctttttaatctaaggcgcttgactcgatcccatgttttactaaagtgaaacaaaacctagtgcgaatcaagactccgacatctatcatgggtggaatggatgaatgcatgaagaaatgcatatggcacaaatgccatttatgaatatgggagcccgggagattgtccccttcttagacacaacattcgggcagcatggcgcccgacgtatgcatttaagaaggcgacacggaccctccgtcggttcgtgacaaagtgaggggatcaagacgcaacccgtgcatgatgcagatgcgataaaaggcacaacacggggatgtatatagtatgacaatatccacatataatcatacaac

SEQ ID NO: 7126 - DNA, 373 bp, Glycine max
  unsure (1)..(373): unsure at all n locations
agcttggttcgaggtacnttacccgttgaagatctgaagaacgatgnaagaactgtcgaagaacgggttggaaacttttgcgaaaattcctcacgggaaaacgttacgggaaacgtttcggaagccgcctcggcttaagaattttcttcacggaaatatttnttccaagcanaattcgaaagaagagagaagtgcctaaggggctgaacccctttcttcttcacttcctcccctatttatagcaaaataggggagggtggtgccgcccagctcgcccaggcgagccaggttacttcctccagaagcaacatccttctggaggaatattctggagggcacaagtgggactgggagctattcgatcccactttac

SEQ ID NO: 7127 - DNA, 442 bp, Glycine max
  unsure (1)..(442): unsure at all n locations
nntacatcagatttagaattgaaccactaacctagaattaaatgaacttaatgccattaacctagggaattaaggaacttaatggctgagtgtaactgaaattatggcaaccaaaagtcaccctcaacagccatcaagtcagcccctatttggtctcccaaaaggctgatgcctaggttgccaattaggcccatattacaactngaactaaacctaactaaagcccttntagttgattaacccaaaacatatttttggtcaaccaacttttcaaggattgggccattatttagacaaactaaacactctaaaattgagacaaagtggtgccatttagtcctcctccatttgggccatgatacaactcacaaccttggacttttctccttgaaactngggctngtattcaaatagtatggacaacacttgttgaagagcttcc

SEQ ID NO: 7128 - DNA, 277 bp, Glycine max
atggcatgatcactatctgacatgttctcaattagctcagatgcttgttctggggtcttcagttttatctttcccccaacagaaacatctatagctgcttgctttgtggtctcaacccatctataaacatattcaattgaattggctcaaaaaacccatgggtgggagttcttctaataaacctctgaacctctccaatgcttcgctcagagactcatcacggaactgatgaaatgaagagatcgtctctatcccttccacagacttggactctggg

SEQ ID NO: 7129 - DNA, 472 bp, Glycine max
  unsure (1)..(472): unsure at all n locations
gcattacggacacttgaattcagcttgcttatgtagttttcgatgatctgagtgggtctgaaaagatgcaaatttaatcatcctgcttgaacgaatgagaaaactggggcaaattattaggatagaatgaaggagaaacccatgcagcgactatcattcctacatgaccaaactttccactggcccaacaatgtcattactcagccaataacaacccttctccttacctaccacccagttatccacaaaggccatccctaaatcaaccacaaagcatgtctaccgcacttccaaagacaaacaccacctttagcataaaccaaaacaccaaccaagaaatgaattttgcagcgaaaagcctgtagaattcaccccaatttctgtgtcctatgttgacttgctcccatatctactagataatacaatggtagccataaccncaaccaaggttcctcaacctccaattttccga

SEQ ID NO: 7130 - DNA, 356 bp, Glycine max
  unsure (1)..(356): unsure at all n locations
tgcaagctntctttaagtgtgtgcttgattntattttataaaaataattacttttaattntattacgtgaacgaaattttttttaaaaaaatattatttctcgtaattaagttttttttttctaaataggactcaatcgtatggataactaggtcatagctcttaatgatttcattagcttatgatttttttttttaaaaaaaaaaaatggtgtcttcaccaatttgtttgagaactgtccgttacatctcttttccttatctggaatatccttttattttgttttttcctcaacagtataaaaaactttgctttgggaattatgtggctttgtccttagtatcactnttccttcc

SEQ ID NO: 7131 - DNA, 455 bp, Glycine max
  unsure (1)..(455): unsure at all n locations
caagcttcaagacacatcatttacgattttacgtcgggcacattaaattctggtcattattacatcttctggaaaagaaaacatagttattgagattgtattgaaaattaattttttgaatcgattgatttattattattaaagagtttggaatggaatgaatttgttgcacccattatgccattacaattacaataggagaaaatcatttaaaaaatattaaaaatgcgaagtgaatcattacaattcattttaactcaggactaaccggtgattcacttttctccctccctcagtccaaacttctttgactcctaagagtanttttagaaatctattgtaaaattacatttgaagtaaaagtgatcttgtcaatcgattaagatcctctcttttatgattatttcgtttctattcgttagatttatatgacaattcatgtcacatgatttctg

SEQ ID NO: 7132 - DNA, 406 bp, Glycine max
  unsure (1)..(406): unsure at all n locations
tgcaagcttgtaggattatggggtacccatcacatgtggtactaggtggcggtcgggcgatggtgcacaacaagttttccacctccacaaatcgcgcataaacccaccatcccctattgcccacctccatctgagctcacgtactcccacgtagcccatatcctcgtttctctcaacacagggtccccatcaatcctcccaagcttccccaacatccaagtaactcaacattcaaacaacacaaaccatcacagccaagaaaatagggcaaaggcagaaaactctgcccaaaacaccaaccaaaatcacagcttttctcacttaaagaccccagtaacaattccttcgttccaattcgttaaccgttggatcgaactccaaattttactggaagtctncagtacat

SEQ ID NO: 7133 - DNA, 446 bp, Glycine max
  unsure (1)..(446): unsure at all n locations
tctcaaggaagctacctagtctataaatagaagcatgtgtaacacttgttgtaactntgatgaatgagagtcttgtgagacacaactcaaagttcaacttctctcccgcttttcctccttcaatttcatgctccccctctctctttctctctctctttctttttctccattgaagcatcctttccaagcttcttatccaaggcacattcttggtggcgaaactccttcttccattgcttattccctagtagatggcgcctcctctcacctcttctcctttgtcttccgctgcatctccatggtggaaaatcaccattgaaggacctcattgaagctcaaagatccagccttcatagaagctccacaagcaagcttccatcaagtggtaatcagagcataagagcttcaagtaggtgctccttaaacctccattgggatttcagttt

SEQ ID NO: 7134 - DNA, 396 bp, Glycine max
  unsure (1)..(396): unsure at all n locations
agcttataatatatcgatacgctaganattattcgtcggaaactctcgggaaattcaaatggtcataacgtttcacacggatgtccgattcgggcacataatatgtcgagaggctcgaaattgaacaacggaagctcttgagaaattcaaatggtcataacttataactcggatgtctaattcaggcgcatcacatatagaggcactcaaaaatgaacaacggaagctctcgagaaatncaaatggttataactattcacactgaggttcgattcatgattataatatatcaagacactcgaaactaaacatcggaagctctcgataaattcaattggtcataacttttcacacgaatgtccgattcgtgcgcataatatgtcgacacgctctgat

SEQ ID NO: 7135 - DNA, 134 bp, Glycine max
ggaatgggacctcggtgtgaaaagttatgaccatttgaatttctcgagagcattccgtatacaatttcgaacgtctatatttgtgatgctactgaatcggacatctgtgtgaaaagttatgaccaattgaattt

SEQ ID NO: 7136 - DNA, 359 bp, Glycine max
  unsure (1)..(359): unsure at all n locations
agctntgatacatattcagcctctagaaagattatcccaataagaattgttgattcaatgccaagaaacttcaagcatttagaaaacatctcanattgaataataaacacaaaaaacataatcgaacccacttaccccaagcaatatcatcgacacaagatcctgtttggatgtgagaaaattaaaatctgaacatcacgagggctaatcctccatatctttggtattcccacccaccttcgtcttcaaattcacgagaacctaagttgttgcagcttccaactaaaacaacagaaacaaaaaagaagttaaaatagaaaacatgtgcaatngagtagagagagagaaagagatagtac

SEQ ID NO: 7137 - DNA, 222 bp, Glycine max
  unsure (1)..(222): unsure at all n locations
ntagagccaattgtggactggagactcaacaaggggatagttataaaaataatctgcaggtgaaaaaagccaaaaatgtattcatcaaaatccccggcggaggcaatggtggctgactacatgttcagactcaccggaggaagacaagcaccatggtggtagtgggtgcacctagattgcaccggagaggagtagatctgacaaaacgtgaaaagattaaaa

SEQ ID NO: 7138 - DNA, 61 bp, Glycine max
gcttgcacattgtgcttgatagaagaagagcttgatggtaaaccttgttacttcgatatca

SEQ ID NO: 7139 - DNA, 211 bp, Glycine max
  unsure (1)..(211): unsure at all n locations
ttccttagtaaggaatctatccttcctaagatggatccaaacccagtcccctctcattaagaactagctcttttcttcctttattgcctatagtataatagacctttgtntggttctctatatggatcttaaccctctcatgcaacttctatacaaactctgacctagattacccttctgtaagtataaaagaagtgacacgtgggagggg

SEQ ID NO: 7140 - DNA, 174 bp, Glycine max
  unsure (1)..(174): unsure at all n locations
agcttctagccatggacttaccttgaattaattcctttgatagcccttttgagcctngtttccctttccttgttntgaagctcactacaagccttaagtgaaaaacccatgatattacccataatcctaaaggaattttggagctttggaattgttttgggaataagtgtgggg

SEQ ID NO: 7141 - DNA, 208 bp, Glycine max
  unsure (1)..(208): unsure at all n locations
aagcgcagtctgggggacgaaggtcaagnggangcgacagacgaagaagacgttccgagcacatgggatggggtgcgaccatgcccgccaagaaaaataaaggaaacaggcgagaggaggaacgcaccggcagagacgcaacgagcagaaggaaagccaggacacgcacaaaagcgccacaggggggcccacgcatcagagccactcg

SEQ ID NO: 7142 - DNA, 242 bp, Glycine max
  unsure (1)..(242): unsure at all n locations
taagcctgtgagcttccattgttagtttttgcttcccttttcacgctntatttcactcctcacaagttagtgcactttcccctggttatttggctctcccttgatgtgttttagtgctttagttgctcattttttgcgaaattcgtgaagcaattcacatgtgaatccttgcttgttttcgctaaattaaggggttgtaacggatggccttaagcctatgatgcattctggagtaaaggggc

SEQ ID NO: 7143 - DNA, 445 bp, Glycine max
  unsure (1)..(445): unsure at all n locations
gtgtaattagagcataagagcttcaagtaggtgctccttaaacctccattaattttcaactttaccttctcctccattgttgtttcttcattttctacttgtatctcctcacatgtcttgtgttaaatgttgttaatatgattctttagaatttccaccgattaatcttgctatagaagctagatttgattttctatggttcaaatttcttgttcatgttcttgaaccatgagttgtgttgagtttaggtttctttgagttttgtcttgatattttttgtggctgaaacctaaaccataaaattcttacaaaaacattaaagtagaataaaacctcaaaaatctagagtgacttgttcacctattgtagtnntttcataacagtcatgtctagtcatgaaacttgtcacataagatttctgatgttgtgctgaatnctatttttc

SEQ ID NO: 7144 - DNA, 413 bp, Glycine max
  unsure (1)..(413): unsure at all n locations
agcttgtcctggatgaatataaaagtttcagatgatatatgtgggtaatgtcgaggctgtgttgagatcggatggttttgaagggaaaagatttaatgaatttaaaaataaatatctttataatagaatcgaattgtacgtgttgatttgaattagattattttttttattttttgttagaattttttctgggtaaattaatatgcaaatataagttaattattaacattgaccataaaataaaattntatttgaaacataatgtatagatacatttatttttccttaaattaatttcaaatttaattttaaaatagtttaccaactaatttttgaaaattggtacatcattattttattttctaatgtgttgtaaaaataactatatgtgatataacatttactggtttgac

SEQ ID NO: 7145 - DNA, 449 bp, Glycine max
cttgaaggtgttaaagacatgagccattgtggtgtagaacccaatgaaatcaccatggtgaatgctttaatacctgcgctcgtagtagagactttgatactggacaatgggtgcaccagcacattcgtaaggctggttatgatcccttcatgtccacatctaatagtaacatcattcttgcaactgcaattcttgaaatgtatgccaaatgtggcagcttcaagatagcaagagacctgttcaacaaaatgcctcagagaaacattgtttcttggaacagtatgattaatgcatacaatcaatatgagagacataaggaggcactagatctcttttttgatatgtggactagtggcatttatcctgataaggctacctttctgagtgtgttgagtgtttgtgcccatttgtgtgctctggcattgggacaaactgatcatgcttatctg

SEQ ID NO: 7146 - DNA, 449 bp, Glycine max
  unsure (1)..(449): unsure at all n locations
agcttagcaacaacttaataaagcaagtagtgaaatttgcatttatattattgttctctgcattgacattaagtaaccagtgactcaacgaacttagtggagggtgaactaactacctgccaaataccaccaataaaaacgcgaaaggcaatgctatctaatactaatatgctaatataaaatatttggtttatcttttagttnttttctttatatgaagttagaccaaacaaaattttaaaaattattctaaaagtaaaagtaactttttaataaataatttttttatataactntaaaagagagacaaaaactaaaaaaaaaaagttaaacattgcagaagttcctactccagaagcagagtggaatactgaaaatatgtatataattcaagaccaaacaaattagcaacttgcctctgaacatacaagaggctaacatgacataat

SEQ ID NO: 7147 - DNA, 430 bp, Glycine max
  unsure (1)..(430): unsure at all n locations
actacgctnantaattgtcagtcaatttcaatgttttcatgtgctgtatgaaaacaattgggtttttttcatcaaggtggattagttaactaatatgatagaaggaagtgattaacttttaacttcacaagacagaaaaataaaatcagaaatatttaatgataaaattcttgaacaagagagacaagaaatagaaagctttcaataggatggaaggtaattatgcatatataacaggactttaggtattgggttggccaccagcccactatcattatacgactacatcatagatgttgatgggccttaagacaattgatcaaagtcaattccatggcttttgcttcctgtacctcccagtttgtntcttgcaccttccaatttttcaaaatgggcatagtaaccttgtctttctcacttntccatagct

SEQ ID NO: 7148 - DNA, 430 bp, Glycine max
  unsure (1)..(430): unsure at all n locations
catgatgatgaatcaagtatgattcatgtagttntgatgatgacaaanagcccaaanaaatgatgtcaagattgagtcaacaagttcaagatcaagattaaagaanagacatgaagaagaatcctgattcaagagaagatgaattcaagattcaagagaagaaaccaaaaagcaacaagtcaagactttgcaagggaagtattgaaaaagatttttcaaaaaccaaacatagcacaattttattttacaagaaaagtttttccaaatttttctaagttaccagagtatttactctctggtaatcgattaccaattacctataatcgattaccagtggtaaagtttgatttcaaaagcttttaactgaatttgcaacgttcaaaatggttntaaatgatataattgattgcaatatattggtaatcgatta

SEQ ID NO: 7149 - DNA, 413 bp, Glycine max
  unsure (1)..(413): unsure at all n locations
ttgtccacaacatttaagctcaatggctcgacacttgtgcatctaactgtgccacttataggcttcaatttttttgcatgacatgtgatttcaaagtatttgggtccttgatgattgctctagacggtaagcctatttttcatgttgggagatatgcatngatagattacaatgctcaagaagacattgtctttttccttcaacaccttctntcaacatctggtaagtgtattaggtatctcaactactacctgtgactacctttgaagaagaggtgcaagagcttaagaatcagaacatacacttacaaatgtgaatgacattcatgtctgaccaaattcgtagctggtgtagcaacctcattgggcgacactaaatgttcatagtaaatttatggtatgaacatggtgtga

SEQ ID NO: 7150 - DNA, 261 bp, Glycine max
agtcgacctgccgatgcaagctctactcttattattatatataaaaaactattcttgtcattgatagctttggtcctcacacaatacttataaagcctgaattagtaatttctacatgaaacgacaccacatactacgcagtgttagtttaaggccaactcaggtttaaatagtgttcttattatgaaaaaacattattgttgagagcgatgtgatacttaaaaaggaaggatcacgaacttgtacataaaatgatatcag

SEQ ID NO: 7151 - DNA, 416 bp, Glycine max
ggaagccatttttacaacagagagtttcatctccagatcagctgtgttggttggccaaactgctaggctatcaatttgaagttaagtataatctctgacttagagaatagagccgatgatgctatgtccagatgtcatggttaggtagaaatgaattctattatttcttttcccttgtgggctgatagacagaaacttttggatgaaataactaatgacccgtacatttaaaagttactgaaagaagtgtaggagtctcctaatgttagacctgtgtttcaggtgaaacatggagttttactttatcatggcagggctggtgattcccctgaatcaccctctattccttggctattggaagaatttcatagtactcctgctggagggcactcaggttttctgagaacataccgaag

SEQ ID NO: 7152 - DNA, 420 bp, Glycine max
  unsure (1)..(420): unsure at all n locations
ggatgcaagcttctgttttcaattacgagcgtctccatatattacgggcctcaatccgacatcggagtaaaaagctattgtcgttagaatttgctcagagcttctgttctgaattttgagagtcttgatatactacggaacacaatcggacatctcagtaaacagttattgtcgattgaatctgctcagagcttctgttcttaattacgagagtctcgatatattacgggattcattcggacatccaagtaaaaagttattgccgcttgaatttgctcaaagcattcgttgtcaattacgagcgtctagatatattacgggattcattcggacatccgagtaaaaagttattgtctttntatttngctcagagcttctgttttcaattcccagcatctcgatatattacaggactctatc

SEQ ID NO: 7153 - DNA, 379 bp, Glycine max
actatgaattcaagcttgacagcagatcttagtaatgacccactaacctagaattaaattaactcaatgccattaacctacggaattaaaacaaactaaatggctgatgtgtaaccgaaattgctggcaaccaaaagtcacccacaacagccaacaagtcatccaccatttggtctcccaaaaggctgatgcctaagttgacaattgcgcccttatacaacttgaactaaagcccttttagttgattaacccaaaacatatatttggtcatccaactctacaaggattgggccattatttagacaaactaaacactctaaaagtgaaataaagtggtgtcatttagtcctccatttgggccatgatacaactcacaacc

SEQ ID NO: 7154 - DNA, 406 bp, Glycine max
ggatgcaagcttaacataaggcatgcgaagtgggtggaattcctagagcaattcccttatgttatcaaacataataagggaaaaggtaatattgtagccgatgctctctctcggcgtcatgcattactttctatgcttgaaacaaaattgattggtcttgaatgtttgaaaagcatgtatgaaaatgatgaaacttttggagaaatttttaaaaattgtgaaaaatcttcagaaaatggtttctttagacatgaaggctttcttttcaaagaaaacaaattgtgtgtgcctaaatgttctactaaaaatttgcttgcttgtgaagcacatgaacgaggtttaatggggcattttgtggtccaaaagactctatacacattacaagaacacttttattggcctcata

SEQ ID NO: 7155 - DNA, 426 bp, Glycine max
tctagaaggagatcaacttgatgttctatgcttcttgaaggtggcagtccatgatgaatctccttggaaaagacatctttaaattcctgctatattggttgaacactaggagaaacataaatagttaactgattagaattatcactctctctcttttgtgtatcactcttttcctcgggtgtatcactcttctatttcatattccttggtggagcctcactattttctttctcttgttctctcttttctctcattctgatttggtcatcacatgcttctctaggggatagaggtttaagagtaaacgaggaagatttgactattcgtctgtagggctcttctttgttacggttcaacaaacgttgcatttgtatagtccacgcgtccagaaataagcgctgagattcgtccagttgatgatataca

SEQ ID NO: 7156 - DNA, 106 bp, Glycine max
  unsure (1)..(106): unsure at all n locations
actctagagtcacctgcggcttgcatgctcgagatgattattgtagaanggcgatattttctgcttttattcgttgaccacagagtggtacctggagatatgtcgt

SEQ ID NO: 7157 - DNA, 373 bp, Glycine max
  unsure (1)..(373): unsure at all n locations
cttaaacttccttatataggctgccaaacactccacttctaagaagacacccctaccttgcatgtattttgtttaataatgtgattgaagttaattttttattagatttaattaaataaatgtttagtattttgttctttcctattagtctattgatagctaactggaataaaagaaaagctaaggtcagaccagttgatagctaactggaataaaagaaaagctaaattgcagggaataattctcatatctttttatttcatcattaccccttnttatagccatttcatacaagatattttgctaagttgttataaccaagaatttgatattgcataaccacatatgtatcaagtaaaacatggaaaaagct

SEQ ID NO: 7158 - DNA, 318 bp, Glycine max
agcttctatagaatgtttgttcctaatggctctacaatggtctcacctctcaatgagctggtgaagaagaatgtggcatttacttggggagaaagacaagagcaagcctttgctttactcagagaaaagcttactaagacacctgttctagctcttcttgactattctaaaacttttaagctagaatgtgatgcctctagagtgggagttggagatgtaatgttacaaagagggcaccctattgcttaatttagtgaaaaacttgatggacccaccctcaactaccccacctatgataaagagctttatgtcttaata

SEQ ID NO: 7159 - DNA, 424 bp, Glycine max
  unsure (1)..(424): unsure at all n locations
ngtagggcctagggaccttcttcagcaatggatacccctgcttctcggaaaatgaatggcagcggaatggagaatgaatatagagagagacgagaccccacctcaaggagaagatgagcctagaagaagctcaccaccataagaggccatggataagagcttgggggaagaacgagacgactgaagggagagggagagaagacactatattatgcgctccaaatgagctttgaaatctgaagtgtaatatgcaaatgatcaaagtcgaaaaaaatgcacacacatgacctctatatatagcccaagtggcacacaacattggatggaaaatcaaatacacgcgaatgagggagccaaactgggagccaaactcaccaattagagtagggaaccacgtatggtcacccacaactcagaacaatcc

SEQ ID NO: 7160 - DNA, 221 bp, Glycine max
agctttgagaaaattcaaacaacaataaattttgactcgaatgtccaattgtgtcccgtaggatatcgagacactcgtaattgaaaatggaagctctgagaaaaatcaagcgacaataacttttaactccgatgttcgattgagtcctgtaatatatcgagacgctcgtaattgtaaactaaagctctgagcaaattcaaacaacaattaattttgactcg

SEQ ID NO: 7161 - DNA, 254 bp, Glycine max
tcagttttcaattacgagcgtctcgatatattacgggactctttcagacatccgagtcaaaatttattgtcgtatgaattttctcagagctttagttttcaattatgagcgtctcgatatattacgagactcaatcggacatccgagttaaaaattattgtcatttgatttttgtcagagcttacgttttcaattacgagcgtctcgatatactccgggacacaatcggacatccgagtgaaaagttattgtcg

SEQ ID NO: 7162 - DNA, 432 bp, Glycine max
  unsure (1)..(432): unsure at all n locations
ctgatcaagagccatcacataattactagatttctagcagtacacatcaaatagttaactagaatttgttatactttctttctggtggcaaatgtgtgctaggacttggggcaagtgccctctctaccttaaaatttattttggaatatgcattattggtccactaaatattttaaattgcccactaatcaataagttatataaacatggaaaaaaaataaaattttgttacctgtaaactacaagataaaaaattatattgttttgaaccccagacctaagaaaccctcttactcttttgtctattntggctttggtatgtgagagtcattgcctatgaataaatttttaataagaaatcagttgtagatagtaacttcttgatttcccctgtaaaatatttcacaattcaatataaactaacatactaat

SEQ ID NO: 7163 - DNA, 336 bp, Glycine max
  unsure (1)..(336): unsure at all n locations
gggcggggggggtcgaggcgcgaaaaaataaatatatagggggggggggnggggggggggcgcggggcgcgggggcgggagcgggaggagggggaaggaaggagcggggagagacgaggggagggaccggggaagagggggggggaagggggggggggggtgggaagagacggggagggcggggggcgcggaggggcaggcggagagggagcagcgcggggtggcgaagggcacagcgggcgagggcggggggcgacggcggggggcgagaggggcggggagggagagcggggggcgggagcgcgaggcgagggggggggcgcgggagacgggagg

SEQ ID NO: 7164 - DNA, 296 bp, Glycine max
  unsure (1)..(296): unsure at all n locations
agctntgtgtaataattacacttatttggtaatcgattaccagtgactgtttctgataaatcaaaagatgtaactctttaaaaaggttntgactttttcaaattggttttaagtttttctaaaagttataactcttctaaatggtcttcttggccagacatgaagagtctataaaagcaaggctttgatttgcttttcaatacacttttacacttattcaatcaatcttttacaagccctgaatctctttgaacttcttcttcttctttgtaccaaaagctttctgaagttttttg

SEQ ID NO: 7165 - DNA, 449 bp, Glycine max
acacctcgagtggttttcctctattcggttgaattattgtttcttctaatgctcttttagaaattaaatgtgaaatgtcttaatctcattattggttattattaaattctatctttgtgctttcattcctctttcgtcatattatttttgaaaaagtgtgtgtgttgttatgatcgatttggggtatgatttctttgccaagcatgttcgcatttcagttaaagttttcagaaatttcaatgtcttcatgtttttagatttcaaagacttcaatgtcttctatattttacaagacttcaatgtctattgtcttttatatttcaaagacttcaatgtcttcagtcttcatatcttcaagactctaatgtctttagtcttttacatttcatagacttcaatgtcttttgtatttacattttacaagactacaatgtctcatgtctattaca

SEQ ID NO: 7166 - DNA, 145 bp, Glycine max
  unsure (1)..(145): unsure at all n locations
agctntgatttatcagagggtttcagggacaaagctctgatttacatattgaatttcatccaaatttttgacaagtcattgttacttccatgaatattgatattgtatcatgcttaattatatgcatttgcttattctgatcatt

SEQ ID NO: 7167 - DNA, 460 bp, Glycine max
ataaatctttcaaaaaataataataaaataaaatcaacccaacacataagttctttttctacaaaaaattacttaagtatgattttctcattgcacctgaggatatgcaggagcaaggacaaacaccttgtcgacctagaaaagcaaaaaaaaaaaaaaagaaaactaaaaaaacataaaacttctttttttttcttaaaaaagttttttgttttctttctttttctaaataaacaaacataactcatgtctcaaggaaaaataaataattaaaaagttattttatttttagcatactcaattaaaggttgttgtcttcatgatgagcgcgtgggatgctaacaccttctgtgtgcttaaatgacttccgaatctttttttctcaaatcgtagaccattttttattttttttaatttttcaacgtttttcttaaataaacattgataacgattccctaag

SEQ ID NO: 7168 - DNA, 240 bp, Glycine max
actctaagtcacctgcggctgcagctttcaaatatcattgagagaagaaagactaagcattgattcgtatatttgtctgcaagacgactctagatttaatatctgagccaactcttaccacaaatctattttgatttgtttagagtcaatgatggcttggtaggaaaacaaacactacgtgttaatcaagcttggggtagaacttgatttatggagacagaagtggccgtgacacaatac

SEQ ID NO: 7169 - DNA, 310 bp, Glycine max
  unsure (1)..(310): unsure at all n locations
tgctngtggtgcttctatggaggcgggatctttgagcttcatatgaggtcctttaatgttgtatttccaccatggagattcttcggaagacaaaggagaagaggcgagaggatgcgccatccactatggaataagccatagaagaaggagcttcaccaccaagatgagccttggataagaagcttggaaggatgcttcaatggaggaaaagaaagatggagagaaagagagaggggggagcacgaaattgagggaataaaaatggagagaagttgaactttgagttgtgtctcacaagaatctcattcat

SEQ ID NO: 7170 - DNA, 413 bp, Glycine max
  unsure (1)..(413): unsure at all n locations
acgttcagattctgctggtaatcgattaccatatatgtgtaatcgattacacagtgcaaatttttaattcaaattttatatagctgtgtaaatcagtttaggccactggtaattgattacatcctctggtaatcgattaccagagagtaaatttgttgaaaaagactttttaacttaaatttcttgggcaaaccttntgctacttcaattggaattcccttcctatttaatataccctntctaagactctatagactntcttgatcatacatcttgaatatctttaatttctttgtcttgaataaagctttgagacgcatgtgaaactttggcatcatcaaaacattcagcttgatcctttgtctacagtactcatttattgaaagtggaagattcacccatatgaacttgga

SEQ ID NO: 7171 - DNA, 317 bp, Glycine max
  unsure (1)..(317): unsure at all n locations
agaatccaagctnataatgggagttctcttcatggctactagcatcagtaatagtagcaggcttctcttccaatgtagctagatcaagatccaaaacacataatatgaaatggacttgctccttctagtcaaagaagttaagccattaaaacctggcacagatgatacatgagaattcagtgaattgagaacatgtattgcataataaaattcacataagcattntgagacataaagcatatgtcatgcatacaaacatacaaacatgatgatgctaataaaactggttaacattatttgacaattaaatatgcacc

SEQ ID NO: 7172 - DNA, 372 bp, Glycine max
  unsure (1)..(372): unsure at all n locations
agcttaacaagaactgctatttaccaaaaatgttcacagagaaatacgaattaaagctacaattacaaaagtaatgacggcaagcctatcattgacacgcatgcatgacagctcaatcgttctgctctcagccttaaaaaaatgtgagttgaaagtaattattaccatcccactaaagcttgtgataaggagacttttccttccttttttgtccatcaaggacgaagcaacaattgctttttttttttggtcagcaaaaatattatatattgatatatgaaaaagtaccagaggtactatagatacaagagtatgtatgtaaagctagttaatcctcatatcaagctgagtacagactgatangagattact

SEQ ID NO: 7173 - DNA, 444 bp, Glycine max
  unsure (1)..(444): unsure at all n locations
tccactatctgctctatatctaacgctatcatatttcattcattcaaatggttatcatttgatgnttttcacacgtggctcaagataattatttggtcggctatcacagattgcattgcatcagaaaggagcctctgaacaaggggaaacgtgactgacataataacgaaagtaaaatgagcagaaaaaaggatcactaagtcacatcacagggattgtacctaacaggtaggcagttcttatccaatcactcaaagtccatgagtactgaatattntataactctaaaaaagtgacttttaacacatcaacctatcaacgaacgcataaaaatattctaatgtaattacctcgaacaacaaatttaagactgaaaattcacacataaagcctatccaattttcttgcataaaataaggctcaaactcaaaatatcaatctaaa

SEQ ID NO: 7174 - DNA, 349 bp, Glycine max
  unsure (1)..(349): unsure at all n locations
agcttgccacccagctcgcctaggcgagcaatgttgcttcctccagaagcaacagccttctggaggaatcttctggagggcccaagtgggcctggttgctatttgcaccccaatttttactaaatacacccncaactttttttggtgattcttttttcgtaaaggtacggaaacttacgaatttcgtaacgatacttgttttctttccgtaatgttacggaaccttgcggattatataatcatcccctttttgacttacgaaatgttacggaacctcactatttgtgcaacgatgcttccttttgattttcggtgtgtcacggaaattttacggattatgcatcaatat

SEQ ID NO: 7175 - DNA, 448 bp, Glycine max
tgatagcacgcagagactaacgtcgtcttctgcgcccttcgtcaattgcggccgacaagcccgtttacacgcggtgatttacgtcatctttctcgctcacaagatctgtcatactgacttttgagtcacgctgacgggcgaaaatacccgagtggttatccgtataaactttttgctgtctgtaagaggaaaagcctgataacacgcagagactaatgtcctcttcttcgcccttcgtcaatcgcgactgacaaacccgttgacacgcggagatttacgtcatcttccgcgctcacaagatctgtcatactgacttttgagtcacgctgacgggcggaaatacccgagtggttatccgtataaactttttgctgtctgtaagacaaaaagcctgataacacgcatagactaatgtcctcttctgcgcccttcgtcaatcgcggctgac

SEQ ID NO: 7176 - DNA, 433 bp, Glycine max
  unsure (1)..(433): unsure at all n locations
ggatgcaagcttgactntaggcctttcaacttctctatatttataaatgttccccatccttgaattgacatcttcttccatgactcctccataaaatttctcaaaatttccatcttgaaaccaacaatccaagaccctgaaaggtttaagaccccaatcaacttttgaaaccttcaatacaataagacaatggtagatatattccactctaaaatgaattgatatttgccactatggagtgtagaggcaaggaagaggagtgttgacattaagagttgaagaacctttagatttatgttttagttttaatttgatatgccaaacatgtatggatgttgcattgtatttcttgttttagtattagtcatatgtatcctttaataatagaaatagcttaagtcatgccttaagaaaatcaactcaattcaagtca

SEQ ID NO: 7177 - DNA, 451 bp, Glycine max
ctttgttgggaatttctgctgagtcttgatgtaaatattctttactatttatttaatgttgttttgatgagttcactgcttctatctactcttaattcttgcatgcttttagtctgatcatccatttgtgtgtaaagttaggattttcaccattgggaaatgttttgaattcttagaactggatagagcagggctagataactgtattgtctggacatggagtgtagggactctagtttttaatatgttgtgaccttaatgttcttcggttagactaagttcgacgagggatccaagaacgaagtttaattagaattagcccattcacgcgagacattggtatttgggataattgtcctcaacatagaacacaaaaacaatattagatagagaaaaacccttaattgcatcaagccactcggtagaaaggcccaatggtttaatcatctat

SEQ ID NO: 7178 - DNA, 428 bp, Glycine max
  unsure (1)..(428): unsure at all n locations
tagataccaccagcatcaaggaattagggcggttgatggaactctctccaaatgcaagctttccgcaagacttacggaaaaatcttagagttgaccttagcagaggtatccatagaagccattgcatcactcacccaatactacgaaccagccttgagatgcttcacattcggagacttccaattagtaccaaccattgaagaattgaggaaattctaggatgtcctctcgggggaagaaaaccatatctttcatccgggtgtctcccctctttgagcagaattgcaactgtggtcaaggattcaacaagaggtttggaccgcataaaatagactcggaacggcatagcgggcctaccacggaggtacctagaagacaaggcgaggggtatggccaatcaaggagatngtgtcccgtttatggatgtg

SEQ ID NO: 7179 - DNA, 361 bp, Glycine max
  unsure (1)..(361): unsure at all n locations
agcttgaaaaagtccttctgattctgtttatatctatttctgacttgattgcatgagatgaaatgcaaagattggacctcctgttagttggtatcaattaatagcttanacacttgtgcttgagtgaaacaatagtcgtgagactgtggtttgagctactttccttgatatttgtcttatgattaacttcatctaattgtattgttcacattntgttctcctatttgtctagccgcatattctgtgaaaacaagtgataggtacacattgcttcatctttctcatcatgcaatcaataaatttttatgcatacacctttgtacataaacactgcatgttttaccacttgaggacaagtgag

SEQ ID NO: 7180 - DNA, 230 bp, Glycine max
  unsure (1)..(230): unsure at all n locations
ntaatggcccttaatttgaagcaatatttaacattcccataatgtattccctaacaattcccttgccttgatacttcattgaaatcaggntctgaaggagagtacttatttccaccttatcgctttttgcaaagcacttcttcaattcagcaaggaattcgttggcattaattatatcatatgaatcagtacccctaaagacctcaggaatgtcacacttaatgatcata

SEQ ID NO: 7181 - DNA, 243 bp, Glycine max
  unsure (1)..(243): unsure at all n locations
agcttgtgctattccaagttcatttaccatactattaaaccagattgcttccttcactccttcagctagggccatgtattctgcttcagtagttgaaagagtaacaactgattgttgtaccaaacanagtaaacacatatcctattaaaaatttccttgtgtctacatttcctgcaaaatctgcatctacatagcctgtgattgctgcctcatgtgctgtcttcttgaccttaatccagcttt

SEQ ID NO: 7182 - DNA, 482 bp, Glycine max
  unsure (1)..(482): unsure at all n locations
actggataccgcttcgcattgacggacacgattgaatactcacgcttatgcatggtggtgtcattgtcccacagtatggtccatacatatctgctgctgtcgcttgtcacaaccatgtattattattaagaggcacgcatgaagaaatgaaagaaactgtgcaggttccccaaatagaattttcagagcacccacagctctaccgattttcttttgcgagattcaccacacgattcttgctcttgacaaagaattttttcacgaaagagtacggttaagaaagataaaatgaggacacatgaacgtctcttctcttcatttttgatctggagacacgatctattcaatgtctatccaactttactcccccattatgacccccccaccaaacatgtcgaacatgcaacttctantgggagggcaagtcacttgcgcaaacaaaccaagacctacttccctctcaaagaagttacatcatccag

SEQ ID NO: 7183 - DNA, 305 bp, Glycine max
agcttgtaggattatggggtacccatcacatgtggtactaggtggcggtcgggcgatggtgcacaacaaattttccacatccacaaatcgcgcataaacccaccatcccctgttgcccacctccaactgaactcacgtactcccacgtagcccatatcctcgtttctctcaacaccgggtccccatcaatcctcccaagcttccccaacatccaagtaattcaacattcaaacaacacaaactatcacagccaagaaaacagggcaaaggcagaaaactcttgccaaaacaccaaccaaaatcac

SEQ ID NO: 7184 - DNA, 365 bp, Glycine max
acatccattgatcaaccattgaacacgtatatgagatcaaatatccttttcagagctatacttactaaaatctatagttgtccctcgtcaaggcggacgtggccattgtatgctctaagatctcgcatgacgctcgtgcctttcacttctgaccttcttgacatgatgtactgacatttctcatgacatcacctgtctgatgttgctcacctgtatgcatgctctacgaggagagactttatgcgctgctatgctttaccaggatgtcaagacatctcatgtgacatcagctctcccttgtctccatgctcttactgcagcatcttctatcaactactagtatcttacatcagtcatcatcagca

SEQ ID NO: 7185 - DNA, 181 bp, Glycine max
  unsure (1)..(181): unsure at all n locations
gagccaattaagacgacaatatctttttactcggatgactgattgagtcccgtcatatatcgagacgctcgaaattgaatgttgatgctctgagcaaattcaaacgacaataacttnttactcggatgtctgattcagtcccgtcacatattgagatgctccaaattgaatgttgaagctc

SEQ ID NO: 7186 - DNA, 451 bp, Glycine max
  unsure (1)..(451): unsure at all n locations
aagctaggcactaacaatctccctcgttggcaaatattgtctaaaacatacttagacacttcctgagcaggtacgagcagttatgcaagtgggatcagcaactttcattatcagagtaatcaagcacagcggaaattctgcaagttgcaagtcgtttccaggatgtcaagacatctcacatgacatcagctntctgcttctgctccccctgtctccatgctcttactgcagcatcttctatcagctactagtcttttccaggatgtcaagacatctcatgtgacatcagctntcccttgtctccatgctcttactgcagcatcttctatcagctactagtagcttacatcagtcatcatcagcagcagcagtctccccctcaaaatcatgtacatacaactccccctcaaaatcatgactcatgcatacatcgtatcctacttctctaaat

SEQ ID NO: 7187 - DNA, 450 bp, Glycine max
tggcggcatgcaagctccgaataatgaatagcataacagaatagtcttgcacgaatcccaaggctactatttaaaaatagtcactcaaagtcactaggccgtattacaatactctggcccaaaacgaaataaacattgaaccacataaaattgcaaaatttgctaattagaaaataactaaagtaagcgctgctttatttgccctctgcaagtccacaaccaaaatctggattaagcccaatgtttcattaattcctgaaattagattaaaaacatcaaatgagctaaatgagcccaaataataaaactgcctaattaattgacaattaagaccaatcagtaattaatatggtgcaaaaaggggttagaagatatgaaattctttcagatgtttgtgcggatcttcacctgctatgccatgaaagttaggaagcaaatggatcagtccag

SEQ ID NO: 7188 - DNA, 431 bp, Glycine max
tgttcctcagtcatccccatcaccagctccagtccttaaagacccagagccatctgcaccatcaccgatacctgattagcccattgtttaggatccacgagttgcaccggtgttggatcttaacgagaatgcagaggatcatttgcaggatgattgataggatctttattttcttgcattttgaatagttttatgattattctatttttagttcattttatgtctatgtttcagtttctttaaattttagttcaatttttaattgcaggttatagttatactttgtttggtagcttgtataaaagcatgattgaacagtacattgattatattgagaggtttgatgtctgatttgaaattcggtgtttgtgattggtgtgaatgaagcaattgtatgatttgagtggcttggaatgcgtacatcatatgcc

SEQ ID NO: 7189 - DNA, 432 bp, Glycine max
agcttggcatgttgctgtttaggttctgttggttttgtggaggaaattataaaaaaaaacagaggagagaagagagacaatacgtatacggaggaaatataattattctattctaatttaaattgttctcagcagcgatacaataaatagcaaaagataaattaattagataacacgatattagcacaatagaatattaaaactaacttgttccttaaggataagaatcatttattgactaagctaatccattaaaactgacttactcctaaaatataggaaattaacttatttactaaatcctattttaaaaactgaaaaataaaatatcatgtagttacaaaagtatatcttcaacacttcttcttgtttttggaactgcacactccaattctttgccttaagagttcaagtttgttgataggtagtgac

SEQ ID NO: 7190 - DNA, 274 bp, Glycine max
ctgtctacgttattctgagcgcacggagagactagcacgtatgttgtaatatgctgccgacactatgtgaagctgaagattgaggcattgatgcatcacttcccgcatcctgatcgacccgacatcaacgcacacacatatcggatgacactgatgagctctattctcagaggaatcaacataagtagatgtgtgagccatccgtccctctgactaggaaaacatgtggagcttgctaatccgagatcaataaactatcatgcataggctgatc

SEQ ID NO: 7191 - DNA, 448 bp, Glycine max
tgagcacgcttgcaagcctctccttactcacttgatcacgcaggatatgaaacttggtttcaatatgtttactcctgtcatgtgcctcacgatgcttagctaaatcaattgcttatttgttatccatcaacaacctcataggactgcaatttctcaagtttagttctcccattaaagcttccagccatagagcttgacaggccgccatagcagcagcaatatattcttcttcacatgttgacaaagcaactacactctgcttctttgagcaccaagagattggtgatgttccaaatttgaaaacatagccagtagtgcttttcctatcatccttatcaccacaccaatctgaatcactataaccaaacacttcttcttctatattcttttgactgtaaagacataaaattccaagatccaatgttccttgcacatacctcagaatcct

SEQ ID NO: 7192 - DNA, 376 bp, Glycine max
gacacatcctgaggatgtgtagttattatcatatcaataatgctaaattaggaacataacacccatttatttgtgaacatcacgagtcaatataataaaaacaagtatcaatagcaaaatgaagcattatatggctacctttagaaacactgtaatggcatgactggtgagaaagtgcttctacagagacaatagcgacaataatgaatcaagcaactcttgtaggatccaattgctaggtatgagacttgggtcctacattgaaagcatgggattctggtctagtgtttacaataaggccaattacaaaactaacttgtaatgtgattttgaagatgttcttctcaattggtatcacagcttttaaatatgtgtc

SEQ ID NO: 7193 - DNA, 564 bp, Glycine max
  unsure (1)..(564): unsure at all n locations
aggggnagagnnnnnaatgataccattgattccccgtgcattacgagactcatgctaatctcaagcttggacaaccgatggagaatgtcaactctgatcatgttttcggatatggtcgaacataatgtaacgttagaatgcactaggcgtgccctcgacgaccgaagcgatcaatgatgtgtgctattctgatactctcatcctacggcagagcgcgtcgttacctttctacttctcgacctctcttgatcacgaatgacgtgaacagtgatcatcatcgacactcacctatcttgatgttgcatcaccgggtgtgcatgcgtctacgaggggagacatctatcagcttctaggcctttaccaggatgtcaagacatctcatgtgacatcagctctcccttgtctccatgctcttactgcagcatcttctatcagctactagtatcttacatcagtcatcatcagcagcagcagtctcctcctcagaagcatgtacatactactccccgttaaaaggatgactactgcctgctttgngggcgaaactcgaaatactagagccat

SEQ ID NO: 7194 - DNA, 386 bp, Glycine max
  unsure (1)..(386): unsure at all n locations
agctntgtagcataggaactaaagttgtgagctttgggcatcctgtcctacagttactaacggaggagcaagagcggatgacgaagggatgtcctctgttctagctctttttcttgatgccatcagtaactaaaaagaactcaaaattccatagaccaaaattgttcaagttaaacaacaacaataaaggctaaaattaacaataggcgcttagcaggatatagctcgctcagcacaccctgagaaacataacatgtcggcttagctgaaggtaagctcgcttagcctaaaagttgccgtgatgaaatacgcttagctcaggtaaactccgcttagcgcgaggcttacaacacaaaattttctaagttactttggcttaacgattc

SEQ ID NO: 7195 - DNA, 224 bp, Glycine max
  unsure (1)..(224): unsure at all n locations
tctntgagaaaacttccttgagaagctagagcttagctacacacacccctctcataactaagctcacctccttgagaaacttccttaagaagattcctatagaatctagagcttagctacacatacctctctaatagctaagctcacctccttgagatgagaagctagagcttagctacacaccccctataatagctaagctcacccctatgactaaaaacatg

SEQ ID NO: 7196 - DNA, 426 bp, Glycine max
gcatgcgagctgcaggcttgcgagcttcgatgggaagagagacacccatcactagcacatatcctggtcttgaaagaggagctcgccgcttgctcgcggtacaacagaaacttgtctcaaagcttatgcaagcatatagaccaccttgttttccatcgtcagctagttccaagatgaattaagtctaccctcgatccacgagcatatagtggcacacgagtatgccctggagtacgcacaataggaggctagaggatgggtgattgactcgttaattcaagaggcaacaatgtggatggactgatttgctcttacctagatcgggagtcaagaacttccccgattgctatctaacgtcaaaggatggaggacacctacttctgtcccaaggagatgcacatacttatctgctatggcctgcatatg

SEQ ID NO: 7197 - DNA, 429 bp, Glycine max
  unsure (1)..(429): unsure at all n locations
tattaggacctataaaactcaagctggtaaccttccttgaacttgcatgctttctagcttatttcatttgtgctgcctaatggacatgcccatatctttgaaaatattgcatatcactttgaaaggttgttgattgatgcattgcttactcatctcacgatttgtgattgatacatttgaaacaaacacaattgtggttaaccacttgtgattccttttacttgaagataagtaaatcgttattttctttgcttaagggcaagcaaaactgtaaatttgggggagtttgttaattgcaattcattagttattattgtattgacaatttgcaagacaataacaacatgcctcaaatntatggttctttttgngcaaattggatatatattctttcttggatgattttatagagtagaaactccatttttg

SEQ ID NO: 7198 - DNA, 356 bp, Glycine max
  unsure (1)..(356): unsure at all n locations
agctntganaagtgttgtgtttcaccttctcgctaagccaattcgctggcttagcgagcgtccgctaagcgcaacactcattggctaagtgcaaggaagaatctggaagaagatgagttgtacatgtttgctaagcacaccgcttcatctcactaagcgcaccgcttcagtccatccgctaagcgagaaaggcacacgctaagccgaaattcactaatgtgcgctaagcggttcagaattgcgctaagtgcacgagcacgaacaaggccacctatttaagcctaaaattagattttgtgaagggagtttgggctgagaagctgaagcttgcatgtctagtgattctagagagagaa

SEQ ID NO: 7199 - DNA, 452 bp, Glycine max
  unsure (1)..(452): unsure at all n locations
ctattaggacactataaaactcagcttcttataagctgaaccatnttatcaataaacacaagttgagttntattcagaaaattagaggttatctcttttatcttagggaaagtgattctcctaaattcttgagtgattcaagaacaccctggttgtatcaaaggactttcacaacctttgggtggtgccctcgccggaaagagtgattctttccttcctttcatcttcaaccttggtctttcaaaccacaatttcagaaaatccacctctgcccagaattatctcgtggtcataactcccattttacacacttaaattaagtgattctggagcctaaattgaatttcaaaatgagacctttcacctcgttttggaatcacctcatttggagccctgtagcttcaggtattgccatttctatatttctgtccagacaccacttaacctacgtt

SEQ ID NO: 7200 - DNA, 431 bp, Glycine max
  unsure (1)..(431): unsure at all n locations
agctntacagcagattttagtaatgacccactaacctagaattaaaataacttaatgccattaacctagggaattaaaaaaacttaatggttgggtgtaactgaaattgtggcaaccaaaagtcacccccaacagccaacaagtcagccaccatttggtctcccaaaaggatgatgcctaggttgccaattgggcccttattacaacttgaactaaacctaactaaagcccttttagttgattaacccaaaacatatttttggtcagccaactttacaaggattgggccattatttagacaaactaaacactctacaaatgaaacaaagtggcgtcatttagtcctcctccatttgggccatgatacaactcacaaccttggactttcttctccttgagacttgggctagtattcaaacagtatggacagc

SEQ ID NO: 7201 - DNA, 397 bp, Glycine max
gtaagctgagcacatttatcaataaacacaagtggagttgtagacagaacagtagagtatatctcttttatcttagtgagagtgattctcctatattcttgagtgagtcaagaacaccctggctgtatcaaaggactatcacaacctttgtgtgttgccctcgctggaaagagcgacacttttcttccattcatctacacccttgctctttcacaccacaattccagaaaatccacctctgcccagaattatctcgtggccataactcccgttttacgcactcaaattaagtgattcttgagcctgcattgaatttcaaaacgagacctttcacctgcgtttggaatcacctcatttggagccctgtagcttcagttatcgccatttctatatttct

SEQ ID NO: 7202 - DNA, 270 bp, Glycine max
agcttgagaaacattaatagaattatatttgactatatttcaagtacacatttaacatttttttctctaaaattaaacttaatgggcttctagagcaaaagagagtttttcaacttcaaccaaataaagaaacttcaaagcattgttctttgtttgtggtaactttaattacaaagcatacacatatataattaattttcaattaagaaaaatcaaattacctcttcaaacaatgtaacatataagataaaacaaaccacaaaaaattat

SEQ ID NO: 7203 - DNA, 438 bp, Glycine max
gctgaggcacagcatacctctctaatagctaagtttcaccttcttattatgacaagctagagcgttactacgcaccccctataatagctatgctcgcctatatgccaggaaacatgaggatgcagatgaagttcctactacagagactactacacgatgcctctaaatacgcggatcgatccctatactactataatgaccaaaagacaacgcccaaacgaaggacaatacctgtgctcatatcgactaagatttgcggtatcatacttagcccaagggctgaaaatctaccctagggctcatgagaaccctagggccgtaccttggatctctagcccaatctactcggagtcttcgatccaatgcacatacggggtaggattgcatctatatcttacttaggatgcgcagagagtcgtcgttattctctaatgaccc

SEQ ID NO: 7204 - DNA, 488 bp, Glycine max
  unsure (1)..(488): unsure at all n locations
aaattgatcgcaatgcatntancttagattacanttgctatctacgtgacactatagactactatgctatcaaattgacaactaaccggatgtagattgacaaacgtatagncacgaatgaccagcggcggaaaacgttcatggaattgatcacgttatcaatacagcagagcctcggatgacattttctcctcatacttcttggactcctaaataagtgaattttaatacccaaagtagccaacacacttcctcttatacttaaactgccatttatagcacaaatgaaggagaggctgccgcccagctagtctacgcgagctgngtagcttcctacctgagcatgctacctacagaatattgcatatgggcccactgctacggtcatgctatgcgtcattgatgactactattgtattgagaagcttgtagaaaaactgattgttccccaatatattggctgttatagaccgattgacctacttttg

SEQ ID NO: 7205 - DNA, 437 bp, Glycine max
ccatgcaagctcatgcacggaaaatgtaattatgaaattgagatgcccgaagaaacaccatttcctagttaaccatgcattaggtaccatgttcaattattttgtttttaagtgaaacgggtttatgatcccaacatggttggctcctaacacatgaaactaagaatgtagtgtgaagtttcacgcttcccccttctttgtttttgttttgtagaggaaaacgcaaggatgagcaaacatgaaaacaaatggtatgcaattttgcagatcaaaaagtttgttgaacgcatatgcatgatgatgccatgactcatgcaaaatgtgaggctggaatatgataacggacaaatgcaggatatgtccattatgatgttatgaagagatgcttatgcgatgcatgatatgaatgcattttacggacacgagagcccggaaaa

SEQ ID NO: 7206 - DNA, 285 bp, Glycine max
acttttcactcggaggtccgattcatgcgcataatatatgatgacgctcgaatttcacaacggaggctctcgagaaattcaaatggacataactttgaactcggatgtccgatttaggcgcatcacatatcgagactctcgatattgaacaatagaagctctcgagaaattcaaatggtcataacttttaactcagatgttcgattcaggcgcataatatatcgagacgctctaatttgaacaaaggaagctctcgagaaatgcaaatggtcataacatttaact

SEQ ID NO: 7207 - DNA, 435 bp, Glycine max
  unsure (1)..(435): unsure at all n locations
agctntacagcagattntagtaatgacccactaacctagaattaaaataacttaatgccattaacctagggaattaaaaaaaacttaatggctgagtgtaactgaaattgtggcaaccaaaagtcacccccaatagccaacaagtcatccaccatttggtctcccaaaaggctgatgcctaggttgccaattgggcccttattacaacttgaactaaacctaactaaagcccttttagttgattaacccaaaacatatttttggtcagccaactttacaaggattgggccattatttagacagactaaacactctaaaattgaaacaaagtggtgtcatttagtcctcctccatttgggccatgatacaactcacaaccttggacttttctccttgaaacttgggcttgtattcaaatagtatggacagcacttg

SEQ ID NO: 7208 - DNA, 347 bp, Glycine max
  unsure (1)..(347): unsure at all n locations
ctctagctagagatgaggaagtgctgaagggcgacacttcctgctgttattgctgaccacatagtggtacctgtagatatgtcgcatgggtcacgagaccttgaggacgtcacgtggggtgctattgcccaaaaccaatcttgaccaatcccgacccaacacgggcatagtcggtcagtgagaacctgngatgtacctaagcacgcgagctcctgtctttcaacagataatatgaaaacttgaccacaaagcaaggaggcttgtggtggctggccagctgtgaattntgtgtaatatgtggattgaggcctctggtaatcaattactaacggtgggtaatcgattac

SEQ ID NO: 7209 - DNA, 433 bp, Glycine max
  unsure (1)..(433): unsure at all n locations
agcttagttacacatacctctctaatagctaagttcacctccttaagatgagaagctagagcttagctacacaccccctataatagctaagctcacccatatgccaaaaaacatgaaaatacaaaaaaagttcctactacaaagactactcaaaatgccccgaaatacaaggctaaaaccctatactactagaatgaccaaaatacaaggcccaaacgaaggaaaaacctattctaatatttacaaagataagcgggttcatacttagcccatgggctcaaaatctaccctaaggctcatgagaaccctatggccttcccttggatctctagcccaatctacttggagtcttctatccaatgcccttacggngtaggattgcatctatatcttcctttggatntgcaaagagtcgtcattattctataatgac

SEQ ID NO: 7210 - DNA, 434 bp, Glycine max
tacctattatcaatgattatatcatttgcacccatctttgagctaaattagaattgtattgaccggtgagccttgagttgtaattcctatttaccttgcttaggttttaagagagcacattggtttaggacaatttcaccccaaatttgggggagtctgttaaatggttagtgtttaaaggtaagaaacaacaacacacacaacatataactaaataacaatttaatagaaaaaaaaaagagaagaagaaaagagttcaaataagtgtgtgttgttagaacaagtcaagtgaaaggctaatgagcaagctaagtatatttaaaagactaattggttaagtctaggatttatgctctcttagaatttaagcctttgaattctagaaaaaccaatacttttgtagcccagcctcattacaagccaataaaagtcct

SEQ ID NO: 7211 - DNA, 236 bp, Glycine max
gtaacgcttgttgtaaccttgatgaatgagagtcttgtgagacatacttcaaagttccactcctctccctcttttattccttcaattatgtgctcccccctctctctttctctccctctttctattcctccattgaagcattctttctagctttttatccaaggctcatcttggtggagaagcttcttcttccatggcttattccctagtggatggcgcctcctctcacctcatat

SEQ ID NO: 7212 - DNA, 335 bp, Glycine max
agcttctaccacgttatgaccaatttcatacatgtggaactgactccactactctcaccacccttatatagcttgtaagttattgttcttaagcctcgatgcttttgggtttttatcagatagctttgtctgcccttcccgtgtcagtcagagtgggtgtgacgctttatttcttgatcaggctcttactcgaagtatttgcagtacaatgctccttacatctcatgtagctctaaggataaagagttgtactgacagggcttggtctaccaaaacatatcatatgaccacgtatatttttagtagaacatctgctgagcttaacaatgctccat

SEQ ID NO: 7213 - DNA, 435 bp, Glycine max
agcttgagaggattgatggggacccggtgttgatagaaacgaggatatgggctacgtgggagtacgtgagctcagttggaggtgggcaacaggggatggtgggtttatgcgcgcattgtggatgaggaaagcttgttgtgcaccatcgcccgaccgccacctagtaccacatgtgatgggtaccccataatcctacaagcttgagatgaggaagtgttgaagggtgaaacttcctgcttttattgttgaccacagagtggtacctggagatatgtcgcgggggtcaggagaccttggggacgtcaggtggggtgctattgcccaaaaccaagcttgaccaatcccgacccaacccgggcatagtcggtcagtgagaacctgtgatgtacctaagcaggcgagctcctggcagtcaacagataaaaggaaaacaag

SEQ ID NO: 7214 - DNA, 540 bp, Glycine max
  unsure (1)..(540): unsure at all n locations
atgatccatctattacgtgcctctctgactcagctgtcactatatacacttcggcttagctggtgacaccgaggaccgactctcgcttatagtactttcacgaaagtggagtgatctggcccatgcttcatcactactcggtagcaaatatcaatatgtgctctctaacatcattacacgtctcgatagattcatatatcgctgcaacgatcacagattgntcagatacctccaaatatcatcaacgcgcagctctcccaattttcgaatgctcataatgatccactcggatgtcatgatgcctcactaatctatgagatgacctatctatctcacgatcaaatgcgttgtagatatatggattgcctctacttatacactacattcagcatgcacataactagttgccttgtcatgtatataaaggagcaccgttgaactacaactaccctcaaatgatatccacatgacttgaaattctgtgagcaacgcgtattacatgatgagacgatagcacattaacttttagaccataattcn

SEQ ID NO: 7215 - DNA, 306 bp, Glycine max
agcttggatgaagcatccttttagtcaataataatacatggaagtgcagttgatacaccctgtctatcaagaaaacgatcgagttcaatcttataaacaaacactagtgaaaaattgaatttaaactttatcttattctttaggtatatttcacttttattcaaagtctaagtttcgagaacatgctgtaaaaataaaaatccataacaaaaaaacatttaatagtcaaatttattcagcaaaatgtttgaaattattttccaaaaactaaaaaaaatggtatacctttttgggggttaaaaaaag

SEQ ID NO: 7216 - DNA, 296 bp, Glycine max
tataactcataaataaaaaatgcgctccacaaaaaaccatcggttgcaagacaactcatgaatgttggcgaaatcatgaagtattgctacaaagataacattgccaaagagctggaataaccatcagcctaaaaaaatttatggcaagcaaagcaagttccgaccttcttaagaactacatttggaagcttcaaaccaacaatattggagacacagttatttaaactgtaaaactaagtccactgcttctgggacacagacaatgcatctggtacttcactggggtcaatgcatct

SEQ ID NO: 7217 - DNA, 422 bp, Glycine max
agcttacccttctggttttaagtgctaagtaactagcatttttgaaccatttgctaacctgcattttctaacacattagtaacagagtttgaacaggtcaagagctgactgacttgaataaagaccaaaagcaatgcaagtaacttgcagatggagatagtacaaaatttgctgtttaatacataatgtttaacaaaggtaacactactacaagacaaattcagaatttcagattaatgtagaaacaagatgcaactagagactgcaaggcataaccttttcaggatctagtcccaactctttcgaaagactgtccttcacagatcttggaggaagctcattctctgcaaaagcttggcgaagtttctggcatatttcatcaaaaaaaattaaaagacacaaattagtgcgtgtataattat

SEQ ID NO: 7218 - DNA, 331 bp, Glycine max
ctagtagccagccactaactctagatatatgtggtttaagattttaatgtaatacgaacctaaatctgaagataattgtgtttaaagaaaaatgttctatttatcttgtactctgttactatcctcaatgaagattagtcaacatttcaaatgcaaattatttcatactaatatcatagcaaaactatatatatatatatatatatatatatatatatatatatatatatatataatttactcatttttaaaagaaagacatatattatatatatatatatatatataagagaacacttagtcttataactcgacatattctctctctcaa

SEQ ID NO: 7219 - DNA, 424 bp, Glycine max
agcttctgttatcaattatgagcagctacatatattgcgggtatcgagctgacctccgcaccacactatattagcttaggacacctgtgtgtccatttacatgcatctacaattattagttgtcctactcggacttctcaaaatgcccctatagacaggggtattaccctacactactagaatgacctatagacagtgcccaaacaaaggaagaacctattctactatttacaaagataggcggtgtcatacttatcccatgggctctaaagctaccctatggctcatgataaccctatggcctgaccttggatctctatcccagtctacttggagtcttctatccaatgcccttacggtgcaggattgcatctatatcttccttgggatctgcaaagagtcgtcattattctttagtgaccct

SEQ ID NO: 7220 - DNA, 429 bp, Glycine max
atctcatgagtcctaaatgacatgtggacttgtatttactcactctaacctctaaatactaccaagtccagatttggccttccagccctaagaaatttactctttttccactcctaacaccacattctcactttctaaccctaggataggtgtacccttcatctctaacagttttccataagcaatttcagtacatgaacatcacaagcatcatcataaaaaccctaaaacagaatgggtatgtttaactcatccaaacatggcaatttcaacaagctttcaacaagagtcttcacaaataactatcatgaagcagagaactaacaaaactacccatcacatctcccaaaaccccataccacgaaaatcaaaggagaaagaagtccgcccaacacctgaaattcgaagtcccactcgtagacacgcact

SEQ ID NO: 7221 - DNA, 270 bp, Glycine max
cacctcctgcatgcaagcttctctttgagacaagcaaaggcttgctctcgtttttcaccccatgtaaatgccacattcttcttcactacctcattgagaggtgatgcttttgtacagaaattaagaacgaaccttctatagaagctggctaaaccatggaagctcctaatatctcccacattttttggggtgggccattcttgcatggacttgatcttcttagggtccaattggacgccatttttaccagctacacaccctaagaaatac

SEQ ID NO: 7222 - DNA, 414 bp, Glycine max
  unsure (1)..(414): unsure at all n locations
tataatgagttntgtttagaataggtcttataagtaccttgtttaaagtatagcaaatagtactcacacaatcaactcaaaagtactttggtagcgttgtttcatttagaagagttctagctccttcttcaagggatctatttttcctctccacaacaccattttgttgaggtgttctagggatggaaaagttgtggtgaattccattttcttcacaaaacatttcaaaatactcattttgaaattcacctccatggccacttctaattgaaacaatattaagacctttctgattttgaataactttggaacgtttgcgaaaagcatcaaaagcttcattttttgttttcaaaaacaaattccaagtgaaccttgaataatcatctattattaccaagcccaaactcatagttc

SEQ ID NO: 7223 - DNA, 428 bp, Glycine max
  unsure (1)..(428): unsure at all n locations
agcttaaaggaagtgaacgaattagcatgggcataaatgtctccgcattgattggtaaatctgttccccaaattcctgaaaaatgtaaagatccaggtacattcagcataccttgtattatagggaatagtaagttcgagaatgccatgctagatttacgagcttctgttagcgttatgcctctgtctagttataattctctatctctaggtcccttgcagtcaactgatgcggcaattcatttagctaatagaagtgttgcctatcctgttggtttcatagaagatgtcttagttagagttggtgaactgattctccctgttgattnttatattttgaatatggaagatggattgtctcaaggatcagttcccatcattctaggtagaccctttatgagaactgctagaactaagatagatgtttat

SEQ ID NO: 7224 - DNA, 299 bp, Glycine max
atggtcatagcttgtcacacggaggaccgattcatgcgcgtaatatatccagatgttcgtgactgaacaacatatgctctcgagaaattcaaatggtcataacttttcactctgatgtccaattcatgcgcatcacatatctagatgctcgaaattcatcaaccgaagctctatcgaaatgcgaatggtcataagtattcactcggatgtcaaaatcacgcgcatcacatatcgagacgctctaaattgaacaacggatgctctcgagatattcaaatggtcataacttttcactctca

SEQ ID NO: 7225 - DNA, 366 bp, Glycine max
acattcgctcattgatttttagttttacaataaatgactttgacctcaccttctctctgtgcttcccttaaaaaaaaacaacttgatcttgaaatgcttagtcctgccatgaaaaacaggattatttgaaatggaaataactgtttgattatcaacaaagaatttgtgtaggctccttttgttccatatgtaaatcaacaagtatacgccttatccaaatagcttgattcacaactgcagtgactgccacatattctgcctcaactgtgctatgagccactatgtcttacttttttgaactcaaagaaaacatacccgaaccaaagttgaaacaataacctgttgtacttttcatatcatcaattg

SEQ ID NO: 7226 - DNA, 219 bp, Glycine max
taagcttataccttcctactcagggtagggacagattgctgggttatcacctgcaatatgaagataaatttgattaacgacaaatgagaatggttctgatgtattcagttactagccttaatgaagatcaatcgacgtttcatatgctaccaattgcgtacttctctaatatgaaatctatatgtctagatatctctatatatatctatgtatatgtat

SEQ ID NO: 7227 - DNA, 455 bp, Glycine max
tctcttacccgcgatcctcagagtcgatgagaccatgcaagccctatagacactgtaattggcgataaactttataatggaaaaagatcgtgttaatagtatttttttaagataaagaaattttatcacgaaaaaattttatataacaaaggagacatctctatctatcaatcaaccagtgaaaattatttttggggtttactgcatttcattgggttggatgggatacaatagtatacgggctaacttcttcattgatactgtgacctgccaatgatacttatctcttgatgacatacatgtatcagttgctgaatacataaacttggatgtggggctccctctaatgaccactatattatatgaaaaggaggaaatcccataaccactactatagttgttgacatagagacaatagactcaagacaagctgcaacctgtgtcttgactacaca

SEQ ID NO: 7228 - DNA, 477 bp, Glycine max
  unsure (1)..(477): unsure at all n locations
ntgaaccattgaanaccgtgganacccatgcattaggcgacactatagcacactcaagctggtaagcattcaactgcagtgcgtttacacaattctaacatactcatcaacactatatcgtagtgatccggaggccaatatatgaactgttgttttgcccttctgtaatgtaagaacacccattctaccatatgcattggatctcaaacggaaatgtggatgcagataacgacagcatctactattcgaagagacaactcgttttgacattagaaaccttcgctgaaatggtgtctctatgtatacataaggtggataagagtagacattcatcagacaactcatgtgggctgcacgatagcgattcctactcatcttgatctataggtcgaaagataggnctagaaagagatgcacctggcgtaagtatggacgagatcttcaacgtggacaatgaagggttcatgagcaatcctn

SEQ ID NO: 7229 - DNA, 434 bp, Glycine max
agcttcttgtcttgaataaaccaggggcttcatattcaagtatttacctcttccttccagacctctcagccttcacatagcttctccttttgggagaccctgtcatgatccattttgcacgaggaggtgtgatggtaatggttgcttcagaatctaacctagaggaaatatggatagtcttggccttgcccttgttttggtttttaggatatggtgactgagaagtctcactatccaaaagtggatgagtttgaagggtttttgattgaaaaagttttggttcttgccatttcttagaaaaggtctcaagaatacaagaacaaaaacgagggaaaaaagtgtttaaagagaaagagagagagagagaaagagaaagacagaaagatagataggtaagtctaaaaaccagtttcacagtttccctttatatagca

SEQ ID NO: 7230 - DNA, 422 bp, Glycine max
  unsure (1)..(422): unsure at all n locations
tactcaagcttatgctgcanacatctacaacagacctccccaacctcagcagcaaaatcaaccacaacagaacaattatgacctctccagcaacaggtacaatcccaggtggaggaatcatcccaaccttagatggtcgaatccttcacaacagcagcaacaacaaccttattttcaaaatgctgctggcccaagcagaccatatgttcctccaccaatccagcagcaacaacaacaacagccccagaaacaacaaacaattgaggctcctccacaaccttcccttgaagaacttgtgaggcaaatgactatgcaaaacatgcaatttcatcaagagaccagagcctccattcagagcttaactaatcagatgggacaattggctacacagttaaatcaacaacagtcccagaattctgaca

SEQ ID NO: 7231 - DNA, 433 bp, Glycine max
  unsure (1)..(433): unsure at all n locations
agcttaaactntnttgaccatgtatttacagggaaaaaggctttgagttcagcaagtcatcgtaaaattgatgatgatgatgataacttagacgagtttcttgaggggatgttttcgtgatcctagctaatttgattgtggtaacaaaaggattcatcaaaagagttaagaaaaactcctattgagttcttgtatttgagatactctaaaattgaactaagctaaaataaacatgtagtatttaacttaaacttatcatattttttatattaaattctcaaattaagtaatgccacatgatatcttttttacatttacaacaacaagttgatatgagatctatttagaacaagttgcagaatttcaagaaaacatttacaaacatatatatttgatatgagatcttactgacaagaataaaagaaactaatta

SEQ ID NO: 7232 - DNA, 344 bp, Glycine max
aggatttccttttagtagggaatctatccttcctaagatggagccaaacccagtcaccctcattaagaactagctcttttcttcctctattgcctttagttgaatacacctttgtttggttctctatttggttcttaaccctctcatgcatcttctttacaaattctgacctagattccctttctttatgtataaaagaagtgtccagtgggaggggaatgaggtctaacggtgttaggggattgaacccatagacaacctcaaaaggggactgcttggtggttctatgaacccccctgttgtaggaaaattctacatgaggaagatactcatcccaagactta

SEQ ID NO: 7233 - DNA, 401 bp, Glycine max
tgagcacccttgcaagctcctatagacactgtaattgggtttaaactttataatggaaaaaatcgttgttaatattattcttttaagataaagaaattttagccggaaaaattgttcatataagaaaggacacatctctatctatcaatcagccagtgaaaattatttgtgtgggtcactgcatttcatagggttggaaggaatacaaaagtattctcgtaacttcttcattgatattgtgacttgagaatgaacctatctcttggattacatacatggatcaggtgctgaatacataaactgggaagtgccactccctctaatgaccactatattatatgaaaagctggaaatcccattaccactaccacagctgctgaaagagagaaaatttatgcaag

SEQ ID NO: 7234 - DNA, 422 bp, Glycine max
gaccaactggtaacgtcaatcctatgactgggagacaatcaggcccccacaaagaaaagttccatagttatttggggcaagaaaaaaatcctattgttcactccaattggaatgttgtcccagaatctctaaagaacctaatatgggatgacattttggtaagtgcatttaagtacacatatgtattcgattttctttaattaacttcaaaatatgatcattcactaactgttagatgacaattttgatttggagggaaagttttgatgtcaacggtcgccactagatggaggcaatttaagtcttccctcatgacaaaatatgtttatgctgacaatgagggtcaacaaaaagatgatccttctgttaaatatggtcttgatccaacaacttggggccaaattgcaaaaatccggtaaaac

SEQ ID NO: 7235 - DNA, 383 bp, Glycine max
agcttgtatagaaagcttactgttgccatattattataccctgagggtaccctcgacacctactgaatacaaccttctagggactctggaggcagaacattattatttaacgagcaactggttacctataaataaaataataaacggtgaaaggctgacgtggacgtcattgtgtcccaacccctgcttatatatactctatgtaagccctcactatgcactgtctattaatactctactgaaactcgtattagacaattaaattactcgctgtaaactaatactaagataagtggaccatggctagctatgtgcctagcgactctatgactccttggattacagtgtcagaccacattcaacctcaattcacaaattatatt

SEQ ID NO: 7236 - DNA, 402 bp, Glycine max
  unsure (1)..(402): unsure at all n locations
ctcttgtcgcaagctcatacaggaggcgaagctacctcatccatggcaaacaccccagcggaaggagcctgaactcaccagttacccgttgcaaattgtttaaacggcatggcgcaaacacaccacggaaggacctcacagaaaccgaaagatccaaccaccatagaagccaacgccgcgagcccacaccaaaataatcacatcacaagagctgcagcaagtgctacataaaccataacgaagtccctaggaaacacacactgcagccgcgcgcaacattcctagacaaccnggagacgcatgcttgcgcaacatgtgaacacgagacccagagctcaacaaaacacagatgtcaaaggccacaaggatccatgaaaaatgcgcgacctgactcaacaaaaa

SEQ ID NO: 7237 - DNA, 388 bp, Glycine max
ttctagacgcatgcaagctcctgacaataggacaaagaagaaaattcttcagactgtcggcgagcggtggaggcagtttaaatctgacttgactaggaaatgggcacttgcagccgacaaggacgatgtggacgacattgtctgtgaaaaatacggcaataggaagaagaaatgggcctagttttgtcagacccgcagatacccctcgtgggagatatgtactttttcattttagttgttttccacaaaaaaattagttcttataattcattgtagtaattattttcattaatgttcgatttttgcagaatgtgcggaaaaaggcataggccatccaaaagcaaaacactggcccccacgtgttgtctcgtgggggttatgaaatatt

SEQ ID NO: 7238 - DNA, 275 bp, Glycine max
  unsure (1)..(275): unsure at all n locations
tcttctctgtccgtggcttattattagatggcgcctcttctgacctattctactttatcttccactgcgactacatggctgagaatcaccattgaatgacctcatcgaagcttatagatccagcctcatagaagcttcgtaagcgagcttgcatcaagtggtatcagagcacaagaacttcaagtaggttgctccttaaacctccattaattcttagctctaccttctcctccattggtggatcttcattntctgcatgcatctcctcacatgtc

SEQ ID NO: 7239 - DNA, 427 bp, Glycine max
  unsure (1)..(427): unsure at all n locations
agctntgagccaaaatcctgactcaccataaaccttgacccagggtgagaatgtcaatccttaccctcagaagcaaaaaaagggagagggaaaatttccaatcaaagagaaagcaaaaaaggaaagaaggaaaatttccaatcaaaagaaaaaagagaggaaaggaaattcccaatcaaagaatgggagaaagcaaaaagaaaagaaagaaaattcccaatcaaagaatgggagaaagaaaaaagagaaggagaagaaggaaagaaagctcctgatcaaggatcgaaagaaaacagaagaaatgtgcagagaggtctctggaccaaacaatatctgaacaaatacggaattgtcaccaaatgaacaaaagaaagaaaaggagaccctaacctaaaagtggtcttctccctttgattaccaaccaaaa

SEQ ID NO: 7240 - DNA, 417 bp, Glycine max
tccacaacatccaagtaatacaacatttaaacagcacaagctatcacagcaaaatttttctgcacttgagcaaaattgtgctgcacaatttcacagcattaatctgcacaaagtgcagatttcgaaaaccacacttcccctcatcaaatcttgcccaaatcaaatcctacaagtcccaaatcatgtatcaatcatgtctaaaccaaagccaagcttcaaaccacagcaacacaaaatctaggtgtccaaaacccctcaatttaatagattttctaggctttagaagtgaaattgagaatgaggtaaatttgaagcagactctcacctcacacaagtccataacatcaatctaaacttgctcaaacttgaattacacctaaaactccaccgaatcaaaatttgactcctcaacaccca

SEQ ID NO: 7241 - DNA, 442 bp, Glycine max
cacctccacgcatgcaagcttatgcactagtccaaagagaagatttgatgcaatctgtgatgatggtatttgaatatatagcatcaagaggtgctatgctctcaaggagggggcataaacctcaacatcgattatctcttcaaataacttcaaatggcacgccaactaccaaatctcaatcacaatggagaaggagaaggatgcatacattgtggaaatatgaaacataccaaagaaacatgtttcaaactacatggatatccagattggtggcatgaactcaacgaaaagaaaaaacgtgaatcaagtggaggaaacaattctggccgcgttgcccttgtgagcgtaaagcctaaactatctcttatcacacaacaacaatcacttggtggtcatgcttctcaaaacaatccacgcaaccaatgttcttcttattcatgct

SEQ ID NO: 7242 - DNA, 400 bp, Glycine max
tggtacatatagtctgaatctcggatcctgttaatgacttattctaaacacttgttggctgatcattagaaccaacgaactgagtgacaaacaattatttattgaagctgctctcgaataagatgacaaccaatctctatatgcctggtcctctcatggaagactcgggttgcggcaatatgaagagcagactgagtatcacaatacaacttcatttgcaaactcttcacaaaacttcaatacttgcagataatgtctgatccacatgagctcacatgtaaccatagccatagatcgacactcagcttctgcactagaccgagcaacaaccgttggtttcttgctttcccaagagaatacattttctccaatgaagacacaatcacttgatgagatcttc

SEQ ID NO: 7243 - DNA, 408 bp, Glycine max
cagtgcaagctgtggcatgcactcgtagcttctacataagcgtcacacaggattggaggagaagttgatattatattctaatgacacttggatttgaaacttgaatttgtgtgttcctatttatggagccacatctctacttatcatgattacagagtattagatatgggtgagccaacgcatccaatagcgagggctggattccacactaagtgtgcttaagctgcatgatgattgagaagaatgaaagacatgcactcagtgtgactatatgaagtggcaatagggtgaaccagcaaatgctcacccggccccctttaaagccactgattgtgctctcccagtacatcaattcatctccacacacgcgtaaataaacttaatgcatgagaagtaaaacctgcctgt

SEQ ID NO: 7244 - DNA, 393 bp, Glycine max
  unsure (1)..(393): unsure at all n locations
tcttatccaaggctcatcttgcgggtgaagctccttcttccatggcttattccctagaggatggtgcctcctctcacctcttctcctttgtcttctgctttatctccatggnggaaaatcaccattaaaggacctcattgaagctcaaagatccagcctccatagaagccccacaagcaagtttccatcaagtggtaatcagagcacaagagcttcaactaggtgctccataaacctccattaattttttttggtttaccttctcttccattgttgattcttcattatttcctccatgtatctcgtcacatgtctagtgctaaattcttttaacatgattctttagaagttccaccaattaaactggctatataagctagatttgatntctat

SEQ ID NO: 7245 - DNA, 423 bp, Glycine max
agccttgcagaattggtcttcgccagtgaaaggatcaatgtgggtccgaaaataggcaaatttgatcatcctactaggacgactgatataactggggcaaatgaagagggtgacgatgagggagaaacccatgctgtgactgccattcctgtacggccaagtttcccaccaacccaacaatgtcattactcaacccttctccttacctaccgcccatttatccacaaaggccatccctaaatcaaccacaaagtctgtctaccgcacttccaatgacgaacaccacctttagcacaaaccaaaaacaccaaccaagaaatgaattttgcagcgagaaagtctgtagaattcaccccaattccagtgtcctatgctgacttgctcccatatctacttgataattcaatggtagccataacccta

SEQ ID NO: 7246 - DNA, 426 bp, Glycine max
tatgttgcaaacatctacaatagacctcctcaacctcagcagcaaaatcaaccacaacagaacaattatgacctctccagcaacaggtacaatctctttatgaggaagtatcccaaccttagatggtcgagtcgttcacaacaccagcaacaacaacagccttattttcagaatgctgttggcccaagcagaccatacgttcctccaccaatccagcagcaacaacaacaacaacaaaaacaacagccccagaaacaacaaacagttgaggcccctccgcaaccttcccttgaagaacttgtgagacagatgactatgcaaaacatgtagtttcaacatgagaccagagcctccattcagagcttaactaatcagattggaccaatggctacacagttaaatcaacaacagtcctcgaattctgac

SEQ ID NO: 7247 - DNA, 377 bp, Glycine max
cgcttggtgacgatcgaagcttataggtcattatcgtgtggagtcacgaggttcagcttagtttatatggacaactagtctcgggaaaggtaattgcttctggtttggatgaagagcttgccaaggaagccaaaagagctggtatatacttgagtcgttgattatctctcctccatacaagcattttcagggcacaatgttctttgctaaagtgctattcacttatgccatttttgccagtttctgtctgaaaacataggttagcacaggaggtagcatccatgctacaattgagtgttgagattgataccggctcatctgagaggttagtttatttgtctccagtaattctcaccacaactaaaataaaatatctt

SEQ ID NO: 7248 - DNA, 250 bp, Glycine max
ctcttttacactgtattacctttgaatagcaagagcagttgccacaatgcatgacctcagccccacttattgatccattctggcattatattgtagacgtcctacgcctattgatatcttaatagcttcagcttgacttcagtttgtaaagcatacacctagcatacatatccaatctttaattaaccagcatgagtcatagcagttgagtacgagaccaatataaatgctgcataatgaccataattca

SEQ ID NO: 7249 - DNA, 475 bp, Glycine max
  unsure (1)..(475): unsure at all n locations
atgaaccatccatgacgcatgaanaaccgatgataccatgaagcccagcntncattagagcgctgaggtatttacggaacgtttttgctgtgacgacgtattctaatagacggcagactagggcacccagcctaaagggagctctctgagctccactccgtacgcgactcctccggtcggatattccagcacgacgaggtacttcccttcgatgccgttgccagagataaccccgctcccaatgacgcacgaaggatcttctaccatccattcacgtccatcattcggcggnggtgactaccggaggggtccctgaaccccctataccgaagtggagtgaccctaatgcacgttgcatgtatcatggtggtgcccaggggcnttccatcgataaatgcttggcccttaaatacaatgtccaacatctaacggatgccggatggctgactttccaagatgatcggacaatgtgacg

SEQ ID NO: 7250 - DNA, 258 bp, Glycine max
  unsure (1)..(258): unsure at all n locations
tgttgtcattaaatcttacatgaattgcctcttccatagtcaaggtttgtgatntgtacactctatatgccttggatgattcaaagtatatctatattccgaatcacattttgagtcaaactttccaaggatatccttggtgctgaagatgaaacactggcatacaaatgggtgaaagtcagaaatgttgggcttatgtccctcccacaattcataggaagtcttttttaagattgaccttatataaattatgttctg

SEQ ID NO: 7251 - DNA, 217 bp, Glycine max
gaaatttgtcatttcatcttctttctttcttgcaaatccatatctaaagtttcaagtactttctccatcacccacatccaccattagccaccacaaaccatcattgttctccattgaaaacccacaccgagaggagacccttaatcgaagcagagtttcccacttggcttgcggtttctgtagagaacgaaaaccctaatctaaactttcgtttttt

SEQ ID NO: 7252 - DNA, 158 bp, Glycine max
tgttggagtagaaacatgggaccaactcatgttatttcaaaaaagaagtcgtatccagtcaaggtctgagagaccatacaagttacctatttatgtctaattatgcgggccattaagtctatcatatgctgacaatagccgagaagcccatgaatctc

SEQ ID NO: 7253 - DNA, 430 bp, Glycine max
agcttaaacattcaatttcgagcgtctcgttatattacgggactcaatcagacatccgagtaattacttattgtcgtatgaattggctcaaagcttaaacattcaactttgagcgtctcgatatattacgggactcaatcagacatccgagtaaaaagttattgccgtttgaattggctcagaggttcaacattcaatctcgagcgtctcgatatattacgggactcaatcagacatccgagtaaaaagttattgtcgtttgagttggctcagaggttcaacattcaatttcgagcgtcccgatatattacgtgactgaatcggacatccgagtgaaaagttattgtcgtttgaattggctcagagcttcaacattcaatttcgagcgcctcgatatattacgggactcaatcagacatccgagtaaaaa

SEQ ID NO: 7254 - DNA, 334 bp, Glycine max
atgagccaattctaacgataataacttattactcggatgtccgattgagtctcgtaatatatcgacacgctcgaaattgaatgttgaagctctaagcctattcattattaaataacgttttactcggatgtccgattcagtgacgtaatatatcgggacgctaggaactgaatgttgaacctctgagccaactcgaacgacaataaatttttactcggatgtctgattgagtcccgaaatatatcgagacgctcgaaattgaatgttgaagctctgagccaatgcacacgacaataactatttactcggatgtctggttcagtcccgtgttata

SEQ ID NO: 7255 - DNA, 433 bp, Glycine max
  unsure (1)..(433): unsure at all n locations
agcttcttttccactggagccttgatttatcgaatcaactgtgggttacattgcttatgaggcttaaaaaaaattttaagtgaaaatcgatattctaccaactttcgaggtaaactagcatcttatggtaatcccaagcaaagcaatctcgataacctttgacaagttccactatttgatctttctatacctcgctcaacaaaatacttacttttgtcatctgaggtttctcacttatgttgagattcacttctatcaattggtcttgggctttaatgaaggtatttgcctctgaatcgactgagaaacatcatccaaaaatatgacagaagcccccccaagacttttggcatgaatgtcttggtcattcattatttcctatttgccttcttcatcatatgaaatntgaatcaacaagattattccctatatt

SEQ ID NO: 7256 - DNA, 146 bp, Glycine max
atactccagcacatatgatcaacatgatcctagaggaaatgccaaaccgtggcaccctcaaggccagagtcatacatcaactcattcatgacctcctcaattaggttcataaactcccttcacattacaacacatattcacaacat

SEQ ID NO: 7257 - DNA, 420 bp, Glycine max
  unsure (1)..(420): unsure at all n locations
agctntatatctttttcttgaaatggtacaactgatcactattaataattgactgcgccatttgttcttatatgcaatgcaacagcgaaatgcaaaaatcaaaagtctcacacggtacccacatgtccttccaatctaaaaaattcaaagaattgaagatattgaaatctattatattattttagtatttatactagctntattggtcaataattttcattaaggtgtctaatatctgaaagttttgtacgcaaattgcggcatccatataccgactatatatatgtcaaggatgaaaaaagggtatttgatgagcaaaagtagaaaggcacatgaaagcactccaatgcacatccttccttatcgatccaaaagagaaagagaaaggcangaagaaacgacagaggggaagagcataca

SEQ ID NO: 7258 - DNA, 360 bp, Glycine max
gagtgcctgaccgaattgataggtcctttaggtggcagcatgttggactccgaatccgagcacttcttgtcacgatgatctataataaggctcttaccctttcttgtcaatcaaagcaggaccacacttctggggaaataatcaatttcatgactgctgatgcggaaagagttggtgttgtcaggtggtctatccatgatttgcggatggtggctctgcaagaaacattagccctggtgatttggtataaaaaccttgggctggcttcaattgctgcttttgttgcaacagttgttattatgttggcaaacgctccattgcgatcatcgcaggagaagtttcacaagaagctgatggagt

SEQ ID NO: 7259 - DNA, 439 bp, Glycine max
  unsure (1)..(439): unsure at all n locations
agctntacttcaatattttccaaatcatcaagaatcttgttgaaatcaaccaattgttcagtggctgttcttgactctgtcatcttgaaggtgtacagttgttgcttcaagcatagccgatttgcaagggactttgtcatatacaatgactccagtttcagccacattgaggctgctgtcctttctcttgcaacttctcttaaagctttgtctccaaggcatagaatgattgcacttctagctttagcaatcatctctgatttctcctttgagcttagagattcagacatcttttcttctcctttaagagcatctgcatagccatgttgaatcaagattgcttccatcttgattctccataacccgaagtcattttcccctgaaaacttctctatatcatancttgttgttcccatctttcttgatcttgatcctgttc

SEQ ID NO: 7260 - DNA, 485 bp, Glycine max
  unsure (1)..(485): unsure at all n locations
tttgancccattcantacgtgacactatacaatactctagctatgcgagtgcgtatcatgtgttcatattcacatcattactattccaccaatgcttcaaccagacattctaatctctatcaacaaaattgccaaatgtcaatttgccatatacgtcaaattgagatttgagtcctctcctcaccagcggatcggcttccctggcatgaaaactcctgcactcaaacctcactactcttttttaagttaagggttaacacactgcactgacttttatgaaaagagaaaatgccctttttttaacgttgtcatgatcaaacttaaagatatgaaccacgtgccatttgataactaactgagaacaccccatagacctatattctaaaattactaaaaaatgattctacttgactccaaaactacaaaaaattctgccaacatttaaagatgcatacggtatctaatgacgcatatacacaacattn

SEQ ID NO: 7261 - DNA, 163 bp, Glycine max
gagactgcagcattccacaatcggttgtacctttcaagtaacgaatagttcttcatgtggttattacatgacgagaggtttgagcctgcgtaaagtgacgcacaactcccaccgcatatagaatatcacgccttgtcttgggcagatacctcacactctccac

SEQ ID NO: 7262 - DNA, 427 bp, Glycine max
agcttactaacccacctttctcccttacaatgtatctataaagtattacacacagctcaggtcgtgaattccacgaccccagatgcacaatcacaaaagaaaataaaaacaaaaattaaatcatataatagaaactaaataataataataataataataataataagcacctctatcacgaaaaactaattttttttatgaaaaaaaaaaggaaatcaaaagctaatcaccaaccaatatttataaaaggcgcaaagagatcacaacaaattaaatcaaaacccagagaagtcagatacgtcacaatgctaaaataccagacagaataatctacatgtggatcgttaaattgagcggtaagttaaatctcacgagcctgaacataacacagataaagaatccttcacagaattcaatcacctccgtt

SEQ ID NO: 7263 - DNA, 446 bp, Glycine max
atattacaatgtccatgaatctcagagatctatacgaggagataagtagccctacaagaagatgttggaatggggaggacgcggaaagtgacaatgataaatgtctggatgacgtgtgctgacgggacgatgatagaccaatgacgggcgatgaagaacttcaggatagagcaccactaagaggtgccactatacttcttgacaagtgactacaggtaagacttcaaactattcactgcagctgcggtcatggatacagatgaggagtgatcaaacgctcctggatcatcggaaagagaccctgtctttgaccaagaggaagtgacaggaagacaacccaggtctgcagagataagttctgaacaagctggtgcttcgctgagggagtacatatatgacacagaagaggtgcaggctgcacgaactacccctcctatggatcaacg

SEQ ID NO: 7264 - DNA, 501 bp, Glycine max
  unsure (1)..(501): unsure at all n locations
aggccacgacgacacgttgggcccannngtttgatgccattgtaanacccggtgagttccatgcagctgcttgttgactgcatgtctggtttaataaataaaccgagtgtactttgcatatgaggcgtttagaaacattttatatgtatgaagctattttacgaagcttcaaagacactctccccatatgatgtgaccacggaacccgtaaggaataacctccatcatgcagcaacagtttatgcttttttgtctacagagaaacatacatatcactcttatgattaatgcggtgagacacggcgtggaaggcattgatagtggcggcgccggatccgatcctttggccgatggggtcggggacggcgagggtgaacgtggaggcatatatccgacccatgcgcttgagcctctccagctgacagttgtacagatgaacttgtctgggctagcggcggtaagcagaatggcattccacgtaggaacccgacactggtctcg

SEQ ID NO: 7265 - DNA, 178 bp, Glycine max
ggaagtaaaatgagaaaggggaaaggggtgacctgaagatgaatgtgcagtactaagagtatggaaaagaatacattgataatccttcaaataaatgggtgggattttaattctggtagatattctagtaggacctgaatcaataggagaaaaagcaggaacaatggaattagaaaca

SEQ ID NO: 7266 - DNA, 597 bp, Glycine max
  unsure (1)..(597): unsure at all n locations
acctcccctacctaccattatcnntnnntntangnnntgntnntntntttatatagtgactaacgtatatatctactactcaactaaggccgcagcngaattgaacccttccttttgacnccctcgaagncccgggganctntanagacnacctgangcgtgccagcttggactcaagagaattatataatggctctctagtanagtnncannaaaaaactattataaaaagactcaacaaacccctagctttggccgcctggttttcacactaattttctattgaaatttatgaactaagattggtgtaaaatatgccccacctataaaataaattttgagccaaaacaacaagcatacattccctntcacttttttttcctggatactcgattttctgccaaaatgtgtgatgattagaatattttccttttatccaaaacacttgggtctgtttttataaattttttctagatgtgtagcacattcagtaaaaatttcagctcacaaattcgaagtaaccaattctcaataatttttacaactttgtatgttcaagcctgcaacaccagcgattttttaaacatagtatatggg

SEQ ID NO: 7267 - DNA, 321 bp, Glycine max
gtggctcgaggtacttacccgctgaagatcgatataactaatgaagaacgtcgaagaacggttgaaacctttgcgaaattcttcacggaaaacgttattgtatcggttcggaagcgcctcgggttatattttcttcacggaaacaatttttccaagcaaattcgaaagagagagaagtgcctaaggggctgaaccctgttccttctcacttcctcccctatttatagcaaaataggggagatggttgccgcccagctcgcccaggtgagctcagctcgcccaggcgagcagggttgcttcctccagaagcaacaaccttct

SEQ ID NO: 7268 - DNA, 417 bp, Glycine max
  unsure (1)..(417): unsure at all n locations
agctcgtaaggcttcgggtggtacatgatagatagactcaacttggataccatccttgtgctacaacaattgcagcaagacccactatccataatgagagnaataattttgtttaaaaccttgcatcttgtatgaaagatgttttctttttgggtttgggttaggtcacaagattgactcccaatgagccatctctccattagaagatcaccttcttcgtaggggcaaacctcttcaatatgctcatcacccttggcttcaccctcacttccacctgaggaaggagaagaagtagccttctcttgactactgtagatgtcttgatcccacatgatcatggttttctttgtagtggcattgagaaagaatgtggcctttcccaatacattntaagcacttaatgttactagttctatc

SEQ ID NO: 7269 - DNA, 417 bp, Glycine max
  unsure (1)..(417): unsure at all n locations
ngaagatgaagccatcttgcaaagctntgaatgagattttgagagtttgtgagatttctagaggtggaggagacatccccactacttgtatagcttctatctttcatcttctcttttcattggtggaaaggaagcttccctgctctggagagataaatcctcagttggttcttcctatggggtacttgatgtaaatactttcatatctatctaatgatgttttatgtgttcactgtgctatcagtacttaattctagtgtgcctttgccttgatcaggtaactgcatgcttagttagggtcactcaacattgggaaatggtttgatccttagaacctgataagacagggctagcttatcgtatnttcatgagacatcggngtattggaacctagtttttgttatgttatgtcttaat

SEQ ID NO: 7270 - DNA, 181 bp, Glycine max
tgcaagcgcgagatgctaagcgaacagtatagatccataggctcacactttgtttcccaagagagcgatggagagagaaggccgttagaacagcccaggaaattagttctatcatagtttacggcccctagagacgaatcatgccacccaaatcacggaagtacatgcgattgtttagggg

SEQ ID NO: 7271 - DNA, 102 bp, Glycine max
ttaacatgaggtgtttttaaaactaaacttaatgggcttctagagcaagagagagtttatcaacttcagccaaagaaagaacctccgaagcacgtgtggatt

SEQ ID NO: 7272 - DNA, 272 bp, Glycine max
cccatgactaccatggtctttcctgtataaatctgtcttctcccgctgttttttatcaaatattctacacatgttgatcaactgtgcatagctatgaatcccgagagaatttaccatcatttttacttctggtctaaggccattgacatatttcgtgcattaggacctgtgcccagctaccgcctaatgatgaggaatatacactacacggttctcaaacctaacctcatactatatcgcagacatactttagtgtttcagctcgaaaaact

SEQ ID NO: 7273 - DNA, 472 bp, Glycine max
  unsure (1)..(472): unsure at all n locations
attgacgcatctganactttgatacctagctttagctgcacttaggtgctaagcttgaaaggattctttcctcaaaattccagtttggcttgtcctggccaaagaagaccaatcacctggcttcaaggacaattatatttggccaatcaaaagaaattggggtttgattcatcaaggacttcaacctatcaactgaataccatggaatgcttaaatcaattacttctcacaagcattgcagtttttcaaagataagagcacaagtattagagncacaacttgaataagctagtaagcatgacaaaaatcaaggaaggatcatcaaccaaaaacctcacagtcattgtttcactcaaactcaagtgtttaggcttattccatcataaataaccaacataagttccaacctctgcatttcatctcctatttacaacaatgaacacacaaaatgaattnaaggactttcttgctt

SEQ ID NO: 7274 - DNA, 435 bp, Glycine max
  unsure (1)..(435): unsure at all n locations
agcttgagaaacattaatagaattatatttgactatatttcaagtacacatttaacatttttttctctaaaattaaacttaatgggcttctagagcaaaagagagtttttcaacttcaaccaaataaagaaacttcaaagcattgttctttgtttgtggtaactttaattacaaagcatacacatatataattaattntcaattaagaaaaatcaaattacctcttcaaacaatgtaacataaaagataaaacaaaccacaaaaaataatcatgaaaggaagagataaatttatttccaaccacacatatcaaatattcatttaatgaatgtgaaattacaaaactacccctaatacaaaaactagtctaggtgccctaaaatacaagggctgaaaaatcctacatttctagggtaccttacctatattatggat

SEQ ID NO: 7275 - DNA, 418 bp, Glycine max
  unsure (1)..(418): unsure at all n locations
nttccaaagtggtcttcggcatcacattcaaacttgatccgttgttgataagtacctttgcgacaacatggtccatacatctcaccgacacatgtaaagccttgttgtgtcctctcccctcaacgggaatctcttcttccgagaacgcaataaaattattggtggttatatgattaacgattccttcaaaaccctccactaagatatcatgggctacatgggcctcgttgaggacctttattaatagcgcacgatgaggctcagagtttatgagtagttcaagcaatgagatccttgctggagttttattcagttgctcgactaccttaaactcgcttttttggatgaggcgaaagaactcatgagcttgttccacagccactatctttccttggagaccctctttcttttcaggccc

SEQ ID NO: 7276 - DNA, 468 bp, Glycine max
tggcgctgtcatgaacatcatgacgcttccctacccgacgtcgcatcaccgtggctgcgacggggccgtgacagtattcctcggttgctccaatggtgggaatcctgaaacctacatgattcacggtaagggctcatgatgacgatgacacgcaggtgttaggcatgatcctcggcgaacacttttcaggtgcgcgtctgcgtcgcctcaccatgatactgcagatgatgtctattgcacactcctgaagattggtagtatgacacatggatcagacgaccgcataaaagaggagacattcttcatagggctgaatcagctactctactccgcggtacagctacatgtacgaactagctacgctgatgcatgaaacatgcaaacaagcatgatgttcgtagtctgaacgaagagatcaccccgtctcctatttagtgtacttttttaaccacccttttctgttgcgcc

SEQ ID NO: 7277 - DNA, 350 bp, Glycine max
ctatacaagactcaagctatgataacgctcttttagctaacgtcatcactaatgcatactcttgattgtgacacttaggaaatgtgatatcccatgttatatcatttcgcggatgtatgatgctttattcatatgagatcttactgattcactttctatctggcatgctcgggatttggatctaatgctgctggggcatcttcatttgttcaaggactacggccatgcctatgaacctgtgtcttcacaatgaattctgtcctatagagattaggtatcagataggcgtaattgagtaagtttctacgccaattttcagccgatacttcatgatggaacacaagaatgga

SEQ ID NO: 7278 - DNA, 439 bp, Glycine max
caagcctcttatctttcctatgactagcattggcattcctgtaaaaagcagtcttctcccgctgattttcatcaaagattctacacatgttgatcaactgtgcaaagttatgaataccgtgataatttaccatcatttttacttctggtcgaaggccattgacaaatttcatgcatttggacctctccccagcttccccctaataatgaggaaaataccttacaaggttctcaaacctcgccgcatactctgccaccgtcatactttcctgtttcagctcaagaaactccatctccttcctattcttgacatcttccggaaaatacttctccagaaaagtttgtctgaaagtctcccattggacaacaacaccaccgtgtccctctaaacgtgggcgagtgttctcccaccagtactctgcctcatctgataacatgtg

SEQ ID NO: 7279 - DNA, 503 bp, Glycine max
  unsure (1)..(503): unsure at all n locations
agcaacgtgtgntcncgatggaagcaatgcattangtgtgactatacatatactcaagctagcacttaaggagggaaagtgntgtgcaagggancaacaccctcaaaaacaatgtgggccctgcaccggacccagaagaaacgtcgccgcggccacgagacaaagaaatagtcgcgtggggcgccacagcgcaaaaccaagcttgaccaaacccgacccaacccaggcataggcgggcagtgagaacctgagaagtacctaagccggcgagcctctggcagcaacagacaaaacgaaaacaagaccaccaaccaaggaggctcgtggtagcccgccagcagtgaaagttgtgcaacatgtggattacggcccctggtaatcgacaaccaacggggggagatcgagtacaaagcttaatactgaagacaggaggcgtccaccggcctccgtcatccgctaccacagggggcaacacaaaccaaccttgaaacaatggcagaacc

SEQ ID NO: 7280 - DNA, 292 bp, Glycine max
agcttattctatgtgattgaccaagcacactatgatcacaaaattcaagtttatctagtttatcaccacctaacagattttgtttctcaagttcatgtattcctctttcactaacatgacctaatctcagatgccatatcttcgagttatcactcaatgtattactagctaccgatgcatgtccaatagctagcggaacctatcagaataaacaagccattacttttattcttgttacccttacctatgattaaagatccatttgaaatctcaacaacaccatatggaattc

SEQ ID NO: 7281 - DNA, 366 bp, Glycine max
tgatcaagaattatcagagttggatgagtcttttgcagatttgagactggaagatggaatcagaaactctgtcattcagtcgcagcatagaagttgaagcatccaattcaccactggatagtcctgaagaagaaacaagggaaccaactgggtgcaatatgagaaagaaccatctaaaaagccaaatcattggtgatcaaacatagaaagctcaaaccaaagcatctctcgggctgtaaggtcataacgcattgatgttacaagttgagcccagagacatagatgaggcagtgcatgatcaaaattaggttaatgccatgcaagacgagctcgactagatatagaaaatgatgtatggaaaatagt

SEQ ID NO: 7282 - DNA, 440 bp, Glycine max
  unsure (1)..(440): unsure at all n locations
agcttgacatgcttatagaacaatatagatccatgttctcacactttggttcccaagagaatgatggagagagaaaaccttctaaacagcttaagaaattttttcaatcatagtttactatttcttgatatgaattttgttacttaaattatttttttacttccgaaagtttaagcaatgtaactttagttgcaccatatcttatgttgattttcttnttttctccttgacaatatttatctggaatgtttaacatttatctggtatttttgttatgcttgaggaatgtgtgtgcaaaatatctaaatcattttatttttagatcatttcgaacgagtntacattgatcaaaattcatgaaattagttgaccaaactgtttaattggttaaaccaacaaagcattatttagaagagaaaaaatattttaatgcgtgatat

SEQ ID NO: 7283 - DNA, 162 bp, Glycine max
gacctcacataatagaccgacaattttctaacatacatataacccttgtttttatcactccactatcaaaaaactcacctatgacggacattatctgctggacataactaccggtataggcacactcactaagagatactagagcctgcatagaatgtcaaa

SEQ ID NO: 7284 - DNA, 442 bp, Glycine max
atgcacgcgcgagcaagctagctataagactgtgtagtctatgtgcactgttctcatcaagcatttattatttctaaagtcaatcctcgtgggctactagatcaaatgatagacaagtcgactgcacaccggctaagaaggctggaaaccatagtgatatgctagcgtgaactgcaattacaaatcatacacatatattattctttatcaattaagatatgtgatattacctctccattctctgttgcatgctagataaaacatacctcctaaaatatgcatgataggaagatataaattcttttacaaccacacatatcatatagtcttcccttgagtgtgaaatatcaaaactacccctcattctctagctctctaggagcactaaacacaatggctgaaatatcctgcatctataggtgacctcacctatattatggat

SEQ ID NO: 7285 - DNA, 213 bp, Glycine max
tgtctgagtccttcttggtgcacatcatttagaacactcttctgcaggaatatgggcccgttaagaattcctacagcgcacataaggacaaatggcttaacaatgaattaatgaccatgtgtgtacaagaagaagaaaggcttgtaatggagatgatatgtctgagtctttcctggcgcacttcattttgaacactcttctgcacgaatatgg

SEQ ID NO: 7286 - DNA, 425 bp, Glycine max
agcttgcatgatttacatctccctctttctcaagcaaattcttcttgatatcatcaaaatcttcatgatttacattctcccccttttttgatgatgacaaccacctgtaggttaggagcaacaacaaagaaaatatctatttgcatatagtttactcccccttggttttacaatgattgcttatatgagacaattgaagatttcatatttttcatatataaaaagtagtctcataaaacaatagataatttttcttactattttatcttttatctttctctccccctttgtcaacatcaaaaacaaatcatgaatagagaggagaaagatgttaccacttgttgcaatgtatgagaatcaagtgataccaaaaggcattaaaacaatcattcaatattaatcaagcaaaaacaagtacaataaca

SEQ ID NO: 7287 - DNA, 221 bp, Glycine max
agcgtttgatgtgtgctaggacaggcagcgtcttggctgaaaataacagggatatacagatagacgccgcgacatgatcttgacggaatagatcaggtatacaaagttataattaccgtgataattcaccatcgttattacttctggtcacaagccattgacacattccatgctattggacctacgcccatctctcgacaagcaatgatgaaaataccttc

SEQ ID NO: 7288 - DNA, 255 bp, Glycine max
tgagatgatgagatgaggcatgtggaaactttctgcttttattgttgaccacagagcggtacctggagatacgccgcggaggtcatgagaccttgtgtatgtcacggggggtgctattgcccaaaaccaagcttgaccaatcccgacccaacccgggcataatcggtcagtgagaacctgtgatgtacctaagcaggcgagctcctggcagtcaacagataaaaggaaaacaagaccacaaagcaaggaggcttg

SEQ ID NO: 7289 - DNA, 386 bp, Glycine max
gctagcttgcataaagtcatgtctatcattaccttcttagtctcttatagacatattttatttagaaactacctgtcctttcctcaccatctttctgatttaagcccattttaaccccctccccagcccccttatattgtaggaaacaatcttcatcaaacacctacattgtttcccttcctctgaattatacccttgtccccctttcctccaggttcaccaatttagatataattgttccctcctacttgataaagattactcccatagtttttgccatttcacaattgtttcctgcctctattaccatctcacaggttctgggtgttgaaactgagtttgctgatgttgcgccctgcataccttggaatttctttccacatgac

SEQ ID NO: 7290 - DNA, 401 bp, Glycine max
  unsure (1)..(401): unsure at all n locations
gacctataaaactcaagcttgctaccccaagaaccatcaggaaattacttgtgaaggagagccatgagggtgggctcatgggccactttgggatagacaagaccctagtcttactcttagaaaagttctattggccccatatgaagaaagatgtccataagcattgcactaagtgtgtggcttgtttacaagccaagtctagggtgatgcctcatgggctatacacacccttacccattccatctgcaccttgggtagacattagtatggactttgtccttgggctccctagaacccaaagagttgtagactctatctttgtagtggtggataggtttagcaagatggcacactntataccatgccacaaggtggatgatgcttcccatatcttaaaactc

SEQ ID NO: 7291 - DNA, 440 bp, Glycine max
ggcatgcaagctatgaggactatggtgtacccatcacatgtggtactaggtggcggcagttctatggtgcacgacgacctttccacatccacaaatcgcgcataaacccaccatacactgttgcccacctgcaactgaactcacgttctcccacgtagctccatatcctagtttctctcaacaccgggtccccatcaatcctcccaagcttccccaacatccaagtaattcaacattcaaacaacacaaactatcacagccaagacaacagggcaaaggcagaaaactctgcccacaacaccaaccaaaatcacagcttttctcacttaaagaccccaataacaattccttcgttccagatcgttaaccgttggatcaactcgaaaactttactggaagtctctagtacataaagctacatgttgatcgttgggatctac

SEQ ID NO: 7292 - DNA, 180 bp, Glycine max
caatcttcctctttttcactcctcttttactttccccgaacagaatcctgaagcacttcatcatacggcccatccttcttataagataaagggatcattcttcaccgttaccgatggtgtgcatcgccgtctcggaccatacggagcacccacagcacctattccttcttctttggcatc

SEQ ID NO: 7293 - DNA, 435 bp, Glycine max
acccgcgatcctcagagtcattgacaccattgcagctccacatggagctacatcatgaggcacacagcatcttcatctacgagatgttcttgagctcttttaatccttcatgacggacaatctcactctaattcgatgatcacaatctcatgctcgatgtgtaccccccattttaacgaggttaggtgctgtacataacacacccatgagactacaccgattgcttgttagatacactctagaaaccaaccgattatatatacaaattgtatacgcctactccacaatcaagttttcgtgacgattctaagttctatcattctccacacataagacaagagcactcacccttcataactagacacgatacctacgtatccactaagtttcctatatgataactatgatgaacctgagggcagtcgcacactcatt

SEQ ID NO: 7294 - DNA, 323 bp, Glycine max
gcgaccttaagtcacctgctgctgcactgagttttatgtgtcactaatgtttgggtaacttgcctactgttccgggtttttgtattcaccccaatatcccacaaactacgagccggaaacataaaaggaaacatctgtggtgcctacagagacgaactacccacaccttttgcttgccctcatcgccatttctacgagggaaccttgtggacccgctggtattataggaatgacaaaacgaaacccctgtgggtgtcccgggcgatcacacgatttgtggatgtacaacacttaatattgatttcgggcggataatccgctga

SEQ ID NO: 7295 - DNA, 436 bp, Glycine max
  unsure (1)..(436): unsure at all n locations
agcttcacatggagctacatcatgtggtatagagcatcttcatctatgtgatgttcttttgcttctctttatctttttgttcggtcaattcactttaattccttgttcttcatcttattctccatgtatatcctccattttcttgtggtttggtgctgtttagagtagattcaaaaaaataaaccgattaaatctcagatctacacttgaaataaaccgattatagttcaaattttataggtctactcttcaatcatgtttttgtgttgattttacgttctatcatttttcagtcataatttttgtgtgctgaacctttagatctaaattttcttccaaaatattttctaagcttcctatatgatgcctatgaagaaattgagttttggtgttgagttgtggctgaatntgtgaatcaaaataagtcttaagttct

SEQ ID NO: 7296 - DNA, 272 bp, Glycine max
tgtttgaaggacaaattctcattatacaaagcttgcaagaactagttcagcagagaccaattatgagtatagagcagttcgttgagaaggtggcctggctaggagcccgaccttcttttgtgggggataatgaaagttttacagcccaggcacctcaacagcatgagccaaaacaagaaaacgatcactcatctgaagccaccatctatggagctgttgattgttaaaaaacaggattagagacgagatccattgaggttgctcatcatgga

SEQ ID NO: 7297 - DNA, 106 bp, Glycine max
  unsure (1)..(106): unsure at all n locations
tgcctttcataccaccgtcaaaaggctctaatactgacatatagaataagaccactccctgccattcatcgatgtacttgatgcatttcataaaaatgtgagctcn

SEQ ID NO: 7298 - DNA, 423 bp, Glycine max
agctcagaccaggatctatccccattatcggcaacaacctcgaggcaaatggaacacgacactgttccgaaagactttcctcctccagcatctccgtcatccacaaccttatcattgttattcttattattattattgttgttgttattgtcctcttcttcatcgttaccgagacccattagaaaaaccctaaaatcggaacaagagcgagagagggaacgacggcgtttaaatgaaatggagttaggacagggatgagaaaacaaaggaaaaaggattgtaatctgagatctcaagtcttggggatgaacaagattgaatttttatttcgttggattcttcctctgactcccgataactcttgtccaatcaactttaccgacggttgcgattcattgccggtgcacttcaccttcccgtgac

SEQ ID NO: 7299 - DNA, 417 bp, Glycine max
taataacttccaaaatgttgattcctttagttaagcgagatcagatcattcagaaaatttggattaagttacattattttgacctacatatcttatttaactcacttctttttggtaaggcaggttggcgacatttctaattttctatatcaagaaattaagaaatttaactaagaaataatattgtcggtacgcggaatctgggaaaatgttgggagcgctagagtgattgctctaacatttatcccatctcctgacaaaccaaagcctggaactgccactacacagcattatcctagctgcacagggtcttaagtcttaacctgcgattatagagttcttccaattaatggatggcgtggaacattacacttggaaaggagggatccacacaaaacaaaaaacagttattaatgc

SEQ ID NO: 7300 - DNA, 441 bp, Glycine max
  unsure (1)..(441): unsure at all n locations
agctagcttctacactttgtgcatgtccttcatgctttacatgcctaatgacacctaagcactcttagtagagaatcttggacttgatcttggattagtggactgaaccatatctgaaattcactaattataattagtgaaattttggctccaaaatttggctccacaaattcaatttcaaattcaagtgaaatttgaatagaaattcaaattttcctccaattntatgtgacacttaggctataaatagaggctaagtgtatgcattttttcgaactttgatcatttgaaaatgaaacttcagattttagagctcttttagaacacaaaattttgtgctcttctcttcctctcccttcattcatctccttcttcctccaagctcttatccatggcctcctatggtggtgaacttcttctagactcatcttctccttgaag

SEQ ID NO: 7301 - DNA, 341 bp, Glycine max
tgtcgctcattatgaaatgtatgaataatatgcaaattgacatctccttgcagaatttatatttaccctattatttgcattccgtattttatatttgatgttggggcaaagtattgtgttgacatcgcaactctgcatcacggatgttgcgtgctgccaagatgcattagccattcacacttggagtatccacataagttgattgtacaaatatgagctagtgcacttcttctagatcaagatcaattggggtaacgaaacatcattagacatacagtacatagttcccttcaatggctcttctttagactctaggtctgaatatctatatttacacccac

SEQ ID NO: 7302 - DNA, 439 bp, Glycine max
agcttgtctttaatttcgtcattacactggttttaaaaaagcacatcaacgcatatagaacaacaacatgtttaatgatgaccattaaagaaagctcgtatacagttatatgttatgagataacttattaattgtggctttgatatgcatatcaagtttcctacgcaacgaacacaaccaaacaacaacatgttgcctgagacacaaaagtacgagctgccaatgtgccctacatgtcatgcacattacatacgtatacaccgaaacatcatttcaagtattattcttaaacatgacttactgatggaagtaaggtccaacgtacacctctcggtcagattccttaagccatctttcaagatattgttggcactcgctgcgtctatcctttgaaaccaccaatgactgtggctcaaggaatgcatacatggaaccttga

SEQ ID NO: 7303 - DNA, 161 bp, Glycine max
tcagatcatatctcacagaagatttgacgaccattagttgcagtcaccgtagaaagtgaagctaaactcaacattcggtgctctctttctatcatgcccagagagaaagctgtgtgcacataatatacaagcacttattatttattaaataacggtttccc

SEQ ID NO: 7304 - DNA, 354 bp, Glycine max
ttgcactctatcatgaggacctgagcgttacccactatgatgcatgatctttcgcttactcaacagctctatcataacaaatcaatacacattcatgtccaatagcctatttactatatcgagggagaattaacgagtgaccatgggctagataaaactcggacacgaagaatgacactacccgtaacgcgaataatctcacttgaaggtgaccgagtatcattcctatccgatagagctaccatacaatggtgcacatgtatcagatatgcacgattataagaagctgagcgcatcttgagcgtgctgcactgtaagatctgaatgttctcctctaatacatcctacacaaac

SEQ ID NO: 7305 - DNA, 324 bp, Glycine max
tgacacaatgaattgtcctcctactaacatagtcttctctttcaacccttcttttcccatacaaacacatttccccatccaaaaccctagcagccacattcaatactccaagggttgaacacttgacatgaatattatcatggaagataagatgtaaaaaggggtctgagaacccataacctctacatttattccatccagtgagtatgattaacgtatgctcatgtcctagccaccaaaactgcaattttgttcattagtagtcattcatgtcattttcttcagaatatctacagtgagactgtgttaaaattctcattaatg

SEQ ID NO: 7306 - DNA, 229 bp, Glycine max
gaaaaacccgtctgccatctgcttaatgaatttggccacaccaaaccctcttaggccgtctgggccgtgaacaaatattatatttgacaactttaaatgaatttatgccattcttcggttattatacttatattggctttcaaccaccctttaagggatctaaaactgccttataaaatactcctcgcttgtctttatcacataatggtgaatacataacaaatgcctc

SEQ ID NO: 7307 - DNA, 347 bp, Glycine max
  unsure (1)..(347): unsure at all n locations
agcttacccattctgttttagggttattatggcgatgctcgtgatgtttatgtgctgaaattgctaatggaaaactgctagggatgaatggtagagttaacctagggttagaaagtgaaaatgtagtcctctgagtggaaaagtgtgatgcttcgagggttaatcctagtttgaaatgtcatttaggacttatgataaagcttggcttgcgcaagagaggacaacaaatgaccaaagtgaaggcaagaaccatttttagggtaaaatttaggtgttgaggagtcanattttgattcggtggaattctatgcgtaaacccagtttgagcaagtttagattgatgatat

SEQ ID NO: 7308 - DNA, 381 bp, Glycine max
tacggaccttcagtctcagctttgacccgctgtaaatgatatgttcatgatgcataagaatacgtaatgaccaatccaatgatgatcttataatgcgcctaacataagcgatcgctattttatatatgagagaagggaagagagaatgacaaaacctatttatactggttcgaccacttcccgtgcctacgtacagtcctcgagtaacccacttgagattatccactatctctataaatcctttatagactttgaacacaccttgggatccatctcccttgtgttcaagattctccaagagacaaccagtctcttgattacaattatcacaatctaagagacaatcagtctcttgattacaattaagtctatgagatgaat

SEQ ID NO: 7309 - DNA, 426 bp, Glycine max
agtgcacctgcgcgcatgcacgcttatctatgaacatattattgacgggacttctaagatcactttgcgctatgatgctactcgattgcactagactctgaacaagagagtgtctgacctttatatgatatattctaagtatctttctatgaataagtggctcctatatttggctacacacaatcaatttctaatacatgagtaattggaatagatattcttataatgctaacgttatccgtgactctgatggtagatgacaaagctgtatgaaagcagaaattcgaacttcgagcattagaaatagaaacatcacattttatagcattataagaacaccattatttgagctcttctctaacaagatattcatagatgatcttctgactacatgctctaaaacatagactcctatggaggtgatca

SEQ ID NO: 7310 - DNA, 420 bp, Glycine max
ggcaaatagtcaagactcgagcaagtttggtatcatactctgccgatatatagcaacttgcacaaatggtttcaaatgataattcagtctgttccaactactcaccccactattcaatttgcatgcaaagcacatatagtctagtcgaataagccaacaaggcttatgacacacatgagttgcttggatgagtgggataagaaaaaagctgctttgattgacaacctcattcatatctagataaaaatttattaatttcgtttcttcctttttagcctttttttttttttttgcacttggggtcgatgactcaatctacttagcagataagggaaaagtttggtggacaccaaattctattcaatactgcagaggaaaagagaaaaaagtgtatgatgatatgataggataagaaaaaaa

SEQ ID NO: 7311 - DNA, 389 bp, Glycine max
  unsure (1)..(389): unsure at all n locations
agctggcatgattcacattctcctcctttttcttgcaaattcttcttgacatcatcaaaatcttcatgatttacattctccccctttttgatgatgacaaccacctgtaggttaggagcaacaacaaagaaaaaaatctatttgcatatagtttactcccccttggttttgcaatgtttgcttatatgagacaattgaagatttcatatttttcatgtataaaaaagtgtctcataaagaatagataaattttccttactatnttatcttttatctttctctccccctttggcaacatcaaaaacaaatcatgaatagagaggagaaaaatggtaccacttggtgtaatgtataaaaatcaagtgataccaaaaggcattaaaacaaac

SEQ ID NO: 7312 - DNA, 439 bp, Glycine max
  unsure (1)..(439): unsure at all n locations
ctcagcttgagagtnatagccatccagatccgaacagattggcagcattcctctattgatttgtttttttttactagccttgtatttttcacttgtgtcaaagggaatttgttattctccaaacctttttataacttcttctcttgatgaaactattcttttaaaacgctcagacaaacccaaaagagaaagaaaaaggtttccactttaaagaaaaaatttacagacaataatttaatcagacaaacctttttcaaaagggctttcacgcgatcatatgcttctctaaggagtttcacaacctgcagaataggtagaggtgtatgacttttatttttgataaaacatttcttagaagaggaagcaaataatggaaacatgatatntttagttaaagtatataaattcacaacacttgcctctgcatcaatacgtgact

SEQ ID NO: 7313 - DNA, 444 bp, Glycine max
tgagacgatgcaagctcgaagggaaaggtcgagaaggttaaactattgccactatttctacacacatcaaaattatgtttataaaacttataacctaaataaatgcaagaaaactacattcattactataataatcctttaacatcaccacatatcattttcatccgtaagctacttcttcaaatgcattttttcttgacgagaaaagtctcattacttgaccagcaatagccattggcattttcttaataaatttccatgaccgtgacaggaactacaactataccaaaccagcacaattttctagtggaagtgacgttagaaaatgcttgcttagaaaattcactcacagggggcagaaaatatatcagaagttatcttaagataatgcccaaaagaacatttttaaagatattcatgcaataggagttcattgatgctgaa

SEQ ID NO: 7314 - DNA, 421 bp, Glycine max
  unsure (1)..(421): unsure at all n locations
ctgtccgcanaaagtcacttacgactcgtttaatgtccaacaccgtanatggttctctttgcgtttatcgattaacatggaccggtctaagcataaatcaccacgctaccttaccgcttttgccagaactacatangtctgactttctcatggtaattgaggatacgctggagcataagtctcgcttttgtcgaccacccccagagatcgttaatggtccaacgccttaacgtttctctcctttaacanatcaanagatcgtttaatggtcccacgccttaaatgaccttgtgttccgttacatatatctctctaataagatcactcaacttaaccaacgtttagttctaaagaactgcctgagtctgatttcctcatgcatgtgaggatacgtngagcggcgaaacacccttgccatcct

SEQ ID NO: 7315 - DNA, 111 bp, Glycine max
tggtctgaggcaccatactagagcactagctatctctcattatgcgggccattaagactatcctgtgctgacaatagccaagaagcctatgattccctgctggggcggatt

SEQ ID NO: 7316 - DNA, 93 bp, Glycine max
  unsure (1)..(93): unsure at all n locations
tgctcatgctcgacactcgagcgagatagccatctcactactacccgngatagcatggagcacgtttcgtaaagattataagcttcaacctga

SEQ ID NO: 7317 - DNA, 441 bp, Glycine max
agctcgaggggaaaggtcgagaaggttaaactaatgccactatttctacacacatcaaaattagggttataaaacttataacctaaataaatgcaagaaaactacattcattactataataatgctttaacatcaccacatatcattttcatccctaagctacttcttcggatgcattttttcttgacgagaagagtctcattacttgaccagcaatagccattggcattttcttaataaatttccatgaccgtgacaggaactacaactataccaaaccagcacaattttctagtggaagtgacgttagaaaatgcttgcttagaaaattcactcacagggggcagagaatatatcagaagttatcttaagaaaatgcccaaaagaaacattttaaagaaattcatgcaataggagttcattgatgctggaatttcctgg

SEQ ID NO: 7318 - DNA, 406 bp, Glycine max
  unsure (1)..(406): unsure at all n locations
agaccttatttattngataatcgatatttttatatatattcgcattaacattttaaagactgtcttgacttttttttatgacagtaaatactatatcttgacttgagaatttattttgaaaacttacttaaaagtaaggtcaattaaataaattaagactatctctatattattaataatcaactagattaattaacaattatataactcaaatatccaatgataaatttgatataataactacattattaatattattgggaaaaacaatacaaagtcaataagttcctcgcggaattgatcatgaattttactatcaacttattcttaaaagaaaaaactttgaaatataaatcatgtttcttcaaaaataactttaactgacattaattgtataaaatcaatt

SEQ ID NO: 7319 - DNA, 423 bp, Glycine max
agcttgaggaatcttacggaacggctagagacgccgctatcactgttagactacacatgtgagcccgcttagaagtaatagatgaatttatcgcaattgatattagaatgaacatgtgtaaggatctttagaggatcaaattagagtttatttttggatgtttactgtattgtaattattcctttacaattataattatgagattgttgtgtttgatgggccaattgatgccctaatgcgaattggttgataaaattgagtgttcttagtgctttgtttgtgttttttaacctatgatttaaattcctttgattctaatatgattatgtgaaattgtttgagggattctactccccatgttgtgagaaacatttttgtataattcgtttgtgttttgaacacgatttactaaattagcatgat

SEQ ID NO: 7320 - DNA, 444 bp, Glycine max
  unsure (1)..(444): unsure at all n locations
tatcaaaccaaagcaacttctatctagaacaacttgaagagctatattagaagaaatttcaattgttgaaatgtatagtaagtcggtcatctagtgacagcataacaaagtcacaaatactagtactaagttgaagaacatattgcagtatcgagtgtttgctggttacatattttcaggttatatacctggaggagttccacaacacatattgcggtcatcaatatgctcaacttcaagaccaatgaaccatgcaccaagtgagacatcttcattagcatatttatgcaaaatcggcctgcaatcataattagactccacatgaaatttctatatgtaagagaatattctatgagaaacatggactgatccccgaactgagatttcctattatgaaaattntaagtttatgaaaaagaaagtttcttattgtaatcaaatctt

SEQ ID NO: 7321 - DNA, 455 bp, Glycine max
  unsure (1)..(455): unsure at all n locations
tgagcacgcttgcaagctctntggagtagaaacatgggaccaactcattttatttcaaaaaaaaaaagaaatcatatctagtcaaggtctgagagaccatacaagtttcctaacgatttctaattatgcgggccattaagtctatcatatgctgacaatagccgagaagcccatgaatctcttcgggggcggagtaggtgtctgccatcgccttggccttggctaacaatcggggaagttcttgactcccgttcaaggtaagagcaaaccgatccatccacatggttgcctcttggtgtaaagagtcgatcacccttcctctagcctctttttccgcatatacttgggcatactcatccgcgattctatgctcgtgggccgtggctagacccaactcttcttggtacttggcgatgatagctaacatgttggtttctgtctcgcatagacgctga

SEQ ID NO: 7322 - DNA, 418 bp, Glycine max
  unsure (1)..(418): unsure at all n locations
actcaagctagaatcggacatccgtgtgaaaagttatgaccattagaatctctcaagagcttccgctgttaaatttcgagcctctcgacatattatgcgcccgaatcggacatccgtgtgaaaacttatgatcatttgaatttctcgagagtttccgatgtttaatttcgagcgtatcaatatattataaccctgaatcggacctcagtgtgacaagttatgaccatttgaatttgacgagagcttccgctgttcaatttcgaatgtcactatatgtgaagcgcctaaattggacattcgagttaaatgttatgaccattaggatttctcaagagcttccgttgatcaattctgagcgtctcgatatgtgattcgcctgaatcggacatccgtgtganaagttatgaccatttgaatt

SEQ ID NO: 7323 - DNA, 402 bp, Glycine max
gcatgcaagctcttgcttgtttcccctttaatctttgtctatgagagattattgttttgttagaatgaggccttgtggaatagatgcatcaaccatgtttaaccgtaggaagtgagcaacgaacctccacttacaaggtgaaaggtgaatgccccctttgccctataatttattaaaaggatcttttatcaaagtgacatgagattaataaaccactttcctaattaataaatctaaactttctaaacacctctcactgctaggacagtacaatgctaatttatagctcaaacactagtatgctaagataccaagaagaggaaaaaccaatccaaatcataacactatttcaagtatatattgatacaacaagatcatcatatttatatatgcttcgtgtgg

SEQ ID NO: 7324 - DNA, 294 bp, Glycine max
tgtcaagatcaatgatgttcaaagctgattcatgttaataccagagctctatacgcttatgcaaacataaaagatgcagatagcaagaatgatatcagtattcaatgggtcatagatcttaaatccctacatgaaatacctcagaatttaaaaatgattcaaatacttaattacttattgacttgattcctttatctcctcctatgttttgaaatcatcctttacgttgatagacagactgcaatggatttatccgaaagactcgtaggacagatgatcactgtgttctttctt

SEQ ID NO: 7325 - DNA, 439 bp, Glycine max
  unsure (1)..(439): unsure at all n locations
agcttaggagatccacagcatcgaaaagggtcataaaggaccagtccttgtgaggccccaagaagcagattgtcaacctctttaaacagatgttcagtaataacaccaaaacaatgagcaatgcacccaggaattgaaactggccccactgatgttggaatgccagataaggagatcacttttgaagaatttggtagaaggcttacactcacagggaaggcatcaaaatttccagaatgcacagatagatagatgctatcaacccttaaatcaaagccacatgggtttgccaattccaccaagacctcaacaggctctccaacaatccanataagctcttgcttcttgatattattaggctctcctttactgaatggtgtataaatgaaagggcctgaaggagcagcacccgcccaccagtcttctctagcagtactac

SEQ ID NO: 7326 - DNA, 267 bp, Glycine max
caaccacgagcctttcaactcggcgacctcatatggcgagtttagacaatggagcttatagactatctgaatcgtatggcaatgcgattcaaaggacatggaacgctacctatttacatccctttacctgaatgattttcttttatcaactacataggggccttttaaacccaaggcccatccttgataagtcttcatgatgggtacactactggtcgcaactccataatctcatcaaatccgacgattgcccttggtgagtctcac

SEQ ID NO: 7327 - DNA, 425 bp, Glycine max
gagcgtgcaagcttgataggacgcagagacttacgttattctttgtgacattagaataacggtgacgaccagtatgacgaacgcggtgcaatattactacattcatgcactatagaaatgctttaacgacaccagatatcatctgaatgcctgaactacttgagcggatgcatgtttacttgacgagatgaggtcataacttgaccagcaatagccactgagattttcttaataaattgccatgaccgtgacaggaactacaactataccaaaccagcacaataatatagtggaagtgacgctagaaaaagcttgcttagaaaattcactcacagggggcacagaatgtatcacaagttagcttatgagaatgccctatagaacatttgtaaagacattcatgcgataggagttcattgatgctg

SEQ ID NO: 7328 - DNA, 331 bp, Glycine max
attcgtcttacagaatgcaacaagtttatacggataaccactcaagtatttccgcccgtcagcgtgacacaaaagtcaatatgacagatcttgtgagctcttaagataacctaaatctccacgtgtcaacaggcttgtcagccgtgattgacgaagggcgcaaaagacgacgttagtctctgcgtgctatcacgcttttcgtcttacagacaacaaaaagcttatacggataaccactcaggcattctcgcccgtcaacgtgactcataagccagtatgacagatcttgtgagcgcggaagatgacgcaactctccgcatgtcaacgggct

SEQ ID NO: 7329 - DNA, 421 bp, Glycine max
agcttaccataagtcctatctgacattacaagctaggatgcactcactatctccttcatataccacaggatgaatacttgaccttgtatactctaaagccccactgttatgacactcatagcatcacattctcacttactaaccgtaagctaactgctaccgttcacgctcttcagcattccataacaggacacagcagagacacatggcccacatcatgccaaaaaccctaaagcagagagggaatggataactcataccgccatggcagtgtcagcgagctttcgacaagagtctctgcgaataaccatcgtgaatcagaaaactgacagaactacccatcatatcatccagaatcccatacccacgaatattaagagagagagatgtccacccacacctgaaatttcgaagacccact

SEQ ID NO: 7330 - DNA, 293 bp, Glycine max
taacaaagagcatgcgaagagggtggaagtcctagagcaatttccttatgttatcaaacataaaaagggaaaaggcaatattgtagccgatgctctttctatgcgtcatgcattactttctatagcttgaaacaaaattgattggtcttgaatgtttgaaaagcatgtatgaaaacgatgaaacttttggagaaactttgaacaattgtgaacaaatttcagaaaatggattgattagacatgaaggctctctttccaaagaaaacagaatgtgtgtgcctcaatgttctact

SEQ ID NO: 7331 - DNA, 413 bp, Glycine max
  unsure (1)..(413): unsure at all n locations
agctntatgaagcattgaactgtactctttgtggtctgaaccctaacttgatgagatataatatattaaaagactatttcaaatagccatgaagatggaagatgcacaagaacacaacagagaaaagctacaagtatagcctttcatatacttgctctctcttggcccaaatctaaattaagaaaaacaaacaaaatatccctatcaggcagagagcataaaaaacaacaaagccataagaaacaaacctcagcaaggtaaattaactaaatgacacatttgggagataaaagagccactcacactgatacaatgaccttggtatttccaacctcagcataagcagatccagatgtagcattcacagcatcaatcttgaaaactgcaagtaaccaaatatcaatgtgcttata

SEQ ID NO: 7332 - DNA, 397 bp, Glycine max
  unsure (1)..(397): unsure at all n locations
taagtgttaagatactatgatactaaaagctgtatattgttaattattgagcaatttacatataacactatcttaattgaatcagatattctagatgtgatcttggtgaaccatttaatcttttataagatatatattaatgatatgcatttttttatatcttgcatcatattcatataattctctttttgttatatatagacttaaaaactatattaatgtatgttttgtttgggtgggtgaagagtgaaaataggagtgatgaaaatacatgtggttgtttgatactaaagtggaaataggttgggttaggcgggtcttgcataagctcgacttgacttaatttatatttttatagcacaaattcgagtntgtcactcgtcacaaacttaatttt

SEQ ID NO: 7333 - DNA, 407 bp, Glycine max
tgagtacgagagagtattgttatcttaaatggatgtttttctgaatagctaaagcactattaaatgactgatgcaagctatgcaaagcatcttaacttgcagtaaggcatgtgcaagtcacgcctgcatgagtgaaagggttgaagatttattatcaactagaaaggttaacctaaagctaacttcacttacaaatatacttgctcacatacccactcgtggctgccatgacagagcagagttccttcttctccgagtgtctagtacctttatacacaaaacatagtcaaaatctattcagagtatggcaccactgcaatcctaatttatattctcttaacattgatgtatgacatcgcatcaagaggcaaatagaactactactacgaagtacagataataacggg

SEQ ID NO: 7334 - DNA, 443 bp, Glycine max
  unsure (1)..(443): unsure at all n locations
tgtaataagaatatcggtgggaatatatattgtgagctcgtttgtttaaatttattttgtaaaaagaatgtttttttttaatgaaacaaacaattgtttttattttttatatatttgtctattntttttcttaatttaccaaaaaaaatcatgccactgcattagaattaaatccaaaggtttggcttgttgaataaatacaaagttacaaaatattcatgtcatagaattagcaaatatagggtaaaagaacaaatgatttctgcccaaagttaacttacggcacaatactttaatattttatgacttgagaaccttttaaaagtgatgtttatatgatatgtcngcatgtataataaatntatatgtanttttattaattaaataaataaaaaaatttccatgctactcttgacaggtcanactcactatggagatacatt

SEQ ID NO: 7335 - DNA, 84 bp, Glycine max
ttgagcacgcttgcaagcctgagaggattgatggcgacccggtgtttacagaaacgaggttctgggcatcctgggactacttga

SEQ ID NO: 7336 - DNA, 423 bp, Glycine max
  unsure (1)..(423): unsure at all n locations
ctcagctattaaacttggtcgtgtactccccaacagacatgcttccgtgtttcaaatcctgaaattccctcgccttccgcttcctcagatctcgtggaaagtaattttccagaaatttgtccttgaaggcattccaaggaatcacgcctcccgttgcaacaaatgaaggcttcacgaacttccaccaattctcggcctctccttggagcataaatgtcggataagggaccttatgctcctcgaggcaacccatcgccttgaaaatcttctccgtctcagctaaccacaacctagcaccttccggatcatagtctccactgaactttggctggtggttcttacggaaagccatgagcccncgatactccgccggctccacatcacgttcctgcaccagagtatctagcacagctgtgatgcagt

SEQ ID NO: 7337 - DNA, 209 bp, Glycine max
gcgatcctctgactcattgacaccatgcaagctccgggaaactgccatgttagcaggagtatgccatacccattctgtgacagggttgttgtgtttatagtagcgagggttatatgctgagactgcttatgtaaaactgcctcagatgaacggtctagtcaacctacggtttcacagtgaaagggtgctgtgatgcttcgcctaaagag

SEQ ID NO: 7338 - DNA, 58 bp, Glycine max
ctgaccatatcgtgtctaccgcgatctatttgtgagccactccattccttgtggccgg

SEQ ID NO: 7339 - DNA, 178 bp, Glycine max
attccacaggcttttataggatcctgatatccttaggttacactttggtggcactaggagagtccttaatagcgacaaacatgaccgaagatccctgatgcctgctatcattcagtgagtatttgttaccattgcggaaaactccctctggtaggcacgctctatcgtctactccata

SEQ ID NO: 7340 - DNA, 91 bp, Glycine max
tgccgtctctggatgacaaatgtgcagataacgatgttattcactacgtgtcaacgggctcgctcgcctctagctgaataaaggaatggat

SEQ ID NO: 7341 - DNA, 437 bp, Glycine max
  unsure (1)..(437): unsure at all n locations
agcttgttgaaattgccatgtttggatgagttaaacatacccattctgttttagggtttttgtgatgatatttgtgatgtttatatgctgaaattgctcatggaaaactgttagagatgaaaggtagagttaacctagggttagaaagtgagaatgtggtgttatgagtggaaaaagagtgaggctttgagagttggaaggctaagtctgaattctgtggtaaatggaggttaaagtgagttaatactagcttgaaatgtcatttaggacttgggagaaagcttggactgtgctagcgagaagaacaaatgaacaaagtgaacaaagagccatttctagggcaaattggatgttgaggagtcaaattntgattcggtggaattttaggtgtaaattcagtttgagcaagtttagattgatgatatggacttgtgtga

SEQ ID NO: 7342 - DNA, 438 bp, Glycine max
tcagcctgatcgctaagcgacagcttatccttggctaagcgcgacctattgttgccaagcgcaattccttatggccataactgaggtccatgaagctaagcgccagtcatggcagctaagcaagattcattgcggcaatgtgagcgctaagcgagtccttatcagctaatcgcatgctcctctgtacttaagatgcatcattttagctaagccagccagagtttggcttattgagagttgcagcttttcggatctgcaaacctcgctaagcgagaggatcctcgtgctaagcgaagcctgtgttgaagaaaaaactgattttgaatttgaaacatcggctaagcgcgtgtatccgctaagcgagccttgttgagaaaccatacgtctctctggcttgcttagcgcagctttctgctaagcgaaagtgtcgaaacatgc

SEQ ID NO: 7343 - DNA, 438 bp, Glycine max
agcttgcttagcatgtttaggatcccaataagtcagaaatagtgatggatgaatttcgggttggggaattctagacttggatctggttttgtgttgaatgaatgttaagaggtttaaagggagggatcttggcttttgagaaattatgtggatggttgggattggagtttcaacaaaaaaacttttctatgcagatcgtatcacaaaaaaaatatgaatcgaacataatcaatacttaatcaatcctttcttacacacgatccttcattaacatcctttctttcacaatcaataaacttgaatctttaaatctttgataaaaaaaattgaataagttgattaaaccttaaatgagtgaaagatatgaacaagagaaaaagacacaatcttttatattggttcactctctatttctagagaagctgagctagttatcta

SEQ ID NO: 7344 - DNA, 434 bp, Glycine max
  unsure (1)..(434): unsure at all n locations
tgcctcanaggggtccaggaaggacaaggcggccgaaggaactagttccgccccggagtacgacagtcaccgctttaggagcgttgtacaccagcagcgtttcaaagccatcaagggatggtcgtttctccgggagcgacgcgtccagctcagggacgacgagtatactgatttccaggaggaaatagggcgccggcggtgggcaccactggttactcccatggccaagtttgatccagaaatagtccttgagttttatgccaatgcttggccaacagaggagggcgtgcgtgacatgagatcctgggttaggggtcagtggatcccgttcgatgccgacgctatcagccagctcctgggatatccgatggtattggaagagggccaggaatgcgagtatggccagaggaggaaccggtctgatgggttcgatg

SEQ ID NO: 7345 - DNA, 437 bp, Glycine max
agctcgaaatggtttactatcattgatgagaggtatggggtggtgtttagtattccacagtttattatcaggattctgatatcctttggtttcacttttgtggcagcaagaaggtccttaattgccccaaacatcaccattgatacctcttgcctgccatcattcagtgagtttctgtaaccagtgcggaaaactccttttggcaggtacgtttcatcgcctatgccagatttcttaagaactcgttcttgaaactcaatggcggtttcattgaaattcctatattttttggccaactgaatgaactctgccttatagatctgcataaataccttattattgaatgcatgccaacattggaatataaaaaataaataggatcaccctctcacgcatatagccaaacaactaagagttcatgtatgcatatatgttat

SEQ ID NO: 7346 - DNA, 280 bp, Glycine max
actatctttgcattcagctctcaactttctcaattccgataaaaaataactagtatttgattattatggttaccatttaacctgagagctgttacgctgaagtcttaattatttgggacctattcagataaactttcaataaataggtacttaaggttaagaaaacaagaagtttaaatgaatcaagttaaaattagtgaatgtataagctatactgttatttagcttcttcagacagtgggtttatcttcttattgttatctcctatgagtgcttactg

SEQ ID NO: 7347 - DNA, 440 bp, Glycine max
  unsure (1)..(440): unsure at all n locations
agcttgtaggattatggngtacccatcacatgtggtactaggtgtgtggtcgggcgatggtgcacaacaagttttccacatccacaatgcgcgcataaacctaccatcccctgttgcccacctccatctgagctcacgtactcccacgtagcccatatcctcgtttctctcaacaccaggtccccatcaatcctcccaagcttccacaacatccaagcaaaacaacattcaacagcacaagctatgacagccaagcagaacagagcaaatgcagaaaactctgacaaaacaccaaccaagtcacagcttttctcacttaaagaccccagtaacaattccttcgatgcaattcgttaaccgttggatcgactccaaaatttgactggaagtctatactgcataagcctacattgngaccgttgggatctactataaaacat

SEQ ID NO: 7348 - DNA, 441 bp, Glycine max
  unsure (1)..(441): unsure at all n locations
gatgttttggctattacatgcctaaatcccttgagtggcatttgcattggttgttatcttggttgtttcatcttagtacattctgatatttgtattgcatcatgcatcaccatggtatatgtgaaaaaagtttctaagttagaaaagtttcttcatatgcaaaaactctttattttaatcaattacagtctcactgtaatcgattacaacaagttgtctggagcttaaaaagttgagtttcgtatcgatttaatcgattatagtagtcttttaatcgattatgctgttgtttgagacaatgattgatttattcaggagtctctactttaatcaattaccangtggattaatcgattacttctctcttggttaggtggtcagaagtgaacaagaacacttcaatcaattacctagagcatctaatcgattacattgttcttg

SEQ ID NO: 7349 - DNA, 397 bp, Glycine max
  unsure (1)..(397): unsure at all n locations
gagactgcagcatgtccacttcggttggaccttcctcgaaacgaatagtcctacatgtggagattacatcacgagaggttttctcctgaatatgagtgcacggaacatcccacggctgcattaaaaatacatcctttgcctcgtgcagatacctcactcattaaagattgggtgtgtgagaactccaacaagaattcactttctttgtgtcagaacaggtcctgtgtcaaatagttctacttataatagcgatagaggaatttcacatcttgactntatttattcttcatacgattcacagatcctagaagaatgtttctatataagaaatctcacacacacagtttaaataaaatcttaaatattatctcaaatgtcatatcagatcatgagttca

SEQ ID NO: 7350 - DNA, 364 bp, Glycine max
ggctaggaggaggtaagtgcagagataggggatgaaaggagtggaatgtggatgcatgatggacggctccttccatttgtagtcccttgtattatatcactatgacactattgataatcaccaactgtgcttctttgtgttttgcagccatttttgtcgcaaatttattacgtcaataactaaactgctaacaagatcaaggaaatatcaatcataaaatattctaaacaataatgaagagcaactgttgttctgttttcttcctatttctaaacttgaatccttatcactataccgccatctgtagaaaatagttcagaatctttttgcttatgcgatgcaaccattgccttgccggacttaa

SEQ ID NO: 7351 - DNA, 487 bp, Glycine max
  unsure (1)..(487): unsure at all n locations
nttgatcgcagtgaatacgntacactatacgagactctatgcaagactcagacgggcgctggacgaccaggcatgcgatagcgcttgatttagttctcaggaccacaaccttatggtcagaaacgaagtccatgaagctcacacaattttggagctaagacagacctatggaagctatgaagtcctgactcacgagactcttatgaaaacatagatggcggccatgaagtactgaacacgcatcatagcatctaagcctaccggagagtggattaatgacgaatagagattttcagagctggatgcactcgctaagcggacggatactcgtgctaagcgagacctgtgctgaaaaaagaactgcatttgaatatgagacatcggctaatcgcgtgtatccgctaagcgagcctttgtgagaaaccaaacgtgtctctggctttgctgagcgcactatctgctaagcgaaagngtccaaacatgcttg

SEQ ID NO: 7352 - DNA, 419 bp, Glycine max
  unsure (1)..(419): unsure at all n locations
agcttatgagacacaatctttggaactgaatatttattttcataaatcaaaataacaagggtataaattcttctcatgactcaacaaccctccccatcaaaactttcccctctttccctcattttctattcaaaaaaccttcatcgttaccaccactagcggatgcaccttctatgttgtgggagcaattaccccaccagattnttttttatttgttaatgtatataaaaaaaattccctcataaaaaattatatattgccccattgaattttttttaactcacaaacaaacataagacattcaatacaaaaattacatgctcaagcccaaatcatttaatccaatttcattattgttatagtaacacaaaaaaaaaacaccacacactacacggagcacactggttcatgtaacatct

SEQ ID NO: 7353 - DNA, 430 bp, Glycine max
taggctaaagtgcagatctcagtaattaaatgaatatgatttggaaatcatttaatttttgaaacgatttagtaacacttattgtgatggagctgagataaaaactgagaaaagtgaaagtttaaaattgattaaaggagtaaaggtgtgtttactgtttacaaattgttacaagagtttctatagaagtgatatgacttcatataaccaattttgtatccaagtaagaaaccatataattaaacaatatccactgatcaacatgtgcgtattaataagtaatgtggtaatacgctcttcaagtgtaggatatgttaattatatatgcgagttcttgcgagctctctctaagtgtgaggatgcacgcactttgatcaggactagctagctagtttcatacctcatatctaccactaagcagggaaaacct

SEQ ID NO: 7354 - DNA, 292 bp, Glycine max
acgtgcacacacgcgcggatactctgatgattgagagtcgtgcgacaccctacgaacagacgaacttctatgccttccatttccttctttctctgctcccctatccctctctctctccattatctttctcctccattgaagcatcatctccaagcttcttatgcaatgctcatcttggaggagaaactccttgttccatggtttatcacctagcggccggcgcccactctcacctattctacgacgccttccactgcatcttcatggcggaaaatcaccgttggaggacctc

SEQ ID NO: 7355 - DNA, 276 bp, Glycine max
gcgatggtgcacaacaagttttgcacattcacaaatcgcacataaacctatcttgccctgttgcccaccttcgactgatctgaagtactcccatgtagcccatatactcgtttctatgaacaccgggtcctcaacaatcctcccaaggcttcccagcatccaagtaacataacattcaaacaacacaaaccatcacagccaagaaaataaggcaaaggcagaaaactctgcccaaaacaccaaccaaaatcacagcttttctcacttaatgacccc

SEQ ID NO: 7356 - DNA, 495 bp, Glycine max
  unsure (1)..(495): unsure at all n locations
atgaccccatctattgaacgccgtggcantaccgtcgatgagatcgattgcaagcgtcggcgagcatcgggaccccgtcacatgtgtgactatgctttctgacggtcgatggtgcactacatgctcatgacagacacgatgcccgcatcaccttattatacactgcagcccacctctttctgatgtcacaatgtggaacgtgcacactattccatccttgacccacaccatgtgggggccaatatttgggaccttgcacggcaagcaaggctaagaaccctcacctattctagctatcacagcgaaacctaacatatataagggctaattctccgtcaaaacggaatccagattccgactattctaactaaatgaccccagtgacaatcccttcgggccgcttgggcacccagtggaacaactccaaaatctcactggaaaatactacgcataaacctcgtggtgacgctgggaatctctccttacaccaaaacc

SEQ ID NO: 7357 - DNA, 342 bp, Glycine max
tgcccttctcatcgtctccttgctcctccttttcatggatattctgcctttggttcaagattttcgcaaaaagatttgtcaattcaaactgcaaaatattatcaatatagctatacatatgtcaactgctgactttggcatattcagaatcctcaaaatcggtgtgaaaaaaccataattaataaaaaagaattagaacaatttaactcgggttggttgaagtgaatggaagttgatcatgatgcagttcagcacagaagcatatacaacttacacaggaggaattaggcacactcatgatttggtagtagttcccagcgcatgaatcccactctctcgcac

SEQ ID NO: 7358 - DNA, 132 bp, Glycine max
aaagcttcagactgtctttagcggaggaggcagactttttgtgactcgacgaggaaacggacacttgcagttttttatgactacgcgggcgacggggtccgcgaaaatcagggcgatacgaggacaacatgg

SEQ ID NO: 7359 - DNA, 398 bp, Glycine max
tttacatccattaatcaacaatgtaacacgtatatgagatcaaatttccttttcagagctatacttactaaaatctagagttgtccctcgtcagggtggacgtggccaaggtaggctctaagatctcgcatgtcgaactgagagtagcctttgttaaaaggacaagaggggggacctgcaaaataaaggacttcgacactgaagtaagtacgagagttatgtgagaataaattttgtaaaagggtgagatataacctggtacttatagagtggagtggaagctgcgggtccttattggttgggattgttacggtgttgtaacaacccttgcagataatgactagcttgtagataattgtagcttacagataatgtgtaccttgtagataattgaatac

SEQ ID NO: 7360 - DNA, 179 bp, Glycine max
ataatgaatagcataacagaatagtcttgcacgaatgccagagctactatttgaaattattcactcaacgtcactaagccctattacaatactctggcccacaaccaaatgtactttgagccacataaaattgcgcaaaatgctaattttaaatatcactacagtagacgctggtgtat

SEQ ID NO: 7361 - DNA, 55 bp, Glycine max
attgctatatgaaccactatacgatgaaagtgtcatcatttcattttacgcgtat

SEQ ID NO: 7362 - DNA, 499 bp, Glycine max
  unsure (1)..(499): unsure at all n locations
attgcatccatccattgagcgccgtatgacaccgtcgttgagaccntttgaagcccctcgttactcagaggaacacgcaggaatgtgaaaccttgtatttaatgagacaactcatgctttgtgccgtaggatgctatagacgaaatcaacagtttttttattaatcatacgctacctgattcgactgcatattgaggaatggagatactacatgatagttgacaggcatttagcgaggccggatatctgagactcttagatataagaatggttacgagtcgaccaatataatactcgttgtttcgatcaccaactacagaaaggtgaagttcgacataaaaaagattgtgcgagtgtgattctttctatcacacttatatacagagaacctgaggcgctatttggacacacataatgaacgttctaccttcgcctgtgatgacactatatagaagaattcgaggttgagtgtagacacatttatatttgtgtgcaaccg

SEQ ID NO: 7363 - DNA, 393 bp, Glycine max
  unsure (1)..(393): unsure at all n locations
gcttatcacanattttcttgagaatccattgcatttggatagtgtaagttggtatagaagtcactactgaatttgttgattgttggatgatgaaagaccaagataggatggacaacaatgttgatcattttcttccgcactcttgtcttatatattggtcgctcaatcttctgtaatctggtggagcgtccagtcatgtagaaatgagcgtccagtctagtggttcattaacatgagttatattgtaattgtaactgcgttttgtttttctattgtaactgttatagattagatagtaatttgtagtctcctttataaggaactctgtatttcgggtttagagagtttgagagtgctctgaaccctctcattgtagattgtgttattcacaat

SEQ ID NO: 7364 - DNA, 414 bp, Glycine max
  unsure (1)..(414): unsure at all n locations
tgagatgaggaagtgtagaagggcgaaacttcctgcttttatttgttgaccacagagtggtacctgnagatatgttgcgggggtcaggagaccttgtggacgtcaggtggngtgctattgcccataaccaagcttgaccaatcccgacccaacccggacatagtcagtcagtgagaacctgtgatgtacctaaacaggcgagctcctggcngtcaacagataanaggaacacagaccacacagcaaggaggcttgtgtggtggctggccagctgtgaatcttgtgtgatatatgggttgtggcctctggtaatcgattaccaagagtaggtaatcgattacaaggcttacaaatgaagacaggaggctaagatggtctctggtaatcgattaccacggggtgtaatcgattacc

SEQ ID NO: 7365 - DNA, 385 bp, Glycine max
  unsure (1)..(385): unsure at all n locations
atctttgtcctcatttcttggtagaggtccaatatggcagcttagttgtttatggatttattcatatagtaactgtgatcaggtgtcgagtagaattgcaccgggccaacaacaacaagtggaaaaacttgttacattccatattaaacaagtggagtatcatttaaagatttaattcttggtaaaatcagactgtttgccaattcaggaaacaaggaatgccctaagatgatgatttgtttggaaactggtattatttaacatcctttcttctcaatgtgactatgcaagtcattatgtcagcaaatattcacanctttttaaaatcttcctcttttgcanagtgaaattcacttttggcttgaagcacatgaaaaatatggaa

SEQ ID NO: 7366 - DNA, 305 bp, Glycine max
gcgggctcacctcactctcttgtctgcaactctagctctgaccactgctcttccttcccacgacgcttcttttcatatccgcctgagtgcgctgacaccctacaccatacttccgacgatttcctttggcattcatcacgctagttatgccgccgctgcctttgcctaaacccattccgggttcataaccgttccccaacataactggagccatcattactgctgcatgggacacgctaagctgcccatagaaggagatcacggaagaaatgctgaccacctcacgagactggaaagtgatttct

SEQ ID NO: 7367 - DNA, 283 bp, Glycine max
acatccagccccttctttcatccacattagcccctgaagtgtaaagtctctcatggctatgaaaggctaaaccccctttgttaggagcctggcaggtcaactcttgtaatgtaactctatctattatctatgtaatgcaatattgactctattattcttctctgtgcctttctgatgattatggcctgatcatccatataatggttagagtggaatgcattgaaaaataattattttctgaagaactgggaaaggatatctaaataaattcattgctagaaat

SEQ ID NO: 7368 - DNA, 456 bp, Glycine max
  unsure (1)..(456): unsure at all n locations
gggttctagattgatttctctagttgttttcttgcaacttctgtaatattttatttgttgtggattatattgttacgtttgtaactaaatttaaataagatttaagtaattntttttaaaaataatttcaataaaaataataattaatcatcattattatattataccataagttttgcaaaatgaaatgaattttccatgttcccaataattttcatttctacattctcatttcggtaactcttctaacctccacaagaaccacaagcttttgtttttaccaagtgaagtcaatttcttcaagcaacacaagtggacaacctctgtacaccggagaatgaaaatgcaagattntggttaggttgtggaacatgcaactgatattcacaaatgagaaatctcttcaattgaagtgataaaactaacacattgcatgagagagtctaagtataaaga

SEQ ID NO: 7369 - DNA, 342 bp, Glycine max
  unsure (1)..(342): unsure at all n locations
agcttgtaatcgattacacgcatactgtaatctattaccagaggagttnttcagaaaacattctcaacagtcacatctntttgtgtggttcttgaatggctatcataggcctatatatgtgtgacttgagacacgaatttcataagagtttttcagaacaaaaaggtcttatcctcttatagaacaaaaaggtcttattcaaattgttctatttgaatcaatatttaagaaattcattattaagggaatttataacttgaatagaaagttaaatagaacttttaattagggaaataagttgtaatatcttaattcaaccccccccccttcttaagatatatg

SEQ ID NO: 7370 - DNA, 432 bp, Glycine max
  unsure (1)..(432): unsure at all n locations
cttcaatntaatgaggttgaatgacaaacctgcttggtaccaaaagcgagcaatatgttgatgcaccttcaatacttcattcttatccattgactctattatgttcatttgcctcagcatctccatttttctccgattgattgcattttctagattcttacaaaatttgtccattggtccttttttagtcccacactttgtctttgcacttgcagcagcattaaaagagtctgcaaactcatcttcttcacttccatcacatccaatcggttcaccaaattcaaagtctcttatatttgccatattaccactgccagaagtactgtaagtggtcccactttattttgtagccatatattccttcaactcttcgactacatttgggggagttatcttgcaagctgcaacgtcgcccgacttcccaatcacgtg

SEQ ID NO: 7371 - DNA, 328 bp, Glycine max
agcttctgataccatcttccaaagctcttcctcaaccgtaagccaatactgcttgtgaaagaagacctggaaaccgtttggactagtagctttaaacaatttcatcttcatcataactttccttacctcttccttggtgataggagccaagagagcacaacaatcctcgttatggagataagggtgggggatcatgtccggctgaggaacacagatggaatcaccagtggataaggttgtaaaatacctattggcttcttactggagagtttctagatttgtgtaccatgtaccatcatgcaagaacaggctatgaatcttagtgcat

SEQ ID NO: 7372 - DNA, 404 bp, Glycine max
  unsure (1)..(404): unsure at all n locations
tgtttgtgaggtatctagaaagttgtggagaatattgactctgtaagttttctatatactcaacaaaacctattaagaaagtataaacatatcctttttcgagaagaggcattgtggtttcaacaatttagggctaaatgaattcttctaggaagcataaatacatcattttccatgattaaaccgtgatttggaggaagcataagaaaatgcattgactcttcttgcccttgggaattatgtgtacaaatgaggacatacttanggagaaaggtgtaaggtacttcaatgatctatcttgagtataaaaaaaaagttatggaaattctccaatctatatacaccaaccccaacaagctatcaaaggaagacaaactggctcttgtaaaatggtgagaaaagat

SEQ ID NO: 7373 - DNA, 406 bp, Glycine max
  unsure (1)..(406): unsure at all n locations
agctntgagccaattcanacgacaattactttttacatggatgtctgattgagtcctgtcatatatcgagacgctcgaaattgaatgttgaatctctgagccaatccaaacgacaataactttttactcggatgtctgattgtgtcccgtaatataacgagactctcaaaattgaatgttgaagctctgagctaattcaaacgacaataacttttaactcggatgtctgattgagtcctgtcatacatcgagacgctcgaaattgaatgttgaagctctgagccaattcanacgacaataancttttactcggatgtctgattgactctcgtcacatatcgagacgctcgaaattgaatgttgaagctctgagccaattaaacgacaataactgtntactcggatg

SEQ ID NO: 7374 - DNA, 436 bp, Glycine max
actcagcttaacattcaatattgagcgtctcgtaatattacgggactcaatcagacatccgagtaaaaatatattgtcgtttggattggctcacagattcaacattcaatttcgagcgtctcaatatattacgggactcattcagacatccgagtaaaaagttattgtcgtttgaattagcttagagcttcaacaatcaatttcgagcgtctcgttatatcacgggactcaatcagacatccgagtaaaaagttattgtcgtttgaattggctcagagcttcaacattcaatttcgagcgtctcgatatatgacaggactcaatcagacatccgagaaaaaagttattgtcgtttgaatttgctcagaggttcaacattcaatttcgagcgtctcgatatattacaggactcaatcagacatccgagtaaaaagat

SEQ ID NO: 7375 - DNA, 435 bp, Glycine max
  unsure (1)..(435): unsure at all n locations
agcttaaagtatgcccgagtcattcatccctatgagatgttgttgaagtattggcgatcagaattgccattccttggattatagggttgaaccaagctcatgcttttacaaaaaggttcatcaagtcaagttgaaatatggaagtaaccgtcttgcaaaattggggcaaaagatgaatcgagtcacatcactgcttcgtctactgccaaacatatttaggattgttgatgtccttgttacttccagtttcaccttgacaaagatgtcatggaccatgttgaaaatctaaattgattcaaccccatatcctgcgtaaaaattcgcaatacttcaattgtacatcattcgcatacatccatgcttttcattggttgcattgctcattgcattctttccttgananataaaataaaataaaataaaatgaacttaatc

SEQ ID NO: 7376 - DNA, 476 bp, Glycine max
  unsure (1)..(476): unsure at all n locations
taactcactcacacataacaagtttagcatgctttcgtcaaatctcttcacaaataactatcacaaagcattaaccaagcaaaactgcccatcatatctcccaaagccccatacccacgaaaatcaagtgagaaagaagtctacccaaacctgaaattttgaggtcccacacgtagagatgcgctgcacgactccgaaaatgtcttcctttcgcgatttggagcagaaatgggcaccaaaggttggagctttaatggagtttcaatggaggatgaagaggaaagaaaaagcaacgtgagggagagggagaaagcttctgaaatgtgggctgagtgaagagagagagagttgttttttggtttaaaaaggcttttttctcttttctattatattattctaagatatgccacatgtctncatttgagtggagcacaaggcccacttttctcttgatgtaactcatgctcagccacatg

SEQ ID NO: 7377 - DNA, 390 bp, Glycine max
  unsure (1)..(390): unsure at all n locations
agcttaagaaccttanacacaggttgaaaatgtggagtaaggagaattcaacagatatatatactcaaataaagcacctccaacagaatatgaatgagttggagaattctatgtcatctcagccttcggagcaacaaatcaagcagctgaaggaacttcaatctaagctatgggaaaaggctaatctccatgaatgtatcttgagacagaaagctagaagtagatgggttaaagagggggacagcaacagttcgtatttccacaaactaatcaattacagtaggaggagaaatgctatcaggggtttgttgattgatggttcttgggttgaagaccctctcttggtaaggctgaggtttacagcactttcaaatagatccatgaacctca

SEQ ID NO: 7378 - DNA, 462 bp, Glycine max
  unsure (1)..(462): unsure at all n locations
tctagcacactccagacatcttcgcacanatcccaacggtcagatcttggaaaggtgtcttttgaagttgcaaaccatatttcgagacgatccaacggttaaagaaggctgggcagcatttttaccgaggaagctccatgtagttttctctagaagcttcattaagaggcttctagcacactccagacatcttctcaaagatcccaacggtcagatcatggacaagtgtcttgtgaagttgcagagcaaagttcgagaagatccaacggttaatgaaggctgggcagtgtttttaccgaggcagcttcatgtagctttctctagaagcttcattaagaggcttcctctagaagcttcctcgtggcttcttcgagaagctgtctcaagaggcttctttgagaagctacatccttatctatccacncctctattaactaaattaacttccttcaaaattattac

SEQ ID NO: 7379 - DNA, 486 bp, Glycine max
  unsure (1)..(486): unsure at all n locations
agcttggcctcagggcaattccctcctttcacgccaaattactttgctgatcctgaaatcaatgaaatgctattagaaattatatacaaaataaatcacagtttaatttttttataaactcataaatataatattttaatagtctacattcatcattccattccatgtgtacaaacaattaggctacattaaaattgtagtcccccctaattttaaaattgtaattntgatcccttatttttaaatcaaaatatttagtttttttattttaaaaaataaataattctaattntttttcattagttgataatttaaagtcaaatattaactntgatgtgacatattagtgatgttgaacttatataagcaattgacatgagactatgtgaaanaagaattaaataaagtgaataataaaaaaatattntaataggaattgaactcataactatttatttatagataaaataaaaattactaattcac

SEQ ID NO: 7380 - DNA, 449 bp, Glycine max
  unsure (1)..(449): unsure at all n locations
ctcacgctgtggactgaggacaacttgtgccaaccgcgaaatagatgttgagatcagcggaaacacgaatgacacctttgttaaaatcaacatgtgtaaagatcaaaggctggccttggtaaccatcaactgctacaacatcaagagggcaatctgcacctgtgcttgtcatatcaaggccacctaaatccggggaagccggaacgatgtaataactcgaacgagctcgaactatctttcctgatgtgtccagcacttgctcaggtgcacgacctgctgcaccaataatagcctttgtgctcacagcaactataaggaccaatgttaccaatgtcatcttcattgttctagttttagttatgtgtttttgcaacttgtgatggatatggaagaagagggagattatatctacgttcngaattggtgtaatccatgtacccatgtgcaca

SEQ ID NO: 7381 - DNA, 461 bp, Glycine max
  unsure (1)..(461): unsure at all n locations
agcttgcttgtgggcttctatggaggctggatctttgagcttcaatgaggtcctttaatggtgattttccaccatggagatgcagtggaagacaaaggagaagaggtgagaggaggcgccatccactatggaataagccatggaagaaggagcttcaccaccaacatgagccttggataagaagcttggagaggatgcttcaatggaggaaaagaaagagggagagaaagagagaggggggagcacgaaattgaaggaagaaaatgggagagtagttgaactttgagttgtgtctcacaagactctcattcatcaaagttacaataagtgttacacatgcttctatntatagactangtagcttccttgagaagctntcttgagaaaaacttcttgagaagcttctttgagaaaacttccttgagaagctagagcttagctacacatacccctctcataac

SEQ ID NO: 7382 - DNA, 437 bp, Glycine max
tatgaaacaacaccttttctgtctagaaattacagataatgccaagtaattatagaaggagcactttcatttctattataaaacttgtggataaagcataatagtacatgaaatgaataacccaccactagtacaaattcatcccatgaatatattgccaacccaaaactttcaacttcttgcttttgtttagggttaacctttccgaagcttacaattgttgtaacaaagacataaaaatgaatgcttctttctaaagcacaagcattttaggaaagaaaggagagaatcaacaaaacttactcttgagatactttgttgcatttggaaatgttttgaatagctgaaaagtttcgaaacaaatatttgggtgagactgactgtttacaaaagattgtacacaactctcaaatccttcctaacaattaaactgctat

SEQ ID NO: 7383 - DNA, 430 bp, Glycine max
  unsure (1)..(430): unsure at all n locations
tgccacccagctcgcccaggcgagcagggttgcttcctccataagcaacagccttctggaggaatcttctggagggcccaagtgggcctggttgctatttgcacccccatttttactaaatacacccccctgctttttttttgtgattcttttttggtaaagttatggaaacatacgaattttgtaacgatacttgttttctttccgtaatgttacggaaccttgcggatcacataatcatcccctttntgacttacggaatgttacggaacctcactaattgtgcaacgatgcttccatttgatctccggtgtgtcacggaaccttacgaattgtgcatcaatattttcttttgttttccggcacgtcccggaatttcacaaattgcctaatgatgggtgccaagcacctcacaaggaccaaacaaaag

SEQ ID NO: 7384 - DNA, 385 bp, Glycine max
tggagaggatgcttctgtggcggaacagattgagggatagtgtgagagaggggggagcacgaaattgaatgatgaagaagggagagaagatgaactttgagttgagtctcacaagactataagtgatcacaggtacatctggggttacacatgctgcgatctatagactacgtggcctacttgagatgctatcttgagaacacatacttgagaagcggcttagagaaaactatcatgagaagctagagcttagctactcacacccatgttatgactgcgctcacctcctcgagaatagaatctagagcttaggtacacaccgttataataggttagctcacccccctgacacatatacgtgaacctacgaactataagacctact

SEQ ID NO: 7385 - DNA, 329 bp, Glycine max
  unsure (1)..(329): unsure at all n locations
tcgtanagcttacgataagatctggtacctatccatggcagaggtctccaccgaggccattgcctccctcgcccaatattatgacgagccgttgaggtgcttcatctttggggacttccagttatcacccacggtggaagagtttgaagaaatccagggatgccctctggggggaaggaaaccatacctcttcttgggattccatccctctttagctagaatttccaagatagtccaaatctcgacgcaggaattataccacagaaagcaagtcgaanatggggtggttggagtaccaacggaaatgttggaagcaaaagcaagagtct

SEQ ID NO: 7386 - DNA, 476 bp, Glycine max
  unsure (1)..(476): unsure at all n locations
ggtgaggaatgttgaaacttctaaccctgtgtgctaatagaatcattaagctggcttgatttggtttatacaacaaattattttctggatagattcaagtcttctatccttccttgcttaacattggttntgtagtttttgtctaactttagtggaagctgttgtggcttctttgtgcctttcactcaaatttttaactagtgtttattttgagttgttgcaggtatcagagagaagaagcaaaaatccaagcttgggtaaacctcgaaaatgctaaagcagaggccaggtcaagaaagcttgaggtatttcattgtctaactttagtggaagctgctgtggcttctttgtgcctttcacttcaaattttaactagtggttatttttaactagtgcttctttgtgcctttcactcaattgtggaagctgctgtggcttctaatatgtatggctgaaagtgaattgtgattttgagt

SEQ ID NO: 7387 - DNA, 398 bp, Glycine max
  unsure (1)..(398): unsure at all n locations
agcttgtaggattatggggtatccatcacatgtggtactaggtggcggtcgggcgatggtgcgagtcaacactccacatccacaaatcacacataaacccaccatccccagttgcccaccttcactgagctcacatactcccacgtagcccttatcctcgttcctctcaacaccgggtccccatcaatcctcccaagctttcacaacatccaagtaattcaacatccaagcatcatgaactaacacaaccaagaaaacagggcagaggcagaaaactctgcccaaaacacaattcaatatcacagctttccttacttanagaccccagtaacattttcttcgttccaattcgttcaccggtggatcgaactcgaaatttaatggaagtctctagacat

SEQ ID NO: 7388 - DNA, 429 bp, Glycine max
  unsure (1)..(429): unsure at all n locations
aagcaattaaactaactaaattaaatgctagaaaaatagaaataaaaagagacctgtgttgcctccccgtaagcgctcggttaatgtcattagcttgacgcatcgtcctgttatcctggattgaagcgtagaatactgttcaatctctcaatagctccaccatgatattgctttagcctttgtccgttcaccacccatatgacgatcacaaagnctcactgcttcatatgttcggactttcttgatggtaaatggtctagaccatttcgatttaagcttnccaggacacaatttaagtcttgaggtgaacagcaacacttgttgtccttgttgaaaatccctcttgagcagttctctatcatgatactctntacatttttctttgtacaactgtgaagattcataagcagttacatttatctcttcaac

SEQ ID NO: 7389 - DNA, 383 bp, Glycine max
  unsure (1)..(383): unsure at all n locations
agctngaaggtatcagctcacccaggcgagctggttgcttaaggctgaagctttcccatggcccaggcgagccaaatgctggcctgngtgagtttaggtctagaaaatgaccattttgcccctttccttgtggcttttgtttctggatctaacaatcaaacatcaaccctgagcgacccttcggcattgcgctgcaactggtgccaaacaccgtaattcaattagcaatgatcaaaagatcatgtccaaatgataaaaacattatacctggatgaaattagggtctgacagttgcccctctttacttatcttttattaaaaataaaagataagtaaagacaatgacactaatttcattngagccgtctgactattcaaaatca

SEQ ID NO: 7390 - DNA, 452 bp, Glycine max
  unsure (1)..(452): unsure at all n locations
ctctggagtataaacatgggaccaactcattntatttcacaacagaagtcatatctagtcaaggtctgagagaccatacaagtttcctaacgatttctaattatgtgggccattaagtctatcatatgctgacaatagccgagaagcccatgaatctcttctggggtggagtaggtgtctgccatcgccttggacttggctaataagcggagaagttcttgactcccgttcaacgtaacagcaaaccggtccatacacatggttgcctcttggtgtaaagagtcgatcacccttcctctagcctcttattccgcgtatacttgagcatactcgtccgtgattctatgctgcggggccatggatagacccaactcttcttggacttagcgatgaagctagcatgttggactccgtctcgcataaacgctgagacaagcttcttttggacctcg

SEQ ID NO: 7391 - DNA, 397 bp, Glycine max
  unsure (1)..(397): unsure at all n locations
agctngagatgaggaagtgtagaagggtgaatcttcctgcttttattcgttgaccacagagtggtacctggagatatgtcgcgggggtcaggagaccttggggacgccaggtggggtgctattgcccaaaaccaagcttgaccaatcccgacccaacccgggcatagtcgatcagtgagaacctgtgatatacctaaacaggcgagctcctggctgtcaacagataaaaggaacaaagaccacanagcaaggaggcttatggtggctggccagttgtgaatcttgtgtgatatatgggttatggcctctggtaatcgattaccaagggtgggtaatcgattacaaggcttaaaaatgaagacaggacgctaatatggtctctggtagatccatacca

SEQ ID NO: 7392 - DNA, 427 bp, Glycine max
  unsure (1)..(427): unsure at all n locations
ngtagctnttgcatanntttttggtttagaatttanattactgcctgcctctaattatatcatgttttgaataaaattaagctacaacatgaccaataagacaagaacaacattgattagaaattactttttgttgtttattttttacttagaaattgtttacattgatttttaattttttccaaattgttgtagagatgagtgcttctagtcctagtcaagctaaataacaagatgatgataccaaacctttatggacctatgttataaagataaaaagtgtaggtggtggtggaaattatgcggtaaaatgcaatatttgtgattntacctttaatgggtcttacactagagtgatggcacacttgttaaagatgacgggaaaagggagttagagtttgtcaaaaggtaacaattgccaaactta

SEQ ID NO: 7393 - DNA, 396 bp, Glycine max
  unsure (1)..(396): unsure at all n locations
aagcacctgcggcatgcaagctttcaccagatcatataagataattgcatttacgcaatctgcagatatatcctgccaaacgtcaaattctccgactatatatacaacctttccatcactggcacgtggagtgaatcttcctncatggcgcaatactaaagttatattgacattcattctacacaatcagaaaccacagacatggtcagatattatgaaataaaaaaacctacctcaaaaagcgcgaagacattgacattgtcaaaaagcgcgaagacacaatcagaaaccaaaaacattgtcatctataagaacagagcatcataaacgagaataataaaggatcataaaccttcctacgaagcgcgaagacaatgcagatgaaacccctcaaca

SEQ ID NO: 7394 - DNA, 400 bp, Glycine max
gatgatatggtcttcaccgacgataggatcatattggtctataaagaggcaaatctgatcatcatgctttgatacatgccaaagaacaactagggcgaatgaagagggtgagaatgagggagaagcccatgttgtgactgccattcctatagagctagagtaatgcgttgcatgttgatttatactggttcgagcacttcccgtgcctacgtgcagatctcaagcaacccacttgagatattccactctctttgtgaaactccttttacaaagtctgaaccacacagggacaacccttcccttgtgttcacgaatcctctacaacaagagacccacggtctcttaatccctcttctgaagtaagaagaagagaagaagagatctctcttattagagatac

SEQ ID NO: 7395 - DNA, 454 bp, Glycine max
  unsure (1)..(454): unsure at all n locations
agcttctctcctagctacatggtgcgttngcaatgatagaagctaggcgatcctgcagaaaaccttggactatgcttgtggagctggtgctgaatataaccctctccgctaaaacgggtcttgtttccagcccaacaccgttagggcccactgtaactacgccgtgaacagctacttccaaaggaagggtcaagggtcctgcgactatgcgggaacagccactgttactgcatctgaccccagtaaatccttcaatctctcttttctttttctttgttttctctcttagcatttattccttggaacaataatcgtagctgacccttttatctgtttctctttntcttgatgagcaggctctggcggtacttgtgtttacacttctagcgtcaggtatgtatntgtatttgatccacccatcatcaagctttcttctggttaatatgctaatctt

SEQ ID NO: 7396 - DNA, 591 bp, Glycine max
  unsure (1)..(591): unsure at all n locations
cgggcccanngccccacggcntttganttcgattgcactntccgtgacacgtagtagactactcaagtcctacgagcttcattgatcaatgacacagcgtattgacactaagctagtatttgaatgctgataataaagcccactaagaatgagacctgcgttgcctccccgtaagcgctatgataatgtctttcactagactcatcgtactgttatactgattcgaagtgtagagaaatgtgttatctgacactagagacgccgtgatcttgatttaggagttgagcgttcgccgactatctgaggatcacattgctccgatgcttcatatgtccagcatatctcgatggttgatggactagacacatttctatttatgctttccatgacccaattatagtctctctgtgaatagcatcacttgttgctcttgttgaataccactgatgagcagtgatttatcatgatactaactgattntgtctctgtacaactgagaagattcatggtgagatcatattctctctttccgctccagaagtccgagcctccttagctctctggattncgctccatcgagttgagcacatn

SEQ ID NO: 7397 - DNA, 372 bp, Glycine max
  unsure (1)..(372): unsure at all n locations
ccacatattctgattaatatattaagaatgtatatcataaccatataatatcataatttcacgttcaagntgcatattaaggtcatagataacacaggaagtaccgcattcatattgttcgatcgggttgttaatttctttattggaaaatcggcaaggatgtacttgaagagaatgaaagggtacatctaaaataattcccaacccatatatatcgtttatacagattatattatacagtttctgatttattatataaattatataataaactccacaagggaatcaaaggtcatcagtttccaactctcttcaattcatttaaggacaaataatttttgttcaaattgaagtcaatgatggtaacatcta

SEQ ID NO: 7398 - DNA, 384 bp, Glycine max
  unsure (1)..(384): unsure at all n locations
ggtaatcgattacataccttgtgtaatcgattacaggcttttaaattcaaattcaaaatttgaaaattgtttcataaattaatttagccactggtaatcgattaccagagaggaaatatcatatttttgaaaagataattgttcttaaaaaaacttgtaaaatatttcctttatccaaacctgtgcagtattaattaaggaattctttctaagatcctaactaagtacatcgctcttcttgcatttctgaattcttgacttgaatcgcgctcatctttggcatcatcaatgtggcgtccctaaataatgactggtctaatcgtaatgatntaaataacananaccatgggaattctttcttctctttctctttcgtcctttctc

SEQ ID NO: 7399 - DNA, 402 bp, Glycine max
  unsure (1)..(402): unsure at all n locations
agcttgtaggattatggcgtacccgtcatatgtggtactaggtggctatcgggcgatggtgcaagtcgactctccacatccacaaatcacacataaatccaccatcccaagttgcccaccttcaactgagctcacgtagtcccacgtagcccttatcctgattcctctcaacaccgggtccccatcaatccctccaagcttccataacatccaagcaattcaacatccaaacatcatgaattatcagaaccaagacaacagggcagaggcagaaaactctgcccaaaacacaaaccaataccacagctntccttactcacataccccaataacattctctttgttccaattcgttcaccgttggatcgactcgaaaattttactggaggtccctagtacata

SEQ ID NO: 7400 - DNA, 326 bp, Glycine max
  unsure (1)..(326): unsure at all n locations
tgcccacagaaggagtccacggaggaaatgcttactccctcataagactggaaacaggtctctaatgactcctctacggcttcgacataaggcatanaggatgggcagctcacccagatgtcctcctcgcctgatacgataaccagatgcccttccactacgaatttcaacttttggtggagtgttgaaggaacaactcctactgagtggatccacgggcgccccaacagacagctgtaggggggttaatatccattatttggaaagtaacttgacaggtgtgagggcctatctgtattgggagatcgatctcttccctaacctct

SEQ ID NO: 7401 - DNA, 336 bp, Glycine max
agcttcctttacacaaagagaagagaataatgaaggattgaagaaatacaagtagtggggatgtctcctccacctctagaacctcacaatcactcacagactcatctcatgctctcaggatggcttcctcttctcactctgttctctaccagtcttctcacagcaaaagctttgaaaactctctggaacttggacctttctctctttagaagtctctaaacatgcaaaagctttgataatttcccaaactcccctccaaaatctgatttcaggcttaaataggtggctttgtttgtgctagcacgcttagtgcaactatggaccgctcagcgtgca

SEQ ID NO: 7402 - DNA, 194 bp, Glycine max
  unsure (1)..(194): unsure at all n locations
gtgctcatttctgctccacatcgtgtaaggagagcatcttcngngtcgtgaagtgcgtggctacgagtgggacttctaaaatccacgtttgggtggacttctttccctcttgattttcgtgggtatggggttttgggagatatgaggggtagttttgttagttttccgctgtgtgatgaccatttgtgaataca

SEQ ID NO: 7403 - DNA, 459 bp, Glycine max
  unsure (1)..(459): unsure at all n locations
aaatttggcttatacatgcctaactcccttgagtggcattttatattagttggtatcttggctgctgcatattagtacattagatatttggtttgcattgtgcctcatcctagtgtgtgtgaagaaaagattctaagttagaaaacttggcttataggaaaacactctttgttttgatcgactacagcagtgccgttatcgattacaacaagctaactgctctcaatcgtggtctgggagtttggcttcacaagatagctacaggagatcgtgtggcatctatggtgtttaaaaacaagtctactaattatgatataaactcagaccttntattgtttgcanagcacatattttgccttaagattttcttgcagtctactttcttttgtgacaagaacaatggtctatacatgcctttacatatcatgttcatgctcttaancaaaagtgttctcgtcg

SEQ ID NO: 7404 - DNA, 486 bp, Glycine max
  unsure (1)..(486): unsure at all n locations
nntgtctcaagtattcaaatctgactcttggaagtgccttgatcagaatgtcagcactttgattctctgttttgcagtacagtaacttcacttctccttccctttgaacttctcttagaagaaaaagctntatcttgaaatgcttagttntgccatgaaacactggatcattagcaatttagattgcagcctgggtgtccacaaaaatctgtgtgctttcttcttgtttcatatgcaaatctgtcataattttcctgatccaaagagcttgattcactgtagcaacaatagctacatactctgcttctgtagttgattgagctacaacttcttgctttntaaaacaccaagaaaagactccagaaccaaaggagaaacaataaccagaggtgcttctcatgtcatcaatacaacctgtccagtcactatcagaatatccatggagcttanattatgagaaagagagtacatataccatagtctaaa

SEQ ID NO: 7405 - DNA, 352 bp, Glycine max
  unsure (1)..(352): unsure at all n locations
tccttntagtgcgtcacgtttaaaaccaagctcgatggtggtgtgagcctttgatggtactcggcgggaagtgatgggggaaatcgacattcccattcagataggcccccacacatgcaacgtggtgtttcaagtaatggatataaatcccgcctatagctgcctcttgggaagaccgtggattcatgccctgtgagtggtcccttcaacgcttcaccagaaattgaagttcgcagtaggtggacttttagtgatagtgtcgggtgaagaggatatgttagtgagctgcccctcctccgccccatatgtagaagcggcagaagaatcattggaaacgactttccaatcattc

SEQ ID NO: 7406 - DNA, 389 bp, Glycine max
  unsure (1)..(389): unsure at all n locations
agcttagttacacatacctctctaatagctaagttcacctccttaagatgagaagctagagcttagctacacaccccctataatagctaagctcacccatatgccaaaaaacatgaaaatacaaaaaaagttcctactacaaagactactcaaaatgccccgaaatacaaggctaaaaccctatactactagaatgaccaaaatacaaggcccaaacgaaggaaaaacctattctaatatttacaaagataagcgggttcatacttagcccatgggctcaaaatctaccctaaggctcatgagaaccctagggccttcccttggatctctagcccaatctacttggagtcttctatccaatgcccttacggggtaggatngcatctata

SEQ ID NO: 7407 - DNA, 482 bp, Glycine max
tacctattatcaatgattatatcattcgcacccatctttgagctaaattataattgtattgaccggtgagccttgagttgtaattcctatttaccttgcttaggttttaagagagcacattggtttaggacaatttcaccccaaatttgggggagtctgttaaatggttagtgtttaaaggtaagaaacaacaacacacacaacaaataaataaataaaaaaataagagaaaaaaaaaagagaagaagacaagagttcaaataagtgtgtgttgttagaacaagtcaagtgaaaggctaatgagcaagctaagtatatttaaaagactaattggttaagtctatgatctatgctctcttagaatataagcctttgaattctagaccaaccaatactcttgtagcccagcctcattacaagccaataaaagtccttctgattcaatttgtgcatttctaacttcatgacatgagatgaagttc

SEQ ID NO: 7408 - DNA, 452 bp, Glycine max
  unsure (1)..(452): unsure at all n locations
atcctctgagtcacctgcggctgcaagctttggaacagttctgataaacattaccgacactattgaaacagtaaaatattgggtctatttaaaagagtccttgttccctttgtgagacaccctttcagatagtctcaaaaccaggttttagagatagaagctctgcctagggaaaacctctntgtaagcttttatttcgatttcaataaattcaaagttccattttgcacatctcccttctcccttcactgatcctgtgcagctctgtcgccgcttcgatttctttgttttcaaaaacctgggtttgtaagccggattccggtgtgcccttgataattgttctacatatatctttatttgtcatattgcattactcttacttcctatctgtccgtctatatcctttccgctgatatatatatatatgtaacaacaggtgaagatatcaaaca

SEQ ID NO: 7409 - DNA, 437 bp, Glycine max
  unsure (1)..(437): unsure at all n locations
tggttntgggcaatagcaccccacctgacgtccncaaggtctcctgacccccgcgacatatctccaggtaccactctgtggtcaacaataaaagcaggaagtttcacccttcaacacttcctcatctcaagcttgtaggattatggggtacccatcacatgtggtactaggtggcggtcgggcgatggtgcacaacaagttttccacatccacaatgcgcgcataaacccaccatcccctgttgcccacctccaactgagctcacgtactcccacgtagcccatatcctcgtttctctcaacaccgggtccccatcaatcctcctaagcttccacaacatccaagcaaaacaacattcaaacagcacaagctatcacagccaagcaaaacagagcanaggcagaaaactctgctcaacacatcaaccaaaatcacag

SEQ ID NO: 7410 - DNA, 421 bp, Glycine max
  unsure (1)..(421): unsure at all n locations
agcttgtagaattcaccccaattccagtatcctatgctgacttgctgccatatctacttgataattcaatggtagccataaccctagtcaaggttcatcaacctccatttctccgagaatacgactcgaacgcaacgtgtgtttgtcacggagaagccccggggcgttccattgagcattgtagggctctgaagcataaggtgcaaggtctaattgatttgggctggctgaaatttgaggagaatcgcgtgtaaatcctgacattaacaagagatgccacacatggggcaattntgaaagtttttgttagatgtctctaatgactcatcaggattttcaagtttgtacaattattgtaaaccacaattacaatgttaaatgaaatggataaagttgatatctttgtccctcgtcctctcac

SEQ ID NO: 7411 - DNA, 400 bp, Glycine max
  unsure (1)..(400): unsure at all n locations
agctntcttaataaaacttgcttgagaagcttctttgagaaaacttccttgagaagctagagcttagctacacacacccatctaaaaactaagctcacctccttgacaaaatacatgaaaatacaaaacagtgcctactacaaagactactcaaaatgccttgaaatacaaggctaaaaccctatactactagaatggtcaaaatacaaggcctaaataaaggaaaaacctattctaaaaattacaaagaagagtggatccaaccttgacccatgggctcagaaatctaccctaagggtcatgagaaccctaggccttctttatatctctagcgcaagcctctaggagtcttctatccatactcttgggcggtggatagatcatccctccacctggatgg

SEQ ID NO: 7412 - DNA, 326 bp, Glycine max
  unsure (1)..(326): unsure at all n locations
tgtataacggctagacatgatacatgtcatggctgggtttggctcaatgataacacggatgccccacattatttccatgacacaaatgtacaaatgatgattgggaaattttatgcccaactggtcatgcatgcacctatgctgacactcaagtgtcaaattattatggtcatgtgatgctaaggctcaagattcatttgctctattctactcaacccaatgtttccaaaatatgggggtttctcagctagacaacttattattctttttccatctatttccttacttgctctgttttttctcattanctctctctaccatctcat

SEQ ID NO: 7413 - DNA, 354 bp, Glycine max
agcttcaatgttaatgtcacatcagataatgtcaaaaaccgtatcacattatggagatcatggtatggtattgtaagtgacatccttggccatagtggatttgattgggatggcactaagcacatgatcacagttgagaatgaaaatgcttggaatgaatattgcacggtaagtattctttaatatgttgctattttttattcaaagcagattggatttgactttttctttgttttccagtcgcgaaaatcggctaaatcgtttcgattcaaggtgcgttcaaaatgagatgatatagtgaatttgtgtgctaaagatagagccaccggtcatggagtgttatggatgctgatg

SEQ ID NO: 7414 - DNA, 435 bp, Glycine max
  unsure (1)..(435): unsure at all n locations
tattgcaattgcaatacttgcacaattacagtgctcagcacacagggaaaggaatgcaaaaatttacacagcttgaagcacttcaattattcagctataacactagtccttgaccattgcccttttctttgtgttaatttattaatatctaagctagcctcagctaaagggaagaaacataaactattacatcaatgggaattctagaaccacacaatcacaagatagaatgaccaaactaggtgatcatcagcatttgtttcattctataacggaatgggtcaccacaacattcccatcactcggtagaaatatgtgaatacacctttctttctgtatctactattttaactcttcacaccccttttctcacgtttttgtatatataccaaaaatacctctntcctctcacattcaatccactacactcctgct

SEQ ID NO: 7415 - DNA, 433 bp, Glycine max
  unsure (1)..(433): unsure at all n locations
agcttatgcacggaaaatgtaattatgatattgagatgcccgaagaaacaccatttcctagttaaccatgcattangtaccatgttcaattatcttgttttgtcagtgtgtgttttttttatttttagaaatgggtttatgatcccaacatggttggctcatggtgcctaacacatgcaactaagaatgtagtgtgaagtttcacgctctcccttttttgtttttgttntatagaggaaaacgcaaggatgagcatacatgacaacaaatggtatgcaatcttgcagatcacaaagtttgttgaacgcatatgcatgatgatgccatgactcatgcaaaatgtgaggctggaatatgataatggacaaatgcacgaacgatatgtccattatgatgttatgaagagatgcttatgcaatgcatgatatgaatg

SEQ ID NO: 7416 - DNA, 459 bp, Glycine max
  unsure (1)..(459): unsure at all n locations
cttatggattatggggcacccgtcatatgtggtactangtggcgatcgggcgatggcacaaatcaactctcccacttccacaagtcaaacataaacacaccatccccaattgcccacctttaaattgagctcacgcactcctacgtagcccttatccttgttcctctcagcaccgggtctccatcaacccctccaagcttccacaatatccaaacaattctatttcatttatcatgaaactaccataaaccaagaaaacagagtagaggcagaaaactctgcccaaaactcattcaaattccacagttttccctactcacataccccagtaacattttcttcgttccgattcgttaaccattggatcgccttgaaaattntattggaggttcctagtacataaatctacatcttgaccgctgggatctgctataaaatgcctgtaacaagagatgacta

SEQ ID NO: 7417 - DNA, 230 bp, Glycine max
agctttactcggatgtgcgattgagtccctattatatcgagatgctccagattgaaaatagtacctcctatcgaattctaaccataataactttttactcggatgtccgattgtgtcccgtagtatatcgcgacgctcgagattgaaaacataatgtctgatcaaattcaaacgactataactttatactaaatgtccaattggagtccgtaatatatcgagacgctcca

SEQ ID NO: 7418 - DNA, 609 bp, Glycine max
  unsure (1)..(609): unsure at all n locations
aaattctctctcaatctcatcgtctcgtgnnttctnttncnnnctctcctctacatgcncagactgcgtgaatgatgcactcgtggacgtacactatcaatacaaacgctgcgttctcaatcttgagcatcctgatatattactgaggtctatttgacattcgggtaaaaagtcatcggcatgtgaatttgctaaaagcatctgtctctaactaccagtgtctcgatatattacaggactacatcacacctatgagactaaagtcattgtcatgagaattttcttagagcttccgatttcaattacgagcatcgacatattacggcccccaatcggacactccggctaaaagctattgcggttctcatttactatgacctacctgttctagtttccagcttatcgatatgataccggacctatctcgacatccgagtaaaaagcgattcgcgcacgaatctgctctgagcttccgctctcaattaccaccactcctacatgttatggcactcattcncgcctcccacgtataagctattgcggctcgagtntggatcaagctctngctctcaatcttcacacgcctgacatcttcccagacacacaccg

SEQ ID NO: 7419 - DNA, 403 bp, Glycine max
  unsure (1)..(403): unsure at all n locations
agcttctcccccattntgctataaatagggggagaagtgaagaagaaaagggttcagcctcttaggcacttctctctctctcgaaattgctgaggaaaattatttccgtgaagaaaatccaagccgaggcgcttctgtaatgtttccgtgagaaattacgcgaagattctcgaccgttcttcaagattcatcgttcgttcttcgttttcttaagtcttcaacgggtaagtacctcanaccaagcttttcaattcattctatgttcccgtggtggtccacatnttgtttcatgtanttttattctcgttttcatttgcttcttatanccccttttgacgtgcttaagccatttatttaagtcgnttctcgcttaatctaaaaataaaataaatttccaccgatc

SEQ ID NO: 7420 - DNA, 447 bp, Glycine max
  unsure (1)..(447): unsure at all n locations
tgtctatccgatgcagcaataatgatggcccgagttatgttggggaatgattacgaacccggaatgggtttaggcaaagacaacggcggcataactagcttgataaatgccaaaggaaatcgtgggaagtatggtttaggctataaacccactcaagcggatataaagagaagcatcacgggaagaaagagcggtggtcaaagctcgcggttgagacaagaaagtgaaggaagcccaccctgccacataagtagaagctttataagcgcgggtctgggagatgaaggtcaagtggtcgcgatatatgaagatgatgttccgagtacattggatttggtacgaccatgccctnctgatttccagctaggaaattggcgagtggaggaacgccccggcgtttacgcaacgagcataatgtanacctttactggtttaaaagctctatag

SEQ ID NO: 7421 - DNA, 383 bp, Glycine max
agcttgagggaaaacttgatgccttggtcaacctagtaactcaacttgccataaatcagaaatctgcatcttcacctattactgttgcaagagtctgtggtctatgttcttctgctgatcaccatacagatctctgtccttctttgcagcaatctggagtcaatgagcaacctgaagcctatgttgcaaacattcataatagacctcctcagcagcaaaaccaacaatagcagaataattatgatctttcaaacaacagatacaatccaggttagaggaatcatccaaatctgagatgggcaaatcctccacaacaacaacagcagcaacaataacagcctgtccctcccttccagaatgctactggtccaagcaagccatat

SEQ ID NO: 7422 - DNA, 411 bp, Glycine max
  unsure (1)..(411): unsure at all n locations
agctttccgcaagacctgtgngaagtattgggatctatctatgatagaagtctctattgaagccattgcatccctcactcagtattacgatcaaccactaagatgctttacgtttggggactttcggttagtaccaaccgtggaagagtttgaagagatcttatgatgccagctatgaggaagaaggttgtatctttgtttcgggttctatccctccatgctgagaatagacaaggtggtcaaaatctcggtgcaagaattggaccgagtaaagcaaaatataaatggtgtggttggaataccgaggaagcacttgtangagaaggcgaaggctttggcanatcgaggtgaatgggcttcgttcattgatgtcttggattatttgtatctggagtcatcctcttactaaat

SEQ ID NO: 7423 - DNA, 393 bp, Glycine max
  unsure (1)..(393): unsure at all n locations
cacctattttgactctcccatggtgtctctacatacataaaacagccccaccatcccaattttgcaaaatcatattcatatatcattggggcatttcattgagcacttggtgggcgcacgtttagacataaattgcaagagaatgggagcaatgtggcatgccccattgcttcataatacaacctaggcctaaggccttttcattcaaatcctcaattcaagagaacaagcaccaaagcaaaccaaaactgcctcacaaatagaaacatgttctcacaatttaaggcaccaaaagatgaagaatacacatcaatgggaagcagaaacatcaaggatggaatacttacttgttggagtgaattgaaacaccaaaaacaaaagcanaatgcgatc

SEQ ID NO: 7424 - DNA, 259 bp, Glycine max
atacataatagcctcagaaattgaatatcatgacttaaaattaatagttgctccattagcctggcgtaccatttcaccaccagaaaggatttaatgcaaagtcacactaaacttgacttacaccacatcttcttaagacacttaatataaacattggatgaaggatacatacattccacataaaactgaaacctgatggctgataagcattacttgcttcaaatatcagttgaatttacttaggaatacaacaatgaca

SEQ ID NO: 7425 - DNA, 424 bp, Glycine max
tatctgagtccactctttatgtgaaatataagggaaataactttctcatagtttctctctatgttgatgatcttttagaaactggagatgatgcaaggctagttgaggagttcaagcaagaaatgatgcaagctattgaaatgactcatcttggtctcatgacttattttcttggaattgagatcaagcaaagttaaaacaaagtgttaatctgtcaaaggaaatacacaaaagaaattttgaagaagtttcaaatggaggaatgcaaatctattagcacaccaatgaatcaaaaggagaagttcaacaaggaagatggtgctgataaaattgatgaaggatattataggagtttgattgaatgtctaatgtatctcactacaataaggtcagacattctatttgttgtaagtctcttgtctcg

SEQ ID NO: 7426 - DNA, 339 bp, Glycine max
  unsure (1)..(339): unsure at all n locations
agctttcgttntcaattacgagcgtctcgaaatcctacgggacacaattggacatccgagtgaacagttattgtcgcttgaatttgtttagagcttatgttttcaattacgagcgttttgatatcccacgggacacaatcggaaatccgaggtaaaagttattgtcgttagaattttgtcatagctttcgttatcaattatcagcgtctcgatatcctacgggacacaatcgaacatgcgagccaaaagttattgtcatttgaatttgctcagagcttctgtataaattacgagcgtttcgatatattacgggactcaatcggacattcgagtgaaagc

SEQ ID NO: 7427 - DNA, 369 bp, Glycine max
  unsure (1)..(369): unsure at all n locations
caaacgacaataactctagactccgatgtgcgattgtgtcccgtaatatatcgagatactagaaattcacaacagaagctcttataaaaatcaaacgacgatgactttntacacggatgtccgattgggtcccataatatgtcgagacgcttgaaattgaaaacagaagccttcaccatattcaaaagacaataactttttactggaatgtccgagtgagccccataatatatcgagacgctcgtcattgaaaacacatgctcagaggaacattcaacgacaataacttttgactcaaatgtgcggttgagtcccgcactatatccagacgctcgtaatcgaagacagaagctctgaggaaattcaaac

SEQ ID NO: 7428 - DNA, 353 bp, Glycine max
  unsure (1)..(353): unsure at all n locations
agctntgcgggttataatgaatgatggctatggtctgcttgaaaatttgatgcacctgcctactttacaatattaattttataatgtaatttggatacatattcttttttcatgtgggtggttttgatgccactatgcaggcatatactgaaacttccggaaacctgaagggcttaccacaaggtataatacaagctacttcagatcttgagttaaggcatttatggtcgccaagtaatttgaggtcaaaggtcagcatcttttgcaatttatttattttacattatatagttctatttaaatcgatagatgatgaccgaatntgtaaactacaagcggcacgtcatcaatta

SEQ ID NO: 7429 - DNA, 391 bp, Glycine max
  unsure (1)..(391): unsure at all n locations
agcttcgagaaagtccactacggtcatgtgctctcttctaatgcaatgaatntgaattgaaaatgtggaaaaatgcctgatgaaataaccgattcttggagtagatgctcatttttattggaaaacttgatagcttcaaaatttctcgtcttgattttcatttttcttcagctaatcgagaaacctaacatcagatcgaagttatgtgaaaaacaacttatatctgttttaaattntcagcgagcttctaaatcatcctccgattttttattntacgtataaatagctcttccatcgacaggtttaaatcaacaattgcggcgaagtactggttgcggtgaaatatcatgtcaaatattacagtgtgggcacgctctacgcttttgaactc

SEQ ID NO: 7430 - DNA, 359 bp, Glycine max
caagcttatcgacttctgtgtagattcatcatctggggacatcaattatgcagacttagtactttccccaatcgatgcccttatcgtttacatttggacttctatgataccatgtctttgtaacaatcacaatccaacaatgtctatgcttctgtatacacaattgatacaaaatgggtatcccccagatcattttactttcccatttgcactcaaagcatgtttgtgccattgctgatcaacattgtggaaaatgcattcattgctgcatagtgaaatctgggtttgaagctgatgcctatactgctactgggttactgcatatgtctgtgtcatgtgcacatctgaactcacgactc

SEQ ID NO: 7431 - DNA, 311 bp, Glycine max
  unsure (1)..(311): unsure at all n locations
ttaataagatatctcttgaagataatcttgctttggtgacaccttctggggaggaggagataaaggaatcggtttgggagtgtggtatcttgaaaagtccctagccggatggttataatctcaagtttatcaaaaacttttgagatttattgaaggtggatgtgaaacatgttttggatgaattccatttacatggaattattccaagagggtccaattcttcttttatatcccttatccccaaggtgaccaatcctctcaactcgggagagcttagaccaattntctttggtggattctatgtataaaat

SEQ ID NO: 7432 - DNA, 303 bp, Glycine max
  unsure (1)..(303): unsure at all n locations
ntgaagtgccctttgtgtcttgatgaagctcagtcttgcttacatttttttttcgcttgccctacagatgacttggtgtgaaaaagtgttgctccgggataaattttcataccgcttgtccaagggaaaaggagatgtcttcgtgccaacacttggctcttttttattaaaagtggtgttggaacaaaaagaccgtatgtggcttggtgtgcggctttatcgtgcatatggaagaaaacgaatggttgtattttcaatcatacaactttttgaacagaaacaggtgattggacatatataatt

SEQ ID NO: 7433 - DNA, 476 bp, Glycine max
  unsure (1)..(476): unsure at all n locations
gctntgattctttgngccagatatgagactaatatttgatctgnggctttaataaaactcaaactcgtcgcacctcctaaagaatttattttctgagaattaatcttaggtcttttcccacaaactcagcatacgtagcaaactaaactacacctaggaatgttcactaattggattggatcgattntgaaggaaaaaattatcctgactaaatcactttggctataattagttgtagcctaacaactcaaaattataatacaccattttgggcaatgaacaaattttttattaattntcattccatccaacaaaattaagatatgatcttggatttgatcatgtgcccaattagattaacattnttatcaaacatcatgtatcagatcgcatgttacnaaaataagggaaccttcctttaaatagaaatgattttttatgtttatttattggagtgatttcatatttatntaata

SEQ ID NO: 7434 - DNA, 427 bp, Glycine max
taagttcacaatctggtacctaccttattttatagtacgagtatctactttgtaatcaagtctcacttattagtctacatgtttgctctacaaaaagccttgtttggctacaagtggtgttttgtattaaatggcttttcaaaggattgtaaatgagttgaattaagtgcttatgaagtttgtttagttaaacaaacaaattaaattcaagctaatagttacgcttgatagtccaagttttacattttgtgaatagcttgcgcgcacgcgcatatatatatatatagtattattacttagatcattgcaattctattgtatatattcactctataaaattataattctatttattatcatcttacacacataagacatacataatgtcaatttctaagagtaattttaaacgaatgatttaaatacg

SEQ ID NO: 7435 - DNA, 318 bp, Glycine max
tattcatttagtgctaatttctctaccttcacaatttagttagtttaagatctcttataaatgtcaaaagaagaaatgatctcttaatgagctcatttcatattgtatgtgcaacaagaggaaaggttgaagcacggaaggactgaaagtgctcatgttgtgagtacctctcaagacaagggccaaagaaaaagaactgaggagcccaaaaatgaagctgctaatggtctatgacaaaagaaacaaaatcacggtgacaactgtttcgtttgtgtaagcttggacgtgttgagaagaaatgtaccacatatcatgctt

SEQ ID NO: 7436 - DNA, 613 bp, Glycine max
  unsure (1)..(613): unsure at all n locations
tacgacttcgcagtncnncttctctcntataagtctttttanttntcactctnctccccccccccnccccaggcaagatggtattgatcccctcattnancacngccgcgatactatagacttacatgcagccatgcatgctagatagaatatgcacaaactcttacttatgccgaacttggtaatgaaaggaactatggcaacataacctccaaagaggttagccgatagtgctgctcgctcttgtatgctttgaggcgtgagacttcatcccatcatgtgctcccggcatcactgccgatgttgggacgaatattttgtggcgagctgtccaaagggcggagcttgtcgcctcaaaataccaacgttctgacccccaaagagtatgccatgcatgctgtgtccgacttgattcactacacccttattcgatggatcatgaaaccacgctgctcaattgccaacccacgacctgtcagatntgacacctttgcgacgcggctacatctctcttgcgggcatacatggtatatgacattacaaggganctacacttctaacgctatatcaggatcatttcattcttaagcgaaacatgaacgacttggctacc

SEQ ID NO: 7437 - DNA, 360 bp, Glycine max
tgttctcttctttctctctatctttctccctccgcattacatctctattgattatttttcctgcctgaaataatggtgctcccacgaaatttaactcggcacatgtactttctaccctcaccatctccaaaacatctctctttgttcttgcaaaattatccaaagcaatatctatgtccacatgcatctatttgcatgtacacttaacactataccgtggtatgtatcgcgctgacaccatcacatggcactgtttactcacaaaataaatgccaagcacacgctcatttgttgacataaagacaaaagataatctttcacttctaccttacggactagggctcacaggaatctcacgta

SEQ ID NO: 7438 - DNA, 579 bp, Glycine max
  unsure (1)..(579): unsure at all n locations
taccgcggcactttcttatttttcttntnntatctatttctcccncccagcatgggtttgtcatcttaactgccggatcttatagtcactgcagctgcagcttgcactcatctcgccaggctgcatggttgcttcttcagaatcaactggaagaatgttctggagggcccaagtgggcctggttgtattgcacctccattttactagaacaccccttgcttttttagtgattctctttcgtaaagttaccgagacttacgaatttcggaacgatacttgttttctttccgtaatgatacggaacccttactaagttgtgcacacgatgcttctcatttgatataccggtgtgtcaccggaatcgtacagatagtgcatcaatatatttctttgtttaccggcatgtcccggaatttacagattgcctaatgatgggtgccaagcaccttacaaggaccaaacaaaagttgatggcatcaagcaatagtccccgacgacattaggtattacaactggtcatcgattaccaatcattgtattcaatacacacagctttatgtgaacgatgtgatcttcacg

SEQ ID NO: 7439 - DNA, 442 bp, Glycine max
  unsure (1)..(442): unsure at all n locations
cgcttctataatctcccncttcttgatgatgacaactctgaaatgaagaaacacatacacacactttttcctagtcgatcactcacttaattttccattctccccctttgtttatgagtttatgcttccttgaaattaagttaattacttatgtgagttcttgatttaatccctatttctctccccctttggcatcaacaaaaagccaaagtgcgtaacaagtagaaatcatacatacactactaatcattcacaagtcattcattgaggaataaaaaaccaatcatcaagcaaggaacatgaatagatcaaatatataaaaactacatagttatataacataattcataattgttcaaacataccatgcacataacagaaatactaaattgttcaaatgtcataataatatagatcattttgataggtcactaccatctag

SEQ ID NO: 7440 - DNA, 593 bp, Glycine max
  unsure (1)..(593): unsure at all n locations
cttcaccgtccgtactcttnattgcgtgcgtctattttatcctncantattttcccccgcgcatcggcggtgagttcgtgcctcgctacaggtaactaagacaactcaacttcacaactgctctatacttcatttcactacggttcgtatctctccttggatggattctgacaacttccatcgtgacttcctatttgcgcacgtaatattcattttccgatctatncgaccatgacgaagaatagccgggtcaacaacatcacgtctctttgcagccattattatcttgacctggtctcacacatcctactctagaaagaacatatctatgtctgtacccattcttctaaccaagtgcgaatcctcctaggattgtgaacatggaacaccgatgaagaaatctccttttcacgatgatttaatccatccacctggttaagcacctccttgacggtcctttgaatttcacgatcagaacctttgcggtactggaacgccgctcgcaatggcatccatccatccatgatatgatgcaccgctcaacacaatgacggcaatttacagatcactttatcccgcctgaacaccaaccg

SEQ ID NO: 7441 - DNA, 399 bp, Glycine max
  unsure (1)..(399): unsure at all n locations
agcttgngcaatagtccccactaccatcacctagatatatcatcctctntttaccctcttccaaaattgaatcttggattctatctatgattaaaccctgaaatggttaaaaatttaataagattttataaccataataattggtcacaagattccaaatgatagaaacttcaaaattgatatgagtaaatgcatgtttggtttgactcttcagaattgattataattacataattaattttgaatatattttaatatgttttatttatcaagaagaattcagaattgattctaaattaaaataactttgaatagttgttacatttaatccaaaattctatattgacatttatttgtaacttgattctatataaagtatccaaacataatatacataat

SEQ ID NO: 7442 - DNA, 449 bp, Glycine max
  unsure (1)..(449): unsure at all n locations
ctccatgaatagcctccaatcaaaggctatgcttattatttcattntacttcattttcttccttatgattcccacatataatttaagtaaacatgcggaagacaggatgaacgcgtagctattagcagtcacagactcagaatattgtaaaaaccttcttgataatagcattgaaatgaggataaaataagtataaaagtgaagctcacaaaggaaaaataagaattaaccaaatatacctgaggatcaagaggatcagcctcgcgagaaacaaggttttgtaagctaataatcacattagtagctgccatcacagggtctatagaaagttggggaagagctgcatgacctccctttcctcttattattgcttcaaatacaccacttcctgccgataatggaccacacctagaggccactctcactactggaatgtcaggcgtcacatg

SEQ ID NO: 7443 - DNA, 451 bp, Glycine max
agctttctttttgccacacacacaatattctttctactaaattaacagcaaatctatgaaaccattcaatccccctatcacccttacaatgccccaaaaatgtcaagatatatatctcttctcttggtttcttgaacacataacaattgagcttattctttgaccactagctccctaataaactttgcttttattttccctagaaccccacacattatatgatattatcttcattgatgagcttgcttacccctttgttttgtccatctaccttcatctctattttccttcttatccctgtcttccatggacacaaatcttgaaacaatatacctctcatagccctcaaatgttactctcacagctctccctgatcccatagtttaggcttcaataggatcactccttacaaaatatttgttgagatccaatattacatatatacatgtac

SEQ ID NO: 7444 - DNA, 425 bp, Glycine max
ctaagctatacactcatgcggccagttcatcactataaaaaatctagtctacactcacttcgttcacaatttgaccgctaaagatttcagtttgaagttgacgaaaaagtaaattcgagaaagaggcgttgaatggaaaaatccactgtgaggctgtatcaaagaacatgtgattgtgggaagtctcaaaagctacacatgccatgtgcacatgacattactgcatgtaaacacatcaatatagattacttgcactatgttcatccagtgtacacattagactatgtgtcgagtgtctacatagtcccattagtagacatgtgtcatcatgattattaaccaccatatgaaggatcacaatcatgtgtcaatctagtcatgaggagaaataaaaaaggttgaccacaatcaacaaatatacagac

SEQ ID NO: 7445 - DNA, 240 bp, Glycine max
acaaacaccgctaccgcaacatgagattgagattttgggtcctacctcgacactctatggaggtatgttagaggggttatcaagcctattatgagacacagccggttacggttccaccaaagatttggacgagagatcttaatagggccccaatctccaagaggattgtcttcacacccccttgtgagggttagggcgaaagtatgtcatgccgctttacaaaaagaaatgttatttcaa

SEQ ID NO: 7446 - DNA, 410 bp, Glycine max
  unsure (1)..(410): unsure at all n locations
tctcgattcattctatgtacccgtagtggtccacattgtgtttcgtgcatttttattctcgttttgtttactttttataccccctcttaacgtgcttaagccattttacttaagtcgtttctcgcttaacttaaaaataaaataaatttccaccgaacgtttgaattgtattatccactaacttcggttaaaatcaattccgaccgttcggtcatgccgtaaccacgttggaaatcaaaaagaggtaaaaaataatataataatcaaaaaaacatcttttagtaaaataaagcggaaaatcaatcggacgttntctctctgngatttctcattcttaatcgaattgattaataactaaagtgaaactaaggctaaactcaactcgcctagtcaagctcgtccacaaaaat

SEQ ID NO: 7447 - DNA, 352 bp, Glycine max
agctatgacaatgcacaagttcaccttatcttgtgctgaaattcaaattctatttagaagaataggggtggccaggatcaaactcctgatcctaaccacttgatcataggctctctaatactatgttaaaattatatgatttaggagagaaacaaagaaaagaggagatggagactctaaacaataagataccaaattgatagtgtaatggtatcatattgataaagagcctactctatattgctattgttgaaattatggggtcttaggtatagagagaggaagagagataaaagagaatgaaactctgattaatattaactgagatgtacgacaatgtgttgatatgttg

SEQ ID NO: 7448 - DNA, 388 bp, Glycine max
  unsure (1)..(388): unsure at all n locations
tgtacaattaaacagctctcattagaagctgatccaaacttatcctaaaacttggattgggtagaacaaatcaacagtcatagaaacacacatgatgagttggcattctgcaaccacatcataacatgagatgagtcatgagttgcttctattggaatgttcacaacaagaagagcatataatttgagggacttgaagcctaagatngaccgaagaacgattacattaataatcaccttatcatatgccatgcgtgcatttgggtcagagagaatggaataagctttgtcgagtatgatggccatgtcatggccagcagggccagcaatgtcatggtggcagcgcttctgaagagagcgatacgccactttgacctgtgactgatcac

SEQ ID NO: 7449 - DNA, 365 bp, Glycine max
  unsure (1)..(365): unsure at all n locations
agctntacacgtatcagtcaagtgtatggaccatatcgtggccaaggtactcatcgataatggttccagtttaaacgtgatgcctaagagcactntggacaagttaccattcaatgcttcccatttaaaaccaagttcaatggtggttcgggccttcgacggcactcgccgagaggttaggggagagatcgatctcccagtacaaataggccctcacacctgtcaagtcactttccagataatggacattaaccccccctacagctgcctgttggggcgcccgtggatccactcagtgggagttgtaccttctacactccaccaaaagctgaaattcgtagtggaggggcacttggtcatcgtat

SEQ ID NO: 7450 - DNA, 505 bp, Glycine max
  unsure (1)..(505): unsure at all n locations
cttaagttctgcccttaattgttnttntattcttctgtattttatactttntttttctatagttcatttcatcatcattgtaactatagctgcccattataaaatagcttagacaaactaggtctgctgcttctgaaccttttatttatccttgaagtagtttattttttttatttgtgttcaactagtgaagagtgaagactgaagttgttctgtcagactccttgattttcctttcattttgacggaagcctaagcaatacactgccactgaattgccagtaagaaaaattggtcatgaaacacacacacacacacacacacacacgtatgatagaaacacacagacacacactgatgacacacacacacacacacacacacacacactcattatacaaacacacacacacaagtgtgataacaacattngttcaatatacatgcagaaatttgttcagttctgacttgttagctgtgacacagtagttgcgctcctcataan

SEQ ID NO: 7451 - DNA, 418 bp, Glycine max
  unsure (1)..(418): unsure at all n locations
agctntcataagtgaaattaggtgcagccatctccctaagagtcctctcacaaggtggaggttgagccatgttctcagtatgaaaattagtagtggaatgctcaaaatcagaatattcagaatcaccctcaacataatgctcaaaatgcacaggatgcacactatgcctaactaatttatgaaaggttctatctatttcaggatcaaagggttgtaaatcacctggattgcccctagtcatgcactatatatagcaaatagtgtgtttctcaacaagcacctaacaagggggtaaaactatagctatactcaaatgatatcaaaatgagctgaaattntgtgatgaacaccctanaatcatgaaaagatagcataaaaaatttcaaacaaaaattcanaagtctaactatgaaaacta

SEQ ID NO: 7452 - DNA, 485 bp, Glycine max
  unsure (1)..(485): unsure at all n locations
tgtaggattatggggtacccatcacatgtggtactaggtggcggtcgggcgatggtgcacaacaagtttttcacatgcacaaagcgcgcataaacccaccatcccctgttgcccacctccatctgagctcacgtactcccacgtagcccatatcctcgtttctctcaacaccgggtccccatcaatcctctcaagcttccacaacatccaagcaaaacaacattcaaacagcacaatctatcacagccaagaaaacagagcaaaggcagaaaactctgccaaaacaccaaccaaaatcacagctgttctcacgtaaagaccacacgaacaattccttcgatccaattcgttaaccgttggatcgactccaaaattttactggaagtctatagtgtataagcctgcattctgaccgtngggatatactagcaaacatacagaactcattctgcactagactttccacagccaaccacacacaagca

SEQ ID NO: 7453 - DNA, 493 bp, Glycine max
  unsure (1)..(493): unsure at all n locations
gctggcctacgtcagttgaacaaaccctcagctgccataaacagaaaacaaactttgtcgatgttagcctaaaaataacaatgactaacgttgaccgaaaacctagcctatttgaacaaaaaaaatatccataaaatgactttggcaaaaatcctagcttgatgtcgaccaaaaaaccaagcatatgtcagccataaaatggcattggcatcgaccaaaaatagccttgaccattgtcaaccgaaaaacatcatcaactgataagttctatcctattttattgtgtacttttttactcttaatgttttttgtggccagtccaaccatttgaatgatgtgagaatagaccgtgattagaaagtcatgaatttatatggaattgaaattggatgggtgatgtcgtatgacctanggatctgttntaatatattaactttataagacgctntgcttatatgtatcaagaatctatgatctatctttctatggatat

SEQ ID NO: 7454 - DNA, 457 bp, Glycine max
  unsure (1)..(457): unsure at all n locations
ctaagctaatagtcttctagtaaagaaatcactggtagcagtaaaattattaatcagctatatatcacgggtgatattaaataaactgcctaattataaattatttcatgcattgggctgataatagcagtaaaatatttatactcaaaaccgaggcgttcaagttcaatgaagttaactacttcagtacttcatatatgggacgcagtatatataaaatggatacttagccaaaaagattaattagtctaaatattttaaacattttatatttaaaatggatactttntaattaacaatatatatatactcatttcttcttttaaatggatactttctaattntatttgattacacttacttaacttcttttacagattttgaaaccagctttcacaataatagctgatcacgagatgaaatgccttntgttattgattcgtggcacacatagtac

SEQ ID NO: 7455 - DNA, 435 bp, Glycine max
  unsure (1)..(435): unsure at all n locations
agcttgcanactaagtgactactnttcttgctttcaaatcccattgctttatccatgtacacttcttcttcaagatccccatttaagaatgttgttttcacatccatttgatgtaattctagatcaaaatgagctactaaggccatgattatcctaaatgaatccttcttagagaaaggagaaaaggtttcatgataatgaatacccctttttgagtaaagcctctggctacaagtctagctttatatctttcaacattacctcttgagtctctcttggttntaaaaacccatttacactatagagactccttttcataattctattacgtcccacacttggattttagccatagattccatntcttcattcatggcttcataccataatntagaatcatctctactcatgacttgtgaaaactttaattgatca

SEQ ID NO: 7456 - DNA, 468 bp, Glycine max
  unsure (1)..(468): unsure at all n locations
tcatggtgaatcacagatgattcanaggtgttttaatgataacaatgatgataacaaaagatgatgacaaaggagatgacaaaaagctcaaagatcaatcaaagaacaacttgagtgaatcaagaacaattcaagagttcaagataagaatcaagaagaattcaagactcaagaagaatgtttagagtcaagaatcaagattcaaggttcaagatctcaagaatcaagatcaagattcaagactcgagattcaagaatcaagagaaggcttaatcaagataagtatgaaaagtttttttcaaaaattgagtagcacatgatttttctcataacatgtttaccaaagagtttttactctctggtaattgattaccagattgttgaaattcacattcaaatgtgaagagtcacatcctttcacataanagctttgtgtaatcgcatacacttatttggtaatcgattact

SEQ ID NO: 7457 - DNA, 382 bp, Glycine max
  unsure (1)..(382): unsure at all n locations
gatcttccaccaccgccgccaccatgatcttataattatatttttaatatgattattactactttgattttcagccttgtattttggctatattattatggtatttgaacaatatactatttccttatttgcatggtatgtttggaccaatattaagtatgttatttgactatgtggattacatagttaatctatttatgattgttgcttcgaggttcttatttcatgatttgagtgatggtttttcatgaatgttgtatggatgcttagttatttncacattgttacgcactttggctctctgttgatgccaaagggggagagaaatgggattaaatcaagaactcacatgagtaatcaatctaattntaagatatgcata

SEQ ID NO: 7458 - DNA, 419 bp, Glycine max
actaagcttacaaggccatctaaggtcttaaacaggcctagagcttggtttgatagactcaaggtcagcactgtgtctctggctcataacccagcaagtgtgatgcctctttgtttgtctactccatgggggccatcaacaatctacatgctagtttatgtttttttttttggaaggcagaaaatatatatatcattaataggtaaaacagtaccagaggtaccaaatagtagaaatacaaggcaccagagtgctaccctccaaaataacacacatactcaacagaaaacattcagacccaaacccatctatgcaagagaagtagatatattagaagaccagtaatggaagttaatactgaaatctttatcataagcctttaaccatgaccaagctaagaaaatagcatggtccatgac

SEQ ID NO: 7459 - DNA, 353 bp, Glycine max
  unsure (1)..(353): unsure at all n locations
tagcttaggacaaggtccagtatacttctattgttatccaaacaaaacggtgagtctgatggacataaacattcttgactctctgtttttaaatatccactttcatggtcttgacatgaaagaaagatcaattccagcagccttgatttatatgattcagtacacggtcatgaatacttgtgcttttagaatcctgttaaaacctcagagaggagagacaactntgtttatcactgatatgacaaaggctaacgtttctctcccaagaacaataaaatgggatgaagtaactcttccagaagaatgggttatggataacgccacaccgtctgttccncgacccgctccaacta

SEQ ID NO: 7460 - DNA, 374 bp, Glycine max
  unsure (1)..(374): unsure at all n locations
tagaggaagaatttccaaagatgccgtgactcttggcgacgcgcagcgccatcacgatcttctgcctcgggtcctcaattgcggcgtcgcaagctcgccggagctcgccgtcgtcggcgcttgatttcgccatcgctggctcgtccccgatctcgaagctgcgaaagagagagagaaaaaaagaagaagaaaaagaagcagcagcaaagtgcaaatgttggtaggagtcacatttaaaaaaaatgaaagaaaaaaaaacttttttccatatctgtgctgagtcttgtctgtgttcttcaattgcttacttttcttttacttgcgggaaaacctagacaacctgtagtcaattntggcacttcacccctcagagt

SEQ ID NO: 7461 - DNA, 384 bp, Glycine max
taaacaaaaatcaattgaggaagcttcgccaagtatccccattgaaaaacctttattcaaacctttcaaagttagtgagaaggctaaacgaaaaattagggaacttagaaaaactaaatccttaattgaaggcgtaggcgacaatcatagttaattactaaacaagattggtagtttacttaaggtcattctagatactccccaaaccatggaaaatacttccaaaatggtaacaagaagtacctccaaattaattaatgttataaatgaagatagtgaccaaaactcggataacacaactgatatacgatcagtgtccaaaaagaatatacatccaattaattccacacattggaaaacacccttccaaatatattatcaacg

SEQ ID NO: 7462 - DNA, 440 bp, Glycine max
  unsure (1)..(440): unsure at all n locations
ntagctaaattcagacattatcttcttggtcataagtttatcattaagactgatcagaaaagtttagaagagttaatggagcagaagttgcagaccccctgagcaacaataatggcttcctaagttcttaggatatgactttactattcagtacaagcctgggaaagagaacatgttggtagatgcattggctaggagttttatgatggccatttccagcccaattcattcatggataaatcaagtaattgataagactcaaattgatcctcaattggtgaaaatctatcaaagtttcctacaaggcaaaccttcttataatgattacagcattcaaaatggattattgatgttcaaggataaaattgtattacctagtgattctgcactattgaagtagatcatgaaaagagttcatagtactaaaattggtgggcatg

SEQ ID NO: 7463 - DNA, 375 bp, Glycine max
  unsure (1)..(375): unsure at all n locations
agctntgattnttatctcacacaagataagcataaacttttatgacaacatctgcgatcttntgggtgttcttgatccttcttctaccttgatggcgctttctttgttttccctccccgttttctgcattttcttccatttcaatttgttggggctaatttaaatagttgcttaatcttttattctgtgttcttttactctgaaacatattttgttgtttacttaagggtgttaatattntggtatatcctaactgacattggtgcatttctatgattcttttttctttagcttttacctttnctgtgcactatatttggttggaccttttgtgtttcaaatattaaattgctcctacctttcttgtgtattata

SEQ ID NO: 7464 - DNA, 566 bp, Glycine max
  unsure (1)..(566): unsure at all n locations
gtccatgctctccctggtctttctgtgttcttcttttccctcntcncatgccccggcttgattgtgccttcattagcgcacttacatactacacttgcctttgatcctctagagttcccattcttgttcccgtcataccctaatttcggcccgggaccattaatttgtggcattcgtaaaagtcccgcacattctggaagtctaaaagagcattgttgcgcaattcgtaaagcttctcaacaatccacaaggaaaaacaagcattggtgcgtaatccgcaaggcttcgcaacattctcgaagaaaatgggtggtcgtacataatccgtacagctccataacgcttcgcgtacttttattttcatttccgtttgttttccgacccccttttaacgtgctttaaccgcttatctaagccggtttctcacctcataaatgatacaatgaatttaaccgatcgtctgcattggatctcattaaccaccattaaagaaaatctaatcgacgtcacactgtacctcgataaccaaaagggccaatatgatcaatataaaatattttgacaat

SEQ ID NO: 7465 - DNA, 432 bp, Glycine max
agcttgtattccagagaagtggtaagaacactatatgatactaaaaacaagacatatgatagtaatagctttatgatttatcctttctctctgttaaccttaaaatatccacgagaggacatatctggctcagtatatttcttgaattttcagtcctacgttgcacaagaggaacttttcttgtgaactttaactgtaaaagagaccctcacatactcagcaaacatgaggctttcttctaaaatgaccaaagaagagatagacaaagtggtggaagaaaccatagtggaaatgggtctggaagattgtgcagatactacgattggaaattggcattgtaggggtattagtaatggtgaaaagaaaagactagcattggccttgagattctgacacaaccatatgtcctacttcttgatgaacctactactg

SEQ ID NO: 7466 - DNA, 611 bp, Glycine max
  unsure (1)..(611): unsure at all n locations
atactctctctgcgtngtanacactactgtcgcgcacgcgtactttctctcactttacantctactnnncnnccctgggccccagcgcgtctttgantttgatgcgctctgctatctacgtgacactatctaatactcaagcctgcactaaacctttgtattatgtttagagtaatattanattatatctcacacaagctattctttttgacggagacttgtatgtgcaggtacttattggggtttttctatccgatctctcgcctaatcagttattctgagtatgagaacggcaggttatcatttgctcaatatgtgctttagggttaactatgatatttggctctccaatttctctatccaatttctcacaagcaatggggctttgatgatgtattcttttatatacggcggttcatatcaatatgaaagtaacctgacatgaggacccactacgatttccatacaatttgaattatagtacccccggcgctctatatttattacagacatatttcgtgatacagaagatcacacttgtttaatatccacatagacaggaattcgctgaaatatcttctaacctgccatctgttcctcagctagtttcg

SEQ ID NO: 7467 - DNA, 405 bp, Glycine max
  unsure (1)..(405): unsure at all n locations
agctngactaggcgagttgattntagccttattttcaccttagttattagtcaattcggttaagaatgagaaatcccaaagagaaaatgtccggttgattttccgctttattttactaaaaggtatatttttgttattatattattattttatctctttttgatttccaacgtggttacggcatgaccgaacggtcggaatttattttaaccaaagtttacggatcatacaattcaaacgttcggtggaaatttattttatttttaagttaagcgagaaatgacttaagtaaaatggcttatgcacgtcaacagggggtataaaaagtagatgatatgagaataaaaatacacgagacacaatgtggaccaccacgggtacatagaatgaatcgaaagcttgttc

SEQ ID NO: 7468 - DNA, 402 bp, Glycine max
  unsure (1)..(402): unsure at all n locations
tgtcngaacttcatttggaatctcgacatttcttccatctgaatgtagcccttggctcgctcccgtaactcgtccatgctgctggaaagcttcttgcacaatctgttagcaagtttgccaagttgtagggctagcaacatagaatgcaacgccacctcaggattaaggttcctaatttggacaacaagctgaccaaatctgcccaaaatttgtagagtggctcttcgtctacctggcttagactagcaagggcggcagaagtcacatggtgcgatcagcttgtcgcatattgagagctgaaatgaccgacaaaggtatcaaaactatcaaaaggtcggggaaggagtgctctataccacgtcaatgcagctcccttaagggacgtanggaagaatcaacata

SEQ ID NO: 7469 - DNA, 340 bp, Glycine max
  unsure (1)..(340): unsure at all n locations
taatcgattacatactttgtgtaattgattacacgcttttagattcaaatgtgaaattatcaaattgtttcagaaatcaatttagccactggtaatcgagaacatcctctggtcattgattaccacagaggaaatatcatatttttgaaaagagaattattcttagaaaatctttggaaaatatttactttagccagacttgtgtagcgtcaattaaagaattatttctaagatcctaactaagtacattgttcttcttgcatttctaaattcttgacatgaatcgcgctcatcnttagcatcatcaaaacttcatatgatatatgcttctacaatctaa

SEQ ID NO: 7470 - DNA, 328 bp, Glycine max
aatgtatctatacatgatcatgatgacgcccaagaacaatcaaacaacgctgctgcaaatgataagcatttgcttcaagaataattcaagagtgcttcaccaaacaaagcctcgtttcaagattcactaaagaccaaaccttgccttaaaacaaagtgctttcaagacatgcaatgctctggtaatctattaccaccaagtgcaatcgatcaccataagacaaggttgagaaatagttgctgaaaaacgtttcgatattgaattatcaacatgtaatcgattaccatatgtatgtaatcgattaccagcaactaaactcctgaaattc

SEQ ID NO: 7471 - DNA, 447 bp, Glycine max
  unsure (1)..(447): unsure at all n locations
tctaaggaggtgagcttagttatgagaggggtgtgtgtagctaagctctagcttctcaagaaagttttctcaagaaatcttctcaaggaagctacctagtctataaatagaagcatgtgtaacacttgttgtaactttgatgaatgagagtcttgtgagacacaactcaaagttcaacttctctccctttttcttccttcaatttcgtgctcccctctctctctttcactccctctttcttttcctccattgaagcatcctctccaagcttcttatccaaggctcatcttggtggtgaagctccttcttccatggcttatttcctagtggatggcgcctcctctcacctcttctcctttgtcttctgttgcatctccatggtggaaaattaccattaaaggacctcattgatgctcanagatccagcctccatagaagccccacatg

SEQ ID NO: 7472 - DNA, 402 bp, Glycine max
  unsure (1)..(402): unsure at all n locations
atttagatgcatctatgcatctaattagtttcaactagagagtttaaatgagcacaatcaacatcatactcctattcttttttttttttttactgcactcctacacttttattgaaaatataccaaaacatcagtgaagtatgtccaacctattttgtaggaagacatacaaaactgaccaaaaatatttctctataacttataagtaatatactaactaatttctttcaaacacatattgtagtgatagtcacgagaaagcctaataaaaaaattgatctcttgcaacatccaattatagaaacaattagatttctaggatataaatggaacaatgacattttaactaatgatcctgtactataatntttattactttaaatatctatactattaaatttt

SEQ ID NO: 7473 - DNA, 496 bp, Glycine max
  unsure (1)..(496): unsure at all n locations
ctttntacanagaagaagaagttcaaagagattcaaggcttgtaaaggattgtatgaataagtgttagaaagattgattgaaaaagtgttcaagattattgaaatgcaaaaacaaagccttgcttttatagactcttcatgtctggtcaagaggaccatttagaagagttataacttttagaaaaacttaaaaccaatttgaaaaagtcaaaaaccatttgaagagttacatcttttgattttattcagaaacaaacactggtaatcgattaccaaatcagtataatcgattacacaaaccttttatgtgaaaggatgtgactcttcacatttgaatttgaatttcaacgttcaaaggcactggtaatcgattaccaaaacattgtaatcgattatagctntttgaaattaattgaaaccttgtaaattcaatatgaaaactttntcanagcacatttgctactggtaatcgattacaacaatctggtaatcgata

SEQ ID NO: 7474 - DNA, 491 bp, Glycine max
  unsure (1)..(491): unsure at all n locations
agctntanagcacagcaacacagaatctaggtgtccaacacccctcaattcaaaggcttttctaggtttgaaaggtgaaatttagaatgaggtaaatttgaagcaaactctcacctcacacaagtccataacatcaatctaaacttgcccaaactggatttatacctaaaattccaccaaatcaaaatttgactcttcaacacccaattatgccctagaaatggctcttggttcactatggtcatctgtttttctctctagctcagcctaacctttctcacatgtcctaaatgacatttcaagctagtattaactcactntaacctccatgtaccacagaattcagacttagccttccaactctcaaagactcactctgtttccactcataacatcacattctcactttctaaccctaggttagttctaccctttatctctaacagttgtgcatcagcaatttcagcatataaacatcacaaacatcatca

SEQ ID NO: 7475 - DNA, 401 bp, Glycine max
  unsure (1)..(401): unsure at all n locations
ttgagccaaaatcctgactcaccatanaccttgacccagggtgagaatgtcaatccttaccctcggaagcaaaaaaagaatagaggggaaatttccaatcaaagaaaaagagaaggaaaatttccaatgaaagcaaaaaaggaaaagaaggaaaattccccaatcaaagagtgggagaaagcaaaaaaagaaaagaaggaaaattccccaatcaaagagtgggagaaagcaaaaagaaaagaaaggaaaattcccaatcaaagaatgggagaaagtaaaaaggaagaagaagaaggaaagaaagctcctgatcaaggatcgaaagaaaacagaagaaaagtgcagagaggtctttggaccggacaatatctgaacaatacagaattgccaccaaatgaacg

SEQ ID NO: 7476 - DNA, 460 bp, Glycine max
  unsure (1)..(460): unsure at all n locations
gcaagcttntctcgcacagcaggggagaaggggacacatatcttagagatttaagtaactcatttcttgatacagttttgttaatgattataaaattaagataaaaataattaaacagtataacattcatattatgaatgcacctttctataattcttaataaaaccttcttatttattaatctcttaatcattattccaaggtactaattagtaacccctatgggaatgtggcacaactgggctttatatgagtcttatgtgatgtcattaataatgactcattataaggtcaagattttttttaatgcaatataaggtttaagacttaagtgacatatagcatanaaagaaaatacttaagagacatttgatgggttgattgtagaccttattgctggccaagctcagccactcggggtgggtaatacaataagctntacacatntcatttacaatat

SEQ ID NO: 7477 - DNA, 362 bp, Glycine max
atttttattctttaattaattaatcttttgagttatgttagtgaagcattaggtatattgctccactatttaatcttgagctgcatcttttttaatttgtatggctttcttcgttttctctatttgatttgtttatatatgttcggcttaatggattgcgtcttggatagaattttatatggttgtggttcatctgtcatactctctgctgttataggcggcctcggtgatattttttttatatgttgtttggctgcgggagttgtgatgaatatgatagatttatgagaatacgaattaaaattaagtgtcacggaaaacacggttgggtttggctttattaacccatgttgagtggggga

SEQ ID NO: 7478 - DNA, 408 bp, Glycine max
gagcttactcttctattagctagatgtaatgcactataaccatgtttgcatataaggatgatttgtgattgtcaacagcttttatgaataagatatgatatgtgcttcatatgtcacatatgatacatgtccaatacaatgatacaattgttctaaaaatatataagatatgatgcttgtgaaactcatagaacatgatgaatatataattgcaattctacaaatctagactaagaacatattcttgaacattactaaagttataaatcacttgctgtggtctataaataagaatagtacgaatcttgttcctttattgaaatcatctataaagggcacaacttgcccttttagttagtcaagctactatgcttctataatatagaacatagatactgttatatctca

SEQ ID NO: 7479 - DNA, 419 bp, Glycine max
  unsure (1)..(419): unsure at all n locations
taagacctgtttccgtgttcanatcaaatcaatgtgttggaagttattctttaataaagtccgggccaaaacatttgaattaatttggtatttgggaaagccattcattgttttcattctcaatgtttccaaaaatcactttgttgtgttctgatccaatcaaaagtaagtttcaaaaacaccagttgttgattctttccaaagcatgttatgtccatgaaaaaaaattgtttaagtcccaaaaatagttatatatgatctataactacactaacataaaaaaatatatcaaagcacacataaatcagtcaaaaacacaaactcacgtaagtttccaaacataaatccaaaaacaataaataaggtaataaagtactataaattaatacaaagcgataaatgaacatcaagacaagtca

SEQ ID NO: 7480 - DNA, 499 bp, Glycine max
  unsure (1)..(499): unsure at all n locations
cgcctttgatgcatcgatgngccgngcacgcgatactctagagctcgacctgctggcatgctagcttgcgagcagacgatactttatattcgtcctcttctttcacgcttggaccgagaatgttaggatgcggtggttgtaaggcgcccacagatgaaacaaacagcgcttcttgtgtatgattataaagacttgatcgtccacccttccaaatccgcttgttatgacttcttgacgatcttgcctagtcgtactatggcacgacgaatgaatccctaagtacttgaatcgatgaccacaacatgtatggcttcttttggatcgacatttgtacacgttctctgtctagacgctattatccagactctcatcgtttggatgaacccttacgatgcctgcctgttgatatttcacagagaaatacacctaatttgcttatcccagagagagtcagaatggcatcgcgcacctctttgtttgaggcataagcttgattggg

SEQ ID NO: 7481 - DNA, 374 bp, Glycine max
  unsure (1)..(374): unsure at all n locations
gcaatacataagtacttgatgacatcgtctcatctatccttaatgtgatttggttcatatggaaaagcagaaactatatcggatttgagaatgttgttgtctcttcaaattgtatttgtcacggtgttacttcagcagatgcactttcaagtaacttttccaaggatttatgcaatcctcgatgactaaattcaacatccttaagttttttcttgtgaaaatatatccgtccaaagctcctgctatgaaatatgtgatgtgggaacctcctgctgatggatggattaacatcaacacaaatggagcagctccaggatctncaggaattgcagcttgtgttgtcctgtttacaaacccccttggtgactttcttg

SEQ ID NO: 7482 - DNA, 410 bp, Glycine max
  unsure (1)..(410): unsure at all n locations
agctngcaagtgtaatcaaattacttgacttaagcacacaacacanagaaaatgggttgtactagaactgaaaggtacggtcaaaagagtattccttatgaaatatatctcgattgagtcatcaaactatagggtattagcatcactaagaacaagaaatcacaaacaaccataatatctatgcaattaaggcaaaacaccatactacaagcatacatagaattataaggttcctataacaagtatataacatacatataagaataaagaattaaatagtcactaaggatgtattaaggaatcacaaacttcaacaactacattcaggactacacacaaaacaaagggagttaagtagtcatgcgtctacacatcaagagagaaataagcattattaataacatacacat

SEQ ID NO: 7483 - DNA, 418 bp, Glycine max
  unsure (1)..(418): unsure at all n locations
ngtcgccgatgaggacaacgtatnccatggtgtacgcttcattgatcatgtgctcgctgatctacggagattgcagacttgatgtgcgcctccaccaaaacgataccatctcccttgtttttatctcgaaaaaccctatatctgcaatgcttaactggaaatggcgagatgccatggtgaagaacaacgttaggatgttcacattacaaatttcagagcaaaagacaaattatgcttattattatgtctgttctaatttatgcttgctttttatttttattttataagcacttattgtaatgttatattctcaataattaaaagggggggggagatgaagattaaaacatatcttgagtaaatagtcattttcgcccctggatgtgaagaacgctaacacacttgtcttcgaatgtga

SEQ ID NO: 7484 - DNA, 248 bp, Glycine max
catacacgacatttgctgagttcctcattcccaaagtcaaagaaagcgtgcataactttcatcaagagatgcctttggaaaatgaaatacggaccttctgatacgacctgattcaaatcctcttctgtctcaaacttaaacaccagtcattcattttcatgagttgaatatgaaactttacaccccatttttgacagcattccattaatgttttctatcctggaaaccggcccaccacataacctata

SEQ ID NO: 7485 - DNA, 323 bp, Glycine max
tctttcgtctttattttctagcgtctcgatatattatgggactcaatcagacatccgagaagaaagttattgatgtttgaatgtgctgggagcttccatttcttttttcgagcgtcttgatatattaccggactcaatcggacatccgagtaaaaagttattgtcatttgaattttcctgggtcttccatttttaatttcgagcgtctcgatatattatgggactaaattggatatcctagtaaaaagttattgtcgcttgaattttctacgagcttccgattttaatttcgagcgtcatgatatattacaggactcaatcgg

SEQ ID NO: 7486 - DNA, 461 bp, Glycine max
  unsure (1)..(461): unsure at all n locations
ccattaacacacggtgagtgttattcagaaaattagagtctatctctattatcttagtgagagagattctcctaaattcttgagtgatgcatgaacaccctggctgcatcaatggacattcactacctttgcgtgttgccctcgctggaaagagtgatctcttccatggtctcatcttcacccccgttctttcataccacaattccagaaaatccacctctgcccagaattatctcgtggccctaactgncattntacgcactcaaattangtgatgcttgagcctatattgaatttcgaaacgagtcctttcacctctgtttggaatcacctcattggagccctttagctctagtattgccatttctatatctctggccagccaccgactaagctagcgtttaccataccattcatccatttatgccgaaacctccttattagcacccgaattaaccccc

SEQ ID NO: 7487 - DNA, 381 bp, Glycine max
  unsure (1)..(381): unsure at all n locations
tganattgaacaacggaagctctcgagacaatcgagtggtcttaaattntcacacagatgtccgattcggggaaataatatatcgagacgcacgacattgaacaacggaagctctcgagaaatttgaatggtcataacatatcactccgatgttccagccggcgacataaattatcgagacgctcgatatcgaacaaccgaagctctcgacaaatgataatggccgtaacgtttcacgcgaatgttctattcggggacataactcatctagacgctccatattgaacaacggaagctctcgagaaatttgaatggtcataagaattcacacggatgtccgattctggaacataatatatccagacgatcgaaattgaacaa

SEQ ID NO: 7488 - DNA, 312 bp, Glycine max
agcttgtggctgctcaagttaccaagaaaccatcttttagtcgaatgtacgtgcaagtcaaataatagtgtaagtgctaattcttttgaagttcagcacacgagagagaaacgccacctatcttatagtattaaaaatatgcagaaaatggcttctcaacgtcggaatattatatcccaagcagttgctaactatgtcttttgttcataatgctaactattgacttacaatgacaaaaccattctgaagatgaaacatacaaaataaatagagatatgtgtgtatcaaacttacaatagcagaatctacatg

SEQ ID NO: 7489 - DNA, 144 bp, Glycine max
ccagagcatactggcgagtcgggaatgatatagtatcattcaccgactctcttttttggagaactctctgatatatatatatatatctatatatatatagagatatatcataaatatgaaaacctctagagacacgtatatgtg

SEQ ID NO: 7490 - DNA, 313 bp, Glycine max
  unsure (1)..(313): unsure at all n locations
agctngaacttctggctgtgtaattctactgataaatcgcggcacaggggaacttggataattctgcaaggttgctcttcttggctctctaaccatgattgtatcttttgctacttctatatgagaatgccctgcgctacgtaaactaacagatgccttgtaagatcgatgtctttcttctggagttgctgttgcttataacatcctgcacaaatatatgaatgtctctgaattacccttctcaggtggcgtggatctctaaatcaatgggaattaaatgacctacagtggatctcctctgcntacatgaaaa

SEQ ID NO: 7491 - DNA, 352 bp, Glycine max
  unsure (1)..(352): unsure at all n locations
ntgatggtgttgagaagacatcacatgcttgtcatcatcataaagggggagaatgcgaatgtatgcatacatgattttgatgatgccaaagaagaaccaaacaaggctacttcaaatgataagcatttgcttcaagaataattcaagattgcttcaacatacaaagccttgcttcaagattcactagagaccaagcctttccttaaaacaaagtgctttcaagacatggaaggctctggtaatcgattaccaggaagtgtaattgattaccacaagacagggttgagaaatagctgctgaaaaatgttttgaatttgaattttcaacatgtaatcgattaccatatgtatgt

SEQ ID NO: 7492 - DNA, 431 bp, Glycine max
agcttgtaggattatggggtacccatcacatgtggtactaggtggcggtcgggcgatggtgcacaacaagttttccacatccacaaatcgcgcataaacccaccatcccctgttgcccacctccaactgagctcacgtactcccacgtagcccatatcctcgtttctctcaacaccgggtccccataaatcctcccaagctttcccaacatccaagtaatacaacattcaaacagcacaaattatcacagccaagcaaaacagggcaaaggtagaaaactctgccaaaacaccaaccaaaatcacagcttttctcacttatagaccccagtaacaattcctttgttccaattcgttaaccgttggatcgactccaaaaatttactggaagtctctcgtacttaagcctacattgtgaccgctggatctact

SEQ ID NO: 7493 - DNA, 386 bp, Glycine max
  unsure (1)..(386): unsure at all n locations
tatgagaacanaattgcctcaatcatatccaaatatgcatgtgaattangaagcatcaacaagaatcaagccaaggctattgtgcacgcaatcaatggggcaaaacacaccaaatgattatgatgatggatggctcacattctcacaaaggtaaactcatcactttcaaattgagctttcaaaactatcatgacatgtcgaggagaatcaaggatttcaagtcacaaaatgtcaaaaacttttattttcaaaaaaattacccatttcttgaacatatcctatgattcaaagaaaaacatgcaaattcgtacatgcacacagaattgacccaaaatattaaactaaaaatccgacgaaactaatcaacattaacaaattaacacaac

SEQ ID NO: 7494 - DNA, 259 bp, Glycine max
  unsure (1)..(259): unsure at all n locations
agcttgtcatgcattattgatttccagtgtttattttcaacttcagctcttatnttttatattttagaatatanttttttagattacaagtggatgccaggattaattgtgttatatagagtcatcttattctttataaccatggtaattggtttaaaaacgatcaattaaggatgaaattccgcactgctagagactcataatttatagagaatcactaagaagcccgaacattatggtctctgttatgccatcccct

SEQ ID NO: 7495 - DNA, 480 bp, Glycine max
  unsure (1)..(480): unsure at all n locations
nganagaagagtctgtggaagacaccaaacattattgtgagcttccttttctggttgacagcatcctgaacttgtagcttgttggcctaaaatagtttttaatgtgaaacattagaacaaaatacaatccagcatcctagaaattaatatttcaacctaaaaaagcattttatgctgcagtttagtacttggcaatttatatgtcatttaaattctgaccttggataccgaagggcattttaattttaatattataaaaaagataatcattataagaattatattactctaaatgtgtagtagtttcttagttctcaatgcccagacactgctactaaattntgaactagtgctttgtgtttgttttatctgacttgtntttttttttctatttctgaggctgtacactgatgtacatttcaatattataaaaaatctcaatttattattataagcntaagaatgatatggcatgtatac

SEQ ID NO: 7496 - DNA, 301 bp, Glycine max
  unsure (1)..(301): unsure at all n locations
agcttctcaagggaagtttcttaagaaagcttttcaaggaagctacctagtctataaatagaagcatgtgtaacacttgtttaactctgatgaatgagagtcttgtgagacacaactcaaagttcaacttctctccctttgtcttccttcaatttcgtgctcccccctctctctttctctccctctttcttttcctccattgaagcatcctctccaagcttcttatccaaggctcatcttggtggtgaagcttcttcttccatggcttattccttagtggatggcgcctnctctcacctct

SEQ ID NO: 7497 - DNA, 393 bp, Glycine max
  unsure (1)..(393): unsure at all n locations
ngagatgaggaagtgttgaagggtgaaacttcctgcttttattgttgaccacagagtggtacctggagatatgtcgcggnggtcaggagaccttgnggacgtcaggtggggtgctattgcccaaaaccaagcttgaccaatcccgacccaacccgggcatagtcggtcagtgagaacctgtgatgtacctaagcaggcgagctcctggcagtcaacagataaaaggaaaacaagaccacaaagcaaggaggcttgtggtggctggccagctgtgaattttgtgtaatatgtggattgtggcctctggtaatcgattaccaagggtgggtaatcgattacaaggcttaaaattgaggacaggaggctaagatggtctctggtaatcgattacca

SEQ ID NO: 7498 - DNA, 161 bp, Glycine max
  unsure (1)..(161): unsure at all n locations
cagacataccagtcttgtgattggcacgactaacttgcgttataaaatcacactcacctctggcagtcagtggggtactgcaganaatatttatgagtcttgcaaatgacaaccatcacttaggcttgatatcctgatcacacacgtataagagcttgccg

SEQ ID NO: 7499 - DNA, 372 bp, Glycine max
  unsure (1)..(372): unsure at all n locations
agctntgagcaacttcaaacaacaataactttttactcggatgtctgattgagtcccgtaaaatatcgagacgctcgaaattgaataccgaagctctgagcaaattcaaacgacaataacttttttactcggttgtctgattgagtgccgtaatatatcgagacgctcggacttgaatgccgaagctctgagcaaattcaaactacaataactctttactcagatgtctgattgagtcccgtattatatcgagacgctcggtattgaatgctgaagctttgagcaaattcaaacgacaataactttttactcggatgtttgatagagtcccgtaatatatcgagacgctcgaactggaataccgaagctctg

SEQ ID NO: 7500 - DNA, 256 bp, Glycine max
actaagcttaacattcaatttcgagggtttcgatatattacgggattcaatcagacatccgagtaaaaagttattggcgtctgaatttgctcagagcttctgcattcaagactgagcctctcgatatactacgggactcaatcagaccaccgagtaaaaagttattgtcggttgaatttgctcagagcttcagcattcaagtccaatcggctctatatattacgggacttaatcagacatccgagtaaaaagttat

SEQ ID NO: 7501 - DNA, 312 bp, Glycine max
  unsure (1)..(312): unsure at all n locations
ttcaggataaataggcaattgtaatgacataaaaggtagatgacctaagttctgaaaggcttgaatgcaatcaaaggtttcagcagaaaagaattccatatcaataaacttagggtcgataatggaacgagatgagaaaagattggagtaccgtttctgctgttcgtcggaagaaaacactgnggaagaggacaatgagggtggaattggtgctgtggatgcgctagtggctccagaacgatgagcccttgaagcggaggcggaagaaccctttcgtttctttgacgattctgccatttgagggagtttttg

SEQ ID NO: 7502 - DNA, 415 bp, Glycine max
  unsure (1)..(415): unsure at all n locations
gctatgatacttgttaatgctttcttactaattgtgggtatctatattttgtattaatttcttttataataaactcacccctcgcaattnttgtaccatgtggttggtacctatgatgatcgcgaacctttgttcgtgggagcagaatgacaacagtagtggaggagtagtgagattcttttgtggagccaccgagccgacgtgataacgttggaattattttgagagagagttgtgntttgttaatcaactcctccatagctagtttcgtaattctttttgttgatttgaagatgtgaatcccaatttaattatatgtatgaacaaatttattttccattatgtgaatgatatgtactaagttactatacctatatatatatatatatatatatatatatatatatatatatat

SEQ ID NO: 7503 - DNA, 189 bp, Glycine max
  unsure (1)..(189): unsure at all n locations
agctgatgttatgctaagcctcacatctcatactaagcgcatattacaaaaatatttttggtgttgcagaaagcgctaaacacagcctgtcgcgctaagccccaaatgcttacgggattntacaacttcaattaagcttggcgcgaggctaaactaagtgctagtgttttaaactcaaaacgtcacgtt

SEQ ID NO: 7504 - DNA, 457 bp, Glycine max
  unsure (1)..(457): unsure at all n locations
gcttcggctcttgaaacaggtgttatctaatcctttgtgttttctttgttcttgcgtgtttcctcctttgtttgttttttcccttttgcttaactcaatattattgtttcatcttcctttattctatttctttgagtctatctttctttttttaattatatctagtatcaatatctttttgtcttctcattttatatattatcaaaaataattgcgcaaaaagaaaaaaaaagaaagaaagaagtaaaaaaaaaaacgtaaaaaaatctgggcaagtttacatttgttttcaatttgaaaaaaaatccaacacaaaaaacaaaaacaaagtgtgactattggtcttattttcttcttgttttatcaatctttggttgtattctccttaaaaagacaaacactnttcttaaatcccttgttccttgtcctctgtttgttcttattcactaaagttctc

SEQ ID NO: 7505 - DNA, 401 bp, Glycine max
agcttcagattgttaattgcaccatattccatgaagagtacagggtgtcacttttgttgagtggttttattagcatcttgctagttgaaataaaggcacaaacttgtgttaaagtggctgtcaattctcttgggatttgtaccatctatgggcttgttttaatttaaagaaattaaggtttaataaggtgaaaactctaggattgcggctgcctcttggcttaccaaggagttgcacaattttccatatgtttatgtgtcttaattctagttgtaattaggtataacgacaccatcaattgttgatatcaattctagttctaattacgtataatgacaccatcaattggtgatatcaatgtctagtttaattacggttaatgacaccatcaattggtatta

SEQ ID NO: 7506 - DNA, 428 bp, Glycine max
  unsure (1)..(428): unsure at all n locations
ntcaatgcacaaattctaaataattatatgaacactttggtcaatttcaattatgatattaattttttaaattatatataaaaacctaaacagcaagaaaaagagaaaatacaaaatcaatatctctctctaaatttctattttatttcatcaattcatattaattagaaaaagtactcgatttatagggttcacgctcaacacaatagcatatcaatttcacaacaattggtctgtcaaacatatataattcactataataattataaggataaaatgaaaattgcaaaaacaccccaaaacctattccaattgatatctctaaggatccctacacatgttctcactaattcccaattgtgaataactcatcccttacctctaagcgggctcacgtgtcttcagcaaatgatagcagcatctctagc

SEQ ID NO: 7507 - DNA, 390 bp, Glycine max
gcttagcgcgcaaggcgcgcttatctctactacacaaaaacatagactctggctaagagagacatactcgcttaactaaaacaacacaatggctaagcgagcatggctcgctaagccttattctctcacagagagctaattgcgcttagcgagactgacttgcttagcacgacacactacacaggcttagcgccagcaagcgtttagccaaacttgaccactggaacatgattggcttagcgagcaagctcactaagcctaattcaaaaataaagaagaaattgcgcttagcgagactaactcgcttagcgcatgaacaaaaactcggaaaactaaattgctttgggcttagcgagactgactcgcttagcccaagcttattcactaata

SEQ ID NO: 7508 - DNA, 403 bp, Glycine max
  unsure (1)..(403): unsure at all n locations
tgtgcgaatcanatcactcctgcattntatctctagcatgcattctttctttctttacctactcctcacgtttggttttttagggaaaaacaccataactaaacgcgccacaaggcatccctatcgcaccagatccaaatctagaacgatgggtaatcaagaggagacacaggaacagatgaaagccgacatgtcggctctaaaaaaacagatggcttccatgatggaggccatgttatgaatgaggcagctcatggagaaaaacgtggccaccgctgccactatcagttcggctgtcgaagcaaacccaactctcttagcaaccgcgtgccatcctccctcaaacatagtaggacggngaaggaacacgctggggcacgacggcaaccctcatctgggatac

SEQ ID NO: 7509 - DNA, 349 bp, Glycine max
  unsure (1)..(349): unsure at all n locations
agctngctctanattacattggtgtttgtatttatgggaggaggttatatgccattnttgctttaagagtaatgtcccactggtaaaactaactttccaaatgtttgccttcgcaggaatggccccgaggaagcttgcctcanagaggtccaggaaggacaaggcggccgaaggaactatttccgccccggagtacgacagtcaccgctttatgagcattgtgcaccagcagcgcttcgaagccatcaagggatggtcgtttctccgggagcgacgcgtccagctcatggacgacgagtatactgatttccangagganatanggcgccggcggtgggcaccactggtt

SEQ ID NO: 7510 - DNA, 436 bp, Glycine max
  unsure (1)..(436): unsure at all n locations
gcgtgggtctgggagacgaaggcaaggtgtcgtgatatacgaagatgatgttccgagtacattggatttggtacgaccatgccctcctgatttccagctaggaaattggcgagtggaggaacgccccggcatttacgcaacgagcataatgtaaacctttacggttttaaaagctctatagttgggcctaggctttagagttttttcttttgttaaggctttgtgtcttttgtttttgaatttataatacaaggatctttcttcatctgttcctacgtctctacccattctccttcatttgcatgtttacttctttatttctaanacggcagatccgatgacgagtcccccgaaggtactaatacctgggacccgcttatcaacttcgagcaagaaatgaatcatacggaagatgaagggaacgacgatgtgggac

SEQ ID NO: 7511 - DNA, 252 bp, Glycine max
ctaaggagcaatttcttaattaccaactctttattagttcatgcgttgtgtggaacaactagttagcgagagcaaaacaagccgcatagcacaaacaaatttgttttcatagccacgaacaactcaaggctaaaacaagaaggatacttctgggaaacatcagaagaatacccaatagaagacgtgtgctttatactttaattacagagaaaatcaagatggattaccaattgaagtttgcctttgtaacaa

SEQ ID NO: 7512 - DNA, 497 bp, Glycine max
  unsure (1)..(497): unsure at all n locations
cgtattaagcaccacactctanatagatctatttcactactatttatttaacaacatgaccatcggctggaaattacagccagtctatttaagcaattaaaaacttgaatttaaattatgtaaataaaaaatatgattaaaaaattttcgataaaaattaattatcatccaaatcgggtgatattctataacattggcatgctaaccattttttcagttaaatttcacatggactttgatgcctgaaatgaaaatgtagcgtaatagatatatccaatatttaggtgtgcagcactctatatatatatatatatatatatatatctatatatatatatatacatatatatatatacatctgtatatatatatatatatatagatntatagctcgcgcgggcgcgcgccccgcacacctctcctattctccaagatagacaatgacgctggtgtgtcggtggttacgtcaacataacaattcttgtgcctacacaccg

SEQ ID NO: 7513 - DNA, 220 bp, Glycine max
ccgggatcttaagcacctgagctgcacttgtcacatggaagttataacacgaagagcctcatgaagtgtcaatgaaataaattttgaaaaaaggagaagaggatgtgtgtctaacaaccaatgaggtaactacatctctttaatgaaataaccggctctggaggaaaaaaaaacttttttgtccccatttgggggccaagggacttcgcccaggatttca

SEQ ID NO: 7514 - DNA, 468 bp, Glycine max
  unsure (1)..(468): unsure at all n locations
ntataactagcatgatatgccatagattcttcaaacaaactttcaagatcaggagctctttcttcttcataatgattataaggattaaactcctgtctccacccagaattattcgtggaatagaaataacaattgtccttctaatgctctcttcgacaaaaatcacaatttatctgtgaaacaaaaataataatctccataatgcggaatcagaagattgaacttctttgtctaaaatggaagctactgtcctatcttgcaacaatttccttctcctttcggctttgttccttcttaacgtggcttcaatttccaagtccagaggaactaaattacctgtaggagatctatgcatataaaacactgataggaacaacggttatccaattcacaaagaacacaactataaacaaaacacgtattcacaagtcataaacgaataacaaatagacacttagagaactaaac

SEQ ID NO: 7515 - DNA, 395 bp, Glycine max
  unsure (1)..(395): unsure at all n locations
agcttataaagtttgatgctgagaccttcaacaccttcctgaagaccccgataaacttggagcctgnggagcactacatcacttactccaaattctgtcattcacatctaaatccctaagagctggcttctagactctgcattccacggtgaggatttgtgcttaatgctaacagcgcgccttggaagcttcttatgaaggacatgaccaccctaccccagacctggagtgttttatcatactccaacctcacccccacctctcacacgtccgatcttaatatggacagggtgaggttagtctaccgactggtcatgaagatggatatggacttgcgctcgctcatttcaggccaaatctcacagatggcccaatccaactcctcttggctcgac

SEQ ID NO: 7516 - DNA, 331 bp, Glycine max
  unsure (1)..(331): unsure at all n locations
ctgaggatttggtctntgccactgacaggatcgaagtgtatctgaaaagaggcaaatttaatcattctgcttggacgaatgagaaaactgcggcaaataaagagggtgacgatgagggagaaacccatgctgtgactgccattcctgtacggacgagtttcccaccaacccaacaatgtcattactcaacccttctccttacctaccgcccagttatccacagaggccatccctaaatcaaccacaaagcctgtctaccgcacttccaatgacgaagaccacctttagcacataccaaattacaccaacaaaaaggaattttgtaccaaaa

SEQ ID NO: 7517 - DNA, 361 bp, Glycine max
  unsure (1)..(361): unsure at all n locations
tttcttcaatactggaatncaaataatttgtgtccaataatcctaccttattagcaatgtgaaacaatttatctgagtattctttgattgtctcgctttgaatccctcattgaattcaacacttgcatgctttgaatccttttatctccaacacattcttccttcaggtatcccaacttgctcttgtggttttgagtcatgattatggtaaaattgatttttgagacacaagcaaagagacatgtctttgcttttgccttcttgatttgtttctttatgagnttttaattgggccacggtgaaattttctacaatggaggaacattataatcttcttccatgaacttccaagatctaaata

SEQ ID NO: 7518 - DNA, 398 bp, Glycine max
tgagatgaggaagtgtagaagggtgaaacttcctgctcttatttgttgaccacagagtggtacctggagatatgtcgcgggggtcaggagaccttgtggacgtcaggtggggtgctattgcccaaaaccaagcttgaccaatcccgacccaacccgggcatagtcagtcagtgagaacctgtgatgtacctaaacaggcaagctcctggcagtcaacagataaaaggaacatggaccacaaagcaaggaggctggtggtggctggccagctatgaacttgattgatatatgagatatggcctctggtaatcgattaccaacggtgggtaatcgattacaaggcttaaaaatgaacacaggaggctaagatagtctctggtaatcgattaccacgcttg

SEQ ID NO: 7519 - DNA, 348 bp, Glycine max
  unsure (1)..(348): unsure at all n locations
agctntctaatctcaaagaacttcacataggtaatatcatgtntaatggttctgttcccactgagataggttttgtatctgggcttcaaattgttgaattgaataatatttctgcccataggaaaattccttcttccttaggtcaagtcagggagctatggcatcttgatctcagttgctatggatgctgaagttcctggagtttgaggcccacaattcctcccaagaaaggataagataaggaaaagaaactttgatttctgcttccaaattcattacatggattggctatttataagctntaattgctaattattcgttgctttggctaattcataacattctcat

SEQ ID NO: 7520 - DNA, 401 bp, Glycine max
  unsure (1)..(401): unsure at all n locations
gaccttaaatctaagcttcgatcaacttgttctttnntcaatttttgatcaaggagaaagttggtgagtcccccataccattgtcttgatgcttgtttaagtccatagagagcttcttaagcttatacccatgagtaggagttttatgatcctcaaaactgggagattgagaaacatagacttcctcttcaatgtattcttttagaaaagcactcttcacatccatttggtacacgttaaaatccataatacaatcaaatgcaagcaataatctcacaacttctaatctagctattggagcataagtttcaccaaagtctatgtgctctcgttggttataacctctggctactagcctagatttattcctagatatcaagccatgttcatctagcatattt

SEQ ID NO: 7521 - DNA, 346 bp, Glycine max
  unsure (1)..(346): unsure at all n locations
agctntgagactatactntgntgggttgggagcttgtggatcgatatacgttgtacccgtatgtggcaatcactcccaactatcatccatatggttgtgtaagaccactaatacttgggaggcttggtagtattgttgggcactcttatatgtccagtgtgtcagttagttgtgtccaatatgattatcaatgatttccggtgtagtatttaattgtgtcaagaatgatagtcagtggtgttatgtattatagtcatttatgtcaagtgggataattatgcgcttangacgcaagagtgttatttgattatacaaccacatctagtggttaagtacactgtgtact

SEQ ID NO: 7522 - DNA, 481 bp, Glycine max
  unsure (1)..(481): unsure at all n locations
tagaagttnggcattggattgcttttctatcacttcatgccacatcaacaatttagcacaggtggcaacatagattgtattcaaaagttttttgctgtgtgaatagtacatagacgctaaaacacaaacattcttttattcaagaaaacataaacagtttcatgactcatttcaaccattaatgggttaaatgaataattaatttctagcaacaatcaacagttttcagagatgaatagctgacaaccgttactcttcaactattagtatgcttgaaactgatttgctaccagaggactagcctcattgaaccaccacccattgcagcacaatggcatgttcagttgagacatactagcacanacaaggcaccaccaagggctaacttcagcacaaccgaaacagttgaataagccaattcattcgcaaaaatctgcattcacatagctacccgtaacaactacaacaccatttatcacct

SEQ ID NO: 7523 - DNA, 411 bp, Glycine max
agcttcaacattcaatttcgagcgtctcgattattacgggactcaataagacatccgagagaaaagttattgtcgtttgaattggctcagagcttcaacattcaatttcgagcgtctcgatatattacgggactcaatcagacatccgaggaaaaagttattgtcgtttgaattggctcagagcttcaacattcaatttttagcgtctcgatatgttacgggactcaatcagacatccgagacaaaagttattgtcgtttgaattggctcagagcttcaacattcaatttcgagcgtctcgatatgttacgggactcaatcagacatccgagataaaagttattgtcgtttgaattagctcagagggtcaacattcaattccgagcgtctcaatatattacgggactcaat

SEQ ID NO: 7524 - DNA, 392 bp, Glycine max
  unsure (1)..(392): unsure at all n locations
cgaccataactttntactcggatgtttgattgatgctcgtaatatatcgagacgctcgaaattgaatgttgaagctctgagccaatataaacgacaatgactttttactcggatgtatgattgagtcccgtaacatatcgagacactcgaaattgaatgttgaacctctgagcttattcaaacgacaataactttttactccgatgtctgattgagtcccgtaacttatcgagacgctcgaaattgaacgttgaagctctgagcccattcaaacgactataactttttactcggatgtctgatcgaggcccgtaatatatcgagacgctcgaaattgaatgttgaacctctgagccaattcaaacgacaataacgtgtttctccgatgtctg

SEQ ID NO: 7525 - DNA, 291 bp, Glycine max
  unsure (1)..(291): unsure at all n locations
agcttgagacttaattgctttgttcttcccataagcagnagtcagtagtgcactctcacccatctccattacaagcctttcttctttctgaacacacatggtcattaattcattgatagaccatttatctttatgtgtgttgtaggaaatcttaaatggcccatattcatgcggaagggtgttcaaaatgaaatgcactaggaaggactcacacatatcaacctctagtttcttaagttgaactgaaatatctcgcattttcatgatgtactcacgcacacctttcacact

SEQ ID NO: 7526 - DNA, 485 bp, Glycine max
  unsure (1)..(485): unsure at all n locations
cagtaggcagatatgttcaccaagggacttcccacggagcaacttcaagaccttacttgcaagttgggaatgataaatatacattcaccagctcttttttttgctcagcacttatatatatatatatatatatatatatatatatatatatattataaatggaaatagtactagagatacatatatgtagttatgcagccagccatgttccatcatttgagctggacctagctagagacattataatatattacataaaccatccacacccaatccctcctagcttctaaacccatctttgagattcgatgaccattgattaaaatgcattccaaagtccttctccatggttntgatccatgtccagatcaaaagaaccgcatcatccatcagtttagttccatcanaagtagcatcttggaaactatnttattttgtgctgcagattgtgatgtaatgcaatcaccacacttcacttgtcgaat

SEQ ID NO: 7527 - DNA, 349 bp, Glycine max
  unsure (1)..(349): unsure at all n locations
agcttatgccatcaaatataaaatattcttattnggatgatagcaaaagttttccagtaattatatctgcctcccttgttgatgagcaagaggaggagctgttatctgttctcaagaagcattagaaggctataggctggaccctgatagacatttctggtattagctcatccacatgtatgcatcaaataaatttagaggatggggctaaaccagtaagatagccacagagaagactcaacccacagattcttgatgtagtgaagaaggaggtaaccaagctnttgcaagctggaatcatttatcttatctccgacagccaatgggtgagtcccgtccaggtagtccc

SEQ ID NO: 7528 - DNA, 413 bp, Glycine max
tatccttatggcctgcctccgacttcacccccccgtgccactccgaagagtaaacccagcccctactttttgagggccacttccaaccttatgaggactatcccggccaaaacaatggggaaggagatacttatcttggccccctgctccactctaagaatcgcgccccgcttgaactaccccagccgaacatattccgccatatcccggcctcacccacacccgtaaaagaatgtgttcccttcgcggaatataaggaaaagatagaggcgcttgaagagaggttgagagcagtcgagggcctcggcaattacccattctcggatttagcggatatatgtctcgtgcccaacatcgtcatccctcccaaattcaaagtaccggactttgataagtacaaaggtacgacatgt

SEQ ID NO: 7529 - DNA, 403 bp, Glycine max
  unsure (1)..(403): unsure at all n locations
agcttcctcgaaataaaattatgagtggcgccgctgtccaccaacaaaaggatgggaatttcattagtcgtggctcagactttcatcttttggggtttctgaccagcctccaccacaatgctcctgagaaacatcaaattgcactctgcctcatcctcctccttgttggtttgttcttcaacaaccaccatgtttgtctcacctttctcacttcctcctcgtcaagaaatatgacatgcaattgacgatctcaatattggtggttaggatggaatggattaccacatttgtaacacaagcccttcctcttacgtttagacaatttcttatatgaaagatggatctgtgtgtgtgacccgacccatacacaatatgangacttgatgggccggtttgggtgttt

SEQ ID NO: 7530 - DNA, 406 bp, Glycine max
  unsure (1)..(406): unsure at all n locations
ntaagaggaacttttgtacaacgcgggagtttctgcagatataanaaagtaaaattgataaactgctaaaaatatgtttaaagagattaatgtatgaaaggtcaacttaccaggggttcaagagcatccagcatttcctgagtaaaccgaacagtccagatatgctttctggatgaatgcctctgcctaccacaagtttgtcgctccagtggtggtatgaaatgtatgtcaaatacgcagtgacggtcacaggcaaaaaatttaatggtggttgactagtagattttcaaatctttcctgaagttntcgagtccatctgccaaatacactctttctttgtgttgtctaacccgtatttcgtagatggcttcattatatctcangtgaacaacactcggatactatg

SEQ ID NO: 7531 - DNA, 453 bp, Glycine max
  unsure (1)..(453): unsure at all n locations
agctngatgagtttgtgcattgtctattttttaagcgcaaatggcacgagcttgggaaggtacgtacgttagaaatataatataaaatcattcataaactnttacaatagtgttggttcatgacatgtgaaagatataataacaagccattcatcatgtcatgatgacgctacttttcatctcttctttagatttcagtcagtctaataatttatgtaccatttgaagtatggatctcattcgtagccaaattctatttcttactaacaaaattaagtacactgctctctgtttacttcatttaatattgaaaaagaaaagtaaaggacatgctgcatnttttcttcttttacaaaaattatgctctgctattattcatatgtgcatctaggtgtttgtttacgcttcatagttgtaagaaatgagatgtagatcagcaactgattccacatt

SEQ ID NO: 7532 - DNA, 412 bp, Glycine max
  unsure (1)..(412): unsure at all n locations
tgtagagcaagtagacagacttgacagctgttgttaaatgatagataataggacgaggttccaattctgaggaaccttctgatgagcattctgaagtaacattagaatggtcaatgccaagaacaagtacttatagagaagcattcttcatacagatggacttcaaggaatcttttgagttctcaacacttgacagatgttntgagacaacctttctgatcataattataagtatttcataatgaaagaacatctttgcttcttaatagatataacactaaaacacttaagctaaatgttagtaatcacataaacccatcatccttacaatattcattgctaatggtttgtcataattaaaacaagggatgcggattcaacaatcttgccctttctaatgatgacaaacact

SEQ ID NO: 7533 - DNA, 320 bp, Glycine max
  unsure (1)..(320): unsure at all n locations
agctntctgtagatcaatgtctgaatgcacatgctgacgtggagtaaatgtcaaaggttccctatgccaatgcggctggttatttgatgtatgctatagtctgcactagactatatttggcacatgttgtaagccaagtctacaattttatgtctaacccacgatagcgacattgggaagtagtgaagtggatcttgaggtaccgaaatggtacaacaagtcatggtattatgtctggtagttagcaaggcgatcctttagttgcgagatatgtggattttgactatgttggtgatctggatgacatgaggtctacaaca

SEQ ID NO: 7534 - DNA, 304 bp, Glycine max
tttgtgccttctaaaaaaatactataactcattattattcactaacatgttgcatgtacgtaccatttttttatgctatatgctctaactatgaatcttgctttaaattaaatctttactatatggtttcacgttatggcaacagattctgcctatcacttggatggagtgagtatctcttctctttgttaattatgagcattttccacctcccttttggtctcctaattgttgaaaaaatattgtatagtctgaaatcatatgatctggctaatctctccatgacacgtaactacacttttac

SEQ ID NO: 7535 - DNA, 361 bp, Glycine max
  unsure (1)..(361): unsure at all n locations
agcttgacagtattacaaatctcaatatacgtcgccaagagtgagtatggatcttcatttggtaaaccatgaaacaaattgctctgtattagctgtatcaatgaaggtgggtaagttaagttttgtgcttgaacctctggccgcacaacacttgagaaatattgcggcaccaaagtacttgagtaatcttccaaggtcactcatcgtggttgctcttcaaccatgactntggctctaaattctgatgtttgagattccttggatgttggcgaattataagatgatgactcagataagtgagccctttcaggattgatgctactgttctatcatggataagctttctttttctctcagagtt

SEQ ID NO: 7536 - DNA, 413 bp, Glycine max
  unsure (1)..(413): unsure at all n locations
tattagtggagaaataattcaccccttcttaagttattgaggtcgctggtccaacatttgcaatatctaattctacttttaagttaagtaaaatgtagttttcaatacgtgagattatttgttttgtttgatgcacgctgatgataatggagatggaaagttgacactcttcccttatctcatttattttgttgcaatcaattttgtcttgtatgtttaaagaacattattaaattgattgctgcttcttctgcattcagagtctatcatttacaagggggttaaaagcttattagtggaaaaataattcaccccttcttaagttattgaggtcgctggtccaacatttgcaatatctaattctacttttaagttaagcaaaatgtagtnttcaatacgtgagaatatctgtt

SEQ ID NO: 7537 - DNA, 312 bp, Glycine max
agcttaagatgtggttgatcttgtgataagttacacctcgctggcaatgcttcatttgctttcaaccaatattatcaaacaatggaccaaagtgttgaagcgtgtgatttcaatggaatgggaactattgtgaaacaggatccatcaaagggaatctgcttgttccctatataaactgagagcattggtgacatggctagatcaatgcgtgcgattggaagcatattgattgcattgtgactagttttcttaacattgacgtacagaccatatggatggtactggtatactaatgcttaccatgggtagggg

SEQ ID NO: 7538 - DNA, 383 bp, Glycine max
  unsure (1)..(383): unsure at all n locations
agcttacacattaagtttatctctatgcaacacaagttagttacaatgaagttattattattattatatggtcaaggtattattntattatcaaaaaggaatgtagagagaaaaaagacaatggaaagagtgacataagaaggttgacaaagtgagcgcaaagccaaaaacaaaaatgtgaaaatggtaacactccgaacgttaataacaccatcacatcaccaatgcctactctttctccctcactccttctcttctacaaattgccataaataaaatctcgcggcaaaatctttttctctcattcattgattntccgatgggattgtcgcgcaacgtggcttcgcagccggagatcgacgacgccggcggcgacattggat

SEQ ID NO: 7539 - DNA, 376 bp, Glycine max
  unsure (1)..(376): unsure at all n locations
ntaaggatantggttgacatgcggtgtcaattcatttatgtggtgtgctcatgcgccattggtgaanatcttttcaatatatattcttcgtatgcacaacattaaataactatttatcaaaattcaacaattatggttaagctatgcaaataaccttaatttaagtagccctagtttcttctagttaatgtgagcttgaattaatctagatcctaaaacacttgggtatttaaatagctcacattgatttgaataccatgttcagtctttggatctagatttttcagctttaatacaagagtgctttatggggagaaaactctcaatcaatttcaatacatgagtggtttaagggtagttcgtgcgtgaatgatgt

SEQ ID NO: 7540 - DNA, 278 bp, Glycine max
agcttcttgttttttttgtttggggtggtcccttattgctcccaaatgaattaagccctttgatatgggaatcttgatgatgctgcagcagcaataaacgactaacagtattagcaggttattctgaagggtttttcactttcacattgatactataccagctcggagctttaattaattaaagaggtgaagccaacagctattttaatttgttaataagttggattgtaatcaagtaattgaaccccttcacaatttaattagtttaaatatttgat

SEQ ID NO: 7541 - DNA, 292 bp, Glycine max
tttagccaagtgattttattacatgtgcttactgtcaattgtttctctatattcaatgagtacttgtgttttcatttgtgtttggttagatgcttgtttggtctttcaacttggtgggtcagtttgttaagttctttgttccaactttgattctgtgggctttaccattttgcctgtgcatcatttgctggagggctcctcatcttttgagatttgtgcttcaagccagaaaatagatataaatatgataagagtaatcattttctattcattttatggaatttctgcaata

SEQ ID NO: 7542 - DNA, 234 bp, Glycine max
  unsure (1)..(234): unsure at all n locations
gggaacaagggaccacaaaaancccaagaagggggggccgaaacaagaacaaacaaactacgccccaacaaaaaaacccaccgaaacacgaaagcaagccccaagcaccccaaaagacgaaaccccaaaggaggacgcaaaagaaacaacccgaacgcaaaaggaaagaaaaaacaaacaaaagagccgaaaggaagagaaaggacaaacacagccctgaaaccgggccagcaa

SEQ ID NO: 7543 - DNA, 276 bp, Glycine max
agcttattttctttcgtgcgttgagcctggctgaagacacctgctgcgcttagcatactaatctcgcgcttagcgcacaaccttgatgctgatgctctgccagattctccttcgcactaagtgcgctgaagctgtgcttagcggtggatgcgcgcttagcccaattactgaactaagcttaactctcactttttgcactttatgacttagcctctttttttacctgaaaatgcacagatttcatcattaaatccaatggacatattctaaagacag

SEQ ID NO: 7544 - DNA, 290 bp, Glycine max
ttggtgctggcttttttttggaggtaaagaaggatctaggggatacaaaattacacatcagtgggacaactgcattgatggttgcacgtttgaaattacttgatgccaaaaattttagaaacacaaatgggtaagatatcaccttctataaatcacattgaagaaaccagttaaatagttacaaaaacatatgaaaaaaaatattgaaggaaagattaacaactaattaggaacctacttgccatagaaaccagaacagataaaaaaagaagaagatgataaacaacgat

SEQ ID NO: 7545 - DNA, 275 bp, Glycine max
agcttggtgttgatgcttcaatggaggaaaagaaagagggagagaaagagagagggggagcacgaaattgaaggaagaaaaagggagagaagttgaactttgagttgtgtctcacaagactctcattcatcaaagttacaacaagtgttacacatgcttctatttatagactaggtagcttccttgagaagctttcttgagaaaacttccttgagaagcttctttgagaaaacttccttgagaagctagagcttagctacacacacccctctcat

SEQ ID NO: 7546 - DNA, 290 bp, Glycine max
tttgcaagccagaatcttttatcctatctccgatagccaatgggtgagtcccgtccaggtagtcccgaagaagactggcctcacagtgatcagaaatgagaaggaggagctgattcctactcgggtgcagaacagttggaaagtctgcatcgactataagaggctgaaccaggttaccaaaaaggaccattttcccctgccattcattgaccagatgcttgaacgcctggcaggtaaatcccactactgtttccttgatggtttttctggttatatgcaaattactattg

SEQ ID NO: 7547 - DNA, 277 bp, Glycine max
  unsure (1)..(277): unsure at all n locations
agctntacttcttattntagnaatgacccactaacctagaattaaaataacttaatgccattaacctagggaattaaaaaaacttaatggctgagtgtaactgaaattgtggcaaccaaaagtcacccccaacagccaacaagtcagccaccatttggtctcccaaaaggctgatgcctaggttgtcaattgggcccttattacaacttgaactaaacctaactaaagcccttttagttgattaacccaaaacatatttttggtcagccaactttac

SEQ ID NO: 7548 - DNA, 288 bp, Glycine max
ttaactcggatgtcttattcatgcgcataatatatcgagacacttgatattgaataacagaagctctcgagaaattcgaatggtcataacttttcacacggatgtccgattcgggcgcataatatgtcgagacgctcgaaattgaacaacggaagctctcgagaaattctaatggtcataacttttcactcggaggaccgattcaggcgcataatatatcgagacgctcgaaattgaaaaacggaagctcccgagaaattcaaatgggcataacttttaactcagagg

SEQ ID NO: 7549 - DNA, 277 bp, Glycine max
agcttttttatatgtagaaatctaactgaactagaaaatgatataatgtatttttctgtttgccacagggatggtagcatatcagtttcgttcatccaaaaatatctaatgaagaaactggatttgaccagtgaaacagaggtaattctctcctttagtaatacatccaaaaaaatcaactggaactgaaagattttattgtcttgttcttcttttctctgaagcatatcttttgtttaaactcttgtctatctgtgcgggccaagctattgttgtc

SEQ ID NO: 7550 - DNA, 294 bp, Glycine max
tgttaggggatttgttttaacaaaataataccacgtccagcccaccaaaactcacacacttcaacttaaatcacccagttcagcgtactcgaaccgaatttcaccttttcctttcaaattcatgcccctttcaaaaactacgagactgaagtggagtgtgtccttgggtagcctatggtgctgtgttacttcagctcaacaacggagtgtaattgataatttgagatgggtgatgatgtaactttgatcaatattttcgggatgtgggacttctagactgaattttttggtttt

SEQ ID NO: 7551 - DNA, 275 bp, Glycine max
agctgtatattttacgataaaaaattataaaagttcaaaatataacatgacattattaaaaagtgtgaaatcttattaaaaatatactggagaaacttatgtgagtttgtcccattgtaggtgctctaaatttcttatagatatcttaattgcttaggttgaaaatgacattactagtctttctattatagagctaagtattgatgattttgactctaaaaagtatcattgagtttaatttttcatgacaattgtaggtcttttctttttctttt

SEQ ID NO: 7552 - DNA, 291 bp, Glycine max
tgtagataaaattatcttttaagtaagacatcccacgagaaaggtttctaagaaagattaactattaataaaataatgaatacttgacaagtttgcattaatgtcatgtgaaaaaaaaaacccgctttgaagaagctgataaaataaataacacctttatgaaaaaaatatatgatatcaacaaaccacccaccttgtttttaccaacaaaagtttgtttaattggtaaagagtagactcattctaaaataacacaagtttgattttcgctgtccatatgaaaatcttgtt

SEQ ID NO: 7553 - DNA, 275 bp, Glycine max
agcttgttctatccactgggaaccatcccctgagcaagcatacaaatggaaaaatatgagtcccaaagtaccaaaatccctgcggatatatgaagctcatgttggaattagtggttctgagccaaaaatatcctcattcaatgatttcacagacaaggtttcccccctcatttctttgggttggaatttgtaactaatcaattatacatatcttccatgtctatatattgtaatgggctccattgaatttttacttttattatatgcacaatgca

SEQ ID NO: 7554 - DNA, 284 bp, Glycine max
ttggtaacttgtttttacccgaaggcaacttcttcagtgggtgaatatcaactaacttgaacttttcgagagaaggcaatgctccatcttcaataacaatggatttcaaaccatacaagcgtctcagtagtatttgctttaggttctgaaaccccctgtttgggaactgcaaaacctcacccttgtatgcactatgattaataaagagggacgacaaatatggtaggtctttaagtagtggcaatggatcatcagtcaaacgggtgcgtgtcaaggacaacgta

SEQ ID NO: 7555 - DNA, 272 bp, Glycine max
agctttttttttaatggacttaccttgaattaattcctttgatagcccttttgagccttgtttccctttccttgttttgaagctcactacaagccttaagtgaaaaaccatgatattaccatatccttaaggaattttggagctttggaattgttttgggaataagtgcggggggtttttgtttcattggacaacttgttttgttgactatgcttcatgatgtattttgggccatacttgatgtacattgtatattggttaaatgttggaca

SEQ ID NO: 7556 - DNA, 94 bp, Glycine max
acaatcgttctttcttctttttcctcatctggatggttcaaccatgggtaattctatagatagatagccctcctttacatgtacaagtttctta

SEQ ID NO: 7557 - DNA, 275 bp, Glycine max
  unsure (1)..(275): unsure at all n locations
agcttgattttgtgagtngantttagacttagtttcactttagttattagtcaattcaattaagaaagaaaaatcccaaaaagaaacgtccgattgatttttttttttggtttattttactaaaagatattttttgattattatattattattttacctcttttttggtttccaacgtggttacgacatgactgaacgatcggatttcattttaacagaaattaacagatgttacaattcaaatgatcggtggaaatttattttattttttgatt

SEQ ID NO: 7558 - DNA, 290 bp, Glycine max
acactatatactactccttcttcgcaggaaaagataattccggcgaaaggatcgaagtttgtctaaaaacaagaaaatttgattatcctgctttgatggatgggaagctagcggcaaaacgacaaagtaataacgatggacgaaccccatgtcttgaccattgctcctacatggccaaatttcccaccaactcagcaatgtcattactcatccaatatcgactcttcttattacccaccaccctatgagccaatactacccaatcaagcacgaatgaccacccctagatc

SEQ ID NO: 7559 - DNA, 274 bp, Glycine max
agtctttttttgtaaagcaaatctcaaaaaatggatgataggcgcaagataaatattctatcaccactcttattattctacctaaactaagagaaaagataaaatcaatttagatattttcattgatgataataaccaaatgaggaatacagtatataacctagtggttgtcaacaacacgtcctcatttaactttagaaaatttaaaatagaaatgaataatataaaaaggataatcttaagtcatctaatatttaaactacctatttgggtt

SEQ ID NO: 7560 - DNA, 304 bp, Glycine max
taatactcaagctttctatggttttttgtgtaggacaccctcatggtggttaaagccccgagaagacctcaccttatgacctgaagtggtacaacaaaccactgagaagctaaagttgatccaagaaaggatgaggactacccagagtaggaagaaaagttatcacgataagaggagaaaagacttggaattcaaggttggtgatcatgtattcttgagagtcactccatggactggggttggtcgagcattgaaatcctgaaaactaacacctcgctctatcagtcttgtccaaattcttaaa

SEQ ID NO: 7561 - DNA, 269 bp, Glycine max
agtttcctattggctcctaattatatgggccattaaatctatcatatgcttacaatagccgagaagtccgtgaatctcctcgggggcagagtaggtgtctgccatcgctttggccttggctagcaatcagagaagttcttgactcccgttcaaggtaagagcaaatcggtccatccacattgttgcctcttgatgtaacgagccgatcacccttcctctagcctccttttctgcgtacactcgggcatactcgtccgccactttatgtt

SEQ ID NO: 7562 - DNA, 258 bp, Glycine max
  unsure (1)..(258): unsure at all n locations
aaccgngtngaccaacaaaacaaggaggtaaggttatgtggctggaattcaattaatattattgttgttgtgctcattgggttttgcaagaagctctgattgttatcatatgattgaaaacttttatgcataaaattggttacaatgctttatattttgagggtaatcatatatgctagtgaatggtggctgcctttatgaaacaatatgatatctatgagaaaccaaaccgataagttaaagctattttacttattc

SEQ ID NO: 7563 - DNA, 290 bp, Glycine max
ttttggtcttaaatttattgtttttctctttttctattattttatttaagcaatgccacatgtctccatttgagtggagcaaaaagggcccactttccctttttgactgtgacccatactcagccacaaaagtgaggaaaaatctgatctttgaaacgctaaaatcctgcctcggtttgcgtgccatttctctggttccagttcctcgcgtttctctgcgtccgtcggggccagttttcgaaagtaagcaatatatatatcaaaatgctcagaataaaaccccgagcgtg

SEQ ID NO: 7564 - DNA, 223 bp, Glycine max
tcataccattcccttctccaaaacgcatgtggattggagctagattgatttccgtgagtatttcttgcatttcttgtagacataatctttcacatatcaatcataatcttagctgcaacaatatcgtattacaaattatgaacaattcttgcacgagtagagttttttttttatcaacaaatattaattgtgtgtatgttaatttttgttagagagaggattc

SEQ ID NO: 7565 - DNA, 228 bp, Glycine max
ggaacctactttaggagggacgccaacctggagaagaagaggaccaataaacaacacacccccgagcccaaagaaaacacccaaaaaccccgcgcaaaagggcaggaacggaaaaaaaagcagaaaggacgggcccacgcaggggagaacaggaaccaacagaccaaggcgccgggagccgaaggaaaaagaaacaaggcgcacgaacgcggggaaccaagagggaaa

SEQ ID NO: 7566 - DNA, 147 bp, Glycine max
gcatgcaagctacgtgtttgcgcgcttagcgcgacaacacaaaaacatagactctggctaagagagacatactcgcttagctaaaacaacacaatggctaagcgagcatggctcgctaagccttattctctcacagagagctaattg

SEQ ID NO: 7567 - DNA, 166 bp, Glycine max
tgtgcgaatcaaatttttctgcattttatctctagcatgcattctttctttctttacctactcctcacgtttggttttttagggaaaaacaccataactaaacgcgccacaaggcatccctatcgcaccagatccaaatctaaaacgatgggtaatcaagaggaga

SEQ ID NO: 7568 - DNA, 78 bp, Glycine max
tgcttcctgcttgtgacaactttgctccaatccaaatgatttttcgcatgacaaataaattttgaaaaaaatatatga

SEQ ID NO: 7569 - DNA, 216 bp, Glycine max
tctcagcttttgaccgactatattattctctatgaaccagggacggataatgatctatatataggcttgctcacggtagagagaggaatactagagatttggatcacgtaaagtgtgttaaggatgaagaaggcaaagtcttattgcctgaaaaagatatccatgaaaggtggaaggtgtattttcacaacttatttatgatggtaatggtataca

SEQ ID NO: 7570 - DNA, 277 bp, Glycine max
agcttttcatgatttaccctttcaacctcataaatttcctttaaaagggccttggattaggtcccaacaccaactctcttctttcttcatttatttctacagtaaaaaattagattaaaaatcaaacatttaaactattttaaagctattctaatttattcaaaacttataaacaaggacaaacaagcttaaatgtattgaaatagttaacatagttgcctacaaaatggtcattaaaatagcgttcctaaggcaattatcacccaagttgttaagg

SEQ ID NO: 7571 - DNA, 224 bp, Glycine max
acggaccacgactttgatttcagacccacgcccaggaaacagggcacgggcacacaacgaaaaaaggcatgaatagcacgacaaggccgagaggcagccgaaaccaacaaaaaacacggcacgcccgcggaagaaaacccgaacacccgaggcacgcaggaagaaaaccgcggcgacggcgtgaacaccacgggaacccacagagaacggaaacgccgcgccca

SEQ ID NO: 7572 - DNA, 275 bp, Glycine max
  unsure (1)..(275): unsure at all n locations
agcttgttcntgttttatnnaaanncctaggatcatgagcaactaggtgtgtcctactatgacttgagaaacaaaggtgatcaaataacaagcagagatttaaaagttactaggttgcctcctagtagcgcttctttaacgtcttgagctggacgcttgatggcttgtcggtcacggacctagtaccttgcttacctttggctctggacttggtcgcctattgctcggccatgggtcgtaagcaacgctctaacctttttgtggagagctgaggt

SEQ ID NO: 7573 - DNA, 289 bp, Glycine max
tgaggagcccctccttgtgggggtgtgggcacccttggttgggcgagcgctgtgtcagaagagcccccggggcgagccgaaaaggtccgatgatgttgtgcatattggggggtaccatggggagtttgcggcggcttgggccacgcaggtgttgaagtgacgatatgggcatctccctctttcttctttggcccagccattccggtccttctaccgctggcacctagcggggagacgtaatcaaactttcccctctttaaacccacctcaatcctttctccgatgaaaa

SEQ ID NO: 7574 - DNA, 275 bp, Glycine max
  unsure (1)..(275): unsure at all n locations
agctttagtttatttcccatgaatgncnatntcttggctattccacttctcacaaaggctacaagtgtctctcacctaatggaaaactgtatgtttccaaagatgttgtctttaatgagcttaaatatccttacaatgatgtttttccatccttatccaactctgtcactccatctaagagtaactttttaccaactgctcatattcccattgtttcaccttctcctaatgaacccagtcttccctctcaaactgctgaaactaatcctccttct

SEQ ID NO: 7575 - DNA, 251 bp, Glycine max
cccggaggagtcttcaaaagataaggatacaaccccggccaggaacgaaaattaaaaccatgatatctggaaaaaaccccaggaatttttaaaacactccaaacaaaaaaagggctaacagggcctttcaaggtcaccaccctaaccacctaaaatcgcgggcccagggaaggatgggaaccattaaacaaaggggggcattaattaattaaaaattctgaggcagttatgcacaaagctcaagcaaagca

SEQ ID NO: 7576 - DNA, 159 bp, Glycine max
agcctatttttattgagacaagcctcgtctaaattcctaagattgtgcttcatctcgcggagaacgattcttgggtagacaggttatgccctgccataactgatatgacctgatattacaccatgacttagaggataattggttctgtggaattgttta

SEQ ID NO: 7577 - DNA, 199 bp, Glycine max
tgtgaacagacttcttatcttttaccacatgagggacacctatgatatagagagagagagcacggaccacatgataatggtggtccccgtctggctgactctagtaacgcagaccagatggacatagacaactgagtacgtggcttaacacattgtcaggatcaaggactgctagtttatgggtgctgttgattgatgc

SEQ ID NO: 7578 - DNA, 260 bp, Glycine max
cccctacaacctgataaatttcctttaaaagggccttggattacgtcccaacaccaactcttttctttcttcatttatttctacaggaaaaaattagactaaaaatcacacatttaaactattttaaagctattctaattcattcaaaacttataaacaaggacaaacaagcttaaatgtattgaaatagctaacatagttgcctacaaaatggccattaaaatagcgttcctaaggcaattatcacccaaggtgttaag

SEQ ID NO: 7579 - DNA, 217 bp, Glycine max
tctctccaacattggaggcgttacttgagctgccaagtccctccacctctgggtgtaatccttgaacaactcaagctccttcttgcacatggcctgaaggtgtattctatccggaaccatattagaaatgcactaatacttcctaatgaaggcaaccattaggtccttccaagaatggactcgggaagggtccaaattagtataccagggaacggcc

SEQ ID NO: 7580 - DNA, 271 bp, Glycine max
agcttgattatcataagacttgcttattcatttaatactaatttctctaccttcacagtttagtcaatttaagataccttataattgtcagaaggaggaatgatctcttaatgagctcatttcatagtgtgtgcaagaagaacaaaggttgaagcaagaaaggaatgaaagtgcgcatgttgcaagtacctctaaagacaaggacaaaagaaaaagaactgaggatcccaagaatgaagctgctaagggttcaacataaaagaaacaaaat

SEQ ID NO: 7581 - DNA, 230 bp, Glycine max
aaacaacgccccacatccacaaagcacgcaaaaacccaccaccccaaaaagcccaccggcaacggagaccacggactcccacggaacccccaaccccatacctctcaacaccaggaccccatcaacctcaccaagcttccacaacatccaacaaacacaacatccacacaccacgaaccaacaaaaccaagaaaacagggcaaaaacagaaaaacacgcccaaaaacaca

SEQ ID NO: 7582 - DNA, 222 bp, Glycine max
aggacctataaatctcagcttgaccattttttttatactttactcgagtcaatgatgccataaatatcgccgctcaaatgaagtgaagcttgagcccacaacacatacactttatcggatgatgatgagcctgtatatacgggacgctgaaatgatgtgaacttgaccattcaaacgaataactttactggagccgatgagccgtatatacgaccgctaaat

SEQ ID NO: 7583 - DNA, 292 bp, Glycine max
tgtcgggattagattttctttaaaccatactttctgtacattaaagcataatacccaacttgagattcaatgttaatatcgatcattgttggaaaacaatattataatctttaattccttaggtgtgaagacctaagttccttgattaaatgtcaatcccttacacatttgatagaggaagctttaagcttaatgacctaaagataaccaataaccctcatcatattcctagctccaaagttaatgagtgttctagcacaaatcaagataaaaagagagtattttccaatca

SEQ ID NO: 7584 - DNA, 241 bp, Glycine max
atactttttgatacgaattatcaccatgaaaatacaaaaaaaaaaaaggtatgttttattgcattactttccttaattttttaaaataaagattaaggggttctcacagaccctgagagaataaaggtcatttctaagtagcccattcccctaagtataaagaaaatttggggcttccacgacttaacaaacttttacaaaagatttgtctcatacttttctatacttgtagcaccactca

SEQ ID NO: 7585 - DNA, 293 bp, Glycine max
tgctaatgctttctttttttataacaagattaaacataaatacattcatcgtttaaaggtgtccaaaatatgggagttttacaaaatacatattgtcatccagagcaaaggcgtccacagtggtggcttcagccacatgtatacaatcatcaaattcctatacaataggtctacccatacaaaaacaaaagagtaaacctaacagtcagtcctatatacacccaccctataaaagtatataaagctaatccgaacagctgtccactatgatgatgagcctccactgatcgcca

SEQ ID NO: 7586 - DNA, 238 bp, Glycine max
gcaagggaggaacacacgctgcgggaaaccacccgcaaaaaacaagaaaaccctcgcgaacggaaaaaaaagaactaaacttgaatagggggacggcgaacgctccaatcggggaaacggacctttcgcaccacaagcagcaatacagtcccaggcataaacgaaaaggaaaaaaaaggcggaaaagacgcaaacaaccatcatacaagggaagcgacttaccaggagagagaaaagg

SEQ ID NO: 7587 - DNA, 172 bp, Glycine max
caaaggacaagaagcgagaggaggcgccacccaccagggaacaagccacggaagaaggagccccaccaccaacacgagcccaggacaacaagcccggagaggacgccccaacggacgaaaagaaagacggagacaaagagagaggggggagcacgaaaccgaaggaagaaaa

SEQ ID NO: 7588 - DNA, 281 bp, Glycine max
tatgaaacaacaccgtttttttttagaaattacagataatgccaagtaattatagaaggagcactttcatttctattataaaacttgtggataaagcataatagtacatgaaatgaataacccaccactagtacaaattcatcccatgaatatattgccaacccaaaactttcaacttcttgcttttgtttagggttaacctttccgaagcttacccctggtgcaacaaagacataaaaatgaatgcttctttttaaagcacaagcattttaggaaagaaa

SEQ ID NO: 7589 - DNA, 146 bp, Glycine max
  unsure (1)..(146): unsure at all n locations
agcttgatttgtctactactactagnatggngagtcagatgcatatgcagccgaaaaaaagtgaatcatgcatgtagtatttaacaaaagcttttagaatatgtcacatgccgatgcttaaccatacacatttttatgcaaaatat

SEQ ID NO: 7590 - DNA, 280 bp, Glycine max
acgccaaagccagcttttcaaataacaagaccaagcgggcagacaagcagcggacaacgggggacaaaacaggggaggcaaccgaaaagcaggggagaccaccgaagcaaaggcagacccacaggaggcgacagcccaaagcaaacaagcacaaggaccccacacacacgggggagccacgcagggaacaaacgagaaaaccgaacaacgggcacaagaaacagccaaacgacgagcgccaggaaggggagccgagcagcaggccaccaagaagaagaac

SEQ ID NO: 7591 - DNA, 275 bp, Glycine max
  unsure (1)..(275): unsure at all n locations
agcntanctgatttgagcgcgactcggaagtaaaaatgggagaagatatcataccgcaagtttgtaagtttaaatatatgggatcaatactacaaaatgatgggaaaattaatgaggatgtcacacagagaatgcaagcaagatggctgaaatggagaaatgcatcaaggttatttgtgattgcaaagtacccaccaaacttaaaggctaattttatcgtattgctatacatccactatgctctatggtagtgaatgttaggctttaaagggaca

SEQ ID NO: 7592 - DNA, 290 bp, Glycine max
taacaacgttttttatattttggctttgaccttttttatctaaattgttttttaaaaagcttgagcttgacttttatagtaaactaactaaagccaagtctaaccttaaataggtcgagccaaagactccttgacaaacggttcgactcatttccatccctaattgtagtgatttgaatttaaacatttattttgacatgatctctatatttctagtatttttttggtagaaattaattataatttataacattattttatgatttttacttatgaataatatatacatt

SEQ ID NO: 7593 - DNA, 274 bp, Glycine max
agctttctagaattatcattgatttttcacaagttggggaaattataaataaaactttgaattttagctgataatgatgttgtgccccatttgcaaaaaagaagtataaaaaaaaatgatgggcatggttgtagaatagtgtgctggcgattataaaagacttcaagagttcaacggggaaggttgctctgattggtgggtctaagtaaaagtggaaatatttttatggttttattataaagataccatattttatatctgcttgactaaggca

SEQ ID NO: 7594 - DNA, 282 bp, Glycine max
tctcaagaaagtttttattttaaagctaccaagtctataatttgaagcatgtgtaatacttgttttaactttgatgaatgagagtcttgtgagacacaactcaaagttcaacttctctccctttttcttccttcaatttcgtgctcccccatctctatttctctccctctttcttttcctccattgaagcatcctctccaagcttcttatccaaggtttatcttggtggtgaagctccctcttccatggcttattccctagtggatggcgccgactcttacc

SEQ ID NO: 7595 - DNA, 226 bp, Glycine max
  unsure (1)..(226): unsure at all n locations
gaaaccggccaaagacaggcaaaaggcccaagcggagaacgacaaagcccccgagnggagaaagacgaacgccccagcggacaaggangaaggcccagaggcagagacaccacaagaccaccacacgccgccaaaggcccaaaccaaaccgaaggcccaagcaaaaaaaggccacagcaaaaaaccacccccaccgaaaaacggacccaaaccgccaagaaagccc

SEQ ID NO: 7596 - DNA, 218 bp, Glycine max
ggaaaccaaaccagcgcgaccagcattttgggggaacccacgaggggcacaacccaaggagggccaaacaacacaaacccaggagcgcgcaacacagggaaaacaccacgaagagacaagaacccaaagaaacacccaaaaaagcccaacagaccccgcagacaaaacaaaacagaagcgacgagaaagcaacgaaacaggggggaaacaaacaccga

SEQ ID NO: 7597 - DNA, 228 bp, Glycine max
gagaagcgagagcccagcaacacccacgccgcggggaacaaagcgcagcagaacgaggagcaagcaggaaaagacccccaaagaaggcagcagcggagcacacgaacaccaccacaaaagcgaacgccaccccaagacaaaacacagggacaaccaagagaaagggcccaccaccaagaccaccccaaaggcgcggaaacacaaggccaagaccccacaccacgagaa

SEQ ID NO: 7598 - DNA, 97 bp, Glycine max
tttaaggcgagaagatctttgttgaaccaccacgggagcattcttaattaggttaaaaggactgatttgtgagtactaatagaattgggggagtatg

SEQ ID NO: 7599 - DNA, 226 bp, Glycine max
gcggtcgggcgaaggtgcaaaacgattctccatatccaccaatcacgtataacccaccatcccctgttgcccacctccaactgagctcacgtactcctacgtagcccttatcctcggtcctctcaacgccgggtccccatcaatcctcccaagcttccacaacatccaggtaattccacatccaatcatcatggactaacaaaaccaagcaaaacagggcaaaggc

SEQ ID NO: 7600 - DNA, 287 bp, Glycine max
tttggcaactattatataatgatgccaaatatgaataaatattactaatatgttttccatgacatttaatcaaatgttgtgtataaccatttcaaaaaacactaattttccatttcacttttttcatgttctattccattgtgttacttctcttgtgtcccactcttattgttgggtttgtcctcttgttcatcttttctattcaataaggtaaaactgtttaccctcttattgcttcttaatttgggtttctcttggttgaattcttaatttccaagtttttaatt

SEQ ID NO: 7601 - DNA, 272 bp, Glycine max
agcttctttattgctgaaccattttatcaataaacacaagttgagttttattcagaaaattagagtttatctcttttatcttagtgagagtgattctcctaaattcttgagtgattcaagaacaccttggctgtatcaaaggactttcacaacctttgtgtgttgccctcgctggaaagagtgattctttccttcctttcatcatcacccttgttctttcaaaccacaattccagaaaatccacctctgcccagaattatctcgtggccata

SEQ ID NO: 7602 - DNA, 283 bp, Glycine max
ttgatttcctttgtttctgtgactcttcttttctcatgtgcacccaaacccaatctccgggttcgaagacaaccttctttctccctttgttggcttgtttagcataacttttatttttcctctcaatttgatctttgactccctcatgaagcttcttcacatagtccgcctttgcttgaccttctttatgcttaaaaacagaaacattatgcataggcaaaagattaagtggagttagtgggttaaaaccacaaacaacttcaaaaggagaacaattagtggt

SEQ ID NO: 7603 - DNA, 273 bp, Glycine max
aacccatatcatttttttgacctccattcatgaggggacgggacacaattaggtaaataaaaaatatacctcgtctcatatatatgtggtttaagataatacacacatcttaaaaaaatcgattatattaattatcaaaatttcaagataaaataagcttatttggctcaaatattcttattctataaatgtattgcagtactctttctttttacctgtcgtttaagtttttattaccgaaataaaaaaatgtaataaactttattgctccta

SEQ ID NO: 7604 - DNA, 255 bp, Glycine max
aagggctgtgacactcatagactctagtggaatatgtgcttgcgtaaagaatgaacttaagcataatgcttgatcgcatgattaattaagagtgactgaatgaaatcttgaggttgcttacccttacgctgctatttacaactgaccttatggttgggagcctaccattcataatatacatagcttttaaaatagcttgtgaccgcttgtaaaaattcattggccttattgggagatccatctttggagaaatac

SEQ ID NO: 7605 - DNA, 272 bp, Glycine max
tcttttttttgtttggagctctgaaattctctgcattctaagttggaaccttcaacctttgacattattttctccttcttcttcactatcagagaatgtaacttctttgtgtgggtgcttttggtttggacgtacgtacataggtgcaaggttatagttgagtttttttttataattatttttaaaactttttaagaggactgatggtttattaagagagtggatgagagaggttaattaataatggggaagttataacttcctcatttatc

SEQ ID NO: 7606 - DNA, 291 bp, Glycine max
taagggcaccattattattttaactatgatttattgatctttaagtccttgaagtattttgagttttgaatcaccagttgcttacaaacacttgaacggatggtatctccattcaagggcaacatggtgtcctttaaattttatggagcgcaaaatgaaacactctcgcttaatatatatgaccatttggtaaaacagtatcaaagaatatatggtccattcgtgaaacaatatatacatggcatcaactatattcatgtatagtttcttttacctctcttttattttatt

SEQ ID NO: 7607 - DNA, 271 bp, Glycine max
agcttcttctctttctttggcttgacacatttttgttctccttcgagataagttattctctttatcattttcgatttgtttgtgcattgttttatttgaatcattgttttggttgttggttgtttgaatcatttcccagttggttgtcgcacaatgtgaaaatgacattttttttaacaaatgtcatacggattggcaatccttataaatcatacggatcagtaatccttatgggtcatacgaattatccgtatgacattttttttaattc

SEQ ID NO: 7608 - DNA, 288 bp, Glycine max
  unsure (1)..(288): unsure at all n locations
tatgatttatnggttttgtttttaatgaactgtaattacttgtgtagttgtggcttgcaccccctccttttttaaaattgaccaaatttgtaaataaaattttatatttttatattttattttatttatatttatataattgaatccactcattttatttttttataatttacactcactgccttagggtcttgaatccaccacttagttgaatgcacatttttttgttaagttaagaaaagactcgttatcatttatttgttatgttgttcatcaagtgtaattatt

SEQ ID NO: 7609 - DNA, 277 bp, Glycine max
  unsure (1)..(277): unsure at all n locations
agcttagngtgntaacgcgtagatacagattatgtgccctttatcattcaggaacaaacaggctgagtgggtaaacgcgtagatacagattccgcgccccttatcattcaggaacaacaacctgagtgggtaaacgcatagatacagattttgcaccctttatcattcaggaacaaacaggctaagtgggtaaacgcgtagaaatagattctgcgccctttatcattcaaatttcacaagttgggtgataaacgcgcagagacaaattctgcgccct

SEQ ID NO: 7610 - DNA, 287 bp, Glycine max
tatgctgcaaacatttattatagacctccacagcagcaaaaccaacaacaacagaataattatgacctttcaagcaatagatacaatccaggttggaggaatcatccaaatctgagatggacaagttgatgtgatcctgactaggagtggatcgcttgatacaggctacgaagattttggatgatgccacttccaatgaaggaagataagtcagggtagacgccacaaggattaccttgataagtctgagattggttcaacaaggaacccagagagaagctctcacc

SEQ ID NO: 7611 - DNA, 277 bp, Glycine max
agcttcttttttctggtccataaggtaatctattataggcaaagggtacttgttcttaatcgtcaccttattcaactggcggtagtctacacacaacctcatggtcctatctttcttctttactaacaacactggtgctcccattggagatacactgggtctcacaaactgcttctccaaaaactcctctaactttttcttaagctcggctaactctataggagacatcctataaggggctatggatataggtccagcaccaggtaccaggtctatg

SEQ ID NO: 7612 - DNA, 291 bp, Glycine max
tgaatggtatggggttctccttagtaacctcaagatgtagttacacttaatcaagagattggttttctaagagagactttgtccaaatttgttggaagcactaaaaaacttgacaagtggttaagatatagtaaatgcccaactgataaatttggacatgtatattaaggaaaaaattatgttcataataatggaaccataatatgttacttctgtggaaagattggatatatgacatccaagtgtagacatctaccaaaaaccgaatcatccagtgctttcagaactaac

SEQ ID NO: 7613 - DNA, 274 bp, Glycine max
agcttgctatttctggaagctcctaatatctcccacactttttggggtgggccattcttggatggccttgattttctcagggtccacttggaccccatttctaccaactacaaaacctaagaaaactatattatctacacaaaaggtacacttctctatatttgcatagagggtgtttttcctaaggactgaaagaacttgtctgagatgtcctaagtgaaaatctaggctcctactatacactaaaatatcatcaaaataaacaactacaaat

SEQ ID NO: 7614 - DNA, 207 bp, Glycine max
gggaccaggcttattaaagaaaaggaagaatcacccatagaccctagaggcatatggagttacagaatcgccggagcgtaagcaagcaccgatacagacggaaacaacaggggagggcaacatggaagctaaggagaggttatggagcagcgcaaagaaacacaaggacccaaaaggtgggagcctctagtaaaacagtcaacaaag

SEQ ID NO: 7615 - DNA, 275 bp, Glycine max
  unsure (1)..(275): unsure at all n locations
agcttangtantctctcaacaattaaaatatcttcggagggtgtgtctgaaatttcatcttaagcaaatcaatcagtgagattttttttttctcctttcttttctgcccgagactggagcacaacataacttgtaatgaaagaaggcgagaagctgaattttctggaagctcaattgacattcaaagccaaaagttcagaactccgtagacgtcaaacaaataaaaattgaagtcacgaatcatgtgttggaacagaaccccaaaaggacgtttt

SEQ ID NO: 7616 - DNA, 287 bp, Glycine max
tcttatttcccttatgacataagctctgttttttgtgagcaaaacttgaatcagtgtacttttttaggtgagaacgggtagtaagatatactctgttttttaactcccaatgatgaatgtctcggagtactaagagatggaaactgaactcactatactctaattgaaaagaaaaccggtttatatacacagaaaaaagttgcacataaaactaaagagaatctaatgcactaactaactatagttacaatggaagtgacaaaataactaaagttaactctgctgac

SEQ ID NO: 7617 - DNA, 249 bp, Glycine max
agctttttagttaagaaagctaagaagacctacattacatgggatgacaatgatatggactcatctgaagattcagaaaaatgaagttgtaaacctgagtctgatggccaagaattatgaaagtgatgaagaggttttcttgaagaagaattggtatatagatagaggatgctctaaacacatgacgggagatgcatcaaaattcactcatatctctcccaagaaaagtggacatgtgacttatgaaga

SEQ ID NO: 7618 - DNA, 285 bp, Glycine max
gaggcgacacaaaagactactccagctgcagaaagggttattaacaaaaagaaggggagaccacaagaagcggaacgggcgagggacggagacagacgaaaaagagaccaaatttgtaaataaaaaagtcaagggtacaaatgtattctccccataagcgtagggtgcaccacccaaaatgcagggtgcaccaagcaacactcacggccttaggaccttgaatcaacaccttaaatggaaagcgcatttgctaggaacccagaaaaagacgagaaaaagagcccc

SEQ ID NO: 7619 - DNA, 277 bp, Glycine max
  unsure (1)..(277): unsure at all n locations
agctttaattaaaacaccgcaaggaaagccgacaggtgctngacagagacaagcaaccaatacacgcgnatcccggcgcgaccgcggcgaaaaaccgcatgagatagggataggatgtaataccgttaaggatgaaccaatataaaaattcttgtatggagtatctctctgttatgcttctcatatattttggtgttacttatgttcttagtctctaaccttttttgaattttcacttttagcccttgaaaaaaatgaccaatcttagtcttggatc

SEQ ID NO: 7620 - DNA, 255 bp, Glycine max
acaacagaccaggggaaacatggaaaccacagagaaaaacacgggggaaaacgagcgcacgacgagccagccaaagaagccgcacgcacccgaccaagcacgaggcaaggagacacaaaggcgggccccaccaacgcgaggcccaagcagccgcccaccgaggagcgagagcaaacgacgaaggaaagccacacacgggagcgaacgggagaccaaaccagaagcgacgaatggggcagacacaagaccacccag

SEQ ID NO: 7621 - DNA, 275 bp, Glycine max
agcttgactttgtgagtggattttagccttagtttcactttagttattagtcaattcaattaagaaagagaaatcccaaagagaaacgtccgattgcttttttttttggtttattttactaaaagatactttttgattattttacctttttttggtttccaacgtggttacggcatgaccgaacggtcggatttcattttaacaaaaattaacggatattacaaatcaaatgatcggtggaaatttattttattttttgattaggcgagaaaatg

SEQ ID NO: 7622 - DNA, 287 bp, Glycine max
ttaaacagcttgtttttatcgattacgacaactctgtaatcgattaaaacaaagagtttttgcctctgaagaaattttcctaacttagaaaattttcttcactcacactatgatgatgcacaatgcaaaacatatatcaaatgtactaagatgcaacaatcaagttaacaaccaatacaaatgctactcaaaggaattgggcatgtaaaatccaaaacttcttctaaaacttcttcaaacttttccttgagcttcaagctttagccttaggttgttccatgttgttg

SEQ ID NO: 7623 - DNA, 159 bp, Glycine max
agcttttttgtattagaaacatgggaccaactcattttatttcaaaaaggaagtcgtatctagtcaaggtctgagagaccatacaagtttcctaacgatttctaattatgtgggccattaagtctatcatatgctgacaatagccgagaagcccatgaa

SEQ ID NO: 7624 - DNA, 306 bp, Glycine max
cgagtgaaggacaatcaaactcgagcagggggaattataatcgaagaaccctcgggcaaacatggaagaaccccaaaaagatggccgccacatatctccaagggcgtcaggaaaccgggagaactgacccagacgtgggattgcccaaaaccacacttaacgaaggcgaaacaatcggaacactggaactgcaaggacaaaccctgatgtacctaatcaagcgagacaccctctacctaaagatacatggaactataacctggtaagcacgaagcacacggggcgaaaggctacccgtgaaaagag

SEQ ID NO: 7625 - DNA, 143 bp, Glycine max
  unsure (1)..(143): unsure at all n locations
accccaaaaccaccngcaggcangcaagcaattatttagccacaaacacgggaccaacccannccaaaacaaaaaggaagccgcaaaccagccaagggccgagagaccacacaaagcccccaacgaacgccaaccaggggggc

SEQ ID NO: 7626 - DNA, 292 bp, Glycine max
tgagatgaggaagtgtatatgggtgaaacttcctgcttttattcgttgaccacagagtggtacctggagatatgtcgcgggggtcaggagaccttggggacgtcaggtggggtgctattgcccaaaaccaagcttgaccaatcccgacccaacccgggcatagtcagtcagtgagaacctgtgatgtacctaagcaggcgagctcctggcagtcaacagataaaaggaacaaagaccacaaagtaaggaggcttgtgtggtggctggctagctgtgaatattgtgtgatata

SEQ ID NO: 7627 - DNA, 273 bp, Glycine max
agcttgatcttattccggtgagagtgtgaccttaaactgtgagtgaatgactagctgtgagtgataatctttgcatgaatctttgaattttagaatgagatgtatatatgaggacatgatgaaggccatgattgtacatacacaagctcttttgaccaaaaaatttaccttgaatgattattgcatcctttgctccctttttgagctgaatgatatagtcaaaaaaaaaatttgaaccctgaacttaaataattacctcttgataccttgttt

SEQ ID NO: 7628 - DNA, 290 bp, Glycine max
tgtaagtgtaatatttgttctatttcttgatttttatttttatgtcaggggctttgaatgatttagattgtcgtttgattgcagctgtagatattttaccattttttatatagaaaatattcaacatacatttgtgaggaaaaagatatgcactctagtcacaccagaaaactaattttacttttaattttctacagtatatatactaattaacatttttaatttattaatctctatatttactttctcttctatcgtactttaatcttatttttttcttctatattttt

SEQ ID NO: 7629 - DNA, 277 bp, Glycine max
agctttgattgttgatagaagttactgaaagtgaaggtgtggtggagcaagtgattccagtccagttacagtggtggtttgaggaagtgttggaccagctagacaaggccctcttagaatcttcaatggaggccttgaaggagagaagaatattaccttctgaagaagatgaactaagattaatgaagattgaaaggtacacagagagaaggaataggtatgtacagaatgtggtagtagccattagcttggtgtgtctgcaaaagaacttgctatg

SEQ ID NO: 7630 - DNA, 290 bp, Glycine max
ttaagtttttccatttcttagcaacttctcttttgtaaaagatagtacattttggtatttaactttccttataaaactttcaatttaattcagttcagtttgatatttgatttatatattttatacattctgttgtgttgagtccaggacactatacatatacgacactattggagaaatggaggatactgttggaaaacactatttctcttataatcatcatcaaaggaaaaatcagttcaggatcagtaatagtacttgatgcaataaaactaaatatatttttagtt

SEQ ID NO: 7631 - DNA, 276 bp, Glycine max
agcttatttttatactaagattatgaacgatgaaatccaatcctatgttttcttaaattaattcaagtcgttattattttcataatttacgtatgtccgacgcactaaatttcgttatttttgtatttcccgtatttctgttatttctgtcatttccattatttttgtaaatccgatatttctacttttcttttactttaaagttgtctttagttaatcaaaccaaaaccaatgacatttgattaaatttgtacataactattaaactgataacct

SEQ ID NO: 7632 - DNA, 288 bp, Glycine max
tatattctgattttatcttgcatccatataactggaacttgttttttatttaaggctgcatttagcatccaatgtgctaaaagaaacacgcatccaaaacatttgtgaaaaccagtaccaaagtactgagggttttacatgtccaaataggagctaactaacttacacaattgttttatattagttagttcacttccaaatatgagctactacacttgtccttttatgaggttgatacatgttctaaaaactcatatattttagataattgcttctcacaccttgttg

SEQ ID NO: 7633 - DNA, 289 bp, Glycine max
tgagatgaggaagtttttttggtgaaactttctgcttttatttgttgaccacagagtggtacctggagatatgtcgcgggggtcaggagaccttggggacgtcaagtggggtgctattgcccaaaaccaagcttgaccaatcccgacccaacccgggcatagtcagtcagtgagaacctgtgatgtacctaagcaggcgagctcctggcagtcaacagataaaaggaacaaataccacaaaacaaggaggtttgagtggtggctggtcagctgtgaattttgattgata

SEQ ID NO: 7634 - DNA, 275 bp, Glycine max
agcttactttttatccaaacagtgacaatggcactgagatctaaaacaatggtgcagagacttgaagctctcctcgtacctcgatcaggtcaccaccaaatgtacctagggttaaccgaaacaacatagacctagattgtctaagctattttataatgggcagctatagttacaatgatgatgaaatgaactatagaaaaaaaaagtataaaatacagaagaataaaaaaagaattaagggcagaactcaaaagcttttagccatgctggttgga

SEQ ID NO: 7635 - DNA, 289 bp, Glycine max
tgttgctaacactgtttttggtaattctgaaatttatcataaaaacacgttattgtaaattaatatatattggctgtggaaaatgagaaatactccaagatcatacccaccattcggtagtaattggatttttttgagtttgtgacacataatgtatggcaacagtgtataaacaatgagtcggaggaaattcatttggattttgctttccctacttattcatctcactaaatattctgaatctaatttggagcaaagtggtgcgttgtgggccctttctggagcggtt

SEQ ID NO: 7636 - DNA, 274 bp, Glycine max
agctttttcttagtggtcttcggcattacatttaaactcgattcattgtcgataagtacctttgtgacaacgtggtccatacatctcaccgacacatgtagagccttgttgtgtcctctcccctcaacgggaatctcttcttccgcaaacgcgatataattgttggtggttatatgattaacgatgcctttgaaaccctccactgagatatcatgtgctacatgggcatcattaaggacctttatcaacagcgcacgatgaggctcggagttta

SEQ ID NO: 7637 - DNA, 289 bp, Glycine max
tgtagaatggctatttatgatacatgtcagggcttggtttggttcaagggtaaaagggatgccccacattatttccatgacacaaatgcaaaaatgatgatttggaaactttatgcaaaactggtcatgcatgcatctatgcggacactcaaatgtcaaatttttatggtcatgtgatgctagggctcgggattcatttcctctattttaatcaacccaatgtttccaaaatatgttcttttatcaatttgtacattcatccgagtccattttgggcgtttgggaaaat

SEQ ID NO: 7638 - DNA, 275 bp, Glycine max
agctttagtattcccaataatattaatgaagctcataattttcttggttaagagtaaagaagccaaactaaccgtttcacgcagggcagatgggtttgaagaacttaaggcagtttgaaagtgttcattgggcacagccatggaattcaacacctcagcatcaattgtttcatcctctaagtcaatcacattcattttctcccggatacactgtagtgcagcctctgtgcaaagagcagcaagatctgatccaacataaccatgagtatctctgc

SEQ ID NO: 7639 - DNA, 275 bp, Glycine max
agcttttttattcattctatgcacccgtagtggtccacattgtgtttcgtgcatttttattctcattttgtttactttttataccccctgttgacgtgcttaagccgttttacttaagtcatttctcgcttaacttaaaaataaaataaatttccaccgaacgtttgaattatattatccgttaacttcggttaaaataaattccgaccgttcggtcgtgccgtaaccacgttggaaatcaaaaagaggtaaaaaataatataataatcaaaaag

SEQ ID NO: 7640 - DNA, 287 bp, Glycine max
tcttatccaaggctttttttggtggtgaagctccttcttccttggcttattccctagtggatggtgcctcccctatcctcttctcctttgccttccgctgcatctccatgatgaaaaatcaccattgaaggacctcattgaagatcaaagatccagcctccatagaagctccacaagcaagcttccatcaagttatgaccatttgaatttctcgagatcttccgtggttcaatttcgggcgtctccatatgtcatgtgcctgaatcggacctccgtaagaaaattta

SEQ ID NO: 7641 - DNA, 277 bp, Glycine max
agcttgttgtattatggggtatccatcacatgtggtactaggtggcggtcgggcgatggtgcacaacaagttttccacatccacaaatcacgtataaacccaccatcccctattgcccacctccaactgagctcacgtactcccacgtagcccatatcctcgtttctctcaacaccgggtccccatcatccaggtaaatcaacattcaaacaacacaaactatcacagccaagaaaacagggcaaaggcagaaaactctgcccaaaacaccaaccaa

SEQ ID NO: 7642 - DNA, 289 bp, Glycine max
taacatcgatttttttattaactgatgttaagaaaagtgcggtggcattttcataaataagttgacttaattaacatcggttttttcaaaacccgatgttaacatcgacctcttaatattggttttgaaaaattgatgttaccatcaagtacccaacatcggttattgaaacaccgatgttaactttagaaagttaacatcggtttttaaaaaaaccgatgttaacattgacatgttaacattggttttgtttaagaaaccgattttgtctcattcataagttaaaacc

SEQ ID NO: 7643 - DNA, 235 bp, Glycine max
agctttgttaggatgcttcaatggaggaaaagaatgagggagagaaagagagaggggggagcacgaaattgaaggaagaaaaagggagagaagttgaacattgagttatgtctcacaagactctcattcatcaaagttacaacaagtgttacacatgcttctattcatagactaggtagctttcttgagaaacttttttgagaaaacttccttgagaagcttttttgagaaaact

SEQ ID NO: 7644 - DNA, 203 bp, Glycine max
ttgcgccgttcttgttttcacctacgtccagcacaatcaccaaattcattggcgcattacaacggtggcgctttgctacaaaaaggaggtggtggcggtctgactccacgatttgatggctaacgaacagagggagctattttaaaaaaaaaaaattaacctaaatccaaacgtcttatttactttttaaaatttaaaaaaaa

SEQ ID NO: 7645 - DNA, 273 bp, Glycine max
agcttgttttagcgtttatgcgagacggagaccaacacgctagctatcatcgccaagtaccaagaagagttaggtctagccacggcccacgagcataggatcgcggacgagtatgcccaagtatacacggaaaaagaggctagaggaagggtgatcgactctttacaccaagaggcaaccatgtggatggatcggtttgctcttaccttgaacgggagtcaggaacttccccgattgttagccaaggccaaggcgatggcagacacctactcc

SEQ ID NO: 7646 - DNA, 285 bp, Glycine max
  unsure (1)..(285): unsure at all n locations
ttagctntgtccccttgcttcatgnagactcgtccaaaatcgtgaagtaaacctcggatccctgtcggatacaatactggaaggaattccatgcaaccttactacttccttgatgtacaactccactagcttctccattctatacttcatattcaccgaaataaaatgagcagatttggtgagtcgatctattatgacccacacaacatcatgtccacgactagtcttgggtaaactagatacaaaatccatagatatgctctcccatttccattccggaatttc

SEQ ID NO: 7647 - DNA, 200 bp, Glycine max
acactacaacaaactcaagcacgaacaaaaaaccggtgattattgtgaccatactctgggagtgaacaaccaactgcgagaaatgatccatgcaggaacctctgaactttagaatgagaagcatagctcacaacaggacgaaggtcataaatcgtaaatgcaagaagctctctgaccactgaacctaccctgaaagaaac

SEQ ID NO: 7648 - DNA, 139 bp, Glycine max
agcttcatttttggtcctcctcatagttgtggcatgagaaaacatgctctattttcatctcccactccaagtaggcctccggatcattctttcctttaaatggaggaatgttgagtttaataccatcaattcggttttg

SEQ ID NO: 7649 - DNA, 181 bp, Glycine max
  unsure (1)..(181): unsure at all n locations
ggaaccaagaaaccagcagacagcagagncatattgacccccaaccaagaggaaagaaacgaaggccaaaaccagggaacaaaacaaaccgaatggcagaggggaactgaaatcgcggcaaccaaaagtcacccccaacagccaacaaggcaagccaccataggaccgcccaaaagggcga

SEQ ID NO: 7650 - DNA, 253 bp, Glycine max
  unsure (1)..(253): unsure at all n locations
aactatnnatggtattattattattattcattgaagttaaactatttctgaaacacaagttggggaacaatcagagagttgaaagtagcatgtgcatccgtggagcatggctaagcctataaatgtggttgggagacataacagttcacttccaactattttgctattgagaagtccaatattcggaagacagagatatacatgtatagattccaaagacaattaatagataaattaaattatattcacatct

SEQ ID NO: 7651 - DNA, 288 bp, Glycine max
  unsure (1)..(288): unsure at all n locations
tcatgtatatanaggtttttttttcacattaacaagtgatttgattaaaaaaaaaaatccccgtagagagacaactcttatctcataaattaggttttagttagatgcaaatccaaattataagaattaaatttcagaattattaattttgtgtgcattttaacttttatttcttatataaattatattatttttcttatcaaaattatttatattttattattactagttcagtctaaataaattgtatagataatatgtaaaaaagggtagacagataataatatt

SEQ ID NO: 7652 - DNA, 275 bp, Glycine max
agcttctattatttctgaaccattttatcaataaacacaagttgagttttattcagaaaattagagtttatctcttttatcttagtgagagtgattctcctaaattcttgagtgattcaagaacaccctggctgtatcaaaggactttcacaacctttgtgtgttgccctcgctggaaagagtgattctttccttcctatcatctccacccttgttctttcaaaccacaattccagaaaatccacctctgcccaaaattatctcgtgaccataac

SEQ ID NO: 7653 - DNA, 207 bp, Glycine max
acaacagcaggccccagagactcagcagaaggaagcacagggcaaaggcgagcacgagaaaagacaggaagaccaagcgaaagggccacaagcaaacaagaaagaaagcgagaccagacaagccaacaaaaaaaggaaggaagcggcaacggaaccggcggaggagcccggacagaagagggcaaaggaaaaccacgaaggagggaa

SEQ ID NO: 7654 - DNA, 250 bp, Glycine max
cacctggaaacaaggggaacaagcaaagccctaggcaaaggcaaaagaggggcgacgagtccaggacgaggaagaacccccaaagatccaactaagacaagtgggcgcacaccccaaaaagagacgaagaggggtccccgcatcagccggtggacgacaaagaaatctcaggggcaagcccaagcatggatcaaatcgacagactcaaggcaaagacgagctcagaacccgaaaagaaggaacctgggaa

SEQ ID NO: 7655 - DNA, 198 bp, Glycine max
agctttatgtattaattaatacgcggattgctgctattaatttacattattaacttattgtaatttaatttattttggtgtgaaatggcactatgacataaccctggaactcatccccatttctctcaaattctcatctctctttcttttctttttttgcaaattctcctcttgtggttgaatttgaactctgttttt

SEQ ID NO: 7656 - DNA, 167 bp, Glycine max
tttaactgaatttgatatattccaattaatttttaaatggtgtaatcgattacaatatattggtaatcgataaccagtgtatctgaacgttgaaattcaaaatcaattgtgaagagtcacattctttcataaaatgctttgtgtaatcgattacatggttttggtaa

SEQ ID NO: 7657 - DNA, 147 bp, Glycine max
  unsure (1)..(147): unsure at all n locations
agcnttttccttttattncaacccttagaacttcccggccaaaattgtcatagataaagcaatgttgatgttcaaaggacactttaaatccctttttaatcaactgacctacgcttaacaagttttggtcaatgttaggtaccataa

SEQ ID NO: 7658 - DNA, 271 bp, Glycine max
agctagtgcttttccctacgagccctcttggtctcttgttccaaggccttggtggtagctacatttacatccctcagttcggcattctcctttcggatcctaagagccactgatttgaacctttctttgactgtttgagcttgctcgagttctgtcctaagagcctacacctctttctcttcctccgctgcctcaacttcctcccttttagcggttctcaaacttgggagccaatccaaaccttgcacgtgggctttcaaccactcacggt

SEQ ID NO: 7659 - DNA, 288 bp, Glycine max
tgtcaaaaaggttagtaatttttaaaactcttttcaaagtaaaaacgctgtttctacttcaaaaccctttgaactacttcacatagacttatttggtgcctctagaactatgagtttgggtgggaattactatggcttatttatagtagatgattactcaagattcacatggactttgtttttgaaaaccaaagatgaagcttttgatggtttttgcaaacttgccaaggtcatttaaaatgaaaaaaggtcttaacattgtttcacttagaagttatcatggaggtg

SEQ ID NO: 7660 - DNA, 307 bp, Glycine max
  unsure (1)..(307): unsure at all n locations
acaccanagaanacncaagccaaacagcagaaancatttatgacccacaaacctagaaggaaaaaaacgcaaggccacaaaccaagggaagggaaaaaaacggaaaggcagagggcaacagaaaaagcggcaaccaaaagacacccccaagagacaaccacagccaacaaggggtggcccaaaaggcagaagccgaggctgccaagggggccaccaagacgacaagaaccaaaccgacgagagccacaagagccgacaaacccaaaagagaaaagagggcagccaacacgacaaggagggggccacc

SEQ ID NO: 7661 - DNA, 274 bp, Glycine max
agctttctgttgggcttctatggaggctggatctttgatcttcaatggggtcctttaatggtgattttccaccatggagatgcagcggaagacaaaggaaaggaggtgagaggaggcgccatccattaaggaataagccatggaagaaggagcttcaccaccaagataatccttggataagaagcttggagaggatgcttcaatggaggaaaggaaagagggagagaaagagggaggggggagcacaaaattgaaggaagaaaaagggagaaaa

SEQ ID NO: 7662 - DNA, 284 bp, Glycine max
taactcatccattcatggttagttcaacatgctttcaacaaatttcttcacaaataactatcatgaagcagaaacttagcaaaactacccatcatatctcccaaaaccccatacccacgaaaatcaagagagaaagaagtccacccaaacctgaaatttcgaagtcccacacgtagagacgcgcttcacgactccgaaaatgccctcctttcgcgatttggagcagaaatgggcaccaaaggttgaagctttgttgggcaacaatggtggatgagagaaaagaa

SEQ ID NO: 7663 - DNA, 166 bp, Glycine max
  unsure (1)..(166): unsure at all n locations
agcttgattgtgcataccccaccattttttcatagtaaaacactggtaatgtgtctactattattgtgataatctctttctctatcattggaagtgccacttgagctgccaggtctctccacctttggacctattctttgaaaaatnctgcccctttttgcacact

SEQ ID NO: 7664 - DNA, 185 bp, Glycine max
ctattagtgacacttataaactcagctgccaataactctatttgagagaaaatgattattaaacacacaaaatggaagtactaagtatttattatctatacttaacagaaaatacttataacactacaaaataaccataaattggaagaatttgaaaccatttacaccagcctttatacacaaag

SEQ ID NO: 7665 - DNA, 272 bp, Glycine max
agttttttttttgacttgttgccgtagttttaaaaatcagaccagactggggtggttggacctattcgactaataatcaatgcctaatctgatccgagtagataattggatcaaacttgtcttcaaactggtgtgatccagttaattagtttttcggatgaaccagtaaatcaatgggtataacaatccaaccagttcaagtaaatttatcttttttttaattaattggtaaatgttgtgctacttttcaaggtgagagttgttattgcttt

SEQ ID NO: 7666 - DNA, 286 bp, Glycine max
tgaacgaaaactgtttcttaaaatacccaattaaaaagtgtaatgaaggaagaaagagaaagataaggggaaaaaatggaaaaagagaggagaagattgagaaagagaaagagaaagatgaaagagtgggacgacctcgttggaacgtgattggcgaagaagagaagtggtggctctggcggtgcagcgagcaagaggtgaaacagtgccgtttggggtgggattagtagagaaatgaggaagtgtgtagagaggggttctagaagggtcgaggagatggatacgg

SEQ ID NO: 7667 - DNA, 110 bp, Glycine max
  unsure (1)..(110): unsure at all n locations
cagcaagcnggactttttggtcagggaaccacnccgaccaaagagaacccaaacccaaccacccggnacaagcacgactactcccccgcacacggagggcggccacgcaa

SEQ ID NO: 7668 - DNA, 130 bp, Glycine max
tggacttcctgtgttttttttacctatccttcctcaggggtacccaaacccaatcacctggtttaagcaccactttctttctgcttttgtaggcttgccttgcatagctcgcatttttcttttcaattag

SEQ ID NO: 7669 - DNA, 140 bp, Glycine max
  unsure (1)..(140): unsure at all n locations
cagcnncatcctttttatccctcnccgcggacgaggctcaatttagacagccctcctaggtttagactaacttaaactaagcttcatcctcagatccctcttgttggactagacttagtttaaatagcttacgaaatttt

SEQ ID NO: 7670 - DNA, 147 bp, Glycine max
tgaaggaacaaggggtattcatcacatgtgggactagggggcggccgggcgatggcgcacaacaaggcttccacatccacaatgcgcgcataaacccaccaacccctgtggcccacccccaactgagcccacgtacccccacgtagc

SEQ ID NO: 7671 - DNA, 276 bp, Glycine max
  unsure (1)..(276): unsure at all n locations
agctngtccgtggatctgacccattaactaccctaactcctttagactggtggtccctaagctcttgaccttgacttgatagaacctctttttaagtgaaggcatttgacttgatccacgttttactaaagtgaacaaaaattggtgcgaatcaaaactctgacatctatcatgggtggaatggatgaatgcatgaagaaatgcatatgacacagatgcaatttatgaatacgggagcccgggaaattgtctccttcttagatacaacgtcttaaa

SEQ ID NO: 7672 - DNA, 290 bp, Glycine max
ttctactttgattgttgttttttgtagtacacataatgctaatgattgaaagcgttatagaaaaaattctgccaaggtctcttattttgggtggtcaactatttcacatgcgttgatgtgctcatatactgaatttaattatcaaagatggtttgtccataatctcttatgccattgaaaaagttagagaaagtgttagttattggacaacaacacccaaaagaaaggagaaatttatagagacatgtggtcaaatgaatattccaattgggggaaagttgattcttgat

SEQ ID NO: 7673 - DNA, 276 bp, Glycine max
agcttgtagtgcatcgatcgggtgtaagtgtagggaggcacatagaactgcacctgctagtcaggggagcatccgttgctacccatcacgtggcggaggtgcttgccggcgtggagggcctgagccaccatgccttgcattgttgattgaatgttatggttgggtgtggtggtgcacgtcaccgtgtcctggtgtccctgcaacttcatgtgttgcattaatattcttctctttggaagcacaccaaccatatgttctcttttctttgcattcatt

SEQ ID NO: 7674 - DNA, 290 bp, Glycine max
ttagccttaggttgtaatcttgttgcttatgttgctccccctatctctaacaatctccccctttttggttttgatgatgccaaacatgaatacaactttgagtgcatttggagagtctggagattggattggagacttgatccttagtattatcttgaaaaattcttaacacttaagaagagattaattcatcatcatcgtctatgtcaatatataacaatctttatacaatatagtgttcaacatgctatgcaatgcattcaatatgcaatatgcaatagcggtagtgg

SEQ ID NO: 7675 - DNA, 265 bp, Glycine max
aactcccttgagaagcttctttgagaaaacttccttgagaagctagagcttagctacacacacccctctaataactaagctcacctccttgaggagcttccttgaaaagattcctaaagaagctagagcttagctacacacacctctctaatagctaagcacacccccatgacaaaatacatgaaaatacaaaaaaagtgcctactacaaagactactcaaaatgcctcgaaatacaaggctaaaaccctatactactagaatgg

SEQ ID NO: 7676 - DNA, 292 bp, Glycine max
  unsure (1)..(292): unsure at all n locations
ttgaaggtgngtagttcttcttcttttcatagtagagtatcgataatgtgtctaccatcacgatcatcgtctccctttccatcattgggggtaccacctgggccaccagatccctccaccttttgggcgtgttctttgaaagatccgtccccctttttgcaaatgttctgtaattgcatcctatccggaaccatatcaaaattgtactgatactgcctaacaaaggcaaccattaggtccttccaagaatggactcgggaagattccaagttagtgtaccaggtaacacctc

SEQ ID NO: 7677 - DNA, 136 bp, Glycine max
  unsure (1)..(136): unsure at all n locations
agcttggatttccttttagnagggaatctatccttcctaagatggagccaaacccagtcaccctcattaagaactagctcttttcttcctctattgcctttagttgaatacacctttgtttggttttctatttggt

SEQ ID NO: 7678 - DNA, 194 bp, Glycine max
ggagactatttacgaccgtctctatatactaacggttttagtcatacctcctaattcaaaggtatggctgatgcactttgccttgtgctacgctgttcaattttcatcatcttgctatgttatgcccctcagtcgtgcctttgggataaaaggtttgatttaagtatttaacctatagcttccttgttaaattt

SEQ ID NO: 7679 - DNA, 269 bp, Glycine max
  unsure (1)..(269): unsure at all n locations
agcttcnatanttgctgaaccatnttatcgataaacagaagttgagttttattcacaaaattagaggttatctcttttatcttagggagagtgattctcctaaattcttgagtgattcaagaacaccctggctgtatcagaggactttcacaacctttgtgtgttgccctcgctggaaagagtgattctttccttcctatcatctccacccttgttctttcaaaccacaattccagaaaatccacctctgcccaaaattatctcgtgac

SEQ ID NO: 7680 - DNA, 279 bp, Glycine max
  unsure (1)..(279): unsure at all n locations
tacaggaattgctccttctgagttcgncgctggacaaatccatcgacttcagatcttggttgaagtttggtatctggcctgagaaccagttgtattcgaggtggagttctttcaaaagtttgagttgtgttagggattgtgggatttcaccacagaattgttgcctgagagccacgtttcttgaggtgagtttagggggcagaacaatccgtggggattgtgtccgcataaacgttttgggtgtagacaaggcatctttggaaccagtttgttgaattt

SEQ ID NO: 7681 - DNA, 276 bp, Glycine max
  unsure (1)..(276): unsure at all n locations
agctttgtcncttgagttatgnnnnggcaaattacaactttggtatgttgcattatttatagataatagatgttatgtagataaactaggttgctatgcactatttatagatgtgttattgtagataaattacattactatgaattatttgtgttatcataaacaaattacgttgctatgcattattaataaatgagttattatagacaaattatgttgctagcaattgttcaattaaaacatttgacacttttcccttcattgaagtaatattat

SEQ ID NO: 7682 - DNA, 287 bp, Glycine max
tccttgaaaagtttttttgagaagctagaacttagctacacacacccttctaataactaagttcacttccttgagaagcttccttgagaaatttcttttagaagattattagaaaagctagagcttagctgcacatacccttctaatagctaagctcatctccttgagatgagaagctagagcttaactacacataacccctatagtagctaaactcacccacatgccaaaacacacgaaaatacaaaaaaagaccctactacaaagactactcaaaatgccctgaa

SEQ ID NO: 7683 - DNA, 274 bp, Glycine max
agcttgataattgaacaacttatgggaagatactataatatgctatagttacataataatatcagttgcatataaatgtttgcattgcatcactgcatgggagaattcataattgcattatatagttgtacattcttccaataataaagaaaatgataaaacccagactccaaatacatggcagcaggcttgagacagctcccaattcccaaataatactttcaaccattttttttggctaaactttagcaggtctagatcccaattcaaatgt

SEQ ID NO: 7684 - DNA, 285 bp, Glycine max
tgaaccaaaatttgttttagtgtgaacttaaactgagtgaacgactagctgtgagtaacaatctttgcatcaatctctgaattttaaaatgaaatgtatacatgaggacatgatgaaggccatgatttgtgcatacacaagccttttgaccaaaaagcttaccttgaatgataactgtaccctttgcaccctttttgagctgaatgattttgtcaataattgaaccctgaacctgaatgattatctccagataccttgtttagattttaggaaagcatatgcttc

SEQ ID NO: 7685 - DNA, 273 bp, Glycine max
  unsure (1)..(273): unsure at all n locations
attttgtaattgttgaagnngattctcatgtcccttttggaactggaagagtccctgcttttgaatgagtcgtaataacccatttggtcgtcttgctcatcgcaccaagtcttgtaccattctatttgcgctctataaggtaccaccttggataagctaactgccaggcttgcagcattcagggttggtgaaggacccattctccttgttgtcttcagacattccttggcggatgtaatagctggttcctattggttacatcacagtaactaa

SEQ ID NO: 7686 - DNA, 271 bp, Glycine max
agcttgtttatgagctttaatggaggaaaagaaagacagaaggggggagcacgaaattgaaggaataaaacagggaaagaagtggaactttgaagtgtatctcataagactttcattcatcaaagttacaacaagtgttacacatgcttctatttatagactaggtagcttccttgagaagatttcttgagaaaacttccttgagaagcttctttgagaaaacttccttgagaagctcgagcttagctacacacacctctctcataactaa

SEQ ID NO: 7687 - DNA, 291 bp, Glycine max
ttgcttggaggaattagtatttgactgaagggagaggaagataagagcacacaattttgtgttctaaaagagctcttaaatctaaaatttaattttcaaatgatcaaagttgaaaaaagcacacacatgacctctatttataccctaagtgtcacacaaaattagagggaaatttgaatttctattcaaatttcacttggatttgaaattgaatttggggagccaaaatttcactaattatgattagtgaattttagttatggttcagcccactaatccaaggtcaagtcc

SEQ ID NO: 7688 - DNA, 271 bp, Glycine max
agcttctgatctaaatttcgagcatctcgatatactatgggacacaatcagacatccgagtaaaaagttattgtcgtttgattttgctcagagcttttgttctaaatttcgagcgcctcgatatactgtgggacacaatcggacatccgagtaaaaagttattgtcgtttgattttgctcagagcttctgttctgaatttcgggcgtctcgatatactacgggacacaatcggacatcagagtaaaaagttattgttgtttgattttgctc

SEQ ID NO: 7689 - DNA, 311 bp, Glycine max
  unsure (1)..(311): unsure at all n locations
aatgtgtgctctgacaccgagagcgacacaagagcccagcgcccccctggtttttccacagcgaggcatgaaaaaaccgcacaaattcactcccactccaagaggcccccggaacacccttcctttaaacggaggaacgttgagtttaagaccatcaattcggctatgtcgaggaacaccatcattccctcgtcgcccccttacctcctcattatgacctctatgccccatgcgatccaacctctcggggagcgcatcatctcggagggacattaacccctccataagacgcatcnaagcttgcattcgga

SEQ ID NO: 7690 - DNA, 273 bp, Glycine max
  unsure (1)..(273): unsure at all n locations
agcttgatgatccttcatacagngagtcaattttgtaaacacatccttgtaaccctactatcactttgtatagtggaagaatctccatattggagaattataatcgtttgcccccattactacctttaattactaagtgtctatcttaaacttcacgaagcgggaaagtatgagttttcccaacacaaataaaggcgtatgtcatactcatgtccaccatcacaaattcacaatgtcacataccaagattnccagtagcccttcccatcaata

SEQ ID NO: 7691 - DNA, 287 bp, Glycine max
tattcactttaaacttattacaatatatgacaaagccaataaagagaactaaaatcaaacaataaaacaaaacaaaatttagataaattttgggaaaatacatggcacctatggtataaagagtctctacaaaaaattataaattgcaatacttcttagagccacaagccaaccaatatggctacttatgcaaagatgctacctctagcttaacttgctacaacaccaggtaccaacaattataatcaattacatttacttgcgtgggactcaaatcttggaaacag

SEQ ID NO: 7692 - DNA, 275 bp, Glycine max
agcttgtattctggcagcagaaaaacaagtggttgttaactaagaagaaggaaatggcttcctcaatgatctcctccccagctgttaccaccgtcaaccgtgccggtgccggcatggttgctccattcaccggcctcaaatccatggctggcttccccacgaggaagaccaacaatgacattacctccattgctagcaacggtggaagagtacaatgcatgcaggtaagacaactccacacatatatacacacaagaggcaccaaaaagtttaaa

SEQ ID NO: 7693 - DNA, 305 bp, Glycine max
acaccacagaatactcacgcatgagggggagagcctaatttgtcgatcaataagcgccccatatttctagcttgctgcacaagctcatagaacctgacctgcaatctcgaaaccataagctaagctgcactcttcatcacgaactattcgttgcactatctgccaatgccctctctataactctcccacacacacacatatatacatctcccaccaaactaacgctgaggaccccatcagtgggcatatgggcaaacacaaacacttctaggggaactacagcacaaaactccatcccattgcca

SEQ ID NO: 7694 - DNA, 274 bp, Glycine max
agcttgtgtgtttgtgacgcatgaacgaaaacacaattcatggggctccgaaaaagggttgaggatggagaattgcactaagcaatcactacgcatggctccaagctcctgggtggaggacgcatgaacgaaaacgcaactcatggggctccgaaataggattgagaatggagaattgcactaagcacattacggcgcatggctccaaactcatgggtggaggacgcatgaacgaaaacgccattcatggggctccgaaaaagggttgaggatg

SEQ ID NO: 7695 - DNA, 287 bp, Glycine max
tgctcgtcttgctgttttttatcatgcagacttttctgatgatgaccgaggaacaattagggatcaacttgaaacttatgtgcttcaagtgagaagaaatgcttctttttccacttgtgaagatgttcaaagtttggctatgaagatggttcaaactgagaaacatttggtatttccattggtttataaacttattgagctagctttgatattgccggtgtcgacaacatccgttgaaagagctttttcagcaatgaagattatcaagtctaaattgcgcaataaga

SEQ ID NO: 7696 - DNA, 291 bp, Glycine max
cttggagaggatgctttttttttgaaaagaaagagggagagattgagagagggggagcacgaaattgaaggaagaaaaagggagagaagttgaactttgagttgtgtctcacaagactctcattcatcaaagttacaacaagtgttacacatgcttctatttatagactaggtatcttccttgagaagctttcttgagaaaacttccttgagaagcttctttgagaaaacttccttgagaagctatagcttatctacacacacccctctcataactaagctcacctccttg

SEQ ID NO: 7697 - DNA, 262 bp, Glycine max
  unsure (1)..(262): unsure at all n locations
tgggcctcnaaggaggctggatctttgatcgtcaatggggtcctttaatggagattttccaccatggagatgccgcggaagacacaggaaaggaggtgagaggaggcgccatccattaaggaatatgccatggaagaacgaccttcaccaccaaaatgatccttggataacaagcttggagaggatgcttcaatggaggaaaggatagaaggagacatagagggaggggggagcacaagatcgaaggaagaaaccgggagaa

SEQ ID NO: 7698 - DNA, 273 bp, Glycine max
agcttaatgtgaggccttgggagaggattatgtctctaggttttttattcggttgattgaagtggtataattggcatatattcatgttggcagcttttaagggtgttcatagctagccttggtcaaatctttcaatatatttcttgatattccaaaaatgagttttgacctccatgatattttctatatttaatggaaattaaactgttattgtagacatgttggtctacactaatgctataaaattcatatctagagacatttctatcggtg

SEQ ID NO: 7699 - DNA, 288 bp, Glycine max
tgttgaagagctcattatgctatagctcggacccaaacccggacaactcatgcagcttagtagggacctcaatagccatgagcataaacgcatagctgatgtcctacaaaagaacatggacttgtttgcttggcaaccatctgacatggtgagaatccaccccagcattatcttccacaagtttgcccccaggccaacctgatatcacagaagaagaggaagatgggagaagaacaacgcaaagcggtcagagaataactggacaagctcctcaatgccaacttgatc

SEQ ID NO: 7700 - DNA, 275 bp, Glycine max
agcttcagttttctcattgactccagattgctgttttagaaggacaaagatctgaatggtgatctgcagaagaacatagaccacagactcttgcaacaggtgtagatttcttattcatggcaagctgggttactaggttgaccaaggcatcaaattttccttcaagctttttatttttagtagatgaagatgaatccatgaccaccttatggactcctctaagaacaatagcatcatttcttgcactgaattgttgggagttggaagccatcttc

SEQ ID NO: 7701 - DNA, 286 bp, Glycine max
tgtagaactccccatttgcaaatctgttgttggaaaaagtgggtgtttagaaataagctagacgaaacatgtaaggttatgagaaataaggctaggcttgtggccaaaggttactcaccataggaaggtatggattatactgaaaccttttttcctttgcttgtgtagaggaaatacacattttactatcttttgctgcccatcatggtatgatgttgtatcaaatgaatgtgaaaagcatgttcctcaatggaattattaaggaagaaatctatgtagaacaacc

SEQ ID NO: 7702 - DNA, 275 bp, Glycine max
agcttattatcagaccacttccagggtgctggaactacttcacatggacttgatggggcctatgcaagttgaaagccttggaggaaagaggtatgcctatgttgttgtggatgatttctccagatttacctgggtcaactttatcagagagaaatcagacacctttgaagtattcaaagagttgagtctaagacttcaaagagaaaaagactgtgtcatcaagagaattaggagtgaccatggcagagagtttgaaaacagcaagtttactgaat

SEQ ID NO: 7703 - DNA, 288 bp, Glycine max
tcttttttagaccttgatcggtcatctttcctggccgacgccgactgtcattttttcgatcaatatcggtgaataatatttttttgccgaggtgggctaatgttttcctggctgaataaatgagaacatgccattttcggccgaaacgaaacatcggttgagctcgcacgaaaaaacctagccgacctacattgtaagttttttatgcaacaccgaaacaagaaaacttcccctgccgtaagaaaaataattatgggccagccagcgtttttttaaaataaaaaattg

SEQ ID NO: 7704 - DNA, 274 bp, Glycine max
  unsure (1)..(274): unsure at all n locations
agctttattatactaatgncaaaaaaactagtttgataaacttctcgataaaactttttaagtttatagggaggtgatatattactttcataaacttaaacaaactctttgaaatatctttttccttcttaacatcttaattgttcataatcttcattagcaaacttctttaaaccaatttagttaaacaaaactttaaaaatataaacaattttcaattcaaggaaaattttatatttgaattgataaattaattaatttatgcatgtggcta

SEQ ID NO: 7705 - DNA, 233 bp, Glycine max
gttttaatgttaaatgtttaatgtttcattgatattgtaaaatgacaatgaaaatggaacaaaaaaatttactaaaacgttaaacaaaataagacggagggaggatataaaagacctctgaattattacatgcagaattcaaaagataatgaatatttaaaaatcaaagttgtcaataatcacagcccatgaaaatagtaatggtagaacaagaagaggaatttgaagcctaa

SEQ ID NO: 7706 - DNA, 265 bp, Glycine max
agctactattattgctctttacccttcacgatgctttctgcaatgaaacgctcttggttcgccatcttcttggtctgctcccattgaggcatacttttgaactttcccagcacatttatgacacccgattcagatggctcaaatctctggccgaggatcattggggccataaactatagcacatgcttcaatgccacaaagggtgctgagttcctccgttttcttcagcagagactgcttcctttggttgtatgttgtcttcctt

SEQ ID NO: 7707 - DNA, 283 bp, Glycine max
ccccctatagtttatttgtttaacatgttttatatggaaaatcacatttgttgcacattccaaagattaaaggtacatagatgtgaactaagatccttctagatcttgagaaaatgatgaagaagtacttggtcttgaagtaccatgtcttagtattattgaaacactaatgtattttactgtgcatccacgacttgatatatcatttcctactaattcattagcaaaatataattcttcacctataggaagacatttaagcacatactgtgttattttagag

SEQ ID NO: 7708 - DNA, 271 bp, Glycine max
agctttgtgctaattcaaacgacaatgactttttactcggatgtctgattgagtcccgaaatatatcgaggcgctcaaaattgaatgttgaagctctgagcaaattcaaacgacaatatctttttacacggatgtctgattgagtcccgtaatatatcgagacgcttgaaattgaataccgaagctctgaggattttcaaacgacaatagctttttacacggatgtctgattgagtcccataatatatcgagacgctcgaaattgaatgtt

SEQ ID NO: 7709 - DNA, 230 bp, Glycine max
gaacaaaaaccgccgaaccgagcttatcagcgcaaaaaggagacacggaaagaaaaccaagcacccaaaaagcaaggcacacgcgcacaagagccgaaccggcgaaaagggaagacgccaaaaagaacaacgaggcgcagagaagccgggggacaaaaaagaccggagacgacgacggcagggaaaaagacgcaagagggaaaacggaacgacggaaagcaaaggcagac

SEQ ID NO: 7710 - DNA, 343 bp, Glycine max
  unsure (1)..(343): unsure at all n locations
agcttctcaaggaagtnttcttaagaaagcttctatggaagctacctagtctataaatagaagcatgtgtaacacttgttgtaactttgatgaatgagagtcttgtgagacacaactcanagttcaacttctctcccattntcttccttcaatttcgtgctccgccctctctctttctctccctctttcttttcctccattgaagcatcctctccaagcttcttatccaaggctcatcttggtggtgaagctccttcttccatggcttattccctagtggatggtgcctcctctcacctcttctcctttgtctttcgctgcatctccatgggggaaaatcacc

SEQ ID NO: 7711 - DNA, 336 bp, Glycine max
agctggaaggtaaactagatgccttggttaatctggtaactctactggacatgaatcaaagactgcacctgtcgccagactctgtggtttatgctcctctgccgaccaccacatagacctttgcccttctgtgcaacaatctgaagcaatagaacaacctgaagcttatgctgcaaacatctacaacaaacctcctcaacctcagcagcataatcagccacaacagaacaattatgacctctccagcaacaggtacaatcccggggggaggaatcatcccaaccttatatggtcgaattcttcacaacaacaacaatagcaaccttattttcaaaa

SEQ ID NO: 7712 - DNA, 412 bp, Glycine max
  unsure (1)..(412): unsure at all n locations
ttaaaatttgaattaaaacgttcagaaactgctggtaatcgattaccatatatgtgtaatcgattacacagtgcaaattttgaattcaaattttaatagctgttgtaaatcagttttggccactggtaatcgattacatcctctggtaatcgattaccagaaagtaaatttcttgtaaaagactttttaacttaaatttcttggccaaaccttttgctacttcaattggaattcccttcctatttaatataccctttctaagattctagatccatcttgaatatctttgatttctttgtcttgaataaagctttgtgaaacatgtaaccctttggcatcatcaaaacatcagcttgatccttagcctacagtatctccactgctgtgcgtactctntaaaggtctcactctc

SEQ ID NO: 7713 - DNA, 405 bp, Glycine max
ttaaccgatcgtttaagctgtcttctcgcctaataaatgattttatgaatttcaaccgatcatttgcgttgtaatctcgtttaatcgctgttaaaataaaatctaaccgatcgttcacactgtaacctcagttaaaccagaaaaagcaaaataataataaaataatcaaaatatcttgaataataataataaaataatcaaaatatctttgaatataataataaaaaaaatcaatcggacgtttttctttggaagttttattggatcaattgattaataaccaaagtgaaactaaggctaaaataaactcacaaatcaagctttgtccgcaaaaatcacctaaaagccgttttaaggtccaacgccttaaacggtcctctttgcttttatcggttaacatggacc

SEQ ID NO: 7714 - DNA, 327 bp, Glycine max
atactagtattttgtgttggtgaaagaaagtggaacttggtagatcttcaagagtgggacgtagtctcattggtagagataaaccagtatataactccttatgtctgtgcttgtatgtggaatctatttaattgaccttgagatgtgtattgtgtgacaccctctaccccatacatatatgtattaataatagaaggaatcagagtcctgatattaattaagagtatttaaaacatttctgtaattacaagcctctctgtagggtaaaagactcacattctcctttctaacataataataaaacttgtctatataaatgataaattc

SEQ ID NO: 7715 - DNA, 348 bp, Glycine max
tgttgagtatgcagtgaaaaatggccctgactttgaagctatgatatgtgaaaaacaacgggataatccttcctatagcttcctctttggtggggaaggtcatggttactaccgttataagctttggttatcaactcgtcccccgggtggtccattcaacccgtcttttccatcatcttccatgcccatgatgcttcctccaaatccaatgatgaatctgtctcctgtaaatgtttctccgatgaaccctgcacgaattggttcttcaccttcgatgctaggtccacctcctttccaacagttctatgatcaacaacaccaccatcaacatcctcagtcttttggact

SEQ ID NO: 7716 - DNA, 421 bp, Glycine max
  unsure (1)..(421): unsure at all n locations
tgcttgccgtctaccaaagacacgttttagttcaattctttccagagtctatatgagagcatgtctctctctctctctgntcctctgtgagtgagagatctgtgagagagtcatgtattgtcaacttcattcttataaggaaataacaaganagatgcttacatatctgtcattcatttttagttcaaaatctaacatgtgaattaagtgacgatattaacatatttttggtgactaaagaaataattattttctttctttctctcctaactccatcaaatcaaacaacacatttttntttaatttcactctcattttctttattttgttcataacatacacatttaatacttttattgtgatgatattttctagttnttttttatcgaagaagattatcattcttgttatttaatttaaa

SEQ ID NO: 7717 - DNA, 266 bp, Glycine max
aatgagatgttgaagatttgaaagtgttgatggcagctcaccctctattttgttatgtcttaaatccaattcgtgaaagttgtttgattgaggaaagacatttgggatttgaccactgaggtggttagcttctagattcataaaagataaccgcggaagggttaatagtgaggatgggattgaaccgttgaggttgttaactgagaggtccacgaaagtgagatgtatgatgttgaagaaagaaggagggattgacccttggaaac

SEQ ID NO: 7718 - DNA, 232 bp, Glycine max
tgctgcatgatgaaaacgtcctcaccattaaattaagaatgacaccctacatgtgcattaaattacttgcagtataccacttgactcgtcttataatgctcagacctcttgagccagcagatcatctcgtgatttttatatggcacgtctatccctgatgcatgaacggatgctacgctgatttcagttctatcattcgcaaagctatcataccgtcatccgaattcactaa

SEQ ID NO: 7719 - DNA, 309 bp, Glycine max
  unsure (1)..(309): unsure at all n locations
tctattggtgagacctctatttatatgcgatctcattgttgagagccatgtgcaagccaatatggagggatcttgatcacatttggctacattggacaagttcattgagggagtggaagatgaactatgacatttgttggaataaccttaaaggcctcatgatgcgcgtgctcataaacatacttcatctatgtaggtgcttgcacattgatggtctccttttaaaaaggggcagcanacatgaattcagagtaggaatcccgggatatgattaccattaatgaatgctagaggaaacctctgaacatt

SEQ ID NO: 7720 - DNA, 345 bp, Glycine max
gtgcacgcgtgcgcgcgcgaacgtgaccggaaggccatgcatattctgttaccttaatcggacatgactccatttcagtgcctcgcatctccacttgcggttcctgcgtctctgacctctaaccaacagacgcttgaagaccatcgcacctttccgatatcttataaagaagagatgactcttgctcctcatgtccttcattacccacatttttagcacccttctttatacacgatccatcatgctctttaacatatccacaggatgctctgactgaggcggatgtaaagaatcatcctttgattggaacatactgctcaaaatcactaggatgctcttttgttg

SEQ ID NO: 7721 - DNA, 405 bp, Glycine max
tcaccttttggtcctcctcatagttgttgcatgagaaaacatgctctattttcatctcccactccaagtagacctccagatcattctttcctttaaatggaggaatgttgagtttaataccatcaattcggttttgtctaagaacaccatcattccctcttctcctcctttcttcttcattatgatctctattccccatttgatccaacctctcatggagcgcatcatctcgttgtttcattaacctctccaaatgttgcatcaaagcttgcatttggaattgcgaaagccccactccatcattaggattagtacctgacatctcaaacaaacaaatcaaacgtaacaagacaattatagttgctgtttgaatacctcacccactcaagtgtatcacacaatgat

SEQ ID NO: 7722 - DNA, 400 bp, Glycine max
tatatggcaaccaaaatcacaaagcaaaaattattctttacatgaaaccgcaaaaaagaatatcaaaacagttaaaatcacaggattaaaagaaaagaaacagatgaacctctgatttgtgaacataagagatgactgaagaatctggtttcgaataacagagaaatatataacatgcaatgaaaaactaactatacatgaaaagaagtatatgcaacaaacaatttctgaatcaaagaaattcttcttcaaacttttactaacttggaaccaaacacgtctaaataaagagaaaaggccagagagaaaagaagcacaagagaaagtttcatgatcgccaattatgcttttcaatctacgtgatatccactaagtagagtttatgataacactagaaaga

SEQ ID NO: 7723 - DNA, 320 bp, Glycine max
caaagatatggattaattttcttaactaataataaaaatatgcatttattatgtcatatatgtgagaaagagttatagaggcacctgaatatcaagaattgcttgccatggaaaaggaaccggagcatgtggattgtttaatagaaagttgaacaatacacaagtattcatgactaagtaaaatgagaatagagagtcactgatacttgagatgactcactctatatatagtgagtgatgacatgaatatcaactatgcatttatctttcccatattaatggaaacgaaagaaactacttatattgaactggttcatgaa

SEQ ID NO: 7724 - DNA, 408 bp, Glycine max
tcgagaaattgcttatcctgatctgaactctatgtgtcctcctctagaaaagttgaagaccaaaggtactccagaaaaccattgaccatacaacaaaagtcaacaaaacgttattcgtcttattgggagtatgttgatgtattacactctatgcaaaatagtaattcttcagtgaaacgtagtgcatcatcatctgagcaaccaatacagagatagaatatttcaatgttgaatcaatttcatccgtgcatccaggattctattgaaaacattattgatgttaaagcggatggtaactgtagttattgtataatagctgccttattggatatgggtgaagaatcgtgctcattggtgcacaaccatctgcataaagaactcacgagctagttggaagagtatatcaac

SEQ ID NO: 7725 - DNA, 378 bp, Glycine max
agcttctacattaattgctatcttttcatatatcacgggactcaatcggacatccgagtaaaaagttattgtcacttgcacttgctcagggctttagtattccattttgagccgttcgatatattacaggactcaatctgacatcagagtaaaaaggtattgttgtttgaattagctcaaagcttccgcattccatttcgagcatctcgatatattacgggactcaatcagacatcggaatgaaatggtattgtaggttgaatatgctcagggcttccgtattccatttcgagcgtctcgatgtataaccggactccatcccacattcgagtaaaagttattgtcgtttgaattcgctcagagcttctacattcaatt

SEQ ID NO: 7726 - DNA, 397 bp, Glycine max
ttgagaaaattcatacgacaataactttttattcggatgtctgattgagtcccgtaatatatcgagtcgctcgaaattgaataccgaagcgctgagcaaattcaaacgacaataactttttactcggatgtctgattgagtcccgtaatatatcgaaaagctcgaaattgaatgttgaagctctaagcaaattcaaacgacaaaaactttttactcggatgtctgattgagtcccgtaatatatcgaaacgctcgaatgtgaatgtagaagctctgagcaaattcaaacaacaataactttttactcggatgtctgattgagtcccgtaatatatcgagatgctcgaaatggaataccgaagctctgagcaaattcaaacgacaataactttttact

SEQ ID NO: 7727 - DNA, 303 bp, Glycine max
  unsure (1)..(303): unsure at all n locations
tgcagcttatccatggagcatctagcttcattatctaaatgcgtaatcaactccaacagaatgaaatgcaacccatttgaagctctattntagcttacctactgtaaaccaggtgttgtattctttttcctactcaagctnttttgtcccaaaagagaaaaatcacggttttggcatgagaggttttaacgaggcacccctggggagcgaaggaaatttgttctcaattgactacattgaataaaagttctatcttccttcagctattataaatatcttgagtggaccctacaaaggcttatc

SEQ ID NO: 7728 - DNA, 399 bp, Glycine max
tgcaagtgatagcttgatgtttttttactactgcttttggaattttggtctagtcttataaatttcgtagccttgagattatatggttatatatttcttatcagggtattgtttaaaattaaaaaaaaatggcgttccaatttacgcggtcctggttttcttttccctttgattatatatatatatatatatatatatatatatatatatatatatatatatatattaaaaatatttcaaatagtaaaagtaatataaataaaaaattgaataaacttagaaattattaagttgtagaaattattgcttaatagtgattacttttgctacattttaatttaattgttggagaagttatttttaattgaaaataatatagttcgatttaatttatacgtg

SEQ ID NO: 7729 - DNA, 450 bp, Glycine max
  unsure (1)..(450): unsure at all n locations
agcttctcaaggaagtnttctcacagaagcttctcatgatgttttctcaagaaagcttctcaatgaagctacctagtctatgaatagaagcatgtgtaacacttgttgtaactctgatgaatgagagtcttatgagacaaacttcaaagttcaacttctcttcctcttttcttcctttagatttcatgctctccctctctctttctctctttctttctttacctccatcagagcatcctcttcaagcttcttatccaaggcacattcttggtggtgaaactccttcttccatggtttattccctagtggatggtgcctcccctctcctattctcctttgccttccgatgcatctgcatggtggaaaatctccattgaaggacctcattgaagctcaaagatccatacttcagagaagcttcacaagcaagcgttcatcaagccactggag

SEQ ID NO: 7730 - DNA, 392 bp, Glycine max
tgactgaaataagcaccatatagacatttgtgaagtcaaaggtaaacatgtgtctgaaatacttcaagaagaaacactactaaaaaaacatgttttaacatcgtcaaatttaagtcggtttttaaaaaccgatgtaaaaaaataagcggtgacattttttaaattaaatccaacttttttaaaagcagttatatagaaaccgtcgttgataaaaggtgtttatggttacaatgacgtttttttactggtggctgtctatgatttcaaattaaataataaattaattttttttcgggcctacaattccaccttttcgtgcttctcacctccgtccattgaacttctctttttagggaaaaaccaaaagccccaaactcatttggtggttggag

SEQ ID NO: 7731 - DNA, 411 bp, Glycine max
ttgcttctatagatgcaggctctgcagcatatacaaggaatgctctaagctctgagcaggaaaacctggtagaactggagatgctggtgctggagggagatgagagatagaaagagctaatgtagatggggcctcagatcttctagccttggatttctgggttcccaaaaagtgaccaaagggccatccaagttccagtgattctttttaataaagccaaattaatggctgggctcagagattcaaaggtcagagaatcagatgagactcctcgagccttgcataaggcagttatcaaggctggaaaacatagcctcgaggagtcgtgctgagctataagagagatctgacctgacatgaggggccccaagttcatatccctctgcattacaagcccgtagattaacatag

SEQ ID NO: 7732 - DNA, 146 bp, Glycine max
agctgattgctggactattaaggtgagcgctagtattttattctaagggtgtagaatgacctacaagaaggtgaagcttctccccaagagcttatttataatgaacttcttagtgaccgctacaagatgaaattgtctccacagac

SEQ ID NO: 7733 - DNA, 399 bp, Glycine max
gcttaagcagaaagataacacggtgaatttaaagatcaataagtttcaatttcttacaatgtatgcactatgtcacaaccaattttgtttcatgcagacgatcttcagtcatcacattactcctcttgtcgtcattcttctctttgtcaaatgcatactccagttgtttctccactgacttgacaattgctgttcgcttggatcttaacctgtatgggggagatgcattgaatgccttattgttgggaatgtcaatcccattgccatggcttgctggactcctggagaaatgcccagaaccagaatcatcatcggttctctctgttttagaagtatgtggattgttatctactttcaaaactttactgggactggtgagtgtttgggccccatttttct

SEQ ID NO: 7734 - DNA, 315 bp, Glycine max
aatcatgtcgctggaccctaaatattctagtatatctcactccgggcaccaaacaaattcatttatgcatattggccacctatgattttcgatctgacacactaatgatactctgttagacatgaactagtttgcctcgtcagtaaagaatctgtctggacgagcacatactagactcttgtctatatcatagggtaaaaattatgtggattagacaacactttacggaaaaaatgtgtatacctgtttgttttcaggcgaaaacctatgggacaaagcatttttgaaggacatgctctccttacaataatgggg

SEQ ID NO: 7735 - DNA, 418 bp, Glycine max
ttggaaaagggtgttttcaccttctcgctaagccaatctgctggcttagcgagcatccgctaagtgcaacactcctaggcttagcgcgaggaagaatccacaagaagatgagctatataggttcgctaagcgcaccacttcagttcatccactaagcgagaaaggcacgctaagccaaaaatcactaacgtgcgctaagtggtccataggtgcgctaagcacacgagcacgaacaaggccacctatttaagcttgaaatcatattttgtgaagggagtttggactagaatttaaagctttgcatgtctagggtttctagagagagaaaggtccaagttctagagagttttgagagattttgctgtgtgaagatctgcagagaccaaagcttgaagcatgagccagtttgagagcttga

SEQ ID NO: 7736 - DNA, 401 bp, Glycine max
  unsure (1)..(401): unsure at all n locations
nttaaatacataatcagagctaatatgttatcagtattcatgagtagattatgttgagatatatgaaaatctccttgagtcgattactttatgcatgtataagagaatatgtatcaattagaacatatgtgtagaagaagatatttttttaaaacatgaaaacacacatatgttaccatcagaacacttgtttcattaaaatatcatattgtcataccctaatttcatccggggattattacttgatgacatgcaatctttggttagccactttgagatacttggcgtcctttgttgcacaataaatgaagtcccgagacgtctcagaaatctaaaggaagcaagcttgcgcgatccgtgaaatttctaatgtggcggaagtcgaaaagagtgtttttgcg

SEQ ID NO: 7737 - DNA, 377 bp, Glycine max
agctataattgatagcctcaaagaatttgtcttcatactcacccagggacatgttgcactaacccaaagccaatgcggtatgaacaacagactcaaatccatcttggatcgacttgctgccataacaatatcaccacccttggccaaactaggttcctcgccaaatactcagtcctcgttggccagacctcctatgaaaatggacatcccgagaatcgacagccaagatccacttgggtggattttcaaaatctcacaatttttcgatgactagttcatacctaaactcgatagactcatggtggttgcgctttacatggaaggattagccttgtcttggtaccaatggatgtagcggaatgggtttattacctcct

SEQ ID NO: 7738 - DNA, 406 bp, Glycine max
taaggtatctgaatgtttttctaaaaaatatcatacacattcaatgactagcattaaactgataggaaatattactaggtctgagagaaacaccagtttggctttggtaaactagatagtatgcgtataggattacatagtagcatgtaatttgagctagtatgctatattattagattgaaaaacttgtaattccattgttttacttgttttaaacttgggcatataaaaaagtggtttaattatttttcttatgtttttctgataaagaaatatattagagtatgacgaatgacacgagttcttttaatgaagaaacaaaaagtaataaataagagaaaccattttatttattttttcaattaaagttgaaatattaattaaaatatttggcatatgaaataaa

SEQ ID NO: 7739 - DNA, 381 bp, Glycine max
gagcttctagaagtagccacgtctgctaacctcttttacgtgatggcccgtcctcttcgacagggttcacgctagcacctccatgactagctagcgggctgggtataacattttggccttcttactgaaacgctagccatccgacactaatcagatgctgcactttatacttgaacgggatgcaagagtcaatattgtgttcgggaactccactatggtacacacacttggcaccgcaatcataccacttggagtacggtggctggagaactttcccgggtatggccaccacctagagattctcctatgatgaaggccataactcggaatatgccatgggaataggagggaagctgtctttcgggtgttgtgcatatttat

SEQ ID NO: 7740 - DNA, 405 bp, Glycine max
tgtgcaaatcaagtcactcccgcattttatctctagcatgcattgtatgttggtctcgtcctttgtcacgggaagccggaaggtccatatcaccttcttaattgtacacatggggcactgcgcccccaaatgcgcaagtaagaagagataattttccgggctctcgtgtccgtaaaatgcattcatatcatgcatcgcataagcatctcttcataacatcataatggacatatcctgcatttgtccgttatcatattccagcctcacattttgcatggtcatggcatcatcatgcatatgcgttcaacaaactttttggtctgcaaaattgcataccatttgttttcatgtttgctcatccttgcgttttcctctacaaaacaaaaacaaaaaaggggggagcgt

SEQ ID NO: 7741 - DNA, 352 bp, Glycine max
  unsure (1)..(352): unsure at all n locations
gcgcgtgcaagcttcatgatgatgaatcaagctgattcatttattctngatgatgacaaaacgctcaagaaaatgatttcaagattaagtcagcacgttcaagatcaagattaaattaggattaatttcaagattcaagagatgacctcgagaagaatcaagattcatgagaagatgatttcacgggggaagaattgaaaagaatatttcttataccagacatagcacagttttgttttataagagaagcttatctcanaattttcttaattaccacagtttttactctctggtaatcgatcaccagtttcttgtatttgattaccagtggcgaaggttgatttcaaagttt

SEQ ID NO: 7742 - DNA, 408 bp, Glycine max
  unsure (1)..(408): unsure at all n locations
tcttgattaatatttatatatgagaataatttatgaaggaaaaaagtttcttcagaaaactaaaattaacttatgcattagttaaaatcaactttttttcaaaaagttcattttaacttatgttaagttaattgtaggttatgggagacaatttatttcatcttttttctttttattttcttttctcataagtgcttatggagaaacttatccaaacatggtcttaatgaatgacatttcgtttgattggaagacaatattagatgtacatgatctgattaaaattgggtagttaataggatggtttgcaatcaatatcctctctctcttatatatgtatgtgtgtgtgtgtgtgtgtgtngtgtgtgtgtttcgtgttttggatcttgaagaggtgtctacccacta

SEQ ID NO: 7743 - DNA, 216 bp, Glycine max
aatttctggaactttcaatgaactcgctaagcgagctcggcccactaagagagttcattcatacttagttgatcatttgggatctctgagaacacactaaacatgccctattctactaagcgagggtttcatatttttttataattctgtcgcgattatggatgaacttgctaatccactgcactacaggttaacaagcctttgaatgtctgtata

SEQ ID NO: 7744 - DNA, 408 bp, Glycine max
  unsure (1)..(408): unsure at all n locations
tgtatgagtactgngaaagattcaagaaattgtgtgcttgctatcctcaccaccaaacttctgagcaactccttcttcaatatttctatgagggacttagcaacatggagaggagtatgattgatgctgccaatggtggagctcttggtgatatgacccctgctgaagctaggaatttgattgagaagatggcttccaattcccaacaactcagtgcaagaaatgatgctattgctcttagaggtgtccatgaggtggccacagattcatcttcatctactgaaaataaaaagcttgaaggaaaacttgatgccttggtcaacctagtaactcagcttgccatgaataagaaatctacacttgttgcaagagtctgtggtctatgttcttctgcagatcaccatacag

SEQ ID NO: 7745 - DNA, 296 bp, Glycine max
  unsure (1)..(296): unsure at all n locations
gcttgagatgaggaagtgtcaagggtgattctttctgctnnttatagtgaccacagagtggtacctggagatatgtcgcggnggtcacgataccttggggacgtcatgtggggtgctattgcccaaaaccaagcttgaccaatcccgacccaacccgggcataatctgtcagtgagaacctgtgatgtacctaagcaggcgagctcctggcngtcaacagattataggaaaacaagaccacaaagcaaggaggcttgtggtggctggccagctgtgaattatgtgtaatatgtgga

SEQ ID NO: 7746 - DNA, 395 bp, Glycine max
tctattaagctgaaccattttatcaataatcacaagttgagttttattcagaaaattagagtttatctcttttatcttagtgagagtgattctcctaaattcttgagtgattcaagaacaccctggctgtatcaaaggactttcacaacctttgtgtgttgccctcgctggaaagagtgattctttccttcctatcatctccacccttgttctttcaaaccacaattccagaaaatccacctctgtccaaaattatctcgtgaccataactcccattttacacactcaaattaagtgattcttgagcctaaattgaatttcaaaacgagacctttcacctcgttttggaatcacctcatttggagccctgtagcttccgttattgccatttctat

SEQ ID NO: 7747 - DNA, 429 bp, Glycine max
  unsure (1)..(429): unsure at all n locations
agcttctactatttataggcccttcatcttctagtngtttgtgnctctaaatggataagtttttcacttgatctcacatctgaagttnttgatcgttggaacatataatgatttcattaaatgtgcgtccttcttcatgctcgaaaaccactattgtttgctttcgtgtagagcactacaacaaaaaaccacttattttgagacaaagcaagtctatcacggtaaagtgtgtcttttgatgttgtttgacaacttttaaaatttgatcttcataggattcgacatatcctaagagaatgtcttgtgagacagtctttacaaaatgaatctcacatacatagtattaaatgaagtcttacatgtcatctctaatgttgtatcaaatcatgacttactcatgcttttgtccaaactttagacgcatgatca

SEQ ID NO: 7748 - DNA, 364 bp, Glycine max
tgcatcagcatatgacctttatttaacatcataatttcataaaagaggaataggtctatatttttatcttaagcacttaagtatgatcttaaacactttccactgtgcctcactatgggacgcttgatatcgactaattacacctagtgcataagcgacatcaagacatgtacaagacatggcgtacatgatcgttcccactacactagcatatggtacgctactcatgcgagctctttcttcacgagttgtaggacaattctccctactaagagtagattcaacacctacaggcaaatagcctcacttggaaatatccatgttatatctctttaagatagtatcaatgtacatagattgggag

SEQ ID NO: 7749 - DNA, 213 bp, Glycine max
gatccttagtcactgcagctgcagctaatcggacattcggtgaatgttatcttgaacttcagacttcgtgtaatttgagcttcacatatagcgccaatggacatcgggaaaagtatgactttaattctcaagagtctcatgtaattcggcgtatcatattatagcccgatggactcagggaaagtatgacattgattcacgagagttcttgtg

SEQ ID NO: 7750 - DNA, 400 bp, Glycine max
tataatatatcgatacgctcaaaattaaacttctgataacttttcacacggatgttcgattcgggcgcataagatgtcgagaggctcgaaattgaaaaaccgaagctcatgagaatttcaaatggtcataacttttcacacgaatgtccgattcaggcttataatatatcgagatgctcgaaattgaataacggaagctcttgagaatttcaaatggtcataacttgtcacactcaggtccgattcaggcttataatatatcgagacgctcaaaattaaacatcggaagctctcgagaaattcaatcggtcataatttttcacacggatctccgattcgggcgcataatatgtcgagacgcgcgaaattgaacaacgaaagctctcgtgaaattcaaatg

SEQ ID NO: 7751 - DNA, 438 bp, Glycine max
tgagagcttccgttgttcaatttcgagtgcctgtatattgatgcgcctgaatcggacatccgagtgaaaagttatgaccatttgaatttctcgagagcttcctatgtttaattttgagcgtctcgatatattatacgcctgaatcgaacctcagtgtaaaaagttatgaccatttgaatttctttagagcatccgttgttcattttcgagcgtctctatatgtgatgaaccttaatcggacctccgcgtgaaaagttatgaccatttgaatttctcgagagcttccgttgttcaatttcgagcgtctggacatattatgcgcccgaatcggacatccgtgggaaaagctatgaccatttgaatctctcgagagcttccggtgttcaatttcgagcgtctcgacatattatgcgcccgaatcggacatccatgggaaaa

SEQ ID NO: 7752 - DNA, 456 bp, Glycine max
  unsure (1)..(456): unsure at all n locations
agctggcaagtgaaatcgaattactcgacttttgttctcaacacanagaatagtttacactagaataaaaaggtatggtcaaaagggtattctatataaaatatatctcgatacgagtcctcgaactatagagtatcaacattgctaagaacaagaaatcacgaacaaccatactatctatgcaattaaggcaaaacaccatactactaacatacccagaattataaggttcttataataagtatacaacgtacatataagaagtaagaatttaatagttaataaggatgtattaaagaatcacaaacttcaactactacattcacgactacacacaaaataaagtgagtgaagtagtcatgcgtttacacatcaagaaagacatactcatccaagacatatatatggttcaaaaggttttcacaacactaatccacacattcagatagaaataag

SEQ ID NO: 7753 - DNA, 414 bp, Glycine max
ttgtgctaatagaagaggattatgtcagtacacaaattaatgtatatgtgtaactcaacctatttttttgttttttgaaaagatgtcagaggagaggaagatttgtctccgcttaataattaaaatgatcgaaacataaacaaaagtctttttctggttcgagttaaactagttttagaaccttctattccaataacaagcctagtaagaaacgataggtaaagtaccaattcgaagcaaaaaccaattaactaatatattgaaagtcagctgtcaagacaaagcactacaagataatgtattcaacgcaaatgcagtttatataaatgttgaaaagtgagacatgttagtacgtcaaccatgcatcatctcgttggaaataagtgtgtatgtgaaagactttgtgtacctaat

SEQ ID NO: 7754 - DNA, 340 bp, Glycine max
  unsure (1)..(340): unsure at all n locations
agctntctcataagtcctaaatgacatttcatgctgtgattaactcatttaaacctccatttaccacagaatccagatttaaccttccaactctcaaagccctgactctttttccactcacaacaacatattctcaccttctaaccctaggttaactntacccttcatctctaacagttttccataagcaatttcagcacataaacatcacaagcatcatcataaaaaccctaaaactgaatgggtaagcttaactcatccaaacatggcaagttcaacatgctttcaacaaattccttcacaaataatcatcatgaagcagaagactaacaaaactacc

SEQ ID NO: 7755 - DNA, 332 bp, Glycine max
tctttgagaaaacttccttgagaagctagagcttagctacacacaccctctcataactaagctcacctccttgcgaagcttccttgagaagattcttaaagaagctagagcttagctacacacacccgctataatagctaagctcaccaccatgccaaaatacatgaaaatataaaaaaagtctctattacaaagactactcaaaatgccctgaaatacaaggctaaaaccctatactactagaatggccaaaatacaaggcccaaaagaaggaaaaaccaattctaacatttacaaagaagaatggatccaaccttgaccatgggctcaaa

SEQ ID NO: 7756 - DNA, 353 bp, Glycine max
aagtcacctgacgctgcagctcatcatatatatgcgccgaatcatttattgtttcaagtatgaccatatgaatgttcgagagccttcgttgtccatatcgagcgtatagacaactatgcgcgtgaatcacacttccgtgtgataatttatgaccacttgaacttgtcgagagcttccgatttactgtgtcgagcttactgatatattatgaacacagaatcggacttccgtgagacgcgatattatcgcgctaatactcacaagcttactggcgtacgcttagagcgcctccttaaactatgcgcctatgacggacttcgaggacaagacatcaccaacatgattttttcgga

SEQ ID NO: 7757 - DNA, 409 bp, Glycine max
tctcgatatattatgctcctgaatcggactttcgtgtgaaatgttatgaccattggaatttctcgagagcttccgatgttctatttcgagcctctcgatatattatgctcctgaatcggacttccgtgtgacaagttatgaccatttgaattgctcgacaccatacgttgttcaattacgagcgtctcgatatattatgcgcctgaatcggacgtccgtgtgataagttatgaccatttgagtttctcgagagcttccgttgttcaatttcaagcttctcgatatattatgctcctgaatcggacatccgtgtgagaagttatgaccattggaatttctcgagagctttcgatgttctatatcgagcgtctctatatattatacacctgaattagacttccgtgtgaca

SEQ ID NO: 7758 - DNA, 420 bp, Glycine max
tagcgagacaccagctactacaccttccaatttttctcctttttacctgaaaatgaagtgaaatttatattaattccatgcggagagcctctactgagcaaagataaaactaaacaagaaaatatttacaatcctacaaaaagaaccataaattggagaaaatatatacattttggaaaatgtttctatacaaaagttaatcgtagatgatgactaacaagtagtaaacaagaacagtatgtaatactgactagtgaagtacataagtatgttgaaattcataccagtttgtctccaaaaccagtttttaaacttacaggcgctcaaaaatggctccacatcagctcgtcccattgacatttgtaaatttgacgcaacatttagaagttaaaattgccaagattgaacactacatattga

SEQ ID NO: 7759 - DNA, 304 bp, Glycine max
cacaaagaaaagtcatccgatgaggaaaatggtatggccaacagggtctggcatgtgaaatatatctgaattcaagtgatgcctctatatagagacatcattgcattatatcaagaaaccacgaaacgagccttctaatctatgatgcctaggctgaacaccttaccactaacatccgacatgattatcagtaattacataccgctgtcaacgtacattatgtagatgttgattattataaaaataatgagagcattagtgttcacatggtattgcgacttaggaagagactacacactgcttt

SEQ ID NO: 7760 - DNA, 407 bp, Glycine max
cgagtctccaccattggtgtattatgttactcttgcaatgtcttgaactactttatggtagtgtttatggtaagctctaatttttatatatctacactttcctctgtttctcatcatctaaattttttatatttaacattgttcttgttaagcattatgtgatataaaccacttgtgtttttttatttttctattttcatatcaattttgacaacaagagtctatcattggctttcataatgtgtttctatgaatacaaacccaaaaaaagtaatgaaaaaacatcaaagttgttgaggagataattcaatcattatgatacattttttcaatgaaggatatacttgtaaaaaactcttatatacccaaaaatgttataatgtaaccaaacacatgaatatttattt

SEQ ID NO: 7761 - DNA, 364 bp, Glycine max
agctttagaagctggaatcatttattctatctccgacagccaatgggtgagtcccgtccaggtagtgccgaagaagaccagcctcacagtgataaataatgagaaggaggagcttattcctactcgggtgcaaaacagctggagagtctgcattgactataggaggctgaaccaagctaccaaagaggaccattatcccctgccattcattgaccagatgctggagcgcctggcaggtaaatctcactactgtttacttgatggtttttctggttatatgcaaattactattgctcctgacgatcaggaaaacactccattctcctgcctctttgacactgttgcctataggatgatgcctttc

SEQ ID NO: 7762 - DNA, 296 bp, Glycine max
cataaacccacataccagagcggaaagccatgttaccggccaacgctcgaagtactgactctgattacggtcgcactgacctattctcaacctgcaacacgaggataactttgccctttataaatagcagtttgccctaggacacagaagtactcataatatataagcatcatctttccaaccctgaaacggactgcgttcaccacactaatgcggacttggttagtacaacatgcgttctccaatcacctctcatttaagtatcatgaatcaaaaaaccttctccacacccatct

SEQ ID NO: 7763 - DNA, 377 bp, Glycine max
tctccacgttttttaaaaatgattttcggggcttccgtaatgcttccgtaaaatttttgaaaaccttgggtaagtatatttcacttaacattggtgaaagggaagagaaaaaaagatgaaaatcaaatccgaaacacttccgtaaaatacgaaatggggggtgaacttagtaatttgggtgtgcttagaaatcttcttcattaagtctctgggcggcaaacacctatctttttccctataaatagggaggtggctgtttcaaaaaatactcatcaccccttagctatgcatttcggctattttgggcaaaaaacacgcgtgaagaaaaaatcaagtcgaagtgctttcgtaacgcttccgtaagcgattctgtggaa

SEQ ID NO: 7764 - DNA, 391 bp, Glycine max
  unsure (1)..(391): unsure at all n locations
agcttgtaggattatggagtacccatcacatgtggtactaggtggcggtcgggcgatggtgcanaacaattctccacatccacaaatcacatataaacccaccatcccctgttgcccactttcaactgagctcacgtactcccacgtagcccttatcctcgtttctttcaacactgggtccccatcaatcctcccaagcttccacaacatccaagtaattccacatccaatcatcatgaactaacaaaaccaagcaaaataggcaaaggcagaaaactctgcccacaacacataccaatatcacagcttttcacatacaaatacacccagaacattctcttctgtccaattcgttaaccggtggatcgactcggaaaatntactggaaggc

SEQ ID NO: 7765 - DNA, 385 bp, Glycine max
tggagaggatgcttcaatggaggaaaagaatgagggagagaaagagagaggggggagcacgaaattgaaggaagaaaaagggagagaagttgaactttgagttgtgtctcacaagactctcattcatcaaagttacaacaagtgttacacatgcttctatttatagactaggtagcttccttgagaagctttcttgagaaaacttccttgagaagcttctttgagaaaacttccttgagaagctagagcttagctacacacacccctctcataactaagctcacctccttgaaaagcttccttaagaagattcctaaagaagctagagcttagctacacatacctctctaatagctaagctctcctccttgagatgagaagctag

SEQ ID NO: 7766 - DNA, 339 bp, Glycine max
  unsure (1)..(339): unsure at all n locations
ctgcagcttgangatatggagacccatacattgtgttcttgtggcgcgccggcgaaggtgcaaaacaattctccacatccacaaatcacatataaacccaccatcccctgttgcccactttcaactgagctcacgtactcccacgtagcccttatcctcgtttctttcaacactgggtccccatcaatcctcccaagcttccacaacatacgagtgattccacctcccatcattatgaactaacaataccaagccatatttgcaaaagcagaaaactctgcccacgacacaaaccattattacaatttttcatcatacaatactctcaaaacattctct

SEQ ID NO: 7767 - DNA, 209 bp, Glycine max
ggaggggaccaacaaacatccggagcctattatgcgagcacagcccgacagccagacccacgcccaacaccacaaacacggtgaatgggggcaggcgacacaaaaaactcagcgaagaaagcgggacaaacgcacacgcggaatagaggatgaccgcaacgaaaaaaggggactaaacccagggggccagggcaagaccgataaggaga

SEQ ID NO: 7768 - DNA, 406 bp, Glycine max
tcttcaaagagggcctaagtaattatgttggttggtttaagaacagggagttccttagaggagcataagattcttcaaaccaaagcaccataatgaagcaaaggatacaaaggaaatattattattatacattaatccatatacaaaagtcgcccttgatttaagtaaaaggaaacacaagtttgaaacttactggaacatacgaacaacaccattcatcttaaatgcatgttagaaaggaaatccgacaacctgaaagcatcatgttttaggttagtgaaatgaacaaaataaaagagaaaaggaaaggttaaggccagagataatgagaaggaaaagagcaacctgatgtcttttgcaattacggtatcaccatctgcagcccctagatgtcgcaaaactacct

SEQ ID NO: 7769 - DNA, 446 bp, Glycine max
  unsure (1)..(446): unsure at all n locations
agcttgccaatntagttnttgtcggtgaaatgatcatagtgggtctgagaagaggaaaanttgattatcctgctntgatgaataggaagcctgnggaaaatggagagaatgagaaggaaggaggaacccatgttgggactttcgttcctacatggccaaatttcccaccagctcaacaatatcaatacttagccaatatcaaccctcctcattacccaccaccctatcaaccaagaacgctcaatcatccacaaaggccacccctaaatcagccacaaagctcgcctgccacacatncaataccaaacaccacccttaacacaaccaaaacacccaccggggaaggatatttccagaaaagaagattgtagaattcaccccaatttccgtgtcgtatgctaacttactcccatatctactcaataatgcaatggtagccataaccc

SEQ ID NO: 7770 - DNA, 416 bp, Glycine max
tgtgctattccaagttcaattaccatacctttgtgttcgacaagtggcctcagatatcttaagaaggggggttgaattaagatattccaaactacttccccaattaaaaatctatttcactttttattcaagttataaattcccttaacaatgaacttcttaaatattgattcaaataaaacaatttgaatatgaatataaagcaataataaacaaaggagattaagggaagagaaagtgcaaactcagatttatactggttcggccacacccttgtgcctacgtccagtccccaagcaacccgcttgcgagttccactatcttgtaaattccttttacaagttctaaacacacaaggacaatccttcctttgtgtttagaattcctttacaacaagagacccacggtctcttaat

SEQ ID NO: 7771 - DNA, 347 bp, Glycine max
  unsure (1)..(347): unsure at all n locations
agctngctctanantacattgatgtttgtatttatgggaggaggttgtatgccgnttttgttttaagagtagtgtcccactggtaaaactaactttccaaatttttgccttcgcaggaaatggccccgaggaagcttgcctcatagaggtccaggaaggacaaggcagccgaaggaactatttccgctccggagtatgacagtcaccgctttatgagcgctgtacaccagcagcgcttcgaggccatcaagggatggtcgtttctccgggagcgacgcgtccagctcacggacgaccagtatactgatttccaggaagaaatatggcgccggccgggggcatcactg

SEQ ID NO: 7772 - DNA, 333 bp, Glycine max
cttgaaactcagctttcatgcttgagcagacttgtccaatgaatcaactgcttgatcttgaaagggtttctcaagctttaaattatctttggatagattttgaaatctcttcgtaggtttttataagtttttaagagaatcgatgagtgagataaaagttcatgataggctttcctaagagactcaaggtcataaaaaattacctcattgtcctagtatgattcggatccattagaagttgtgtctgctatcaggcatatgtttgtttcttcatcgtcttcatcaaacgaggtgtcatccaggtctttccccatgcacataagccttttgttt

SEQ ID NO: 7773 - DNA, 401 bp, Glycine max
  unsure (1)..(401): unsure at all n locations
agcttgtggtgcanaagattacatctatacattggattntttgatggggcagcctccaagactccaataagattccttgggtgaggtgggacatagtctgcctacctaaaagtaaaggtgggttatggatcaaagatttgattaaattcaacgaggctctgcttgctaaatgggggtgggagttggcaaataatcagaatcagttgtgggccacaattctattgtgtagatatggtggttggagggatttgatttctcataggaactgcagtttatagtcttcttggtggaaagacctcaatgttatcttcaagcagcatcaaagcaacacaatttgtaaaaatagctttattttggccatacgtaatgacgggccatggaatacaaaccaaatacttatt

SEQ ID NO: 7774 - DNA, 417 bp, Glycine max
tggtacctaatgtgtggttaactaggaaatgatgtttcttctggcatctcaatctcataattacattttctatgcatagcatacgtattcccgagtctttcatctctatgaaatgttgtcaaagtattggcgatcaaaattgtcattccttgggttatagtgttttatgaaaaaggttcatcaagtcaagttgaagcagggaagtaaccatcttgcaaaacattggggcaaaagatggatcgggttacatcaattctttgtctactgccaacacatggttgtgccaatttacaaaaaaaaagaacttgaggactattgatgtcaatgtttttccaatttcactttgacaagacacgatggaccatgttgttttgatgaaaatctaaattgagtcaaccccgtgtcctgtctaaaaat

SEQ ID NO: 7775 - DNA, 419 bp, Glycine max
  unsure (1)..(419): unsure at all n locations
tctaaactntgtacaagaatgaagctctgataccacttgttagacaagtggcctcagatatcttaagaagggggggttgaattaagatattccaaactgtttcccctaattaaaaatctatttcactttttactcaagttatgaattcccttaatgacaatcttcttaaatattaattcaaatgaagcaacttgaatatgaatataaagcaataataaataaaggagattaagggaagagaaaatgcaaactcagttttatactggttcggccacacccttgtgcctacgtccagtccccaagcaacccgcttgagagttccactatcttgtaaattccttttacaagttctaaacacacaaggacaatccttcctttgtgtttagagatcctttacaacaagagactcacagtctctt

SEQ ID NO: 7776 - DNA, 372 bp, Glycine max
aataagacattctgattatactgctttgatgaatgagatggctcgtgagaacgacaatcaatgataaggagtgtcgaactcttgttggaattttcatacatcctagtcaaaagtcctagcagctcgactatgctcatacgtacaccatataatccctactgactacacacgctcctggactccatcagacctccgacataaacgatggccgcccctgaatcggcctcaaagctcgacagtcacacatccaatgctagacactactcttaacgtcactcaaacactcaccggagaaggaattgtccctagaataagattgtaggattcacctccattttcgtagcgtttgctatcttactccgacttctactc

SEQ ID NO: 7777 - DNA, 327 bp, Glycine max
aggacctatcaatctcagcttgaccaattaaacgactataccttttactcggatgtctgatagagtccggtagtatatcgagaagctagatattgaatgtcgaacctctgatccaattcaaatgacaataactttttactcggatgtctaattgagtctcagcatataccaagacgctcgaaattgaatgttcaacctatgagcctattgcaacgacaatcacttgttactcgggtgtctgattgagatccgtcatatatctagacgctcgaactcgaatgttgaacctcttgagcaattcaaacgacaataactttatactcggat

SEQ ID NO: 7778 - DNA, 364 bp, Glycine max
ctctgagtcacctgccgcatcaagcttattagatgggtcgttcctaatttctctactattgcatcacctctcaatgagctagtgaagaacaatgtggcatttacctgcggtgaaaaacaagagcaagcctttgctttgctcaaagaaaagcttactaaggcacctgttctagctcttcctgacttttctaaaacttttgagctacaatgtgatgcctctggagtgggagttggagctgttttgttgcaaggtgggcaccctattgcttattttagtgaaaaactttatggtgccacccttaactaccccacctatgataaagagctctatgccttaataagagcactccgaacttgggaacatt

SEQ ID NO: 7779 - DNA, 410 bp, Glycine max
ttgaagggccaagagagactagtcgagagtttaaagcatgatattggaagacaagttgaaggcttgtcagaggtccaaaaggagtttgttcgagcaattgaacaagaccgaagaaacacatacgggtcatcattaaccaatacaaagagaagctaaatttagcttcaacccatgaacagaggctagaggacgagtatgcaaaggtatcagtcctgcaagcagaaagagaagcgagggagaaagtgatcaattcattgcctagagaagcaatgatgtggatggataggttcgttttcaccttgaatgggagtcaagagcttccaagactgctagccaaagctaaggcgatggcggacatgtactcggcccccgaggaagttcatgggctcctcgattattgtcagcacatg

SEQ ID NO: 7780 - DNA, 299 bp, Glycine max
  unsure (1)..(299): unsure at all n locations
ggctntanccttatgtagttcaccatgttgtttcctctatctgtaacaatctccccttttttggctttgatgatgccgaacatgaattcaacattgagtgcatttgaagagtcttgagattggattggagacttgatcacttaatcttatcctcagaaagtcttaacacttaagaagagattaattcatcatcattatcatatatgtcaatgtatatatatatatatatatcaattcatgatcatgtatatcaatcaagaattcaggcaatatctttttctcccacttttggcattaat

SEQ ID NO: 7781 - DNA, 403 bp, Glycine max
  unsure (1)..(403): unsure at all n locations
tgcacaatggaactgatggtttctcaacaacaaacttgataggctctggaaattttagctctgtctacaaaggaactcttgagttagaagacaaagttgttgcaataaaggtcctaaaccttcaaaaaaaaggagcacgcaagagtttcattgctgaatgcaatgcccttaaaagtattaaacatcgaaatctggttcagattttaacgtgttgctccagcacagattacaaaggccaagaatttaaagctttgatatttgagtacctgaaaaatgggagcctagaacagtggctgcatccaaggacattaactcctgaaaagccaggaacattgaaccttgaccaaagattaaatatcatgattgatgttgcntttgcaatacattatcttcatcatgaatg

SEQ ID NO: 7782 - DNA, 334 bp, Glycine max
  unsure (1)..(334): unsure at all n locations
agcgttgatgatatggccttcaccgacgaattgatctatggggcctaataagagcaactctgatcatcttggtgtgatgaatgccatataatattggcgcaaaagaagagggtgaggatgaatgagaaacccgtgctgagaccgccattcctatacatgctaattgtccaccggaccagcaatgtcattactcacacaataacaaaccttctccttacccactgaccagttatccacagaggccatccctataataagacacgaagcctacctaccgcacttncgatgaaacacaccgcctttttcattaaccagaacacccaccaagaaatga

SEQ ID NO: 7783 - DNA, 327 bp, Glycine max
  unsure (1)..(327): unsure at all n locations
tgcctgngcgagctgtcatgaccctaaatgccttgttttgctataaatatgatgtagctccattggagcttgtaggcctaggatcttcttcatcaatggattcctttgcttctctaaagatgaatggcagtggaatggagaaggaagagagagaggagacgccacttcaaggagaagatgagtctagaagaagcttaccaccataggaggccatggataagagcttggaggaagaaggagatgaatgaagggagagcaagagaagagcacgaaattttgtgcacacacatgacctctatttatagcctaagtgtcacacaaaattgg

SEQ ID NO: 7784 - DNA, 386 bp, Glycine max
tgaacctttatcatagcagacaacttctctttttctgaaaagggagtgctaataggtttagaatcagccattccaaacctcacaagtatcttctgaatgtagtccttttgagacaaaaatagccttttctgagttctgtccctatagatcaccattcctaagattttctttgcagccgctagatctttcatatcaaattcaccactcaagaggatcttcagattttgtatatcacacatgctttttgctacaataagcatgtcatctacatagagtagaagatagatcattgatccatcctccaccttgttgtgataaacacaacagtcatagaaacttctcttgaatccttggctggtgataaagctgtcaaacctcatgtacca

SEQ ID NO: 7785 - DNA, 326 bp, Glycine max
agcttgcctgttcgatgcattatttatgattgtccgagttatgctggggaacggttacgaacccagaatgggtttaagcaaagacaacagcggcataactagccttgataatgccaaaggaaatcgtgggaagtatgggttaggctatgggcccactcatgcagatgtaaagagaagcatctcgggaaggaagagcggtagtcaaagctcgcggttgagacaagaaggtgaacgaagcccgccctgccacataagtagaagctttataagcgcgggtctggcggacgaatgtcaagtggtcgcgatatacatgtcgcaaccttccc

SEQ ID NO: 7786 - DNA, 391 bp, Glycine max
tgtcaagccccccagactggacaagtgttgtctgggatgcttttgctaagttgtccgaagtgtacatacttttggctttgcaagcgaggtctgacgtgtcatgtgaggaaagcctctgtatttgacaactttgcccttttctgattgttggagaacgcattgaagacaaatgttatgttttgtctgttgatacagacatgtgcagtgtactcgcaacactcttgcatacatgtcactcgtggagtgggcacgtactagagacttgatgcatgggtgagtggggctacgtcgcgttgcacaaaattaaggcaccactttagctcccgctagttatcgaagagtctgtcttctctttaaatggagtggacgtttgatttgtagccaccgtcac

SEQ ID NO: 7787 - DNA, 316 bp, Glycine max
agctaggacttcctgagcttgggaacctcttcttgctcaggagtacccagacccaatcacctggttcaagcacgactttctttctgctattggtggcttggcttgcatagctggcaattttcttttcaattcgaaccttcacttgctcatgcaacttcttcacatactcagctttagcctgtgcatccttatgcttaaacatagcaatgttagacataggccacaaatcaagaggagtcaaaggaataaatccatacactatctcaaatggtgaacaattagttgtgctatggacatgccgattataagcaaactc

SEQ ID NO: 7788 - DNA, 394 bp, Glycine max
ttgagccaattcatacgacaataactttttactcgaatgtctgattgagtcccataatatatcgagacgatcgaaattgaatgttgaatctctgagcaaattcaaacgacaatagctttttactcggacgtctgattgagtcccgtaacatatcgagacgctcgaaattgaatgttgaacctctgagacaattcaaacgacaataactttttactcggatgtctgattgattcccgtaatatatcgagaccctcgaaattgaatgttgaagccctgagccaattcaaatgacaataaatttttactcggatgtctgattgagtcccgtaatatatcgagacgctcgaaattgaatgttgaacctctgagccaattcaaacgacaataacttttt

SEQ ID NO: 7789 - DNA, 436 bp, Glycine max
agcttaagaatatggaattgaacaaagctaacaaaattggtagcatgtagcaagcttcatgtgcttaatgattctcagacaatggtatgatttgtaacacaaaatgtcatatcaatggggaatttaaaccggagaaataacttaaaagagaaggggaaataactttttctctaaaacttttttaaatcacctttatattacactctcttttaaaaaaaataattcaacaacacctagaccatactatcctgtgatgtgcatgaaccatatcaataaagctatttttttactacctttcttcattcttcacttagtcaataatccattaatcttatttttcacactaaattaataatgttttgtttagcctcacgtataaataaatgagtttcactggttcatttatccttgcactgccatcgcgaacagggacaac

SEQ ID NO: 7790 - DNA, 414 bp, Glycine max
tgttgagaaattgtgcaaacaagagggaattggtgagacatgctattactagattttccacttcttatctaaccttggaaaggctccacaaagagaaagctaatattagaaagatgtttatttctgatgaatggatcttaaacaagttatctaaggagcctaaggggaaagaagctgcaaaggtagtgctcatgccttctttttggaatagtgtggtttacactcttaaagtcatggctccacttgtcaaagtgcttcgtcttgtggatggtgaaaggaaaccagccatgggctatatttatgaagcaatggacaaggcaaaagaaacaattatcaagtctttcaacaacaacgaaagcaagtacaaagatgtgtttgcaatcattgataaaagatgaaattgtcaacttcata

SEQ ID NO: 7791 - DNA, 433 bp, Glycine max
  unsure (1)..(433): unsure at all n locations
agcttgccacattacactcaagatattgatggtgatgaaagtgataattgcagtgaatatgcaaactacacaactacgacttgnggcctatttcctcggttctgcctttngaatccaatgcctggattaagaatagtggataaggttcaatgaaatgcagctcacaaaatgcaagctaaatcaattgcttctcatattggatcttcaaaagaggtattaatttgtctctatcttttttagtcataatttcacttcaggtgttgttatcttaatttcacctttcttattctgcagcaaggtagaactccttatgggaaaaaaagttaagggattaccagtctggctttacacaagaaaaagagattttggatattcttgtaaaatccaaccattgcatngacccatatcaaagagggtgcacttaacatgattc

SEQ ID NO: 7792 - DNA, 417 bp, Glycine max
  unsure (1)..(417): unsure at all n locations
ntgatagtgacatgacaaagttcccccaaaatgtcaatttaccttagtgccctcttccccctaacccaaccattgaacattttaaaattttaatagtaccatatgatttatctaattgggcttccaattatttctctcttataaagaacccaagtcaaatactagtattattcaagtatatgaacaattttttttttaaaaaaatggcataagggttaagactggaaaacagatcaattattattaggcgtttaattggcgcatgtgccagctgacagtctgtgtggttagtaaggttttgtagtttaattgtgtgcgcaagtgacattatcatgtggtgcacgaagcaagctgtcaaggcatgtcacatggtttacgaaatggaattgcgcaaatacaaacaaacaaagcagatgt

SEQ ID NO: 7793 - DNA, 388 bp, Glycine max
  unsure (1)..(388): unsure at all n locations
agctnttcgatgatgggaaagggatatgcatccttgtgtgtgccttggtgatgccagcgtacttagtgcacatatgccatttcccattggccttctttaccatgacgatgttggccagccaggtcgagtacctgacctctataatgccatgaaatttcgataactgaaaatagatgtttgatgtatttcttgtgttatttgattaatttgggttagttgaagtgttgggtgaattatctatatgcgatttcttgatgtggatgttaggttatgtgttgtttgatacatctgcattggaactgtgtaattttgagattgaccccaaacccatttcggtaaaatcacaatcttgaactcgtttattgttggatcaccttccaatttggac

SEQ ID NO: 7794 - DNA, 417 bp, Glycine max
tcaagagatcatccccttgacaacattcttggtgacatctcagcaggggtaacaactagacattctctcaaagatttatgcaataacatggcttttgtatctatgattgaacctcaaaatttaaatgaagccataatagatgaaaattggataatagctatgcaggaagaactaaaccaatttgaaagaaataatgttcgggagttagttgagaaaccttaaaactacccaatcattgggacaaaatgggtgtttagaaataaattagatgaaaatggcatagttataaggaataaggcgagattagtagccaaaggatataatcaagaagagggaatagattatgaggagacatacacttcagttgctagattagaagtcatcagaatgctattagcttatgcatccataatgaat

SEQ ID NO: 7795 - DNA, 353 bp, Glycine max
tatgagtcacctgacgcatgcaagctcgttctaaaccatatatagatttattatgcttgtgaaccaaatgctcgccactataagaggagaaaccttcaggttgtttcatataaacctcttcctctaaatcaccattaagaaaagttgttttcacatccatttgttgcaactcaaggtcaaaatgagcaactaatgtcaagattatacgaagagaatctttcttagatattggagaaaaaagtctctttgtaatctattacttgcttttgagaaaatcccttatcaacaagtcttgccctgtatctctcaatgttgcctaatgaatcccgagtggtcttaaatacccatttaca

SEQ ID NO: 7796 - DNA, 413 bp, Glycine max
tctgatctgcagggaatggaatttgcaacggaagattcagaatttccaccttctcactagcagctgccaaaaacagtggtgaacacctagacttgttcaattcatggaccatatctttatctctttgtaaaatgacttcaaccacattaagatctccactatggacagcctcatgcaaaggagtgtccccaagttcattcttctctattgttatctttttatctttcatcacatcatcatgtgttgacttcactaatgcatattgggaaagaatgaggttgaccatagtagtgttcttggaactcaacacaacatgaagtggagtgtgacctcttacatttcccctaataagaagttcatgaaagtgacaagaaatcaactctacaatcttttctctcccttaactgtgccac

SEQ ID NO: 7797 - DNA, 375 bp, Glycine max
  unsure (1)..(375): unsure at all n locations
agctctgagcaaattcaaacgacaataaccatttttgtctgatgtctgattgagtcccgtaaatatatcgagacgctcgaaatggaataccgaagctctgagcaaattcaaacaacaataactttttactcggatgttcgattgagtcccggaatatatcaggacgcttgaaattgaatgttgaagctctgaaaaaattcaaacgacaataactttttactcggaagtccgattgagtcccgtaatatatcgggacgcttgatattgaatgtngaagctctgagcacatccaaacgacaataaatntttactcggatgtcttgatgagaccgcgaatatatcgagacgctcgaaatggaataccgaagctctgag

SEQ ID NO: 7798 - DNA, 417 bp, Glycine max
tctatataagctgaaccattttatcaataaacggaagttgagttttattcagaaaattagagtttatctcttttatcttagtgagagtgattctcctaaattcttgagtgattcaagaacaccttggctgtatcaaaggactttcacaacctttgtgtgttgcccttgctggaaagagtgattctttccttcctttcatcatcacccttgttctttcaaaccacaattccagaaaatccacctctgcccagaattatctcgtggccataactcccattttacgcactcaaattaagtgattcttgagcctaaattgaatttcaaaacgagacctttcacctcgttttggaatcacctcatttggagccctgtagcttcagttattgccatttctatatttctgtccagccaccactt

SEQ ID NO: 7799 - DNA, 410 bp, Glycine max
agcttgatgatatggttttcaccatctaatgtatcaaagtgggtctgaaaagaggcaaatctgatcatcttgctttgataaatgcaaaaaaaaaaaaaaaaagttagggcaaataaagagggtgaggatggaagcccgtgctatgactgccattcctatacaaccaagtttcccaccaacccaacaatgtcattactcagccaataaccaaccttctccttacccaccgcccagttatccacaaaggccatccctaaaacaaccacaaagtctgtctttcgcacttctaatgacgaacatcacctttagcacaaaccaagagcaccaaccaagaaatgtaatttgcagcgagaaagcctgtagaattcaccccaattccagtgtcctatgctgacttgtcccacatttac

SEQ ID NO: 7800 - DNA, 406 bp, Glycine max
  unsure (1)..(406): unsure at all n locations
tggtgcatgtgatttgtatatctccagcttgagggggagtgttgaatgtgtgtgtaatttggtgtatagtagctttcatgtttcagctttatgcagagaggacagctgtgtgtgtcattgtgaacagctgtccctctcattctctttgtactctatatatatatttattttgaaagcaatcaaagtgtggtatgtgtgagattttccacacagaattcaaattctaagtgttatgattaaagcaacccccaaagaggccacaccttgggctagtggtaccacaattaagtcgactttccaacatcaacatgttttgaattatattgcactcccaaatagaagcattacgactatacctcaggagagagagaatagaaatagtnagaggatgacattataactcaac

SEQ ID NO: 7801 - DNA, 345 bp, Glycine max
agctctgcggatttggtcttcgccagtgaaatgatctgaatggatctgaaaagaggcaaatctaatcatcctgcttatacgaatgagaaaactggggcaaataaagagggtgaggatgagggagaaacccatgctgtgactgccattcctatacggccaaatttcccaccaaacccaacaatgtcattactcattcaataacaaaccaactccttacccaccacccatgtatccacaaaggccatccctaaatcaaccacaaagcctgtctaccgcactttcaatgacgaagaccacctttatcacaaaccagaaaaaaaacaccagccaagacatgaattttgc

SEQ ID NO: 7802 - DNA, 385 bp, Glycine max
tttgtgtttatcgtattataaaaggcgggttatttatttattttttggtaaaaactactaggaatatcaaagatttaatgtaaagaaaacttttaaataggctaccaggccaaactaggcttttaaaaaggtcaggccgagtcaaaataaaagcttttgataggctataggccagactcaggcctcaaaaattaatcgtaggctaggctcaagttttttaaagcctggcctggcctggcctatttcccacccatattgctaaggaggggaaacagattcagtgactttagggcaggaaagtctccgtcactttcctcttttataagccatttggaacttggactagactttgccacttgttttaaacataatattaatttaatta

SEQ ID NO: 7803 - DNA, 356 bp, Glycine max
  unsure (1)..(356): unsure at all n locations
agcttaaggatggaatacttacttgttggtgttgaacaaaagtgcgaaacggaatcaaaaaatgcgaaaaatgatgaccctagggctgcaaactcgtaaatcccgtgggtatggctcttgaaagggggaaaagaagtttttgaatgcaaaaacgtcccccctttcgtcatctttatattttggtgcaggggtggctcgcccaggcgagctaacctgcattttttttttagagaggaacattaaccatgcccnctccttcctcatggtttagcgtcttgcttaacttgaacttacttaagttagagttaggcattgattacttatttttaaaacaaacaaccagcaatagaaaactg

SEQ ID NO: 7804 - DNA, 380 bp, Glycine max
tcagtggcttagtgaagatgaagaggtaaaagtgactcaacaggttgaggtgtgtctcaccattgggagatataatgacaaggtgctgtgtgatgtggtcccaatggaagcgacccatgtgctgttaggaagatcgtggcagtatgataccaaggcagtgcatgatggcttcaccaacaacatctctttcaagcaagctgacaagaagattgttctcaaaccgttatctcctcaagaggtttgtgaggatcagataaaaatgagagaaaagaaaaagagtgagacacttgagaggaaaaagagtgagacacttgagaaggaaaagtgaggaaagaaaaagatgaaacattgagaggaaaagaagaaaacaatgagtgaaa

SEQ ID NO: 7805 - DNA, 321 bp, Glycine max
  unsure (1)..(321): unsure at all n locations
agctnttgttccttttttataaaaagataatttcttttactcatcacgctgtctaaaaaggccttgatgtggatctaagtgctctgatcattcattatcatattcatgatttggtggcatgctcaccactcgttggttgtttatggaactcaccataactaaaaaagcacaaaagcacccctataacacccaatccaaatagtagatggataacgaagaggagtgccagatcagatgaaggccgacatgtccgccttaacagatcatatggcttctatcacagacgccatgctaaaaattcgaaatcaataaatacaatgc

SEQ ID NO: 7806 - DNA, 375 bp, Glycine max
tttcgattcattctatgtacccgtagtggtccacattgtgtttcgtgcatttttattctcgttttgtttactttttatacccctgttgacgtgcttaagccattttacttaagtcatttctcgcttaacttaaaaataaaataaatttccaccgaacgtttgaattgtattatccattaacttcggttaaaataaattccgaccgttcggtcgtgccgtaaccacgttggaaatcaaaaagaggtaaaaaataatataataatcaaaaagacatcttttagtaaaataaagcggaaaatcaatcggacgttttctctttgggatttctcattcttaatcgaattgattaataactaaagtgaaactaaaggctaa

SEQ ID NO: 7807 - DNA, 343 bp, Glycine max
  unsure (1)..(343): unsure at all n locations
agcttctactgttgacaggatatgttatactatctgggatatttcgcccttaaaggttcctgttccatgagccagcagtcccatttaacccatgcaattttcttctgatcaaggccaccaccccataggaacctcctctggatttgggtcagtttttccgctaccctgttaggaattctgganaaaaaaaaaaagatagaaaataagaatagaggttagagtttcttttatgagggtcactcttcccccataagatagatgtgtctgcttccacctagacaatttagattcagtctttcttaggattggatcccataacccacagcgccttggattagccccg

SEQ ID NO: 7808 - DNA, 400 bp, Glycine max
tcatctactatatccctttttttacataaatatctagcaaataaaatggaatatgaatttatcaaagacctcaacacagatcatgatgattggtttctaaaagtgtgtattgttcgattgtggaatatttataacaagaaagatgagcaacacccaatgttattggaaatgatgttgctagatgaaaatgtaactaataacgaatgtcgaattgctcaaaaacaaataaaattaggaaattttgtagcacatgattaacctcagtcgaactcaaaaatatgattcaatatggttcctacgttcattcacttataaacacaaagggggaattttatcgaatagtttgtgagcgattacaaaggaatgcgaaaacacaaaaacaaaattcaagaaacaaaac

SEQ ID NO: 7809 - DNA, 370 bp, Glycine max
  unsure (1)..(370): unsure at all n locations
agcttagcacgataaanaatgtttatgaagatactcaaaggcacgctcgacgcgaaatctcgtgctaagcgcgtgaacaccttactaagcctagacagtatcgcgctcagtgagtgatcgccccgcttagcccagaggagcgcgcttagcgcgaagtcacatggatnttaagctaccttgggtctataanaggagtaggaagcaaaggagaaaaacacaccgaaactcagaactttctattaaatacacctaaagcctcaacatctctcataggtgaaatgcctttctctcgccattctcctctcttactttatccattcattttcttctttcatttacattaactcctaaaagggaaagtctcttatga

SEQ ID NO: 7810 - DNA, 401 bp, Glycine max
tgggctttagcctgcctaccaattttgatctcttgcaagaacaaagggaaacactaagaaactacttcatcatgccatcggaagaaattcttcactcgatgctgaaaaggctatctctacactagcacaacactaacttgacttacgagaaagtatcatcctcaattcctcataaaacaagcatcctgaatgattgagctcaagcaaagcaccctaagagcaagaagtttgaccaattttgacaaagcctcttggtctactacttctgaaaagtcttcttactactctagttaaaaagtatagtttaaatatggacttctatcctgtttgttctcatctgcttacaaaccaggtaagaagtagaaatctattgttaagatgaatgcatgaatcacatctca

SEQ ID NO: 7811 - DNA, 391 bp, Glycine max
tcctggagctcaagaacctgagctgcggctgaagcaaatcaacgaaacacttatgtttcatgtccgaactgccccataaagctataggcctgaacgataatacatacttgcccgctattactactgtccatgtcactaccatatacgaccgtttctggaatatagcagactctcgatacccatgactgaatccttgaaacaaacaaacgactaaaattttactcggtgaacgtttattctggggcactcttactctttaaatgagcctagcttcatctaaccaataaaatatctttgtatagtgaccatgaccacaaaattggataccccgatgggatctcaacgaaaaagccagcgctaattcctttctatgatgcgtcgtgactcattt

SEQ ID NO: 7812 - DNA, 336 bp, Glycine max
tccatgtttaatcacgagcgtctcgatatactacgggacactatcagacattcgagtccaaagctattgtcgtttgacttttcttacagctttcgttatcgatttcgagcgtctcgatatattatagggctcaatcggacatccgagttaaaagatattgtcggttgactattgttatagattccgttatcaatttcgagagtcgtcatatattacagggctcaatcgaacatccgagtaaaaagttattgtcgttagatctttctcagagcttccgttttcaattacgagcgtctcgatattcgacgcgacacaatcggacattcgagtcaaaag

SEQ ID NO: 7813 - DNA, 422 bp, Glycine max
agcttaggtaatcgattacaagtattgtgtattcgattacacaagtttaaaatgatttgaaaatatttaaacacaagttgtaactcttgaaatttgaaatcttaacgttttaaaacattggtaatcgattacatgattatggtaatcgattacagctttgtaaatcagttttgaaaacaatactggctactagtaatcgattaccagagagtaaaactctttggtaaaagattttgtgaaaaattcttgtgctactcaatgttttgaaaaacttttttagtacttatcttgattgagtcttctcttgagtcttgaaacttgattgaatcttgaaacttgattattcttgaagctttttgactcttgattctttggaacttgattaactcttgattctttggcatcatcaaaataatcttggg

SEQ ID NO: 7814 - DNA, 314 bp, Glycine max
aaacattgaacagatgaaaataactttcaatacatatattaaatgtttacatcgagtgctcagtataaattcccaacataggattttagccctccattacaagggagtagcttttagaaatatgagaacggttttagagaaattaccacatgacgaagtagtggggatgtctcctccacttctaacaacctagaaaataaatctaacacctagaatctacctaaaagtcaggacctgcgcttacatgctcaactattcctctgatctttgcacacaatatatagtgcaattcaaacctctttcacattgacata

SEQ ID NO: 7815 - DNA, 363 bp, Glycine max
  unsure (1)..(363): unsure at all n locations
agcttagggatggaacacttacttgttggtgttgatctanttcgcanaacggaatcaaaaaatgcgaaaaatgatgaccctagggctgcaaactcgtcaatcccgtgggtatggcttttgaaaggagggaaaagaagtttttgaatgcaaaaacgtccccccttccgtcattcttataatttggtgcaggggtggctcgcccaggcgagctaacctacattttttttttgaggggaacattaaccatgtcccctcctttctcatggattagcgtcttgcctaacttgaacttacttatgttagaattaggcgttgattacttatttttactttntaaaacaaacaaatagtaaaagaaaactg

SEQ ID NO: 7816 - DNA, 417 bp, Glycine max
tgaagaggcaattgatgtgttgcattctcaatcagtatccttcagcattttcggtgaaaaagtttcttcgcctgtggtttcgaaattgatacaggcttttgaatcaaaagtacaagaagatgagcatgagacagaaagtagggattccagtgatgttctgtcatcatcaaactcatttattatgttaactaaagagcaaattggagatttgaaaaaattgctttcaaagtggaagctgaatgttcagattgcaggtacattattcaatggggagcgagatgatcggaaaactggtgatgcaaagtacagtgatctcaaggaccagtttgaacaattgaagcaacattgctcagatttggaagcatccaacattgaacttgcagttcaatatgaaactgcaaagcaacttctgggtga

SEQ ID NO: 7817 - DNA, 449 bp, Glycine max
  unsure (1)..(449): unsure at all n locations
caaagtcacctgacgctgcagcttttggcggaaattaagactattttttttctttcctctgcgcgatggttcaagacagatcatttanacccgataaaaattgagtaactccatgttctgtgaacttaaataactgaattaaataatttgattatgtaactgctgattaaactatatgcatgtattttgagaaaggaaaaatctgcatatgtatggcagccatgtgtggaacaaggtgcaagacacaatggggggatagaaagtatcgttgtctagcctacatgataaacaatgtgcatacagaaaatatatattcaagctacctgtagaactgcaagccatttctagagtaaatattgaacttcctcttgcatgaatttcctcattacaaagcaagccatgctctctcaaactacagacctcatccacagatgtaagatggaattgac

SEQ ID NO: 7818 - DNA, 405 bp, Glycine max
  unsure (1)..(405): unsure at all n locations
agcttgatgtttctactttcggcagccttgattttcatcatnttgattttcaaagactcacagctctttgattaccatgctacccttgcagaagaacatatcattggtgtgcctcttttgaccctgactaatcaacattagtatggtaccaatggatgtatcacaatgggcagatccactcatgactgtagttccttcatgctttggagtctcgttttgcccccactgcttttggtgatctcgacgacaagctctttaaacttattcaagccttctttattattgattatttaagcaattttgaggctgtagttaactgctttgtggggctaaacccctctttcttgcttagctgttttatctcgaaattgaaataaaaaattaagcatgaagtcctagctcact

SEQ ID NO: 7819 - DNA, 420 bp, Glycine max
tcttatccaaggcttatcttggtggggaagctccttcttccaatgcttattccctagtggatggcgcctcctctctcctcttctcctttgtcttcagctgcatctccatggtggaaaatcaccatcaaagaacctcattgaagctcaaagatccagcctccatagaagccccacaagcaagcttccatcaagtggtaatcagagcacaagagcttcaagtaggtgctccttaatcctccattaattttttttgctttaccttctcttccattgttgtttcttcattttttctccatgtatctccccatatgtattgtgctaaatttttttaacttgattctttagagtttccaccgattaaacttgctataaaagctacatttgattttctatgggtcaaatttcttgttcttgttcttg

SEQ ID NO: 7820 - DNA, 336 bp, Glycine max
gacgcgtgcgcgcgcaagcaataagattactagaacttgtgttttcgtttatactagcttatatggatgcgtaaatatttaaacacatggagaaactcttgaaacatgataccttatcattttataacaagggctaacgattacttgagtgtgcgtttcgactactgtactgataatcagttatgtaatcaacacgggatacacataatcgattgccatgaagtaaatctcttcgtacatagaatttgcgaaagaaaatggtgctactctgcgttatgaaaagcaaaatgagacatatcttgattgaaataatatctgagccagagacctgatgac

SEQ ID NO: 7821 - DNA, 404 bp, Glycine max
tcaagatagctagggaacttcctcaaataattgatgacaatgttgaaggattctgtgacaaattaatgagtgttgttgggtttgagaacaaggagtacaacaagctgttttgggctgtacatccaggggggccagccatcttgaaccgcattgagaagagacttgatttgttgccagagaagctgagtgcaagtagacgggctctcatggattatggcaatgctagcagtaacaccattgtgtatgtgctggagtttatgatagaggaaagtctcaagattagaaaggatggcagaggagatcttgaatggggcttgatacttgcttttggacccgggattacatttgagggaattctggccaggaacttgtgtgcttgaaccctctcacacacaaatgtggca

SEQ ID NO: 7822 - DNA, 346 bp, Glycine max
agcttgctagagctggaaagagcatttgtatctcggtttaatattttgcatctaataggtgtcgactcggactattggctgtgttaacagtcatgtatgtgctggtgttgatattaactatactagcttcaccaccaggatatttgcataggttgtgctactttctctttatattgctggtcgaatttgcatcagtattgaattattattacaaatatcgcaagtatcacaggaatagacgtccaatatgaaccaccgtacagatgtgaggtgtgtcaaagacaaataatatgaacaaattttagtataccatacttaacttacgaagagaagaatataattcaat

SEQ ID NO: 7823 - DNA, 409 bp, Glycine max
  unsure (1)..(409): unsure at all n locations
tccaaaggtttattattcactctcagntatgaatttgcaagaaatgattgacgttcgttcgtgatgatttctaggaaagcattaagagttaaaaaaacattctgtgagcttaagattcaaatgaacaatagtgaataagacacatactatggcaaatgttttttaaatgttttagtcatatgaatatttgtaaaggctcaagatcaataactttggtggtttatttctcaattggttggaaaattctttattatctaacttagtgttactaaattttaatgggtatatatatttccaaattacataaacttcattttgcctttgaactaccactgaataagagacaaaacaatgtcacaggctactgcacaacaaatntttttaaaaaaaaattacaaccaaatacagg

SEQ ID NO: 7824 - DNA, 316 bp, Glycine max
aactgcggcaatatgctgtaccctaagcctgcgcactacttcttatcggcgggtctggctcaagaacgggagcaacagaggtctgatactgctgggccgccccccttgggtcactctctagaaactgggtgcatgcagtcgctgcatgacaccagctaacctagattgcaaatgggaggcgaacgctatacacgttcctaacgattcaacggaggcaccacgcgccttacgcgagcttacaaatgcaacaattctgcgatgatcacacttcattagctctcctcgctgacgacaaggagagaaattccgctgaaac

SEQ ID NO: 7825 - DNA, 406 bp, Glycine max
  unsure (1)..(406): unsure at all n locations
tgctaacagtagtcaactgacacattatgtttgctaaaaaaaaaactgacatatattatgtaggtactattcattcaagcatgctaacagtggacaactgaacatatattctgaacatacttgggttcatggatgcagtggctcgtgatgatttgggtaaagatgttattgacaaagaagtggtggagaaggtcagccaagagtttttgtgaaatcaactctggttgtctccaaatgaattgctatatgatttgatttattgctttaacaattgtcaattgacaatgcatggtaccatgatacgtatcccagaattgctagttattcacccactgggcacaattttcatctagagctttgttcttctagttctaaactgttgncggtggatactatatactgatca

SEQ ID NO: 7826 - DNA, 457 bp, Glycine max
  unsure (1)..(457): unsure at all n locations
agctntgagcaaaatcaaacgacaataacttttatctcggatgtccgattgagtcccgtaatatatcgagactcacgaaatttaaaacagaagctctgagaaaattcaaacgacaataactttntaatcgcatgtccgattgtgtcccgtagtatatcaagactcttgaaattcagaatagaagctctgatcaaaatcaatcgacaataacgttttactcggatgtccgaagaaatccagtaatatatcaagacgcttgtaattgaaaacggaagctctgagttaattcaaacgacaataactctntactcggatttctgaatgaatcccgcaatatatcaagacgcttgtaatagaagacggatgctctgagccaattaaacacgaaataatnttctactcggatgtgcgaatgaattccctaatatattgagacactcgtaattaaaacaggagc

SEQ ID NO: 7827 - DNA, 299 bp, Glycine max
  unsure (1)..(299): unsure at all n locations
tgcattnggaattgcgaaagccccactccatcattaggattagtacctgacatctcaaacaaacaaatcaaacgtaacaagacaattatagttgttgtttgaatacctcacccactcaagtgtatcacacaattatggcttttctctaatgaaacactcttgccttttaccactctaattccccttgagttcttaggtaattcaagagattatggccacaacaaagaacaattcaccatatgtgtaaggtaaggctagagagacacagaaaagttaaccagaaaaagttaacatgtttt

SEQ ID NO: 7828 - DNA, 150 bp, Glycine max
  unsure (1)..(150): unsure at all n locations
tgtgcattgaaggtgtcgatctgtttccaccttgacccttagnggaactgatgtcatcctacatggaagatttacggcgggaacctacttctcgttggatgaaaacctggatgactgcctcatttacctatacaatgacctgatggacct

SEQ ID NO: 7829 - DNA, 304 bp, Glycine max
ttgactagttcataataaacacgtacattttttagacatgactggaataagaatggagcttttaaatgcttgaacagcatccaaaacttctcatttgagaaaggtggccgcccctgaataatgaccggtgtaagtccaataattctcaatgccgagaccgtgggaaatccacttcctattctatagttaccgtttcaggagctctattcaccagggaaacttcgactctatcaacgcatggtcgctttttcataatctattcggcctcctacggtcgaccataatactgaccttcaagctgaat

SEQ ID NO: 7830 - DNA, 343 bp, Glycine max
  unsure (1)..(343): unsure at all n locations
agcttctccttccttntcctataaatatgtgtaggagggaagaacaaaaatgttcaaccctcctggtatctaagaatcacttaaaattagtgagaaaaattgtttgcgtgaagaaaattctaaccgagacacttactgaatgctttcgagactgttccgtgggtgatttcgcaaagatattcaatcgctcttcgtcattcttcggtcttcaaccggtgagttcccgaaatcgaactttncaattcattctatgtacccttagtggctctcattcgttgcgcgtgcttctattatcatttcatttactttacgtacccccgtttgacatactttagtcatttat

SEQ ID NO: 7831 - DNA, 391 bp, Glycine max
tgtcgctagtgttagtcgatgagtatgactaacttttgtgtataaaacctgtgtatattgtatcaaactttcccaatttatggttgttttgtaatactataagtactttttgtaaatataggtaatagataatttatacttttgttttgtgcgtttaataatcaatttctctcaatttcaagttaaataggcaactttggcaaagtgttgtttttcactcttttgctaagccaagctgctggcttagcgagaattcgctaagcgcaaccttcagcggctaagcgcgaggaagaatccagaagaagatgagctgtcaagttcgctaagcgcaccgctccagtcatcaagtgcactgcttcagctcatccgctaagtgaaacaagcgtgctaa

SEQ ID NO: 7832 - DNA, 353 bp, Glycine max
gagcgttttgaacgggatcaatatatgcagtgtcatttatttaaggatgaagatgtggtacgtgatatcttttggtgtcaccctgatgcacagaagttatgcaatgtatgtatattggtgttcttgatagatagtacctacaaaacaaacaggtatagactcccactacttgactttgttggtgtgacaccaacggggatgacattctctgatggatttgcatatctggagggtgaacgtgttaataatgtggtatgggctttagaacaggttctacgtttttttctaacacgtgatggtatccctggagttattgtgactgacaaagacctagcattgatgaatgctgagaa

SEQ ID NO: 7833 - DNA, 400 bp, Glycine max
tgctctaaatttacattgatgtttgtatttatgggaggaggttatatgccatttttgctttaaggatagtgtcccactggtaaaattaactttccaaatgtttgccttcgcaggaatggccccgaggaagcttgcctcaaagaggtccaggaaagacaaggcggccgaaggaactagttccgctccggagtacgacagtcaccgctttatgagcgctgtacaccagcagcgcttcgaagccatcaagggatggtcgtttctccgggagcgacgcgtccagctcagggacgacgagtatactgattttcaggaggaaatagggcgccggcggtgggcaccactggttactcctatggccaagtttgatctagaaatagacctttgagtttatgccaatgct

SEQ ID NO: 7834 - DNA, 413 bp, Glycine max
  unsure (1)..(413): unsure at all n locations
gagctctcaaacaattgtgcttaggaaccgtggcttatttttggacttccttgatcttaatcttcttgctgctactaaagaagaaagcaatagccatgctgactctaacagtaacagaccctggtggatagtagaagacaaccacaaacaggaggcactggtgggccttatctcatagccaaaggcgacatactttattgttccatcagtgctgctgcaacttcagagtgaagattaaaactgtatagaaatggttctgtattcattccattcattctatacaggatatgtatnttcttcttcctcttcagggaatttatgtttctgttcagaataatgaagcagttcataaaatagtgaactcttccttttttgtttttagatctatttttcgatacattagattacttttt

SEQ ID NO: 7835 - DNA, 417 bp, Glycine max
ctcagcttgctacaagattctccttgcctggcacttcaaaaccttctggttgggtcatatagatgtcttcctctaaatccgcatgcaagaatgcagttttaacatctaactgctccaagtgaagattctctgcagctactatgctcagaataactctgatggtagtcatctttacaaatggagagaagatctctgtgaaatcaattccttgtttctgctgaaaccctttcaccacaagtctcgccttgtatcttcttctaccgttagattcttcctttaacctatagacccacctattctgtaatgctttcttttcttctggaaaattagttaaagaccacgtattattcttctgaagggatgtcatctcatatttcatcgctagctcccactcaatagtgtcattcccctgtttag

SEQ ID NO: 7836 - DNA, 321 bp, Glycine max
  unsure (1)..(321): unsure at all n locations
aagaacctgagctgcgcgtaaatgcatctattccatttatttttttagcgtaaactacgataaaattttttccttcgactgttttgacatatagagtgtgctcatgatgtcataagtaaaatctatccttcacaatataggggtgctttttagctatccaagcccgtggtgcttgcttaacccatataaagctatctttagcttggagaccatctcgttatcaccctatagaacatctctccgtgtgtgntatacatacacagtctgtgtcatttgttcgagaagaaatgcgcctttgacatctaactgatacacattcct

SEQ ID NO: 7837 - DNA, 385 bp, Glycine max
  unsure (1)..(385): unsure at all n locations
nggagaggatgcttcaatggaggaaaagaatgagggagagattgagagtggggggagcacgaaattgaaggaagataaagggagagaagttgaactttgagttgtgtgtcacaagactctcattcatcatagttacaacaagtgttacacatgcttctatttatagactaggtagcttccttgagatgctttcttgagaaaacttccttgagaagcttctttgagaaaacttccatgagaagctagagcttatctacacacacccatctaataactaagctcaccttcttgagaagagaagctagagcttagctacacacccttataatagctaagctcaccccctgcacaaaatactgaaaatacataaaaagtccctatacaa

SEQ ID NO: 7838 - DNA, 386 bp, Glycine max
tgggttcctaggcctagaatagcattcgggcattcattttatatccttcatgctgtccctatacatataaaacagtcccacaacccaaagctcacaaaaccatgctcatatgtcgttgaggcatttcaccgagcacttggtgggcgcatgtttaggcacgaatatcaagagaatggggacaatgtggcacgcgccattacttcagaatacaccctaggccaaggccatcccttacaacccctcaattcaacaaaaacaagcaacaatttgaggataaatccctcacgtttcttagcaaacacatgcaatttagagcaccaaaatacatcaatggaaagctagaaagcccaagaatgaggtacttacttgttggagacgaataatag

SEQ ID NO: 7839 - DNA, 419 bp, Glycine max
tcctacaattggacaatagtggtgagcctttcaacatcaccacccaagtagtgtttgattctgctgccattcacagtctctgtcctctttgtggctggatccttcaataccacaactccatgtggaatgacttcatttaagatgaatgatctggaccacttagattttagcttccctggaaacaatctcaatctagaattaaataacaaaacctgttgtccaagcagaaattttttatcaaaagctttttatcatgacaaactttaactctttgcatataaagcttggaattctcataatcttgaaaccttaattcctccaattcatgaagttggagcttcctatgttcaccagctctgtttagataaaaattcaaaaacttcgatgccgagtaggttgtgtgctccaacacaacaggt

SEQ ID NO: 7840 - DNA, 372 bp, Glycine max
agcttaatgtagtctaggaggggccataatgtttctacaaagatgagactaataagtagaattagtctaaatcctatccacaaccaatgactaaaccctgtgctaatattgctagaccattatggtaatgagtaacaaaatccgtctccaaattcctgagccatgtccacaatataaaaattgcatcatccaacactgtgttagcattgaaagtgtcatgtgagaagatgatgttatttctgtgtctccaaatagtccatgtcaatgccatccaccaccacttacacctgttagcctgtaagccgtccgacattccaagtacgtgttggaggaaatgttgttttggattaaagcggaaaacacccacaatgc

SEQ ID NO: 7841 - DNA, 403 bp, Glycine max
tttgaaaaatatttttttttttatcgccaagtcagtgaaaatcaaacatatattatacatcggcatgcttgtaatatggacaaatgaattataccaaagcagttcatttacatgattaaacgagctcaatcatataatatgtcttgccattttaaacaattttaattaataactaccaacagaatgagtataatgatataatgtatatttgaaaaatacttgttaaacattaaatataacattttccattaatattaactctttaaggaaaattaaatacttctaaaaatgttaagatgctagatatttatgcttttatttgataatatttttttttactttcttaatttaaaattgtttaggaaagtaaacattttcctaaaataagtgttggtttatatac

SEQ ID NO: 7842 - DNA, 444 bp, Glycine max
  unsure (1)..(444): unsure at all n locations
agcttgtcggtgaannattgattaaatttattgtttctaanaatgtagaagagaagggaagatgaggttttacaatagagagagcaagagaaagaaagtgagaataagagagagaaagggccagtgcgctgcccaataagataagagagacaaaaagcatgaatttgaaaaggtgaaaccattcaaaatcgtctttgcattgggttcaattatgatggttnntttgaataaccgtccttaaatttacaattccaagacaactgtttgaaaatcgtctttgtaattaatgaacttaattacaaaattgccatgacattatcttcaaagacgatatctgtcaaccatctttggtggtggtggtgaataaatatttttggtagagtgtctagtgatactcatgattcaagnttcatctcatctttatttctaaccaaactcataggg

SEQ ID NO: 7843 - DNA, 404 bp, Glycine max
tccttttagtgcgtcatgtttaaaaccgagctcgatggtggtacgagcctttgatggtactcggcgggaagtgatgggggaaatcgacattcccattcagataggcccccacacttgcaatgtggtgtttcaagtgatggacataaatcccgcctatagctgtctcttggggagaccttggattcatgtgctgggagtggtcccttcaacgcttcaccagaaattgaagttcgcagtgggtagacttttggtgatagtatcgggtgaagaggatatgttggtgagctgcccctcctccgcaccatacgtagaagcggcgaaagaatcattggaaatggctttccaatccttcgaggtggtgagctgctcctttgtagaaccaagtccgttgctaccttctctct

SEQ ID NO: 7844 - DNA, 244 bp, Glycine max
acgactgagaaaacgggggcaaactgatgagggggaaagaacaggagaaacccttgctgagactgctgttcttataccgtcacactcaccaccaagcccatcatgtcattactcagccaatatcaacccttgtacttcccaccatccagtcattcacaaatgacctcccgtgtgttacacaaaaaccgctcctagccgattttcaatgacaaatgcgcgctctagcattcactcaatacaccta

SEQ ID NO: 7845 - DNA, 401 bp, Glycine max
  unsure (1)..(401): unsure at all n locations
ttcttgagaagcttctatggaggctggatatttaagcttcaataaggtccttcaatggtgattttccaccatggagatgcagcggaagataaaggagaagaagtgagaggaggcgccatccactacgaataagccatggaaggagaagcttcaccaccaagaaagtgtcttggataagaagcttagaaaggaagcttcaatggaggaagagaatgagagagagagagagagagagagagagagagagagagagagagagagagagagagtggcntggaaaattgaaggaagggagacaagttgaactttgaagtgtgtctcacaagactctcattcatcaaagttgtgaaaagtgttacacatgtttctatttatagcctangtcactaactaaaatgaaa

SEQ ID NO: 7846 - DNA, 321 bp, Glycine max
  unsure (1)..(321): unsure at all n locations
agcttggcgagctcaaccatgcactacaagatagatatgttttcacatccaattttaaccaaaccaatgctaacaaaaaggccagtgacattgatgttaatgtgacgatattaacattggttcttaaaaactgatgttattttatcaattgttaaaaaccgatattgtatgtatatgccaatatctttcaatatctcttttatacaaaaatcgatgttacataaaaaccaatcttggtatgtttggtaaattaactagcctaanttctatgcatggcaaccgggtgatacatggaccggtattgtattttctaccccgtcc

SEQ ID NO: 7847 - DNA, 143 bp, Glycine max
tatagttcgaattgtggactgtgtttgtcctatcccgtgaaaagtctaagcaccttgaaatggtgttgatcgatggaagggtatgttgtgatttctcctttgtttcgtttgctaatgccacaacgcttatgctccgctttgtt

SEQ ID NO: 7848 - DNA, 306 bp, Glycine max
tggaggtacacgagaagggaagatgatgtattacaatctaatgcgcatgatatggaaggggagaatatcatagagatacggccatctgcgctgcccagtacagatctgagagaccaagagcatgtattggatgaggtgaaaacattcagactcgactttggtcgggttcaatattgatgtgtcgtttgactaaccgtccttgatggatcactatcgagacaactgttagagagtcgtcttgcctcgaccgcactaatttcttagtgtctgacattatcttcacgactatctctgcaaacatctttg

SEQ ID NO: 7849 - DNA, 235 bp, Glycine max
  unsure (1)..(235): unsure at all n locations
ctgcagcatgcacttgggagctaacccgcacttctatttattgtttntacaccaattgttaaccaaaccaatgttaacaaaaaaggccgtgacattgatgttaatgtgacgatattcacattggttcataaaaaccgatgttattctatcaatccgtaaaaaccgcaattgcacgattatgccaacatccttctaatatgctcataatacaaaaatcggagctacactaaaacca

SEQ ID NO: 7850 - DNA, 375 bp, Glycine max
  unsure (1)..(375): unsure at all n locations
agctntagtcacgtgacgtgtaagagtatgaatggtgtattgaatggngattcacacaagtagttaaagatttaatatgaacttatacttattttatgggtgtgtgtgaatctctcataattcactttcttcacttggtggacaaccagcttctccaagaaaatattttgatgtgttacaagaaagtttgctattatagtgggctaaaagtttattgtactagcgaaaacccactctaaattgatggcttacaatggatcaaaagttcattgtgtaagtttatcaacgaccccaaaaaagttctttgttataggatgagttaagcccactataactcgacgataatatagtgagtttagtcgtcaataatttgac

SEQ ID NO: 7851 - DNA, 416 bp, Glycine max
tagtgaatcatccatgtgacttgtcattcttgctaagtgatccatctcgatgtgcatcatccttttcatgaacttatgacaactgtgaacttgagaattggccaataatttttttttggaatgtatgcaattatcttatgtattgtgatgtaattagttacttttccttgaggacaaacaaagctttaaatttgagggagtttgataacgactataggtatatttttggattaaatcatataggaattgttaattattctctcatatttcttcatttttatgtaaataattgaaatttaacatcaattaagtttttatgtagaaagtagtcgaatttgtgaattcacaagtgcttggtgaataattgtcatagaaaaacaaaagaatgtccgagaaagcaaattgaagatatgaat

SEQ ID NO: 7852 - DNA, 425 bp, Glycine max
aaaactcagcttaaaacaagttagttgcttttaggacttgatttacactaataaataaattagattggatgatggtatatctttttataatgagtcaaccaatgacagatgttacccaaaaagagccttgaagcatataacctctaggcccaaattctaaaccagtaaaatgtaagatgtgctagtgagatgaaatgtgatgcagtgcttgttaatgaagggaaaaaaaagaagctaaaaagctccaccatggcttgaaaaagaattgataagggtttcttattttcggtaatctattatatggttggtgcacaataatttagaaggcaggatatgtatagaagtttgtatgaccaactaaagtgttcataagctaagtactccacaaacttaggtacctgtggccatatattcatgagcaacat

SEQ ID NO: 7853 - DNA, 404 bp, Glycine max
  unsure (1)..(404): unsure at all n locations
acctgaggcatgcaagctttattataatttcagggtctcgatatatttctgtacttcattggacatccgagttaaaagctattgtggtttgccattgctacgatgttctgttttcaattccgagcatcttgatatactacgggacacaatcttacatccatctgaggagaagattgtcggttgaactagctcagagcttgtgttttaatatcggcgtcatgattgctacnggactcaatcggacttcggagataatagttactggtggtttgactttactacaagcttgcgtctttcaattcgagcatatcgatctacttcaggctctatcatacgtacgaagaaaagccatgccgttggtcactctcaagcttctctatcaatatgagtctttcacatttacc

SEQ ID NO: 7854 - DNA, 408 bp, Glycine max
tttactcggatgtccgattgagtcccgtaatatatcgagatgctccaaattgaaaatagtagctcctagcaaattcaaaccataataactttttactcggatgtccgattgtgtcccgtactatatcgtgatgctcgaaattgaaaacataaggtctgagcaaattcaaacgacaataactttttactcagatgtccgattgagtcccgtaatatatcgagatgctccaaattgaaaatagaagctcctatcaaattcaaaacataataactttttactcggatgtccgattgagtcccgtagtatatctagacgctcgaaattgaaaatagaagctctgagcaaattcaaacgacattaactttctttctcgatgtacgattgtgtcccttagtataatcaaacgct

SEQ ID NO: 7855 - DNA, 421 bp, Glycine max
tccatcagtaggcttatttggctagtggctaaaagaaaaaaggcctaaatcatctcaataaatgcatgtgcaacaaggaatgacaagagaagcaaggaaaaacctagagtaatctagcacgagggtgaaatcacacataaaagaacatgaatggaataatgcaatccatccacaaaatcccaaaaaactcacaaggaattatttcatcacacatgatccacctcaaaattttcaagcttatttatcacttctacaattgcaacaatgttttcacatcaagcatgaaacctcttaactaaaagtgatacatctgtcacaatttatacaagctagaaatcctatgaaaaatatgagaaagtgcctaaattcaacaaaaatattagaaaacagtagtttcaaaatctgtattttttatttttct

SEQ ID NO: 7856 - DNA, 403 bp, Glycine max
taggctaaattatgctaaactttcgtaagctgcttgagctgagtctagtcttacaagagggatttacggacgaaacttagtttaagttagtctaaacctaagaggactgtctcaattgggtttagtccaacaagagggatctgaggacgaagcttggattgattcagtctgacgagggatcgaggtttagtaatttgggctaacacatagaacacaagagcatgattgattagagaaatatatttatatgcatcagcttgtttgtgagaaagacccaacatttctacctaccgctgtgatcgaggccgtacccgaatcaaataaacattagaatgcagtaactaggtagtgatcctaggtcatttcccaacgggcaatgactaaccaaatgttcataatatgc

SEQ ID NO: 7857 - DNA, 360 bp, Glycine max
  unsure (1)..(360): unsure at all n locations
agcttcactctcctcttgataacatggcngtttgtttgagagaagacacagctaatgaagagattgcgaaagtacttctttgttgtgtgtggtttttgcatacacagaaagtcttatttatagacctgggtgggtgctgattctttgacacctcangtagtatccacatctacttgacactccttttttgtatctatccttttctcttgtggtgacaacaattttatcaattacttatttaataaattagagcaaattaataaatttaattaatatattcaatgacaaaattaagtgaggtttaatgatatttatgaattcgataatagcataaattcatatgtacagataataaatatt

SEQ ID NO: 7858 - DNA, 399 bp, Glycine max
tatgtttctttgtccaaagatgaagcatgattatgtgttattaaggagcatctaggggcattctttgttgacttctctaccgctttggattaacgaatatttgttttcgacatggggcacaattctttttcctttcttcataagatcctatcctttgagagcagcatatattcttgtgtatattaagactgtcatgttcacatcgaaatgcctaattaactttttccaccgatgctagtatatatgatgactgttcaatttacttaattggatcaaatttttttgactaaagctggaaagccgttaatataacctattgtaactgcatgtgccctatcagcgattaggcttaatggatcactcattcagactaattccatagcgagttaaaatattgta

SEQ ID NO: 7859 - DNA, 363 bp, Glycine max
agcttgtccgcgtaaaatcactaaaaatggtatttgtttattcaatacctcagtttttcttaccaagtaaaaaggatcatttttaaggtccaacaccttataatgaccaccttacatgtgataagaatcgcttgattcacccttaaagaagaactacgtacgtctgatttcctcttcgatggaggatacctatgagcaagaaccccgcttttgtcgacctcataaataaagaagaaatactagttaggggtacacaatttcacacaattctcaaaataaggctgatgtcctttgagacaaacgtgagaggagctaataccttctttacacgtaatacgactcccgaactaggaatattattta

SEQ ID NO: 7860 - DNA, 407 bp, Glycine max
tgttcttgatttttcctaagttctgtaacaagcttagaacaataaacttggccttctcttaattgtctttgggcttggcgaccacgatcaataaagtacttttggcacctacaatatgttgacttcaccaacgctgttattggaatgctgcgacaatctttcaacaccttattcacacattctgataagttggttgtcatgtgaccatatcgccgtccagatgtatcgtaagccatgctccatttttcctttgagattcgatcaatccatcttgctatagctggactcaattgacgaaatttttctaagttttgatcaaacacatgcttgcaaggagtgtacgctgcatcaaatttgttatcatcaacagttgtacgtagacatgaaactcaaattaaattaatgta

SEQ ID NO: 7861 - DNA, 403 bp, Glycine max
atcttctattggagctagtacaaattgttgtatatattcaaattcagaatttgtctgacactagaataatatataacagctgtttttcttattacttgtcttcattgcatgtgtgatatggaatcagataactattcattacttaccttggtgaagaaaagcgttcggatttcacagaacattgctccgctaaaaatggaacaaaataatgctagagaaaattaaatgagtgtgtctatatatatatgtgtgtgtgtgagagagacattatatgggacctcgactagcaatgaatactatccactctatttcttcagttaggcgactattaatttatgcacaatgtagtaccacttataacttgctttaacaattcaaatttttagcgagttcctacattaaa

SEQ ID NO: 7862 - DNA, 396 bp, Glycine max
ttaaagcacagcaacacagaatctaggtgttcaacacccctcaattcaatgggttttctaggtttgagaagtgaaattgaggatgaggtagatttgaggcaaactctcacctcacacaagtctataacatcaatctaaacttgctcaaactggatttacacctaaaatctcaccgaatcaaaatttgactcttcaacacccaattttgccctagaaatggctcttggttcactttggtcatttgtttttctctctagcacagcctaacctttctcataagtcctaaatggcatttcaatctaagattaactcactctaacctctaaatactaccaattccagatttggccttccagccctcaaaaattcactctttttccactcataacaccacat

SEQ ID NO: 7863 - DNA, 394 bp, Glycine max
tgaggaatttttgtaaccattatagacattgctatggttgtcggacaacacacatgagttcgcttagaggtaatagatgagttattcacagttggggagtagtgagaacatatgtatggatccttaaaataacaattgagatgggttcccgggtgtttctataatttttgttctatctttacaactatagctatgaattatatatgtttgacggaccaattaatgtcccaatgcgaaattgctgtaaaatttatatgttgtgtggagtgtgaaccctataaattgagattttttcttctaattaccgtgaattgatgcgatatattaattttgcattttccccttttctttctctttttgggttgtatttaagttgaaatgaatattatcattg

SEQ ID NO: 7864 - DNA, 246 bp, Glycine max
atactctgagcgacctgcggcatggaagcctggaggagctgcttgtgtgtgctttgtctttcaagatcgctttgatgacggtaccgagataagagctcagaagattctcgcgaatccggagtccagaatccagacttgtgtttcaagatgctagattccagaatcaagagaacactctgtcgctattagtgctaacaaagttgttcaaaacattgagtcgcaccagacagtttcaccaacatcatt

SEQ ID NO: 7865 - DNA, 401 bp, Glycine max
  unsure (1)..(401): unsure at all n locations
nttaaattctaacttcatatatattctttttggacagagaaatttaatattttttaacagcacatagaattttaatattataaattgaattatatagttttatttaaatttgactactattgtatattttcaataaatttggtaaaggaataaatactagtaataatatgataatgatggaaaaataatataaatatcaattatactaagaaaaaaaagaaaataaattaattaaatataaaaaataatctacaattcgaattcttgttgatctatggaaattaaataaatcttattggaaacaacatattgtgcttttatggtaaaaaaaaagtatgtctggggttttttgatttaataattaattacatacatatcgtgccatatcagtagttggcaat

SEQ ID NO: 7866 - DNA, 400 bp, Glycine max
  unsure (1)..(400): unsure at all n locations
agcttccttaagaagattcctaaagaagctagagcttagctacatatacctctctaatagctaagctcacctccttgagatgagaagatagagcttagctacacaccctctataatagctaagctcaaccccatgacaaaatacatgaaaataaaaaaaaaattcctactacaaagactactcataatacctcgaaatacaaggctaaaaccctataccactagaatggccaaaatacaaggcccaaacgaaggaaaaacctattctaatatttacaaagataagcgggctcatacttagcccatggactcaaaatctaccctaaggctcatgagaaccctanggccatccctgggatctttggcctaatctacttggagtcgtctatccaatgcccctg

SEQ ID NO: 7867 - DNA, 369 bp, Glycine max
  unsure (1)..(369): unsure at all n locations
tatcgttcaactgagaagatatccttttgtttagggtggattctttttgaggttagagtttttgtttaagcatttccttgcacccttcttccaaaatttcaagtgtcatggctaaggattttaccctcttttcaaggtcaagacattctaacttgaattgccctgatttcttgcactcacaacaaatgattggacttttttctttcttatgaaaggatcttttggacaatccgctgaacttggaggatttcttgtttctccacatctttctgatnctttctgtgataagaacttattcatcatcttgctcattagagtcatcatccttaaattcttttctaaagcatcattcacgacaaagactttgga

SEQ ID NO: 7868 - DNA, 374 bp, Glycine max
  unsure (1)..(374): unsure at all n locations
ctgcaagcttgtccactaaaagctatgttctaattggaatcacctagctatgttgcttattggtaatctctcccacacccaagcttggaccaaataataaaacggatgccaaataagtacatacatgcttccattatgcttctatatataacatagttgtttcttaaaaagcgctagaaagctttcttgnaaaacttccttgagaaacttccttgagaagctagagctaagctacacacccccctctaagaactaaacttacttccttgagaagcttccttgagaaacatccttgagaagctgtcttgagaagcttccttgagaagattctagagaaactacaacttagctacacacctctctaataactaatc

SEQ ID NO: 7869 - DNA, 403 bp, Glycine max
tcttgcgtagccgctcttggtgctcagaaaatcccaaatacaaatccctcttattactagctattttgaattctttagttcctgaatgtacaaccttcaaattgttgctcgttcccctctttcttttttgcaaaaaagaaaatcaatatcaaagaaaacatggatgaagtcataaggatgccatgtacatgtgtatttctgaagatatagtatttatattccatcaagcatacattgactgttgattacatgtaatagactttttataacatggttgccccaagtcacaattaaaaagcacaactaccaatctttcggagtcctttggttaaattgtcttgtctccttatgtggtggggttttgtttaataatattatacttttgccttccaaaaaaaactta

SEQ ID NO: 7870 - DNA, 335 bp, Glycine max
  unsure (1)..(335): unsure at all n locations
gtttangcaaagactacggcggcataactagcctgatatatgccaaaggatatcgtgggaaatatgggttaggctataagcccactcaagcatatataaagaaaatcatctcgggaaggaagagcggtagtcagaacttacagttgaaacaagaaagggaaggaaacccaccctgccacataagcatgatctttataagcgcgggtctgggggacgaaagtcaagtggtcgcgatatacgaagatggtgttccgagtacattgggattggtacaaccatgccctcctaatttgcagctgggaaattggcgagtggaagaacgccccggcatttac

SEQ ID NO: 7871 - DNA, 405 bp, Glycine max
cacgcttgtaagtatttgtcggtataatttgcctgttccattatgctcttaatgtctttagaggttacttcctcattgacatcttttgtcttgaatggaattgccatgacaggtttattgttactatctttgatgtttggtagttgatattgtgttgcgggaggtaattccgattggattaactcaccatccttcacttgccaatttgttatgacatttgttgttggatcacctatgatgtcttgtttccaagggtaatctatatcctttctgatggcataagcatgaaaccaatcaaagaaaaggacattaattttgactctttcgacaaattcgtagaacttgtcttggatttgttttctgtttgtacccttgtaatgttggaaaaaccatctcctttggggt

SEQ ID NO: 7872 - DNA, 434 bp, Glycine max
agctagtaagtgtgcttaaagctctactccaatgtgataaggtgttggcttattcactcaactttgacttatgaatgatccttgcttggccatgaaaaacgcgtacatcactaccaaatatggtgtgcttcacttttgaaattttacttaaaaaggctatagtacagttttgccaaaaatggtgaatatttttttttatactaaaactggtaaatcttatcctaatcttctagattaatgtgctaaccaaccttaagatatgtgtactaataaacatcaaacttaccatattatcatatgcagcttaagacatttatttgatactctaagccttattttgaatcaaactcattatggtataaagttttaatatattctacataggaattacgattataatagtttttaatatgacttcttgagtacagaagaat

SEQ ID NO: 7873 - DNA, 406 bp, Glycine max
tctgtagccttccatggcaagttatcacctttcagttataatatggggttttggaaggaaaattcagattacacattggtggggatgtctcctccacctctaggaacctagaaatcactctaaaacctagaatcctcttgaaagctgaggtttttggtgctcctttgccctgctgcgtctctcacatatatctctattcttccaaaagctaaagactcccgcctcccttttttctcgccaacttcagcttttaagggctttttttccttgaaggatcacttagcaccattctcgcgctaaacgcgagttagtgatttttggctgagcgagtcaggcacgctgggcactagaagagacaaatgactcactgggtgagctgatggcgtgctgaatgcgtgcatgcgtg

SEQ ID NO: 7874 - DNA, 443 bp, Glycine max
  unsure (1)..(443): unsure at all n locations
agcttctacattgaagattgagacactcatgagagatcaagccaaagtctccatcactacccatccattcccaacctgtgataaatgtgaggttgtgcatgggtaaagagaatgcactattgatgacaagttaggtacaaccatggatgatatcaactttgttggggcagaaaataattcttacaatcaatatcccaacaatttcaatcaaggacaaggcttcangaaagtcaagggatgtataggcctcaaaccatgcaaaatcaaaggcctagacaagagaaaagaaaacctactcttcaagagaccatgcttcaatatatggcccaaaatgatcagagaatgaagctggtggagtctcaactcaccaacatacaattccttttgtcacaaagacagacgatcaaccttcttttacaacttgaaccaaatctaaaagggat

SEQ ID NO: 7875 - DNA, 400 bp, Glycine max
tgccacccagctcacccaagcgagctcagctcgcctaagcgagcagggttgcttcctccagaagcaacaaccttctggaggaatcttctggagggcccaagtgggcctggttgctatttacacccccatttttactaagtacaccccactgccttttttttgtgattcttttttcgtaaagttacggaaacttacgaatttcgtaacgatacttgttttctttccgtaatgttacggaaccttgtggattacataatcatcccctttttgacttacggaattttacggaacctcactaattgtgcaacgatgcttccattggatttctggtgtgtcatggaaccttacggatagtgcatcaatattttcttttgttttccggcacgtcccggaatttcac

SEQ ID NO: 7876 - DNA, 440 bp, Glycine max
agctttacaatatccaaacaattcaatttcctttgtcatgaaaccaccctaaaccaagaaaaatagagtggaggcagaaaactctacacaaaactcattcaaattccacagtttttcctactcacatacctcagtaacagtctctttgtttcgaatcgtcaaccattggatcgccttgaaaatttaactgagagttcctaatatagaaatctaagttttgaccgttgggatctgctagaaaatatatagaacaccagatgtactacctttcccgtgactagtgttgcacaaccatttttctgcataattggtaaaatctgttgcacaacttgacagcttttgctgcataatttggcagatttcgaattctagcttgcttgtatccaatttcactcaaattggattctacaagtcctaaaccatgtctaaatcatgtttaa

SEQ ID NO: 7877 - DNA, 410 bp, Glycine max
tttgtgtctatctcacatggttgaagcattctcacaaaacagcgagaccctccctatgattttatctagtgagagagacctgacttaccagtgtgtggtatgtcttgtcatgtactcctaggcacccgatgaggtttttcactgacatggtaccacacttcatataggattaagtcttagtgtatctgttgcataacgcatgtgtaatgatcattgtgactcgctatgtaatggtgggtaatgaatttgtgtgagtgtgagatgttgtgttgtacttgagatgtgttgttctaaacacatgattaatgtgaaggtgtgtaatatgattttgtgattaaatcattaggacaagtgatgttacgcaataagtggtaacattaagtgaattgtgctaagttgagtttattata

SEQ ID NO: 7878 - DNA, 120 bp, Glycine max
  unsure (1)..(120): unsure at all n locations
cctagctatgttgttattggtaatctctccccacccangttggaccaatagttagaggtgtcaaaatgttactcatattctttttgcattttctttctaaaattaatgttttgtctataa

SEQ ID NO: 7879 - DNA, 392 bp, Glycine max
  unsure (1)..(392): unsure at all n locations
ntataatgagctctctgttcattgctactagcatcagttatagtagcaggcttctcttccaatatagcaaggtcaagatccaaaacaccgagatgaaattggacttgctcattccaaccagagaagttaagcccattaaaaattggtacagatgatacatgagaattcaatgagttgggaacaggtactgcataataaaacttcacataagcattttggtacatgaaacacaagtcatacatataatttactcagataaaaatcaatgtatattgatgttctcctttgggtgacacaccaacacacaacatacaaacatgatgatgctaataaaattttaacattatttgacaattaaatatgcaccaattagtagtatctatttcctttgg

SEQ ID NO: 7880 - DNA, 433 bp, Glycine max
  unsure (1)..(433): unsure at all n locations
agcttgcacacaagattctccttgcctggcacttcanaaccttctggttgggtcatatatatgtcttcctctanatccccatgcaagaatgcagttntaacatctaactgctccaagtgaagattctctacagctactatactcagaataaatctgatggtagtcatctttacaactggagagaagatctttgtgaaatcaattccttgtttctactgaaaccctttcaccacaagtctcgccttgtatcttcttctaccttcagattctttctttagcctatagacccacctattctgtaacgctttctttccttctagcaatttagttaaagaccacgtcgtattcttctgaagggatgtcatctcatttttcatcgctagctcccactcaatagtgtcattcccctgtgtagcatcactgaaacattctg

SEQ ID NO: 7881 - DNA, 385 bp, Glycine max
ttgagctttgagcacccacgactgtttcagcaccctagtagcaacagtgtatgttgggttttcttcgagccagacttccaagaacagtgtagggggttctgtggattcgagcgaggacaatatgggttttccggtactgtagggggttctgtgggttcgagcgaggacaatgtgggtttttcgacagtgtagggggttgtgtgggttcgagcgaggacaatgtgggtgtcgagggagcggtttctggaagttttcaggtgggaggagaaagagaagagcgatttcacggtgacaaagagaagagggagggcaaggttttcgagcgcgcgcggcttgtgaaatctcaatttttaacttataaacataacaacatcggttttttatg

SEQ ID NO: 7882 - DNA, 419 bp, Glycine max
  unsure (1)..(419): unsure at all n locations
agcttatttctaacaaaattgaagctctttnttttaacttttcaaggactactaacatgctttatttggagttctgtagtatcctataggtcctgcacaagatagataggtcaagtaagcgtaaaattaaaaaataagcaacaattctcaattaagtacaaacatttacctaaaaccaaaattgagttaaggtgagaaaataagagtcaaagaaaggtcaaataagttaagaagaatagaaaaatattaaactacaaatattcaattaatgacgaataatgactcttaattattttgattagatgcaaatatatataaatgataaaagtcgtgtatgatatgttatctctatgcctatgaagtttttagacgatacactcgtaagacgatctgatataacatttaagtagtgcatttaa

SEQ ID NO: 7883 - DNA, 379 bp, Glycine max
  unsure (1)..(379): unsure at all n locations
tgtttttctttgctgaaaataattaattagttntgcatttttaatatcacttagttattattaatttatggtttagtgttaaattaattttggtaaattattattttgtgttttagaataatagtgtttagttattattaatttacagtttaggtagataaattattatacatgataaattaattttcttaaattattattttatgttttagaacaatagtgtttagttattattaatttaccgcttagttagataaattattatacatggaaaattaatttttttattaaattattattttatgttttagaataatagtgcttagttattattaatttacgaattagttacataaattattatacatgttaaattaat

SEQ ID NO: 7884 - DNA, 429 bp, Glycine max
  unsure (1)..(429): unsure at all n locations
agcttgaatcggacatccgtgtgaaaagttatgagcatttgaatgtctcaagagcttccattgttcaatttcgagcatctcgatatattataagcctgaatcggacattcgtgtgaaaagttatgaccatttgaatttctcaagaggttccgttgttcaatttcgagcctctcgacatcttatacgcccgaatcgaacatccgtgtgaaaagnnatgaccatntgaatttgcaagagtctccgaggtctaatttcgagcgtatcgatatattataagcctgaaacggacattcgtataaaaagttatgaccatttgaatttctcaagagcttgccgtgatcaatgtcgagcctctcgacatattatgcgcccgaatcggacatccgggtgaatagttatgaccatttgaatttcgcgagagtttccgat

SEQ ID NO: 7885 - DNA, 384 bp, Glycine max
tgttgacacgcggagatttacgtcaacttttgtgctcacaagatttgtcatactgacatttgagtcacgttgacgggcggagataccctagtggttatccgtataaacattcttttttgctgtctgtaaaacgaaaagcctgatagcatgcagagactaacgtcgtcttctgcgcccttcgtcaatcgcggccgacaagcccgttgacacgcagagatttacgtcattttccgcgctcacaagatctgtcatactgacatttgagtcatgctgacggacggaaatacccaagtggatatccgtataaacattctgttttcctgtctgtaagacgaaatgcctgatagcacgcagagactaacatcgtcttctgggcccttcgtg

SEQ ID NO: 7886 - DNA, 431 bp, Glycine max
agcttgagactgggcaatgaatagaaatcatcacttccattgatgcctttaagtaagacttcattggttgcctgtgatttgacaatgcacaagtgaggatagaactcaaaataaacttcattatctttagcaaacttactgacacaatagatttttagtgattgaaaaaacatgtaacaaattatgaagataaagaggaaaattaggattggtaggagacttaaaagaagaaaaaccaaaaccaagaattttcaaaccttcaatcaaagtgaccaagctgatgagtattttgtgtttctccagtcacatggaatgaagctcccgagtcaaggatccaagttgagttagtattttcctgggaagatgaattagctagcatggcactcagaataacttcaatgggagttgactgattctgacttttagtattt

SEQ ID NO: 7887 - DNA, 397 bp, Glycine max
taatgaagccacaagaaaagatcactacccgcttcccttcatggatcaaatgctcgagagacttacagggcaatctttctactgttttttggatggatactcgggttataatcagattgcagtagatccccaagaccaataaaagataactttcacatgtcacttcagtgtcttttcttatcgccgcatgccattcggtttatgtaatgcccctactactatccaaagatgtatgatggctatctttgctgacatggtagagaaaggcattgaagtctttatggatgatttttcagtctttggtgcatcttttgagaattgtttagcaaatctagagaaggtgttacagcggtgtgaagaatccaatctggtacttaacggggagaaatgtcatttt

SEQ ID NO: 7888 - DNA, 387 bp, Glycine max
agctttgcataccccaaggaaccatcaggaaattacttgtgaaggagagccatgagggtgggctcatgggccactttgggatagacaagaccctagtcttactcaaagaaaagttctattggccccatatgaagaaagatgtccataaacattgcactaggtgtgtggcttgtttacaagccaagtctagggtgatgcctcatgggctatacacacccttacccattccatctgcaccttgggtagacattagtatggactttgtccttgggctccctagaacccaaagagttgtagactctatctttgtagtggtggataggtttagcaagatggcacactttataccatgccacaaggtggatgatgcttcccatatcttaaaac

SEQ ID NO: 7889 - DNA, 343 bp, Glycine max
  unsure (1)..(343): unsure at all n locations
tttaatctgattaaaagcccaaacaagaaatgcaaagggaagttctatgaaggtgactggtgtaactgcaatcattcatcaaattgaatgataaaagctaaaaacaaatttgcataaaccaggattataaaatgaaatttggcattaaacctatnntaaaataaatgaaagtccaaatcagaacataacaattatgcaaatcggagccaagttaatcttagcgaatactcacctccatccgataaccagcccttgatgcacacatagcatggaaataagtggaacacttgcaacattgtgtgcacgaaccatgaatttcttacaaaaacacaaatctgaaatc

SEQ ID NO: 7890 - DNA, 425 bp, Glycine max
  unsure (1)..(425): unsure at all n locations
agcttcacaaaagtttatatggcttgaaacatgcaccgaggcagtggtacaagaagtttaatgagtttatgagcaactcaagattcaacagatgtgacatgggccattgctgctatgttaagaaatatactaatagttatgttgtccttgtcatgtatgttgatgacatgttgattgcaggatctagtatggcagaaattaacaagttgaancancagngggcagaaaactttgaaatgaaggatcttggtccagctaaacaaatccttggtatgagaattcttagaaacagatcagaaggaattttgaagctgtctcatgagaaatatatacacaagttgcttgacatgttttaccttgaagattctaagaccaggaatacccctntaggatctcatttgaagttttcaaagaagcaatctttg

SEQ ID NO: 7891 - DNA, 344 bp, Glycine max
  unsure (1)..(344): unsure at all n locations
tgttatgtagtatgccattttcacttagagaaaaactctttagctattaacaatttatactttagtaatcatcaaaatcaaaagtaggaatgaatcatctaatgatcatgggatcaactagacataacactaagaccccaaacaagaagcactaaaaccaatgtgaaatcaagttagaagttacattagctaaaacacattagacaaaagatcagaaataaaataagataaaaaaaatacatatgcccatcangggataaaaaagatgcccatcacacttagtagttttctacatcgtgatcaaataacaaatccaagttcacatttttttacaaaaaaaaata

SEQ ID NO: 7892 - DNA, 435 bp, Glycine max
agcttagtgacctcacacgaaccttattgactgtgtttcttcgaatcttaacctataagaaggttaaaagaagcttaacctcatttcttcatgaactgcaatttcgagtctgtaaggttcacgccggccgggaagtcaacctcgggttgtagaagatcaagcttaaggaagtcaacctcgggttgtagaagaacaacctcaggttcaaaagagtgaacaacctaggggcttgcttcaaatgcgaaatgagcaacaaggttaaggttcagaacagtgaactcaaatgcgaaagcaattagggttttttgaactaaaatttttttttttattctgatttacgacgggtttttaatataaactggcatgaaatttataacacaaaacattctaaggtggatttcataaccgccttagaatgtacgtcgagaattccaa

SEQ ID NO: 7893 - DNA, 404 bp, Glycine max
tcttacgttcctaggcctagaattgcattcggactctcattttaaatccttcatgatgtccctatatatataaaacagtcccatcaccccaattttgcaaaatcatattcattcatcattggggcatttaaccgagcacttggtgggcgcatgtttgaacacaaattgtatgagaatgggagcaatgtggcatgccccattgcttcagaatataacctaggcctaaggccttttcattcaaatcctcaattcaagaaaacaagcaccaaaacaaaacaaaaactgcctcacaatcataagcattttctcacaattgaaggcatcaaaagatgaagaaaacacatcaatgggaagcaaaaaatctcaaggatggaacacttacttgttggagtgaattgaaacac

SEQ ID NO: 7894 - DNA, 457 bp, Glycine max
  unsure (1)..(457): unsure at all n locations
ctgcggcatgcaagcttggagaggatgcttcaatggatggaaagatagagggagagtatgaggatgggggggagcacgaaattgaatgaagaaaataggagagaagttgaactttgagttgtgtctcacaagactctcattcatcaaagttacaacaagtgttacacatgcttctatttatagactatgtagcttccttgagaagctttcttgagaaaacttccttgagaagcttctttgagaaaacttccttgagaagctagagcttagctacacacacccctctcataactaagctcacctccttgagaagcttccttaagaagattccttaagaagctagagcttaactacacatacctctataatagctaagctcacctccttgagatgagaagctagagcttagctacacacccnctataatagctaagctcaccctcatgacaagaaacat

SEQ ID NO: 7895 - DNA, 311 bp, Glycine max
atatattatgcgcctgaatcgagcactcgagtgaaaagttatgaccattacaatagcgagagagactgagagagagagatagagacagatcgatgtgtcgactcccagattatgacctccgtgcgaaaactattgaccattcgtggctctcaagatcacgcgcagttctatataaaaactgtaatgttgttgtctgcctgaacacgtccctccttctgtctatacactccaacaaacattactcccaactgattaatgaaaataacgagggatgatgctatcgactcgccgaaatctctttctgcgagaaa

SEQ ID NO: 7896 - DNA, 442 bp, Glycine max
  unsure (1)..(442): unsure at all n locations
agctntcaactattagctagttnttcaatctccaattagttnttcagttaattntgtcaaacgtaatctaaatataagttacattatcattaaagaaaaaaaaatacttttgaaaattttaagattggcataaattaaaggttaaattagtctgtaggatctcatattattacaaatttttttaattagatccttatattttattnttcttttaatgggtcctatattaattttaaatttgtaacctacgttaatttatcatgaggaatctgttagacttaatgaaatatttcatcatatatacacatatagatgcgaaccctaaaccaatacacttgaattgattataaatgtgtgaaccttaaactacgaattgttacatacgtgattaaggaagtgcgaacaacattacaaacaaaataaggattaatcacgcattatg

SEQ ID NO: 7897 - DNA, 406 bp, Glycine max
tgaaacatatgtataaacttctctttttgaaacaataacaacagcaaagccctatcttgctaggtgaggttggctacatggataacatgacactatttgacttatttaaaaaccaatgttttagcaatgttatttaccatgaggtccttcttgaccactttctccaatgttcttcttggcctccctctccgcttcacttgactaaaacccatactatttattgttctcactagtgtgtctcagggtcttctttgtacatgtctaaatcacctaatcgattttctgttatctttttgtcgattggttgtacaccaatctctccgcatatacaatcatttcttattttgtatttttggccacacattcatcttaactttctcatttatgctatttcaacctttttctc

SEQ ID NO: 7898 - DNA, 387 bp, Glycine max
agctcgttccagaatccgcaatctacgccaagttgctcgaactcgagactcagatagattctgctttggccaggaagaaaattgatgtgcaggcgaaagttagaaaccctctctgcgttaagaaaacgcttagagtttatgtttataacactttttcaaatcaagtgaaagtggagactgggaagaatggtgtggaggagccttcttgggctctgaggataactggaagggtgttggaagatggtaatggaaaggattctgtggcggaaggaatcttgacgaatgaatatccaaaattctcggctttctttaagaagattaccatatacttggatcagggcttgtaccaggataaccatgttgttgtgtgggatagtgctcattcgg

SEQ ID NO: 7899 - DNA, 410 bp, Glycine max
ttgattcaaaataactatattataagtctcatcatatttaattattttcccttaattttgtgattctcaataaattttaatcaattaaagaaaatatgttaaagaatatgttcctttttttttgagaaaataaagaatatgttcctaatactcatttgctaaaataatgctcattcatgaaaattttcatatttaacctgtgcatacaacattaataacgatcatatgatttcattattgcagactagttgaatggatgctttattgttgttaacactcacgaagtatgatgcacatgctgtgaaaataacagggcatatatgatacaatagccaaccttggctgtcttgtgaaaacaaaaatttattaatttgccctgtctatattaagtgtataatgatatctaaaaa

SEQ ID NO: 7900 - DNA, 415 bp, Glycine max
  unsure (1)..(415): unsure at all n locations
agctagcatgatntacattctccncctttctcaagcaaattcttaattcttcttgacatcatcaaaatcttcatgatttacattctccctctttttgatgatgacaaccacctgtatgttaagagcaacaacaaagaaaaaatatctatttgcatatagtttactcccccttggttttgcaataattgcttatatgagacatttgaagatttcatatttttcatatgtaaacaaattgtctcataaacaatagaataattttcttactattttatcttttatctttctctccccctttgtcaacatcaaaaacatatcatgaatagagaggagaaagatgttaccacttgttgcaatgtatgagaatcaagtgataccaaaaggcattaaaacaatcattcaatattaatcaaac

SEQ ID NO: 7901 - DNA, 388 bp, Glycine max
tgttgttttttagctagacaactttttattactattttttattttctatatttttcttccatcttattcttttcttgctcgctctctttttgctcctttttttccatgagatattttgctacctaaacatacgtatatttttgtgaggtattttgctatatacatgcgtgtccaaggtatcttgctacctaaacatacatatatatgttttgtgagatatttttgctatatacatgcatatccaaggtatcttgctacctaaacatacatatatatattttgtgaagtatttttcctacatacatgcatatccaaggtatctttctacctaaacatacatatatattttgtgaggtatgactaccttccgagcttgtgcttgttttat

SEQ ID NO: 7902 - DNA, 413 bp, Glycine max
agcttccacatcatccaagtataacaacattcatacagcacaagctatcacagccaagcaaaagcagagcaaagtcagaaaactctgctcaaacaccaaccaaaatcacagcttttctcacttaaagaccacgagtacaattccttcgatccaattcgttaaccgttggatcgactccaaaatcttactggaagtctatagtgcataagcctacattgtgaccgttgggatctactagcaaacatcaagaactcattctgtactactcttttcacagccaaccacacacaagcattttgtgcaccaagctaaaatcctgctgcacctagtttgacagcaaaattctgcataagtgcagatttcgaaaatcacacttgccctcatccaatcttgctcaaatcaaatactacaag

SEQ ID NO: 7903 - DNA, 387 bp, Glycine max
  unsure (1)..(387): unsure at all n locations
ntgagggtgcgcagcccaccatcttttctagtagagtactcgataatgtggctaccatcacgattatcgttcccctttccattattgggggtaccacctgagccgccagatccctccaccttttgggcgtgttctttgaatgatccgtccccctttttgcacatgttctgtagttgcatactatccggaaccatatcaaaattgtactgatactgcctaacaaaggctaccattaagtccttccaagaatggactcgggaaggttccaagttagtgtaccaagtaacagctaccccagtaagactttcttggaaggaatgtatcagcaattcctcatcttttgcgtattcccccctcttctgacaatacatctttagatggttcttg

SEQ ID NO: 7904 - DNA, 429 bp, Glycine max
agcttgccacccagctcgcccatgcgagcaaagtggcttcctccagaagcaacagccttctggagggcccaagggggcctggttgctatttgcacccccatttttactaaatacaccccctgcccttttttttgtgattctttttccgtaatgttacgaaactttacgaatttcgtaacgatacttatttttcttccgcaaggttatgaatccttacggattatgtatttactcttttttagctttcgaagaagttacggaaacttacgaattgcgcaaaaacacctcttttcaacttccgccacattacggaatttcacggatcgcgcaagcctgcttcctttagatttctgagacgtctcgggacttcatttactgtgcaacagaggacgccaagtatctcaaagcggctatccaaaggttgcatgt

SEQ ID NO: 7905 - DNA, 393 bp, Glycine max
  unsure (1)..(393): unsure at all n locations
tctatagaaggttcgttcctaatttctctacaattgcatcacctctcaatgagctagtgaagaagaatgtggcatttacctgnggtgaaatacaagagcaagccttttctttgcttaaagaaaagcttactaaggcacctattctagctcttcctaactattctaaaacttttgagctagaatgtgatgcctctggagtgggagttggagctgtattgttacaaggtgggcaccctattgcctattttagtgaaaaacttcatagtgccaccctcaactaccccacctatgataaagagctttatgccttaataagagccctccaaacttgggaacattaccttgtttccaaggaatttgtcattcatagtgatcatcaatcacttaagtaca

SEQ ID NO: 7906 - DNA, 429 bp, Glycine max
agcttgcaaactaagtgctcacctttagtatatgagaatcctttaagttgtttcatgtaaacctcttcctctaaatgaccattaaggaattccattttcacatccatttgatgtaactcaaagtcaaaatgagctactaatgccataattactcggaaagaatctttcttagatacaggagaaaaagtctatgtgtaattaattccttctctttgagtgaaccctttggcaacaagtcttgccttatatctttcaatgttgccttatgagtctttcttggttttaaaaactcatctacattcaatggcttttacactactaggcaactatacgagatcccatacttggttaaatgccatagaatccatctcatctttcatggcattgtgccacaagtttgattctttagaactcatggcctgtgaaaac

SEQ ID NO: 7907 - DNA, 375 bp, Glycine max
  unsure (1)..(375): unsure at all n locations
agaaggacaagttntccatctcttaagatcatatccatgtcatatgcacatctttgtttttaagaaagtgttcaagcggcagaaagacatttaattgttaccaaagagattgaatncacaatcttccagacattcatctcgtccacaatcatcaaactaatcttatatctccatattcacattctttgaagtattcacaactcattaactacttgatgaattacaaggaaaaaaaaagaagggaaaaccagttgtgctctatgcataatttaacaagtgaagatgaattgcctaaatcaagtttggaatccattccagcgatgttcattgaaataaaagtagaatctctgataaccttcttcccttgactctaat

SEQ ID NO: 7908 - DNA, 306 bp, Glycine max
  unsure (1)..(306): unsure at all n locations
agcttattaccagtaaacgtcgatctagatgggatgaaccttttgttattactaatgtttttccccacggtgtagttgagattaaaaatgaaattaccagcacagtcttcaaagtgaacggtcatcaactcaagctttttcatgagagctctcatgtgaaggaggagtttgtggcaaacctctctttggtctcgcctattttatgtgatgatgtgccttgaataacacttgaggagccttttcccttcttttatatgttgnctctttgtttgcatttcattgcatgctcacattgaagacaatgtg

SEQ ID NO: 7909 - DNA, 398 bp, Glycine max
tgcttgtggggcttctatggagactggatctttgagcttcaatggggtcctttaatggtgattttccaccaaggagatgcagcggaagaaaaaggaaaagaggtgagaggaggcaccatccattaaggaataagccatggaagaaggagcttcaccaccaagatgaaccttggataagaagcttggagaggatgcttcaatgcaggaaaagaatgagagagagaacgagaaaggggggagcacctccttgagaaacttctttgaagctttcttgagaaaacttccttgagaagcttctttgagaaaacttccttgagaagctagagcttagctacacatacccctctcataactaagctcacctccttgagaagcttccttaagaagattcctaaaga

SEQ ID NO: 7910 - DNA, 419 bp, Glycine max
  unsure (1)..(419): unsure at all n locations
agcttatccttatggcctgcctccggacttcgtcccccgtgccaccccggaaggtttaagccaagcccctacttttgaggggcaacttccaccttatgaagactatctcgggcaagacgatggggaaggagatacccatcttggccccctgctccacctcaaagatccatccccacatgaactaccccaaccaaacatagtccgtcataccccggcctcacccacacccgtaaaagaatctgttccctttgcggaagataagggaaagattgaggcgcttgaagagaggttgagagcagtcgagggcctcgacaattacccattcttggatttagcggatntatgtctcgtgcccaacatcgtcatccctcccatgttcanagtaccggactttgataagcaaaggtacgacattgtcg

SEQ ID NO: 7911 - DNA, 369 bp, Glycine max
  unsure (1)..(369): unsure at all n locations
ntctaagttttctggtttccaaaccttgttctttcatataaaacaaaagtgtgctattcatctttttcattctcttctccctttgccaaaaagaattcgacaaggactaaccgcctgaattctttttgtgtctctcttctcccttttccaaaagaacaaaggattaatcgcctgaattcttttgtgtctcccttctcccttttcaaagaattcaaaatgacacagtctgagaattcttttgattcttccctttcccttaaacaaaagatttcaaaggactaaccgtctgagatatcttttgtttccccttcacaaagtttcaaaggactaaccgcctgagaactttgtcttaacacattggagggtaca

SEQ ID NO: 7912 - DNA, 412 bp, Glycine max
agcttgccttgccccttgatatacttgtgggactcatggtcactatgaatgacaaattccttgggataaaggtagtgttggcatgttttcaaagcccgtactaaggcatacaaatccttatcataagttgaatagttaagggtaggaccacttaatcttttactaaaataagcaattggatggccttcttgcaacaacacaaccccaatcccaacatttgaagcatcacactcaatttcaaaagatttttgaaagtttggcaacgcaagtatgggggcattagttagcttttgcttaagaacattgaaagcttcttcttgtttctctccgcatttgagaccaacatttttcttgagcactttattgagaggtgctgccaatgtgctaaaacccttcacaaattggccataaa

SEQ ID NO: 7913 - DNA, 269 bp, Glycine max
  unsure (1)..(269): unsure at all n locations
tctaagaatcaagatcaagattcaagactcaagattcaagaatcaagagaagaattaatcaagaataagttgttatagttntttcaaaaactgagtagcacatggtttttcatcaaaacctgtttaccaaagagtttttactctttggtaatcgattaccagattattgtaatcgattaccagtagcaaaatggttttcaaaaagcttcaactgaatttagaacggtccaattgatttcaaaaaggtgtaatcgattacaatgttttgg

SEQ ID NO: 7914 - DNA, 445 bp, Glycine max
  unsure (1)..(445): unsure at all n locations
agctagctttctttaatttgccaaaataagaaaataagaaattatgttgacactgatgcaatgaaataaaagatatatcgagcacagcttagataatggcatctggtaggtaagaatgacatcatgccagtgctgcctagagtagaagcttttaatgtacacattttcttaatatcttctcatttgtgtagaagattttagcggctagctaaattcaacttaataatcaaataatacccccacacaaagctctaaataaatgaaaggtagttaaatgccaacacttcgatatttaaaaaaaaaaaacccttacatgacacgaatttgagaaaaagatcgaaaaagaccaaatactacatactatatactagaggagacanaatttgggaagaagataaagtacaaataaatggtaaaaataaaagaactgggcagaataaaaatg

SEQ ID NO: 7915 - DNA, 403 bp, Glycine max
  unsure (1)..(403): unsure at all n locations
ntaagagtttaattctcaaacaatgttgatgtaaaaaagtttgctgtcatccaagtaaaacttatttttacgtgaattttaagataattattacagaagtgaataaatttattatttttataaaaaaataaaaaaatatatcatacatatatcaatttgtaattgaataatattgtaaaaaatattatatatatatatatatatagattatttactaatttttaattattaatataatgtcacaatcttttcaccaaaccatgtatctaatttaaaaataaaagtagagatattgtaaaacgattaaactcaaagtttaaaattaaaagtagagatattataaattgcagttaaatatagctgaagtgttcgtgtagtgctcgacataaatacatatgtcttc

SEQ ID NO: 7916 - DNA, 441 bp, Glycine max
  unsure (1)..(441): unsure at all n locations
agcttgaagggacacccatatttcctactcccagtatctctnttaacaaaatctttcttcctagacctatactgaccacttctttcacaaccaattaacataaatgaagtccttcctctactaccagtgtttgtgtcaaacctcataatgaccgccacaaattcattttcatgagcaatggattgagcccactgcaaaacatcatctcgggtacaaacacctacaatgcaatccacacaattttacttttctaaggaacattgattttatgaaattaataacaataatcaacattattacctgagaaatattaaacgcatccaaacaatcaacatgttgttcattcacaccacattcttgttcattttgatcatccatatcaacttcttccgatattatactatcatacatccattgatcttcgtccatcttaacaacaaa

SEQ ID NO: 7917 - DNA, 405 bp, Glycine max
tttatgatctgtgtgcacaataaattctctgcccaataaataatgtctccagtgctgaatacaaagcacaagggccatcaattccttctcatagacagattttgccagattcccatcagataaagctttactgaagaaagcaataggtcgtctctgctgcattagaacagcacctatacctctgccagccgcatcacactcaacttcaaaaggtaaatcaaaatttggaagaattagcacagggggggaagtcatgatccccttcatctcctcaaaggccttgacagcctctattccccaagaaaaattgtctttcttagtcaattcggtgagaggttttgctattttaccataatcctggataaactttctataataccctgcgagactcaaaaaaccacgtac

SEQ ID NO: 7918 - DNA, 442 bp, Glycine max
agcttcaagccaaggccagactctcgtgcatgctgaggcttctcaagaaaaaatgccaaactccccccaaaaatctgatttcaagcttaaataggtgggttggtttgtgctcgcacgcttagcacaaatctaaatctcttagtgcgcataagtgaattttggcttagcgcgcttctttcatttagcggatgagctgaagcggtgcgcttgatgacctcgagtggtgcgctctgacagctcatcttcttctggattcttccttgcgcttagccactgagtgtcgcgcttagcaaatgctcgctaagccagaatattggcttagcaagaaggtgaaaacaacatttttgccaatttgcctaattaacctgaaattgagagaaattgattattaaacacacaaaaaagtataaattatctattacctatattcaacataaagtac

SEQ ID NO: 7919 - DNA, 406 bp, Glycine max
tgttcgtgtgtagagaaacttaagctttctgtgtcttctttaaataaagatccggtggtagagaccccaactagtggttctgtgttaacttctaatatgtgatttatattgtcctatggaaatttctagtagaacattcttgattgatctgatttgtttgcctttgatccaaattgatgttattttgggtatggactggttatcttccaaccatgtcttgtaaaactattttgataaaactgtggtgtttgatgattttggagtgagtaaggataggatatttatatctaccaaccaagttgtgatatctttaaaagaagatgcttaagtgcacatgatcttgtttaactttgaagtagagacaaatgtttccatgggtgacctccctgttgttagagtgtttcct

SEQ ID NO: 7920 - DNA, 443 bp, Glycine max
agcttcaaatcaattgagatatcatcaaggctatcaaaatactccacttcacaatgacctgcaaaatgggcaacttggtcgcacaaaaaacacttatcttgtcaacgcaacttcccattgcgaatacaatgcatttttcaatagatttggtgcaaacaaggtgaaatacacaaatatgtatatatattctcaaataattgtcaatatttgtacaaatgtgtttctaatgtttacaataaccatcaaatataccatagttgtttgtcctatatcatctaaacctttctacatcggatgtttttaacttttacaaaatatgctgcccatttcttgtgaattgttgttatggtctcgatgtctaatgttgtaccatcaccaaaccactacaaaatatgaaatatacaaataataagtgacgtacatataaaatgattaaaaaatga

SEQ ID NO: 7921 - DNA, 406 bp, Glycine max
cttgatttcctttgttccggaaacctttcttttctcatgtgcacccaaacccaatctccgggttcgaagacaaccttctttctccctttgttggcttgtttattataacttttatttttcctctcaatttgatctttgactctctcatgaagcttcttcacatagtccgcctttgcttgaccttctttatgattaaaaacagaaacattaggcataggcaaaagatcaagaggagttagtggattaaaaccataaaatacttcaaaaggagaacaattagtggtgccatgaatagctctattgtaagcaaattcaacatggggtaaacaagcttcccaagtttttaagttattcctcaaaactgtcctaaacaaagttcccaaagtcctattaacaacttccgttt

SEQ ID NO: 7922 - DNA, 464 bp, Glycine max
cctctagtcgacctgctagcgtgcaagcgttgactaattcagaatagactggtaattttagagacatgattggaataagattggagttttcaaatgcttggaagcattcaaagttctcatttgagatgaactccatatctatgaattttgggtctacaatggaacgagaggaaaagaggtttgtgtaccatatatgctgttcctctgatgagaataatgatccatagggaatggagggaggaattggggcttcctgtgactcggaatgccgctgactccgactcaaagttcctttccgctttttcgatggttccaccatttgaagagttttttcgggatttcaatcggttcaaatgaaagagattgaaaaaagatgaagtttgggctatgcggggagtgatttggaccaaaattgagtgagatatggctggaagaaaaattgggggcgagggttttcgagagag

SEQ ID NO: 7923 - DNA, 410 bp, Glycine max
tcttaagttcttagagaaagcctcatagaacttgttgtaatcctccttgttctctgcaatttcaaagaaaagctcaagtggatcctcgtgtacaaagtcttctttatatatctttaaatgacaaggtaataataggatctaaaatgtaaggatccaaatccatatttatcatagattacattattacaatatacttctatctaatattgaaaaaaaattgatacgtgtgtgcgcacatatatgtatatatgtacgtatgcctcatattaaaaaagtcaacttttgaatgtattatgatatcataattgaattcagaagtagaatttaactgtccaggtggacaaatcatctagaaaaatgtgacatacatggtgttaacaaacgatgcaaaatataacaaaagtatacat

SEQ ID NO: 7924 - DNA, 350 bp, Glycine max
  unsure (1)..(350): unsure at all n locations
agcttagccctagaggggatgtgacctttcatggtttggagaggatcaataacaatgcctataggttggacctcccagaagagtatggagtcagcaccacttttaacatntctgatttaactccttttgcaggtggagctgatattgaggaggaggaactaacagatttgaggtcaaatcctcttcaaggggaaggggatgatgcaatcctccctaggaagggaccaatcactagaatcatgagcaagaggctccaagaagattgggctaaagctgctgaagaaggccctagaggttctatnanccttaaggtaaatatctgagcccatgggccaatgctgggtccaatt

SEQ ID NO: 7925 - DNA, 390 bp, Glycine max
tgaacatatacacatactataacatatgttgatgtacttaattttggggtattcatatgcagataataactggttaggaaatagttaatcacattaaaggggaagaggaaatatatcttgttgcgtgagtttatacataaaaagtgttttagttattagtttaatttactaatctatgagaaataaagtggaggtggtggatgattatgtattgtgttgttaatggtactggaataattagttatagaaatatgggtgttctgctaattggtttttgttttttgtctttgtacgtttcaaatttgtctgaaataacattaattttaagtaacgaataataatatatattacaaaatttagttatgcaatatttcacaagtattaggtgaa

SEQ ID NO: 7926 - DNA, 379 bp, Glycine max
agcttatcagaatcatcgatgtttcacacttgttgataattgaaagaatttgtatatatatataacacattaaggatctaatcgtaacgtgatactaattatttgagtccttatggaaaaaaattgtttagaaatagaagatgatatattcaaccctgtaaattaaagtagtttgagttagtttggttaattagttatttttactttagatctcaatctaaaatttggttcaagttttgaatttatccttttaaatctgaactaactagatgacctaggaaactatttctaaattaatatattatacactttggtacttaaatttctcctctatgtttttcttcttcattcatgttgatgttttaatgattctatctaa

SEQ ID NO: 7927 - DNA, 390 bp, Glycine max
tggaagagcaatggacgtgaagatgtatatataattatgaattatgagaaatttgcgacaggagttgctgaagaaagtagatctatatataatatagatatagattaattattaatgtctttttaattaatacttaataatagtatttgttaaagaaataaaaaaattaataaataatacattatttaatgtattaacaagttaaaataatttatacttcaaataagatttttttacgtttagtagcttttagttttttttgatttttttttcagcccaagcagttgcattttttcatgagagatgaatgcacaaagcccaatctaaaagttgacatactagtaatacactaatactggttctgctaccacaataaagttctgttatatg

SEQ ID NO: 7928 - DNA, 394 bp, Glycine max
agcttgagaggattgatggggacccggtgttgatagaaacgaggatatgggctacgtgggagtacgtgagctcagttggaggtgggcaacaggggatggtgggtttatgcgcgatttgtggatgtggaaaacttgttgtgcaccatcgcccgaccgccacctattaccacatgtgatgggtaccccataatcctacaagcttgagatgaggaagtgtagaagggtgaaacttcctgcttttattcgttgaccacaaagtggtacctggagatatgtcgcgggggtcaggagaccttggggacgtcaggtagggtgctattgcccaaaaccaagcttgaccaatcccgacccaacccgggcatatccagtcagtgagaacctgtgatgtacctaa

SEQ ID NO: 7929 - DNA, 395 bp, Glycine max
  unsure (1)..(395): unsure at all n locations
tcataggttacaaatattntgatatcttttaaggtatattntgaattttgttacaaactctttaaagaatttaattgtcataacgataagtantaatgtcaaccaattaaataaaattttttacatcgttagtttattgtaataaattcattgttgaagtgtgaaattaacatatttgaacccaaagtttttggcataagttatttgacacactcgggttccttaatcaaggtttgaggtttgatccatgacttggacataaagttacaattggaggtaccactttatcccaaaattgactgatatgatgggagactacttaggtggcaaataggaagtctcagatacctcctaaatgcaacaaaagaaaaaagatattaacatagttaaaacct

SEQ ID NO: 7930 - DNA, 429 bp, Glycine max
agctagttggatgaaatagtaaagctatagcatcactcttaaataaagtaacgattgaggacttcttaatcatgacatacagtattagagtagttactcgcttactctcacatgaatattgaaatgactattaggagtaaaaatagactgaaaatatatagttcctcctacattttaagttttgcatagcctaagctacaacaatagaagaatcatatattaacaccataatattagcactttcacataaaatcatattacaagaatgttacagtccacaggtagcattatcaatgttatcagcatcaatttgatcgatgttaacttggtgtgattgatagtatgcatgataattctcttcttttttctattataatcatatatttgtgttgactcggtcaacactatttttttaaaattagtattggc

SEQ ID NO: 7931 - DNA, 391 bp, Glycine max
cgaatacaatgaaacttgttaacttaccaaagctaagattcacttaattcgcttaagtttccttcgtccagttaactgacagtgttacatttctttgttcagtttgtttcatattattctcttgtgatttgacaacattagtacgaacatcttcaagctttgtatagactttagagcttctatctgttgagagatctcagctagccgttgtttaatagttttgacgttttacacgaggatgctactgtgcaaagagagtagggacaacaaacactttttgtagcatatcttcatagaaatataatttgtcaatgtcacataatgctcaaagttgactttcagcgtacaaatcgaaagaaacattaacattatagaacaaacagaattgaaa

SEQ ID NO: 7932 - DNA, 406 bp, Glycine max
  unsure (1)..(406): unsure at all n locations
agcttctcccccaattttnnnnnntagggggagaagtgaagtgaaaaagggttcagccccttaggcacttctctctctttcgaatttgcttgaaaaaattgtttccgttaagaaaatccaagccgaggcgcttccgaaacgtttccgtaacgtttccgtgaggaatttcgtgaaggtttcgaccgttcttcgacgttcttcattcgttcttcatcgttcttcgatcttcaacgggtaagtacctcgaaccaagcttttcgattcattctatgtacccgtggtggtccacattgtgtttcgtggtattttattctcgtttcatttacctttttatacccccttntgacgtgcttaagccattttctataaggcatttctcgcttaaacctaaaaaaaaaaaatattt

SEQ ID NO: 7933 - DNA, 396 bp, Glycine max
tcaggctgctcaattgctccaggttgctgcatggaatggcaaaggtctgtatggtggtcagcagaggagcacaaaccacaaacccttgcgacaggtacagatttctgattcaaggccagctgggttaccaagttaaccaatgcatccagtttgccttcaagcttcttagtttcagatgatgcagatgggtttgtagctacctcatgcactcctctaatgactatggcatcatttctggtgctaaactgctgggagttggaggccatcttctcaattaaatttctagcttcagcaggagtcatgtctccaagggctccaccactggcagcatctatcatacttctctccatattactgagtccttcataaaaatattggagaagaagctgttctgaa

SEQ ID NO: 7934 - DNA, 426 bp, Glycine max
  unsure (1)..(426): unsure at all n locations
agcttgtaaagttcccccaatttatggttatttggagtaaattttgtaaataaatcttgttttatggttaacactgtctctagaacatttccattggatttaatgatggaatctatgcattttcaggtgaaaaagaggctaagttttgaaatgcaaaaagtagcagttgggctaagcgcatatccaccgctaagcgtaaaggagaatctggcagagcatcaacatcaaagttgcgcgctaggcgcgagatcagtgtgctaagcgcagcaggtgccttcagccaggcttagcacaagactagcgctaagcctaattccacttactcgcgctaagcgcgagggtggcgctaagcgcaaggtcatgaattttgagcctatntaaagcctgttttgtgcaaaattatggtacagacacacgtacaccttt

SEQ ID NO: 7935 - DNA, 376 bp, Glycine max
  unsure (1)..(376): unsure at all n locations
tcaagaaaaagatggcctcagcaaattccttatttccagaagggaattctatcaatagacctccaatctttaatggagagggttaccactactggaaaacccgaatgcaaatttttattgaggcaatagatctaaatatttgggaagccatagaaatagggccttatatacccaccacagtagaaagagttacaatagatggtagttcatcaagtgaaagcataactatagaaaaacctaaagatagatggtctgaagaggatagaaaacgagtacaatacaacttaaaagccaaaaacataataacatctgccctgngaatggatgaatatttcagggtttcaaattgtaagagtgctaaggaaatgtgggacac

SEQ ID NO: 7936 - DNA, 396 bp, Glycine max
agcttgagaaagattctcagagctcccaattctatttccaattctcccaattctatttccaattccagcctgatccttacaattcctcactcctcccaatataaccgaaacattattctaactgtctctcctctaactaacttccactaacaaaaggtatcgggccttaggtggtttgggccttccagaatatgtcttaaaggggcctattccattggaaaataaattcctggaagaacatcccttccaaaatattaacaagcaaaaagaaaaaagtgcttaaaataaaaatggagaaaaaagttaaaacctagaaaaccaaatgttgaagtgagacacaatggattggatgaatattataatgatcctatctatatcagaaccaatgcatatctg

SEQ ID NO: 7937 - DNA, 338 bp, Glycine max
tcttgtccaagacactctcttggtggtgaaactcctccttccatggctaattccctagtggatggcgcctcctctcacgtcttctcctttatcttccactgcatctatggttgaaaatcaccactgaaggacctcattgaagctcaaagatccagcttccgtagaagcttctcaagcaagcttccatcaagtggtatcagagcaaaagagcttcaagtaagtgctccttaaacctccattaaagttcaactttaccttctccttcatttgggcttcttcatttttctctatgtatctccccacaaggcttgagctggaaggtggttaaaataaatttt

SEQ ID NO: 7938 - DNA, 444 bp, Glycine max
  unsure (1)..(444): unsure at all n locations
agcttgaagggacacccacatttcctagtcccagtgtcttttttgataaattctttnttcctacacatatactcgccactcctttcacagccaattaacacaaacgtactccttcctctactacttgtgtttgtgttcgaccttaaaatcaccgccataaatccgttttcatgagccacggatcgagtccatcgcaaaacatcctctcggcactcaaacacctacaaaatccacataatttaagttttctaccagtattcattttattaaatatgtgacaaacattaacattataacctgagaagtcttgaacgcatccaaacaatcaacatgtgattcattcacacccatgattctgcattttcataatccatatccgctcgttcagatattattgcatacattcactcatcttcatccatctaaccaaatcaaacaaataat

SEQ ID NO: 7939 - DNA, 405 bp, Glycine max
tagtgttacaatgttaggggcttggttaatcgagtcaaatgaaagattattaagaagcttagtgttacgaatagggaagaagggttgcaggaagtaagaaaacagcagcgcgaagagaggcccaaaaggaaaacgaaggctccaacgtacatggaggactacgtgtgaagtgtgagaagcatgaagatgcatgcatggaagtagggaacgagtaaccacttctgttagaggatctggaatattctagattcagttagaatgtgattgtagttagctaattctgttagatctcaactgcaggaagtataaaaccttgtaaatgttcatacatgaaataacaagcaactaaacacgatttcttttctctccttcctttcttctctctactaaccgaggcccttggtc

SEQ ID NO: 7940 - DNA, 462 bp, Glycine max
  unsure (1)..(462): unsure at all n locations
ccttagtcacctgcagcatgcaagctnttgatcttgcaagcaaaattagacgtgtcaggaggatgatgtccttatatatgacgattctgcccttttttgatcggtggaggatgcattgaagacaaatgtttcattttgtcttttgctacaggcgagtgcaacacacacgtattactcttgcatatgtgtcactcatggagtgggcatgtactgaaaacgcaatacgtgggtgagtggagctgcatcatggtttaaaaaattaaggcaccatttcagcttatgcaagttaccaaaaagtcacgcctccactttaaatggagtgaaagtttgatttttgatcgtcaccattttttaatttctgctttctctggatacaagtgtagcaacatttacaatgtttgatcgatatgttcatcaaattctaaatagaagggcttccgaattccttcgtacccaaaatgg

SEQ ID NO: 7941 - DNA, 406 bp, Glycine max
tagacagagaagaagagagcttagatagagaagaagagagtgcagatcgagaagaagagagcgcgagcaaataggactcgcgtctgatatattttaaaatgtaagtccaacatcggttttcaataaaaaaaacaccgatgttaacaaaatgatgttaacgttaacatcagttttctggaagaaaccgatgttaacttatcatacattaacatcggttttcaaggatttattttgggttttatttttatttgtagtttcaaatactttatatttaatatttatgaaggtgacgcgataaacaaaaaacatgccaccacaataagaatcataagtgacatgctgggacaagtgtcaaaaaagaaaaagaaaaacatttaaaatgttcaaacagtatagaactactgaa

SEQ ID NO: 7942 - DNA, 440 bp, Glycine max
agcttgtaggattatggagtacccatcacatgtggtactaggtggcggtcgggcgatggtgcacaacaagttgttccacatccacaatgcgcgcataaacccaccatcccctgtagcccacctccaactgagctcacgtactcccacgtagcccatatcctcgtttctctcaacaccgggtccccatcaatcctcccaagcttccccaacatcaaagtaatacaacattcaaacagcacaaactatcacagccaagaaaacagagcaaaggcagaaaactctgccaaaacaccaaccaaaatcacagcttttctcacttaaagaccccagtaacaattccttcgttccaattcgttaaccgttggatcgactccaaattcttactggaagtctctagtacataagcctacagtttgaccgttgggatctactagcaaaca

SEQ ID NO: 7943 - DNA, 406 bp, Glycine max
tggctctggccattagaaccatttcattcttaagttccttaacctttaaatagacattctggtcaagtaagtgcttttctgcatcaaacagatcaaacttgatcttctaatcatctatgcccatttctagtttatcctttcccatatccaccacacaaccggcggttaacataaagggatggcccaaaatcaaggggattttagcgtcctcttcaatatccatcacaacaaaatctgcagggaaactaaactgcttcaccttaaccagaacatcttcaattatgctataaggtcttgtaatagaccgatctacaagttgtagtgtcattctagttggcataatctccaactctctaattctcctacacatggagagaggcatcaaatttatactggcccccaaatc

SEQ ID NO: 7944 - DNA, 438 bp, Glycine max
agcttgaatttccgtccaaaagttttaggttttgttcatttcttaaattatattgtttgtttatttgcaagaacggactttattatataaacatggattttatttttggagtagtttatttgtcttgtaggttcagattcggcaccacccccatccccaccaaaggcatgtgttgatgaggactgacgatagcaacaccaccaccacctaatattttctataaacaattaatatattgtcccacacccaacattaatattgcttacgaggaactttcctacccctccagtttagtactaattaagataattaattaacttggaatatacagagagattttagtttgaatttataggtttggtagggtatgtttgaatatgcatattcaaacatatgtatataaaaaaatatttgttaaaaagtcgatttctttaattc

SEQ ID NO: 7945 - DNA, 410 bp, Glycine max
tttgacgtagtttagactttggaaggttgaagaaatttcgtgaaatggggaaggaaaaaaaaagtaaatagtttatttagtaattatgcattcactgacaacttagttactatattttttaaatcatcgatttaattttaaataatcaatttaatccacaaatatgcaaatactacaaaaattagttcaataaatatggaaaagatgaagaaataatggtatcgtttaataaaaatattacagtgggataaagcatttgttacaagtttagtgcatcctaaaaatagaataaaactatacacaatgacccttgcttcaaaaagattattaataagtggtacattttagtttcactaaacagacagaaaaacattttggtccacatttaatcggttcatgaacacccctaa

SEQ ID NO: 7946 - DNA, 356 bp, Glycine max
agcttgcttgtggagcttctatggagtctggatctttgagcttcaatgaggtcattcaatggtgattttccatgattgagattcagcggaagacaaatgagaagaggtgagaggaggtgccatccactagggaataagccatggaagaaggagcttcaccactaagaatgtgtcttggataagaagcttggagaggatgcttcaatggaggaaaagaaagagagaaggggggagcacgaaattgaaggaataaaagagggagagaagtggaactttgaagtgtgtctcataagactttcattcatcaaagttacaacaagtgttacacatgcttctatttatagactaggtagctt

SEQ ID NO: 7947 - DNA, 409 bp, Glycine max
tctatttattttcagtagatgaagatgaatctgtggccaccaaatggacttttctaaggaaaatagcatcatttctcgcactgaattgttgggagttggaagctttcttcccaatcaaattcctagcctcggcaggagtcatatcactgagagctccaccactggcagcatcaatcatactcctctccatgttgctaagttcctcatagaaatattgaagaaggagttgctctggaaactggtggtgaggacagcttgcacacaatttcttgaatctttcccaatactcatacaagctctctccactaagttgcctgatgccttaaatgtcttttttgatggcagtggtcctagatgcggggaagaatttctccaagaacaccctcttaaggtcatcccagctgaaaat

SEQ ID NO: 7948 - DNA, 423 bp, Glycine max
  unsure (1)..(423): unsure at all n locations
agcttgcgggctataccttcgaccaaacactgtcgtgtntntgtctcggcctggatttaatgcgggttgtagcaccggctccgcttccctaactgtactggaggcgattgccgtggctntatcctctatagttttctggagttttaacatgacctccgagatggaagccatttgatcttttaaagccgattgatcggccttcatctgttcctgcacgccctcttcattatccatttttctggatcgagtgttataggggtgcctcggtgttttcttagttatgatgaaattcctaaagaaataaacaacggtgagtatgccaccaaaacatgaatatgcaaatgaatgattggagcacttggatccaccccaagggttttttagataacatgatgagtttagaacttctcattctataaaaag

SEQ ID NO: 7949 - DNA, 389 bp, Glycine max
tgtacctctcccttccttaatggatgcatcaaagttacccttgatcaagcttgtccttggcttttcccacttccttatattcttcgtggtattggatggaggttgtttggggtcactaaggttgcaaccatactcaagaaaatcgaaatagaatgtcatttttcttttttgaaaacccaatcatttctaccttggtttctggattaaggatttgcatatttgaacaaaaccattatgcaaatgaaaaataatctctaatagaaaagaggccaccaagaggagaagcaaactagattcttctaaccattttgcatatcagaagggcatgggcaacattttgggggagagaccacatatggggcaaacgttctccacatgcactcccagct

SEQ ID NO: 7950 - DNA, 431 bp, Glycine max
  unsure (1)..(431): unsure at all n locations
agcttcaagccaaagccagactctcgtgcatgcataggcttctcaagaaataatgccaaactccccccaaaaatctgatttcaagcttaaataggtgggttggtttgtgctcgcacgcttagcacaaatctaaatctcttaatgcgcataagtgaattttggcttagcgcgcttctttcatttagcggatgagctgaagcggtgcgcttgatgacctcgagtggtgcgctctgacagctcatcttcttctggattcttccttgcgcttagccactgagtgtcgcgcttagcaaatgctcgctaagccagaatattggcttagcaagaaggtgaaaacaacatttttgccaatttgcctaattaacctgaaattgagagaaattgattattaaacacacagaanagtataaattatctattacctatattca

SEQ ID NO: 7951 - DNA, 382 bp, Glycine max
tgttcgtgtgtagagaaacttaagctttctgtgtcttctttaaataaagatccggtggtagagaccccaactagtggttctgtgttaacttctaatatgtgtttgaattgtcctatggaaatttctagtagaacattcttgattgatctgatttgtttgcctttgatccaaattgatgttattttgggtatggactggttatcttccaaccatgtcttgtaaaactattttgataaaactgtggtgtttgatgattttggagtgagtaaggataggatatttatatctaccaaccaagttgtgatatctttaaaagaagatgcttaagtgcacatgatcttgtttaactttgaagtagagacaaatgtttccatgggtgacc

SEQ ID NO: 7952 - DNA, 401 bp, Glycine max
  unsure (1)..(401): unsure at all n locations
ngntcttccttctgacagtctctcattcaggtgggagtgggattcccgcattgaaccaaaacgatcgatccaatgggacgatggttttgattgctgcatatacagcgtgtgattgcaagtctctggtcctatgagtaacagaggggacggtagttcgcgcctatattagaggaatgatgcttgtagcaagtgccggcttgtcgttgagagaaaagatgaacaaccccgtcttgggtgtgcatacgacagagtctctgccctctccacaacatttgtttctacaattgacctcagtccatacttgatggcgataatcaaacgagtagaacacaaattcacctgcgattaaatataatgtctatatcttatgactaaacaatatatgctcgaactattagggg

SEQ ID NO: 7953 - DNA, 394 bp, Glycine max
tgacggagtttggtgcatcggggaataatttcactttataagtgggtcccaattggattcccaattttcaacttacctatttggaagagatatcatggccgttaggtcccagctttccattgtggattcagtcacaaaacaaacttgaatatgttggactatctaacacggggattttcgattctatttccacacagatgtgggaagcactttctcaggttttgtatttaaacctctctcgtaatcatatccatggtgagattgggactacattaaagaatccaatatctatcccaactattgatctaagctcaaatcacttgtgtggtaaattaccctatctttcaagtaatgtgcttcagttggatctttcaagcaattcattctccgaatc

SEQ ID NO: 7954 - DNA, 429 bp, Glycine max
agctttaggtgttggtccagtgggagggattatcacccgaggatacttcatgggaagactgggactagcttatatccacatatcaccttgaggacaaagtgattttggaagacgtatggaatgctatgaaggaggaacctcacgcatgattaagggaaaggttacaacacctgcgtaccttaggaactacatctaatggcattgatagttgagctgacaatcttgtttgccttatctttttttgtctgccatttccattttccaattaattctgttatgattttgttattacaaaattacaaattctgttatttttaatattatatatatataggacccatgtaataagacacagtaatgaatattacctagatatttccatgcctctcttatttaggaggtcatggtcctctaagcctatgctcttat

SEQ ID NO: 7955 - DNA, 397 bp, Glycine max
  unsure (1)..(397): unsure at all n locations
tttacatcctaganaaaccatgatttgttgcatcccagctctcgttacaagcctagaaaagtccttcggatttcatttgtgtgttcttgactgtatgatatgagatgaagtgcaaagattgagacttatgttggttgttgtttgatagaaaacctaaacacttgtgcttgagtgaaacagtgagcgtgaggctttgggtaatgatccttccttgatatctgtgatgtgtcatcattttctcctatttcttaaccctttttgtcaccattttaattactgattagccttaattgtcaaattaattaagcagttttatcatttgggcctactggattaattttgtgtctttaatttaattttaggagaattataaacaattgggcttgaatccggaatt

SEQ ID NO: 7956 - DNA, 425 bp, Glycine max
  unsure (1)..(425): unsure at all n locations
agcttcatcatcaacccaagaaggaagtgataagaaggatttgattgaaatagacgaagatgatgattgcccaaaatgttatgaatgcaatcaacttggacatctgagggttgattgcccaatgttgaagaaaataatagagaaatctgaaaagaaagtcttcaatgaaaagaaggctaagaaggcctatgttacatgggatgacaatgatatggactcttttgaagaatcagaaaatgaagttgtaaacctgagtctaatggcaaggaattatgaaagcgatgaaaaggtaacatcttctgaaaataacttatccatttcatttgatgaattacaagatgcatttactgatttacataaagaatcagttaaacttgcaaaattagtttcatcttctaagaaaacaatntcaaatctaaaaaaag

SEQ ID NO: 7957 - DNA, 396 bp, Glycine max
  unsure (1)..(396): unsure at all n locations
tnttggagtagaaacatgggaccaactcattttatttcataaagaaagttgtatctggtcaaggtctgagagaccatacaagtttcctagcgatttctaattatgtgggccattaagtctatcatatgctgacaatagccgagaagcccatgaacctcttcgggggcgaagtaggtgtgcgccatcgccttggccttggctaacaagcggggaagttcttgactcccgttcaaggtaagagcaaaccgatccatccacatgggtgcctcttggtgtaaagagacgatcacccttcctctagcctctttttccgcgtatacttgggcatactcgtccgcgatcctatgctcgtgagctgtggctagacctaactcttcttggtacttggcgatgata

SEQ ID NO: 7958 - DNA, 364 bp, Glycine max
agcttctatagaaagttcgttcctaatttctctacaattgcatcacctctcaatgagctggtgaagaagaatgtggcatttacctgcggtgaaaaacaagagcaagcctttgctttgctcaaagaaaagcttactagggcacctgttctagctcttcctgacttttctaaaactattgagctagaatgtgatgcctctggagtgggagttagagctgtattgttacaaggtgggcaccctattgcttattttagtgaaaaacttcatagtgccaccctcaactaccccacctatgataaagagctctatgccttaataagagccctccaaacttgggaacattaccttgtttccaagagattgt

SEQ ID NO: 7959 - DNA, 339 bp, Glycine max
tgttgatgctaggcaggggatatgcatctttggaacacgtcatgtacaggttggtgtagtctgtgcacaatttatgtatttgaattctctgatgaactgggatttaagcagcttgtcaatctctccactggctactttgtgtagttcttctcccatcttccttttcttttgtgagactggtttggcctgagggaagatagccattttgtggcatataatgttagggtggatgcctggcatgtcagatggttgtcaagcaaataaatctgcgacttcagctataggtctgtgctcgtggctaatgaggtctttgttgagctgtgtgcattgcccaaactt

SEQ ID NO: 7960 - DNA, 320 bp, Glycine max
  unsure (1)..(320): unsure at all n locations
agctagatggtatgctaagcctcacatctcatgctaaacgcatattgtagaaaaaattggtgttgcagaaagcgctaagcgcgttctaagccccagatgcttatgggattgtacaacttcaagttgggctaaccgcacggttaggctgagcgcttgggttttaaactcaaatgtcacgttggcacgctaagcgcgccatacaaatttcattttttaaaaacaaaggcagaggcaatttgngttgctacctttgcaccctctaaaccttgagcaaattttttactttctgctaccggtgaactgcttctttgatcatcttt

SEQ ID NO: 7961 - DNA, 375 bp, Glycine max
tggacttcttgtgttctgggaacctctccttcctcatgtgtaccaaacccaatcacctgggtcaagcacgactttctttctgcttttgttggcttgccttgcatagctcacatttttcttttcaatttgagccttcacttgctcatgcagcttcttcacatacttagctttagcctgtgcgtccttatgcttaaacatagcaatgtgtggcataggccacaaatcaagaggagtcaaaggattaaatccatacactatctcaaatggtgaacaattagttgtgctatggacaacccgattataagcaaactcaacatgaggcaaacatgcttcccaagatttttctttaaaacagtcctaagcagtgtgcctaaa

SEQ ID NO: 7962 - DNA, 334 bp, Glycine max
  unsure (1)..(334): unsure at all n locations
gctagacatgatacatggcagggctgggtttggttcaaggataaaagggctgccccacattattcccatgacacanatgcggnnnatgacgattttataaattttatttttaaccggncacgcatgcgcctatgcggacgctcaagtgtcaaattactatggtcatgagacgctagggctcatgactcatttcctctatgttaaaacaacccagaggttccaaaatatgttcacatatcaatttgtgcatacctccaagaccatagcgggcgctcggggaaattaacacagcattcaccctccaggtgtagacacatgagttctcttcaaaaat

SEQ ID NO: 7963 - DNA, 386 bp, Glycine max
  unsure (1)..(386): unsure at all n locations
ttgttagagcttagaattcaatgagattntatcttgtcctttctatctattaatctttacattcttccaatgcttgaaacaccaaactttggcgaaacncatttttgttgatattttctagagcannctaagcagaatctcctataaattcatacgaggctataacttcaactgtgttcaacacaatcatgataagtgcatgcctctagttcatgcatcacaagtcacaaatcacaacctaaggcaatgcattccaaaatatttacatgggattgtattagaaatttcttttatctttaatcatttatttttaaccaaacaaatggacaactcaatcatccaccgaataccagataaaacttcaaaaaggaaaaaggaaaactata

SEQ ID NO: 7964 - DNA, 357 bp, Glycine max
  unsure (1)..(357): unsure at all n locations
agctntgattcaacaaccttaaggactgcaactgattcaatggttgatacattgctagtgcaactaggacaaagatgtacaaggccaaagtaatcggaacgaagacaaggcctgtgtatctaaaacaaggactataccaatgcatttagtacgaggatgatgctcatggagagagactccatagaccaagataatatgacctacacatgacattggcaaaagatatacaatgacataaaattcatcagccaatgtatatatttatttcaatagttagttttatcaaacactcgaaatttataaactaacttttgagcttctagctactaaatttcattttttagcttacagctaaca

SEQ ID NO: 7965 - DNA, 407 bp, Glycine max
tgagtccatatatactgtgagcttaagtctaccgatggtgctcgcaagttatttgataaaacttggaaagaatcataaatgtctggattggattaggttacatatgtgcttaaagattgtgttgtttcagagctaccagtctgctctctcaagaagggtaaggagactcatgccaacattctgtgaaatggctatgaagcaaattttcatgttatgctgtacaagctaagtttggcagggaatcatatgcaaattctgttctttgtgcaatgcctgacaataaaatagtctcttgagcattatgattgcaagttatatgaaaaatgaaatgcctatgaaagcactggaactgtttcagttaatgatgcttgaggcatgtgattcagttccaaaatcagtaacaatgg

SEQ ID NO: 7966 - DNA, 439 bp, Glycine max
  unsure (1)..(439): unsure at all n locations
agcttcctcggngccattcctgcgaaggcaaacatttggaaagttagtttacaagaaatataacaatcattacaaacaagggccaaacaacacttctcatggcccgagtgtcaacatgcactttataaaataatcatattggggtcgtgctattttatgacacatacgtatttgcacacataaaaattttgtgtgaagcattttacgacacctatccatgtacatattttttgacaaaccttttcatgctacatcctatatatatacacacacatttttttggaaggcttcttttgttacctactcacaaatacacatattttgaaaaacacttttacgctacccatccaacactttgtaaggcacttcatgctatatattttcacattatgcaaggcattttattcaactntctgcaaggcattttattcaacatttt

SEQ ID NO: 7967 - DNA, 410 bp, Glycine max
  unsure (1)..(410): unsure at all n locations
ntgcggatttggtcttcgccagtgaaaggatcgatgtgggtccgaaaagaggcaaatttagtcatcctgcttggacaaatgagaaaactgggacaaatgaagaggatgaggatgaagtanaagcccatgctgtgactgccattcctatatggccaagtttcccaccaacccaacaatgtcattactcagccagtaacaacccatctccttacccaccacacagttatccacaaaggccatccctaaatcacaccacaaaacccacctactacacgaccaatgctgaaacaccacttttagcatgaaccgaagcaccaaccaagaaatgaattttgcagcgagaaagcctgtagaattcaccccaattccggtgtcctatgctgacttgctcccatatctacttgataatt

SEQ ID NO: 7968 - DNA, 404 bp, Glycine max
tctaatgtctctaaatgaccgctcatagataaaggaggtaggggtgcacagacaaccaggaggtttgcctagaatcatccacccttgaaagagtgcgtaatagctcactgatcgagcgctcttgcgccgaagatgaacggagctcagcgatctgacgaatctgtgggatgtaaaaaacaatctgtaggggagcgttccagcataaagggaaggacccgcacgagcagtgctgtacgaatcggaagcgagaatgtaggcttgagtaacacatacgttggtgagaatccaatgcttctaatacccaatggttcctccgcaaggttcttccatggagggagagtcagggccttagatcaagccgaatggtgtagtcgatggacaacaggtgattattcctgtactcg

SEQ ID NO: 7969 - DNA, 467 bp, Glycine max
  unsure (1)..(467): unsure at all n locations
tgaggcgnccagcntttagaacccttgcaatagaagacactagagaacacgcgagcttatccaccatcgtctcactggacgaccttgaccacatgtttttccgctgtcatttttagtctaaagagctagacactatctggtaccgctctcgcggcccgtaccgaaacagtgctttacccctaaaagtgtagtcaactgctgcgcctcaacgcatttcggggagaaccagctagctctgggttcgagtggcatttcacccctaaccacatctcatacgctgattcttcaacatcaatcggttcggacctccacttagtttcacccaagcttcatcctggtcatggatagatcacccaggttcgggtccataagcagtgacaattgccctgtgaagactcactttcgctacggctccggtggtttgccttaaccaagccactgcctatgaggcggcggctcattctttn

SEQ ID NO: 7970 - DNA, 104 bp, Glycine max
  unsure (1)..(104): unsure at all n locations
acactatnagaaactcaagcccgnagaagaaggagcgncaccgacatgtaagncgcagcttcgntcaccatcggccatcccgcgccaaaactcaacgggcccac

SEQ ID NO: 7971 - DNA, 428 bp, Glycine max
  unsure (1)..(428): unsure at all n locations
agctntgagcaaattcaaacgacaataactntagactcggatgtccgattgtgtcccgtaatatatcgagatactagaaattcagaacagaagctattagaataatcaaacgacgatgactttttacacggatgntccgatgggtcccataatatgtctagacgcttgaaattgaaaacagaagctttcagcatattcaaaagacaataactttctactcgaatgttcgagtgagtcccataatatatcgagacgctcgtaattgaaaacagaagctcagaggaaattcaaacgacaataacttttgactcaaatgtccgcttgagtcccgcactatatcgagacgctcgtaattganaacagaagctctgaggaaattcaaacgacagtaactttttactctgatgaccgattgagtcccataatat

SEQ ID NO: 7972 - DNA, 391 bp, Glycine max
  unsure (1)..(391): unsure at all n locations
tctgttttaaattacgagcgtttcgatatatttcgggactcaatcggacatccgagagaaaatttattttcccttaaattcgctcagagtttcatttttctattatgagcgncncgatgtattaggggtctcaatcggacatccgagttaaaaattattgtcgtttgatttttctcaaagctttcgttttcaattacgagcgtctcgaaatcctacgggacacaattggacatccgagtgaaaagttattgtcgtttgaatttgtttagagcttatgttttcaattacgagcgttttgatatcccacgggacacaatcggaaatccgagttaaaagttattgtcgctagaattttgtcatagcttccgttatcaattatcagcgtctcgat

SEQ ID NO: 7973 - DNA, 391 bp, Glycine max
agcttcacaagcaagcttccatctacctcagccttactgggccatggtcaatcatcaatgctacgctctttggttgtcttgggcctcggccaatcatctatatcacactctttggttctattggatatagctcactcattagtgtaatctctgacccattgctcaatcattagtatttcacttgagccttattagatcataatcaacaattaatgctacacttgggcatttgtgggccttgatcaatcattaatactatatctaggccctattgagccttagtcaatcattaacactacacctatgccttattgagacttggtgataaatgtcaaatttattggattttcatatgcattttatgacgtttatttcgatattttagttaact

SEQ ID NO: 7974 - DNA, 362 bp, Glycine max
tggtactgttactgatattctgaggcggaagcaatggattactccatccaaatcagacaccatatctcatagatacttatccataacgtgctacacgcacactaaataatgatactttccgctgatctcagactagcgcgattggagtgcatatgagcacactgttggtcatgaagatttcgatgatgggcgaaacgatcaaccccttgcataatcgtgcgcatcatctataagggcggataatgtaaatcatgcctgttatgatgatgtcaaaaacaattagattgacgcgtgccgacaatgtggctcggccattgtcttgaagataacacacacaagacactttattgtgattatcaaaa

SEQ ID NO: 7975 - DNA, 429 bp, Glycine max
  unsure (1)..(429): unsure at all n locations
agcttacattattgttggcaagtctatatatattattttttagaacaaaaatattccttgtctctaactgaaaaataaataaaaacagggattcgactttttttatgcgaacaagagtataataagtgatttgactcattaataaataaaaaactcgacaattgatatttgaatgtattcataattctggtaactcgttatgcatgtgcacataatataaatctattaaaaggagttgaagccaaaggattcatanatatctttttattnttaacataaagaagaacattacgattctctataaccaaataaaagcattcaagattatagattataacatatcctacggattggtatttataaaaatacttatcatgaccagaaaagcaagaatatgcaatatccgaatatctactacttgattaagtt

SEQ ID NO: 7976 - DNA, 391 bp, Glycine max
tcgatgaggccctattaataatacgcgcaaaacaaattgtagaaatttaaaattatttacatattacacacatcgattctcacaaacatataattcatccctcatttctcttttcgttctctccaatttcccgaaaccctaatttcctcaatcctggttttggaattcgacaatggagcagaagaggagcagcaagatgtacaacctgttcgtgaagcacttggacgggaaaaccctaaccctcctattcccctctccgatcctctacgcgagttccatcaaggatcgcctcttccaactcactggaatccccgcccaccaccagcgccttgtcaccggctgtcgccacctcaacgatgacaaatccgctatccagtgctccccgggggac

SEQ ID NO: 7977 - DNA, 376 bp, Glycine max
  unsure (1)..(376): unsure at all n locations
agctntctccctattntcctataaatagggggagaagtgaagggaaaaaaatgttcagccctcttggtaattcgagatcacttgaaattagtgaaaaaaattgtttccgtgaagaaaatgcaagccaaggcgcttccgtaacgtttccgtgggtgatttcgcgaagattttcaaccattcttcgaccgtctttatttgttccttcgcgttcttcggtcttcaaccgcgtaattcccgaagtcgaaattttcaattcattctttgtacccttagtggtcctcatttgttttcacgtgcttttattgtcatttcatttactttctcgaccccctttgacgtgctttaatcatttacttaagtcatgttctcgcctaat

SEQ ID NO: 7978 - DNA, 397 bp, Glycine max
tggaagaagaagaaaaactgaacctctctccctcaatgttgaacttgtgaaaatggaggaatgacggcttcaattttttttcttcacaatgaacaagaagataaggcataggtttcaaggtgacaagacttattgacacttgaatgaccccttgcccagccatgttgaacatgccacttaatgccacaaaatgggtagttttgctttttgcaaaactataaaaaatggaaggtataggagttgccaaaaatgggtatttttgttttttttttatcaaaactagtaaatcttatcttaattgcctaggttattgtgttaatttttctaagaatacgtgtacctagagtgaacctcacacggagttcaattacactatcactcaatgcacaatgtaatt

SEQ ID NO: 7979 - DNA, 422 bp, Glycine max
agctttattatgccctctcccctcggcggagatttcttcttcagcgaaagcgagatggttgttggcagtgatattattgaccagccctccgaaaccttctaccgagatgtcttgggccacgtgggcctcgttcagaacttttactaacatagcccgatgaggctcggagcttatgagttactccaacagcgagaccctggccggggttatgttgagctgttcgataaccttgaattcgctctgctgaattatacggaggaactcactagcttcctctagtgaaacctcttttttaccccttcgaagtgaggggtgcttcgtcatcttgttcctccaccacttttgctttccccttgacgttagcgggttggactgataggtccgcgggttgcaacacacgaccactacgggtcacaccactc

SEQ ID NO: 7980 - DNA, 354 bp, Glycine max
tttctattcattctatgtgcccgtagggtcccatgtgtttcggcttttattctcgtcaggtactatttataccctctgttgacgtgcttaagccattttacttaaggcatttctcgcttaacttaaaaacaaaataaatttccaccgaacgtttgaattgtattatccattaacttcggttaaaataaattccgaccgttcggtcgtgccgtaaccacgttggaaatcaaaaagagggaaaaaataatataataatcaaaaagacatcttttagtaaaataaagcggaaaatcaagtggacgttttctctttgcgatttctcattcttaatcgaattgattaataactaaaagt

SEQ ID NO: 7981 - DNA, 398 bp, Glycine max
  unsure (1)..(398): unsure at all n locations
gattaatagccctttaccaaagctttgatggaagaaacctcaagagcacttatatgaagcttggaagaagaaagaaatagactcctctctcccttggtttagctcatgtaaatggagaagaaagagatccaatttggtgtttaaaaatacatgaaagtaaagtttaaggctttatccatggtgaacatgccaagtgtaatgacctgcctcgtcgctacgatataactaactataaaatgtgacatttcaattttaagtggaagctccattaatttgattatgaaaacgatgataaatttttcgcaatgtacagtcatcaaacaatgcgcaacaccgngaaatatatatatatatatatatatatatatatatatatctatatatcttacacccctatg

SEQ ID NO: 7982 - DNA, 380 bp, Glycine max
tcatgatgatgaatcaagttgattcaagtagttttgatgataacaaagatgatgacaaaaagtccaagagaatgatttcaagattgagtcaacaagttcaagatcaagattaatttcaagtttcatgagaaaaaatcaagaagattcaagaatcaagagaagtttgatttcatgattcaagagaagaaatcaagaagaattcacaagggaagtattgaaaagatttttcaaaaaacaaacatagcacaattttgtttttcaaaagagtttttctcaaaattttctaagttaccagagtttttactctctggtaatcgattaccaattacttgtaatcgattactagtggcaaagtttgatttcaaaagcttttaactgaa

SEQ ID NO: 7983 - DNA, 442 bp, Glycine max
  unsure (1)..(442): unsure at all n locations
agctntaaagccttgtagatgatgcagttgactgttaaatctgactttgttatttttaatacatgggataattcaagaacatgtgtggttcaatttattttagaaaactaattactttcttttgtcagcttccaaagagagcttttgaataatatgccatttttgtcctcacaaaaaagctgtacccagccatactataaatgaataaaagattaattttaaattcaatgtcaaacctgatatcgccaacaataacacaaccataaatcattcaaaacaagacagactagcccatataatggcaaggcaagtagcaggttttactgaatgtataacaataacaaatatattccatcaaccgccaaacaaaacatagaggggcccttccaatgaaaaacattngttcataagagaaaatactgacccacaacttatcaatatt

SEQ ID NO: 7984 - DNA, 406 bp, Glycine max
  unsure (1)..(406): unsure at all n locations
tggagatgatttttgaaagaatagtcaaggggagctcgggaatacaaaactatattgtgaaacaaatgcccccttgagtaattgataaacataaatncaaaatttgaaaaacattaactgaaaaattgaaagtgaaataaagaccttatttattgagaaatgaaaatatttcctcttaaacattgaacaatacataccatttaatgaccgtattaaagtcgcataaaaggtctgcatcaaaattgcactaaaatatttgtttgtaaatttacctaaatgtgttatacttgggtgggaaaaatacctataaatagatttatagataaatcgatgttaaattgtaaatttatagatacactactattgcatcactaaatgatgccactttgacctatacctttacttt

SEQ ID NO: 7985 - DNA, 441 bp, Glycine max
  unsure (1)..(441): unsure at all n locations
agctgttgagtganaggatgtgactcttcacatttaaatttgaatttcaatgttcaaaggcactggtaatcgattaccaaaacattgtaatcaattacagcctttgaaaataattggaacgttgtaaattcaatttgaaaactttttcaaactcattttgctactggtaatcgattaccagagagtaaaaactctttggtaaatgttttgtcaaaaactcatgtgctattcaaagttttgaaaaaactttttaatacttatcttgattgggtcttttattcattcttgaatcttgagtcttgaatcttgatcttgattcttgagatcttgaatcttgaatcttgattctagattctaggcttccttcttgagtctagaattcttcttgattctttaactctcgacttgctcttgattcacttgagatgttctttgattcac

SEQ ID NO: 7986 - DNA, 404 bp, Glycine max
  unsure (1)..(404): unsure at all n locations
tgttgttattggtgtatatcaacatttttttatgtcgaattgaggagcctactaagtaacaactaatgatcaataccttttcaagtaaatncgnnnattaatctatgaaattgtaagaccagtttaattcttgacattttaaattcttttttagttcttgactaagtaaaaaacaaaaatttaatattctttcatatcattttcccgtaacactaaaaattcaagtgaatgactttttatgaaattacatattaaacgagaattttaagaagttaaaggctaaagtaatcgacttacaatcttagaaattaatgtaatgttttactccatattttacaacttataaatactgctacttgtgaagtaaaacactgatagtacttagtacccaagtaaagccctgg

SEQ ID NO: 7987 - DNA, 438 bp, Glycine max
agcttcgaaatctaaagatctaattcatggtaaatgtttcataaatggaattcccttacttctgttgattgattccggtgcaacctattcttctatatcctattcatgtgtcgggaaacttaagcttcatatgtcttctttaaataaaaatctgattgtagaaaccccaactagtggttttgtgttaacttctaatgtgtgtttgagttctcttgtggatacttctggtaggacatttgtggttgatctgatttgtttgcccttgagccaaattgatgttattctgggaatggactagttatcttccaaccatgtcttgtagaactgctttgataaaactgcggtgttctatggttctggagtgagtgatgatatgatgttcatctttaccaaccaagctgtgacatctttaaaagaagatgctcaagtgtacatgat

SEQ ID NO: 7988 - DNA, 412 bp, Glycine max
ttaggacaggatgcttcaatggaggaaaagaaagagggagtgaaagagagaggggggagcacgaaattgaaggaagaaaaagggagagaagttgaactttgagttgtgtctcacaagactctcattcatcaaagttacaacaagtgttacacatgtttctatttatagactaggtagcttccttgagaagctttcttgagaaaacttccttgaaaagcttctttgagaaaacttccttgagaagctagagcttagctacacacacccctctaataactaagctcacctccttgagaagcttccttgaaaagattcctaaagaagctagagcttaactacacacacctctctaatagctaagctcacctccttgagatgagaagctagaacttagctacacaccccctataat

SEQ ID NO: 7989 - DNA, 433 bp, Glycine max
agttaaaaagcatttcaggcctaacatgctgacacacaattattaaaatcttattcatgatttgaatcctatgattcggctacattggtttgtatcataaaacaaatctcaaatgactttgaatcttacaatacatgaatgaataggtacaatttcatatcattgatacaaatcacatgattcaacacttcattattttttcatttttttttacttttctttcaccaattaattctaatgaaagaaattgaaaagtcatatgagcttaaaccatcaaattaaaaggaattgaaggagcaattctgaccttatcctttgattattccactactacactaattcaatgcatgcactctttggttatttcattgtttagtttccattcttctaaaatagaggattcacaaactcatatataactaataatattgtt

SEQ ID NO: 7990 - DNA, 406 bp, Glycine max
tcttgccctcaaattccttgagctgaccaacagcatattcatcaatggcatcaaccatataaagaacctcgtatcccttcttcttcaacttctctaagaatgtagagttctcaacagccttcttgctttcacctgtgatgtagtagatgtcactctgaccttccttcatcctggtcacataatccttgaggcttgtcatttcatcaccactcttggtggagtggtacctgagcaattcagcaatctttcccttgttctgtgaatcctcatggatacctagcttcaagttcttggagaaagcctcatagaacttgttgtaatcctccttgttctctgcaatttcaaagaagagctcaaggcacttcttaaccaagttctttctgatgaccttcaagatcttgttctg

SEQ ID NO: 7991 - DNA, 272 bp, Glycine max
agcttgaccaatcccgacccaacccgggcatagtcggtcagtgatatcctgtgatgtacctaagcaggcgagctcctggctgtcaacagataaaaggaacaaagaccacaaagcaaggaggcttgtggtggctggccagctgtgaaacttgattgatatgtgagatatgggctctggtaatccattaccaacggtgggtaatccattacaacgcttaaaaatgaagacaggaggctaagatggtctctggtaatcgattaccaaggggtgta

SEQ ID NO: 7992 - DNA, 403 bp, Glycine max
agagatgaggaagtgttgaagggtgaaacttcctgcttttattgttgaccactgagtggtacctggagatatgtcgcgggggtcaggagaccttggggacgtcaggtggggtgctattgcccaaaaccaagcttgaccaatcccgacccaacccgggcatagtcggtcagtgagaacctgtgatgtacctaagcaggcgagctcctggcagtcaacagataaaaggaaaacaagaccacaaagcaaggaggcttgtggtggctggccagctgtgaattttgtgtaatatgtggatggtggcctctggtaatcgattacaaggcttataattgaggacaggaggctaagatggtctctggtaatcgattaccaaggggtgtaatcgattaccaggctagaaaac

SEQ ID NO: 7993 - DNA, 433 bp, Glycine max
agcttgatggttttgagaagaaatcacatgtttgtcatcatcaaaaagggggagaatgtgaatgtatgtatacatgattttgatgatgtcaaaagaagaatcaaacaaggctcattttgcttcaagattaatacaagattgtttcaacaaacaaagccttgattcaagatttcttcaagatcaagccttgcttcacaatgaaaggtttcaagtcattcaaggcacatgtaatcgattaccaatacatgtaatcgattaccaatggtttgaaagtgtgtaatcgattacacatcatatgtaatcgattaccagagactctgaacgttgagaattcaaattttaaatgaagggtcacaactgttcaagcaaaataattgtgtaatcgactacactaattttgtaatcgattaccagagcggatttcaaggaatat

SEQ ID NO: 7994 - DNA, 388 bp, Glycine max
tctaaactttatacaagaatgaagctctgataccacttgttggacaagtggcctcaggtatcttaagaagggggggggggttgaaccaatatattacaacttatttccccaattaaaaattctatttcactttctatccaagttataaattcccttaataatgaatttcttaaatattgattcaaatagaacaatttgaatatgaatataatacaataataaataaaggagtttaagggaagagaaaatgcaaactcagatttatactggttcggccacacccttgtgcctacgtccagtccccaagcaacccgcttgagagttccactatcttgtaaattccttttacaagttctaaacacacaaggacaacccttcctttgtgttt

SEQ ID NO: 7995 - DNA, 430 bp, Glycine max
  unsure (1)..(430): unsure at all n locations
agcttgtagaatggctagacatgatacatgtcatggtttggtttggttcaaggataaaagggatgccccacattatttccatgacacaaatgcaaaaatgatgatttggaaactttatgcaaaactggtcatgcatgcacctatgcggacactcaagtgtcaaatttttatggtcatgtgatgctagggctcaagattcgtttcctctattttaatcaacccaatgttttcaaaatatgttcttttatcaatttgtgcattcatccgagtccatttcgggcgtccggggaaatttcacagcattcacccttcaggtgtagacacattttccaaaaattggttatgatcaatgaactttctcaaagaaaagttggaaatcgtttcttttcaaaagcatgctgtntnttagctagacaacctatttttttct

SEQ ID NO: 7996 - DNA, 389 bp, Glycine max
tccttgagaagattcctaaagaagctagagcttagctacacacacctctctaatagctaagctcacctccttgagatgagaagctagagcttagctacacaccccttataatagctaagctcacccccattcctaaaatacgtaaaaatacaaaaaaaaaagtctctactacaaatactactcaaaatgccctgaaatacaaggctaaaaccctatactactagaatggccaaaatacaaggcccaaaatgaggaaaaacctattctaatatttacaaagataagcgagctcatacttagcccattggcccgaaatctacccttaggctcataagaaccctagggcattcccttggatccctggcctaatctacttggagtctggtcta

SEQ ID NO: 7997 - DNA, 427 bp, Glycine max
agcttaagctccttcaactgcacaaggctcttaatatttgaagagtatccttgtggaaccttcacccgacgaagacactaacaaaaacttatcttctacttcttggacaaagtatggcaggctgggggcaagtaaattttcttcccatcagaccttggatgcaattgtgatcgtatacccatattagctagatcttgacgggtattcaagccatccttcgtcttgccttgaatgttaaggagcgtcccaatcacactatcacataaatttttctccacatgcataacatcaatacaatgtctaacgttaagatcacaccagtacggaagatcaaagaaaatggacctcttcttccatatgcaactctgacttttatccttcttttgggtcttcccaaatacagtattcaggtgttcaacccgctgat

SEQ ID NO: 7998 - DNA, 400 bp, Glycine max
  unsure (1)..(400): unsure at all n locations
tctattnttattataccactagtattatattatcataaaataagtaccttttggggaacacatgttaagattaataaagaaataaaatatttaacattaaaattaaaggaaagattaccaaactctgtattctaatgactaagacatgcaacaagatggggcaaaaagtggaggcatttccatgactaagacatccattataataggagccaatgttacatcccatgacactaaaataagggggagatattactttagtatgatacaaaaatattgttataattcccaattaaatagatcaagtaaaaactatggagtatagacgatggatccttgcttagacttatttaagaggtaataaaagagactatactacgagtacatactcacaagatctgtt

SEQ ID NO: 7999 - DNA, 415 bp, Glycine max
  unsure (1)..(415): unsure at all n locations
agcttcaacattcaattacgagcgtctcgattataacgagactcaatcagacatccgagtaaaaagttattgtcgtctgactntgctcataactttatcattcaatttcgagtgtctntatatattacgggactcaatcagaaatccgagtaaaaatttattgtcgtttgaagttgctctgagcttcaacattcaatttcgagcgtcttgatagattacactgactcaatccgacatccgagtcaaaagttattgtcgttcgacttggctcagaactttaacattcaatttcaagcgtctttatatattgctgggactcaatcatacatccgagtaaaaagttattgccgtaaacttttctcagagcatcataattcaattggagcgtctcgtatattaccggactcaatcagac

SEQ ID NO: 8000 - DNA, 391 bp, Glycine max
gaaattcaaacgacaatactctttgactcggatgtcggattgagtcacgtaatatctcgagacgcttgaaattgaataccgaatttctgagcaaattcaaacgacaataactttttactcggatgtcggattgagtcacgtaatatgtcaagacgctcgaaatagaataccgaagctctgagcaaattcaaacgacaatacctattgactcggatgtcggattgagtcacgtaatatctcgagacgctcgaaattgaataccgaagctctgagcgaattcaaacgacaataactttgtactcggatgtgcgattgagtcccataatatgacgagacactcggaattgaataccgaagttatgagcaaattcaaacgacaataaatttttac

SEQ ID NO: 8001 - DNA, 430 bp, Glycine max
  unsure (1)..(430): unsure at all n locations
agctntataaaaaagttatatcaaatgtcacaatgggtgaaatagaattaggttttctgtcccaaagaatttgaaaatttaatcatttaacaaaaaaaaaggctcagttgctgaaaaaataaaataggatgtaaataagtctaattccattcacaagaggtatcttaattcataaagataaggataagacctcacacaataaagaaacatttatatataagtaacttgttaagccttgatatagaattggttatgcaataaaaataggtcagggnnacagcttatgatatactatcaatttccaccgatatatctgctatgtaatctctattctccttctgcaggcggctaggactgttcttaacaataagtgagtagtaaaagtttattcccaggaaatcaattgagcccttgaccagatttgattcct

SEQ ID NO: 8002 - DNA, 394 bp, Glycine max
tcagttttttcaaatatataatataatttgttttatattatttactcattccaaatcctgtctagggtagctttgctattcttagccggttccaagcccgaataaaaggatagggttgtgttaggctttcgacagccaacgttaaactttgtcgaatctctatgacatggatcaattacgtaataatgtgaatgctaggtcgttgcccggaagcaacgcgctgtatggctcgagtacagtgtcaaaagagcaagagccgctgcatcgccgcccggatgtagtgaaaagtaagcaagggttcccacattttcgtgaacgggtgtgggtaaagaagctagttcatgacaggaggattcgctttggtacatggaatataggcacacttactggaaaa

SEQ ID NO: 8003 - DNA, 423 bp, Glycine max
agcttcggcataagcataatactaatcttcaattgaacttagccatgctttcgccgtgtctttctaagattatatttaatatggatttaactcaagttctttctcacaaattcaacttatattgctaattaattatactcgttagatttttctcacctactctaaaaaaaagtcattcacaacttaaaaaaatgactttaataaattaatatgtattaaataaggaaagaagtactagtattttttgaaagtcattaataaatttaataaattaatgaaaaacaacaaataatgtgcatttaatgttaaaaatataattatttttatttattggtccaaaccattctgtgtattttatttatttattggctagaaatcataaatgttttgaacttttgactagaaatgataaaattctagtca

SEQ ID NO: 8004 - DNA, 371 bp, Glycine max
tatccaaaatatttaataaacattaatgtgtacatgatatgaaaattagatgcaattacctgggcggccattggagatggtgtgttataaaatgatatgttagacagaccactattatttggttgagcagttcctcccaaaatagatgccccatgatgatttccgggaaaatccttcatgccctgcatgagcttcagttgcctaggacttgtgtcttctgagacagagtgtctagtgtcaactatattacaatcctcagctgatgaatgcaacttaggagaggtcgtgcaatgtaggtattgcttttgtatacaaagagcagctgcttcaccaaaaactgcagttgcatcttcagcagcacctaaatattc

SEQ ID NO: 8005 - DNA, 326 bp, Glycine max
  unsure (1)..(326): unsure at all n locations
agcttctagcttgtgaagcatcaatcttatattattacagtgcagatcattcatcactaatctaatggtgaaaaataaattaatttcctaccaatgttagaatcttttaaaggaaaaagacacgttaagggttcttgctctacttttacttaccaaatcaaagttagtaatgtcacacaatgagacacgtgtattttgcgacatacctaaagagaagagagataattactcacatacttattttgcaacatggctggatagagacactcacacttactgacacgcctatntttctctaaagacaaanaacaaagaccacacttata

SEQ ID NO: 8006 - DNA, 435 bp, Glycine max
  unsure (1)..(435): unsure at all n locations
agctngccaacaagaatagaagactatgagatgtttcctgatagtgcaatagatgatgatggtgaattggttcatctagcaccgatgggagaagcagaacctgtcaccttccaataagcaattaaaaaagaagtatggttacaaactatgagagaagagttgaaagccatagagaggaacaagacatgggagctggctagtctaccaaatggcaaaacaactataaaggtcaaatgggttttcaagaacaagctcaaaccagatgggagtattgctaaacacaaagccaggctagtggcaaagggctttatgcagaaagaaggctatgattacaaagaagtctttgcaccaatggctaggtttgagactatgaggttgatagatgctttggcaagttggaaagggtggaaactatggtaaatggatgtaaagtct

SEQ ID NO: 8007 - DNA, 408 bp, Glycine max
tcttatgatgaatcaagattgattcaaagaagttttgatgataacaaaggtgatgacaaaaagctcaaaggttaagaacacttcatgataacaaagatgatgatctcaagaatcaaagaatgagttcaagatgttcaagatttaatcaagaacacttcaaggttcaagaggaaatttgatttcaagaatcaagaatcaagattcaaggttcaagcttccaagaatcaagatcaagatttaagactcaagattcaagaatcaagagaagaattaatcaggataagtatgaaaaagtttttttcaaaaactgagtagcacatggatttttctcaaaacctatttaccaaagagtttttactctctggtaattgattaccagattattgtaatcgattaccagtagcaaaa

SEQ ID NO: 8008 - DNA, 411 bp, Glycine max
  unsure (1)..(411): unsure at all n locations
gcagctaagatatactttgtaacatctttgactatttcctttcattcttcctttgtagtcgattgaatccttcaaaccaggctgtgtatcttaagaattatgctaagaatcttgggatacaatcttggttaaaatattgatcgtttgtacntataagtgacattgagaatacctgtttttgcaaccatagtgttgaaaacaaactggcctcaaccatgactaaaaaaacattttttgactacacggtttcaacaactggtgtgaaagacctattttagataacatgtcggtgacatatntgaatatcccgatatctaacacaaaggcagttttcaatactcatccttatatgagctgctctatgatggttatctataacaccatcctacaatgtctgtgtcgaaataaaat

SEQ ID NO: 8009 - DNA, 403 bp, Glycine max
  unsure (1)..(403): unsure at all n locations
cttgatctaccaccatcgccgccaccattatcttagtttttctcttattttaatattactagtactttgttttccagccgtgtatttggctatattattatgacatttgaacaatttagtatttctttatttgcatggcatgattgaaaaattatgaattatgttatatgactatgtggnttttatatatattttttatctagtcatgttccttgcttcatgattggtttatattcttccatgattgtcttgtgaatgattagtagtatatgtatgtttcatacttgttacgcactttggctttttgttgatgccaaagggggagagaaatagggattaaatcaagaactcacataagtaattaacttaatttcaagtgaaacataaactcaaaaacaaaggg

SEQ ID NO: 8010 - DNA, 438 bp, Glycine max
agcttctcctcttgatgcttctagggctctttttcccatataggcactgtggtgtgctctggaatctgtgccctttcttctgcctacaatttgtctaaaagtttgtaaaagtgtgtgtcaaagtgtgtgtaccctaattctgcacaagataggctttaaataggctctaaattcacgacgttgcgcttagcgccaccctatctgatgcaagctccattagagcttgtaggcctaggatcttcttcatcaatggattcctttgcttcttggaagatgaatggcagcggaatgaagaaaggaagagagagaggagacgccacttcaaggagaagatgagtctataagaagctcaccaccataggaggccatggataacagcttggaggaagaaggagatgaatgaatggagagggagagaagagcacgaaactttgtgct

SEQ ID NO: 8011 - DNA, 412 bp, Glycine max
ttgtaacactcaagtttcaaagaatcaagattcaagaacattcaagtttcaagattcaaaattcaagaacaattaagtttcaagattcaagattcaagaacaatctagtttcaagaatcaagattcaagaacaatcaagatcaagattcaagaatcaagagaagactcaatcaagataagtactaaatttttttttcaaaacattgagtagcacaagaatttttcacaaaatcttttaccaaagagttttactctttggtaatcgattaccagaaggtagtaaccgattaccagtagccaacaatgtttttcaaactgatttacaaagttgtaattgattaccatgagcatttaaacgattaccaatgttttaaaacgttagatttcaaatttcaagagccacaactaggga

SEQ ID NO: 8012 - DNA, 438 bp, Glycine max
  unsure (1)..(438): unsure at all n locations
agcttgtaatcgattaccagaggacattntcagaaaattatttccaagagtcacaacttttcaaatggcttttacatggccatcaaaggtctatttatatgtgacttggaacacaaatttgctcaaaatttttcagaacaaaaaggttttatcctctcaaaaagcaaaatcttcttatcctcttaagattccttggccaatacacttgcaattcaataaggatttatttgagtgctcaaattgttcaatctatctctttcaagagagatttcttcttctcttcactctaattctcaaaaagggattaagagaccgagggtctcttgttgtaaagaaatctgaacacaaaggaaggattgtccttgtgtggttcagaacttgtaaagggattctacaagatagtggaactctcaagcgggttgcttgtggactggacgt

SEQ ID NO: 8013 - DNA, 411 bp, Glycine max
tcctcggggccatttcctgcgaaagcaaacatttggaaagttagttttaccagtgggacactattcttaaaacaaaaatggcatacaacctcctcccataaatacaaacatcaatgtaaatttagagcaagcttatgcgcatatttccttacgaacgttcacttgcacaagacatcctattaactaagaaaaatgcacccatatacaatcaaggtagcttcattacctagattatttacatgtacttccaaggtgtatttgttacttacatcacacacatctccttggctgaatttacatacatgcatactcaaagcattttggggtaccaaaaattgcacatgcgctcatcttggtatttctaatacctatacatatacaaacttcatgatgaatcttgactacctacac

SEQ ID NO: 8014 - DNA, 317 bp, Glycine max
  unsure (1)..(317): unsure at all n locations
agctttgagccaattcaaacgacaatatctttttacttnnnngtctgattgagtccagccatatatcgtgacgctnnnncccgcccgttgaagctctgagccaatataggcgataatatgtttataatcggatgtctgattgagtcctgtaatatatctagacgctaggaattgaatgttgaaactctgagcaaattcttacgacaataacttttttcttnnnngattgatagaggcctgtcatatttttagacgctcgaaattgaatgttgaagctctgagccaattcatacgacaataactttttactcggatgt

SEQ ID NO: 8015 - DNA, 407 bp, Glycine max
tcttcacatagtccgcctttgcttgaccttctttatgcttaaaaacagaaacattaggcataggcaaaagatcaagaagagttagtgggttaaaaccataaacaacttcaaaaggagaacaattagtggtgctatgaacagctctattgtaagcaaattcaacatggggtaaacaagcttcccaagtttttaagttattcctcaaaactgtcctaagcaaagttccaaaagtcctattaacaacttccgtttgcccatcggtttgtgggtgacaagtggttgaaaataacaatttagtgcccaacttgctccacaaagtcctccaaaaatgcaaatcatcaagcctaggtataggatgcctatatttaatggtgatgttattaagggctctacaatcagaacacatg

SEQ ID NO: 8016 - DNA, 429 bp, Glycine max
  unsure (1)..(429): unsure at all n locations
agcttcaggttgctcattgactccagattgctgganagtaggacaaagatctgcagaagaacatagaccacaaagtcttgcaacaggtgtagatttctaattcatggcaagctgagttactaggttgaccaaggcatcaagttttccttcaagctttttattttcagtagatgaagatgaatccggggccacctcatggactcctctaagaacaataacaacatttcttgcactaaattgttgggagttggaatccatcttctcaatcaaattcctagcttcagcaggggtcatatcaccaagggctccaccactggcagcattaatcatactcctctccatgttgctaagtccctcatagaaatattgaagaagaagttgctcagaaatatggtggtgagggcagctcgcacacaatttcttgaatct

SEQ ID NO: 8017 - DNA, 390 bp, Glycine max
tgagatgaggaagtgttgaagggtgaaacttcctgcttttattgttgaccacagagtggtacctggagatatgtcgcgggggtcaggagaccttggggacgtcaagtggggtgctattgcccaaaaccaagcttgaccaatcccgacccaacccgggcatagtctgtcagtgagaacctgtgatgtacctaagcaggcgagctcctggctgtcaacagataaaaggaaaacaagaccacaaagcaaggaggcttgtggtggctggccagctgtgaattttgtgtaatatgtgagatatggcctctggtaatcgattactaagggtgggtaatcgaatacaaggcttaaaaatgaagacaggaggctaagatggtctctggtaatcgatta

SEQ ID NO: 8018 - DNA, 406 bp, Glycine max
  unsure (1)..(406): unsure at all n locations
agcttcaggntcaatctccctatagngatcctcaatctgctagcaatactaatgcacaattcatggcactgggttatttggattctatctcagaatttcaaaagcagacccctttgttcagattagataatcatatggatactatgaattccgggactgctgggattgctaatgattactatggcttagatgcttcatcaattagtaatttgggtggcaaaaatggtagaaggtttgaatttccagtcaagacctgtcactatttcaacaaaggtctttgtaagcatggaaatagttgtagatattatcatgaacatggcgtccctgatatgttctctcacatgtatggaaatgatacttttaatgatgatccggtgatttcacctgagtcactagcacaattaga

SEQ ID NO: 8019 - DNA, 394 bp, Glycine max
  unsure (1)..(394): unsure at all n locations
tgaagaggttaaaattatagccccatgttactttacttctattttgcaattttaaaaacatttttatgttggaagcgcacgtacgttcacgttgcacgttctttttatattntattattttggaaaatttagttatttctgaatctggtccattttccattcatattcaacccatatctttgcaaatatatttgcaaccaccttcggtaacaaacaaatcacgtgcccatcctttatctcactgataacttcctatctaacgttctgataacaagttgagctctgtgatggatagactctataaataggatggggtgctctcagttttgtatcaccaaattcacttctctattaaaaaaatacaccatttattccgggtgagtaagggtctgga

SEQ ID NO: 8020 - DNA, 427 bp, Glycine max
  unsure (1)..(427): unsure at all n locations
agcttggaaggtagtcatacctcacaaaatatatatatatatgtatgtttaggtagcaagatactttggatatgcatgtatatagaaaaaatacctcacaaaacatatatatgtatgtttaggtagcaagataccttggatatgcatgtatatagcaaaaatacctcacaaaaatatacacatgtttaggtagcaaaatacctcataaaaaaaggaaaaacaaacacaaacaagaaaaaataaataaacaaatgataaaaagagaaaaaaaataataataagttgtctagctaaaaaaccaacatgcttttaaaaagagataactaccagcttttcttagataaaattcattgatcataaccagtttttgaaaanaatgtgtatacacctgaagggtgaatgctgtgaaaatnttcttgaacgccca

SEQ ID NO: 8021 - DNA, 398 bp, Glycine max
tggaatgattcggtctgacgagggatcaaggtttagtaatttaagctataacatagaacacaagagcatgattgattagagaaatatatttatatgcatcagcttgtttgttagaaagacccaacatttctacctactgttgtcacttttacttaccttacattttattgtttttagcataaaggtttagtttaaattctgttagaaattatcaatcatacatgttctctcaacaatgcttcattttgaacttaactcaggctaacattagttccctgtgtttgatactcagattcatccgttttaatttttaaatacttgacgatccagtgcgctttccggtaaacccccattgaaattctcttgaaacataattgagcaaaaagtaactgcaatgg

SEQ ID NO: 8022 - DNA, 349 bp, Glycine max
cgggatccttaagcacctgccgctgcagctcgtaatagggactttgacatggatgtgtatgcttttatgcaaggaacattaccatacaacatgttcctaggatagataataaggagctactaatgacccctgcattgaaaaataataattagggataatgcatacatcttttaaatgtattggttaaattttacttacaaattcaagtaagcttttgagtagatcttattatttaatgattgctccatccatcttccattgaacaattgatatccattacatctatcctttgcattgcgtatgaactgagattcatggaatctatactcatgaccatgaccaaatttta

SEQ ID NO: 8023 - DNA, 394 bp, Glycine max
tggctaatccaaaatcagcaactttatgattgaaattgctgtccaatagaatatttcctggtttgatgtcataatggattattctttgtttgcaatcttcgtgcaagtatgcgatgcctctggctatcccaactgcaatctcataaagcttttcatatcctaaggtcttcttttcatggaacaaatacctgtcaagagagccattctccatgtactcataaaccagtgctcttagatctctttcgaagcaaaatccaatcaactgaactagattgaaatgatgaacttttccaattgtacccacttctgccataaattgttcctcaattctcttatctgagttaccacgtagaaccttcacagccacagtgattccatcactcaaatttccttt

SEQ ID NO: 8024 - DNA, 302 bp, Glycine max
agctagcttaagaccgtatattgatttctttaatttgcacaccatgtggtcctttccttcaactgagaatcccattggtggagccatataaacattctcctcttaaattcccattagaaaagcagttttcacattcatctgatggaactcttaatcaataaagggtactggtgtgcatgtaatcctcaaagaatccttttggagatcggggaaatgtctctttataatcaatgtcatctttctgagtaaatcccttaacaaagccttgttacgttcaaagttgtcatgagagtcacgtttag

SEQ ID NO: 8025 - DNA, 150 bp, Glycine max
  unsure (1)..(150): unsure at all n locations
tcttacgaataggtnatccatatgaagcttacgaattgtcaatccgtaagttatataaaacttatagattatttatttgtaaattttatataacttaagaactatcaatccataagtattacgcgaaaaaaaaattaaatcaacaactta

SEQ ID NO: 8026 - DNA, 410 bp, Glycine max
  unsure (1)..(410): unsure at all n locations
agtgttgaaaggtgaatctttctgcttttattgatgaccacagagtggtaccctggagatatgtcgaggggggcaagagaccttggtgacgttagggggggtgctatttgccaaaaccaagcttgaacaatctctacccatcctcggcataatcagtaagtgagaacctgtgatgtaccttaacatgctagctcctggccctctacagatcaaaggaaccaagaccacatagcaccgatgctagtggtggctggccacgtgtgaattatgtgagatatatgggttgcggcctctggtaatccgataccatgggtgngtaatcgattacaatgcttcaaaatgaacactggaggctaatatggtctctggtaatcaataccactgtgagggatctataccaagcttgaaag

SEQ ID NO: 8027 - DNA, 367 bp, Glycine max
  unsure (1)..(367): unsure at all n locations
tgctctaaatntacattgatgtttgtatttattggagggagttgtatgccatttttgttttaagggtagcatttcttggtaaaaactaactttccaaatgtttgccttcgcaagaatggccccgaggaaacttgcctcaaaaaggtccaggaaggacaaggcggccgaaggaactagttccgctccggagtacgacagtcaccgctttaggagcgctgtacaccagcagcgcttcgaggccatcaagggatggtcgtttctccgggagcgacgcgtccagctcagggacgacgagtatactgatttccaggaggaaatagggcgccgacggtgggcatcactggttactcccatggccaagtttgat

SEQ ID NO: 8028 - DNA, 279 bp, Glycine max
agctttggacaaaatgggtgagttggagagaagttcatgatatgctaatagaagagtttcatggttgtttatatccacctcttcatatgatttaaagtctaatccttcttatgcaatgtttgccattagacagggtcggcttcttctttctttttcgcctcctcatcagatgatgtgtcattcaattctttccatgtgcttatcagcactttcttggcctttggttaaagaatattctattgtgatctaacttatcaaggcctggacattctgacttga

SEQ ID NO: 8029 - DNA, 311 bp, Glycine max
tgtcaaaaaggaaagcaagttaaaaactcgtttcaaagcaaatacattgtttctacttcaaaactccttgaactacttgacattgatttatttggtccctctagaactatgagtttaggtggaaattactatggcttggtaagtgttgatgattactcaaggtttacttggaccttgtttttgaaaaccaaaaataaagcttttgatgcttttcgcaaacttgccaaggtgattcaaaatgaaaaaggtccaaacatttttcaattagaagtgatcatggaggtgaatttcaaaatgagtcttttgaaact

SEQ ID NO: 8030 - DNA, 442 bp, Glycine max
agcttatcaatcttttgagcaaggagaacccccaatgcataattggatgcatcacacattagctcaaaaggggatgtccaatcaggtgcctgaataataggggtggtagtcaccgcacgcttgaggcaatcaaaagcctctttgcatcggtcatcaaaataaaactccaagtccttttgcagcaaattggatagtggaagggccactttgctaaaatccttgataaagcgcctataaaaccctgcatgaccaagaaaagaacgaacctctcgaacgcaagaggggtaaggcaattgtgaaataacatttatttttgcagggtctacctctatgcccctactggaaatgatatgccctaaaactataccttgttctaccatgaagtgacatttttcaaaattcagcacaaggttagtttcaatgcatctattaagaactctat

SEQ ID NO: 8031 - DNA, 403 bp, Glycine max
tgtgttgcatcctcaaacaccttcacaggtggccaaagatcaacaaactatgaaagataagagggataaggaaaataatagaaagagaaaagaagaactaactttaatagttaaggaggagtgtaaggaggtaagtgtctcctccaaaaggttagctaagaaggaaagtcattttgcaataaagacaaatattaaagaaacttcccttcttagacaacctccacattttctcctctataaaagaacacttgttagcactaccatacctcttgagcttgaggttattccttaagtaaatgagtttttggatgagggtttgggtcgtaagagcttaaatccttgtgcttttggtggtatgatgaatgtgttgagtggtgtgcaaccctcttttgtaaatcaccca

SEQ ID NO: 8032 - DNA, 574 bp, Glycine max
  unsure (1)..(574): unsure at all n locations
cccaccgtctcancctcagtntgctantctagaatcctattcgtctctgatccatattatagtncttccatcatagccgtaagcnnagtggaacattcttatcacgttccacncacggaccagcagcatgccagcttgtgcatgaacgtgtacttgagtagaacatcttatccccctttctcctctacaaaatgaatgcttcacaaatggatgatagaactaccacgacagcggcctaaggatctctaattaagtaggaacactccctgtatctttggcggtaaattccctcgaacactcccatatttttttcggaccacgagttctgtgtctagcatctccacggactccgtttgaactgggacaaattagaacccagttaagggcatggcatgcttacggttgctaggaaaactattggttgataagagctcaaaaaccaaactggatgcaataaccatccgagaatatgtgcatagtcatccacaaaaataaaaaggggatccgtgtattgacctaactcttctaggacattggcaacactgcgaacgcgatgtcactcgaaacgataacg

SEQ ID NO: 8033 - DNA, 403 bp, Glycine max
tggagtttctataggtccttcttcaggagaaattgttgtgccatcacaaatggtgactttggttccacggtatgttgtttgcaatgaatatgaagaatgtatcaccatacgccaatgctattttcaggtatgcattatgtatgtagtagtttatatgtgcacgtgtatgtgtcttcagtaagtgattttagttgtctgtgaaggatgaggtggcaggtgttatctccattaacagcaaacagagaatgccactacagctgaaagaaggatttaaaaacacaagagagttcagtttatttgagcattttatcagaaagcacagaagtaaaagtgacaattccttgttatatattcagattcaattaaatgaggctggattgggatggtctgggccagtctgtat

SEQ ID NO: 8034 - DNA, 436 bp, Glycine max
agcttcggaagatagtgatgaggtacaagccctaaaggcagagcttgaaagagcctgtgtagtcgaagagaagttcaagtccatagccatcaaagtctgaaaagagtatgatgaactaagggatgtcaatatggccaccgatgaagccttggaatgagaaaccaagaaggcccgaaaggaagaacacgatcaaagcaaagttttgaggggctttatagggcagcaatagtgagctcaagctccgaagaggtgaaaggaatcatcatgggtcaaaggcatgatcttgaaggacgagctaaaggtttgccttaggtcgaaaagaaatttgtcccaacagttaagcgagactgaagggaatatgtgggccatcatcgataagtgcaaagagaagctaaatctagcggcgactcacgagcaaaggctagaggatgagtac

SEQ ID NO: 8035 - DNA, 409 bp, Glycine max
tcttaatggaggaagagaatgagagagaggggggggggggcttggaaattaaaggagattagggagagaagttgtacttttaagtgtgtctcacaagtttctcattcatcaaagttatgacaagtgttacacatacttctatttatagcctatcacatgggaagcttccttgaaaagaaaaggaaggtagcttccttgggaagctagaggaagaaagcttccttgagaagctagaggggggctactcataccccttaaacaactaagctcacccccatgccaaaatacatgaaaatacaatgggaagcttccttgagaaacaaggaaggtagcttccttgggaagcaaggaaaaaagcttccttgagaagctagaggggggctactctcaaccctccaatagctaagct

SEQ ID NO: 8036 - DNA, 442 bp, Glycine max
  unsure (1)..(442): unsure at all n locations
agctnggaaggtagtcatacctcacaaaatatatatatatatgtatgtttaggtagcaagatactttggatatgcatgtatatagaaaaaatacctcacaaaacatatatatgtatgtttaggtagcaagataccttggatatgcatgtatatagcaaaaatacctcacaaaaatatacacatgtttaggtagcaaaatacctcataaaaaaaggaaaaacaaaaacaaacaagaaaaaataaataaacaaatgataaaaagagaaaaaaaataataataagttgtctagctaaaaaaccaacatgcttttaaaaagagataacttccagcttttcttagaaaaaattcattgatcataaccagtttttgaaaaaaatgtgtatacacctgaagggtgaatgctgtgaaaattctcttgaacgcccaaaatagactcggata

SEQ ID NO: 8037 - DNA, 407 bp, Glycine max
tggaatgattcggtctgacgagggatcaaggtttagtaatttaagctataacatagaacacaagagcatgattgattagagaaatatatttatatgcatcagcttgtttgttagaaagacccaacatttctacctactgttgtcacttttacttaccttacattttattgtttttagcataaaggtttagtttaaattctgttagaaattatcaatcatacatgttctctcaacaatgcttcattttgaacttaactcaggctaacattagttccctgtgtttgatactcagattcatccgttttaatttttaaatacttgacgatccagtgcgctttccggtaaacccccattgaaattctcttgaaacataattgagcaaaaagtaactgcaatggggagtcaac

SEQ ID NO: 8038 - DNA, 459 bp, Glycine max
  unsure (1)..(459): unsure at all n locations
cttcgggacatgccgtcggaggcagacagataggaactcgacgaagtggggttctcttgcgtgctacacagcctcatacnttgcagcgcgaacgggagttctataatgccgacagaccgctgtctgttatttgggcacggtagactacctgcgtgcagctcgcacgtcttttcgttcggactgtctaatagtctgacagacgtgggacggtcgcttcagctctgttttgggaagcagggacatgggagcgggaatcgaggacactcggagatgaactctagtgcccggctttgtattgcttttttttatagcgaaatacggaagacgagcgttgcttctgttctggcccggtagtanaattctaacacttaaataaaaactcgtattgaggttttctaaatttcttaaacaagctatgggattgtcgattttcttataaacagcctatccctctttatg

SEQ ID NO: 8039 - DNA, 375 bp, Glycine max
tatggaagaaaagttgaagaaataatcatcgaatcttaatattgaatatgcaacacggacggaagatatttattgtatgcccaaaactcacacatgtcaaaaggagtggcgccaaaaagaaatgaaatgtaacatagcacaaaatggtttatgattatgaaccctctgctgcattacattcccaaggctaaacttataatcaatgaggtattaatttaataattaaaaaaaattattgccttgggtcggacttacggaggcatagcaaatgccacaaagatgaacgattttgtgagagtactgcaatgtttataggcgtatcaaacatcagattctcgtgtttataaacataataaaaacataagatacatcaaa

SEQ ID NO: 8040 - DNA, 396 bp, Glycine max
  unsure (1)..(396): unsure at all n locations
tataagaacaaaattgcctcaatcatatccaaatatgcatgtgaattaggaagcatcaacaagaatcaaaccaaggctattgtgcaagcaatcaatggggcaaaacacaccaaatgattatgatgatggatggctcaaattctcacaaagttaaactcaccactttcaaattgagctttcaaaactatcatgaaatgtagaggagaatcaaagatttcaagtcacaaaatgtcaaaaacttttattttcaaaacaattacccatttcttgaacatatcctatgattcaaagaaaaacatgcaaagtcgtatatgcgcacaaaattgactcanaatattaaactaaaaatccgacgaaactaacaacattaacaaattaacacaactaacaaattaa

SEQ ID NO: 8041 - DNA, 412 bp, Glycine max
  unsure (1)..(412): unsure at all n locations
agcttccatcattcttctccttcctcaagaggaagtgagggtgaagccaagggtgatgagcatattgaagaggtttacccctatgaagaaagtaatcttctaatggtgagaaggcttcttgggagtcaaccttgtgacctaactcaatcccaaagagagaacatctttcatacaagatacaaggttttaaacaaaaattgttctcttattgaggatagtgggtcttgctgcaattgttgtagcacaaggttggtacctaagttgagtctcactatcatttgccacccaaacccttacaagcttcaatggctcaatgatcaaggggaaatgatagtcaataaacaagtacaaatatcattntctataggagactactgtgatgaagttttatgttatataatccctatggaag

SEQ ID NO: 8042 - DNA, 394 bp, Glycine max
tattccagggacaggttattattatgcagagcctgcaagaattggcccaccaaaggccaattacaaatgtagagcagttccttgagcaggtagcctggtctggagctcgactttcgattgtgagagattgtggaagctttacagcccagacacctcaacaggtgagacccgacgaggctactcctcttgagcccacacctgcacaggtcgaaccagtgccaactaatccaccatctgcagtggcggatccatcttcttccaagcttgaagcagctccctcatcttcacctattattattatctctgaagactctatagagtcagcatctggatgagctactactccttctgctacccctgttttccatctaacagatgaggaggatacacagga

SEQ ID NO: 8043 - DNA, 410 bp, Glycine max
agcttgaagtgagaaagtgtggaagagtcagtcttcctacctttatttgttgactacagagtggcacctggagatatgtcgcgggggtcaagagaccttggggacgtcaggtggggtgctatttcccaaaaccaagcttgaccaatcccgacccaacccaggcataatcagtcagtgagaacctgtgacatacctaaacaggcgagctcctggcagtcaaccaataaaagaacaaagaccacaaagcaaggaggctcgtgtggtggctggccagctatggatcttgagtgatatctggaatatggcctctggtaatcgattaccaagggtgtgtaatcgattacaaggcttataaatgaacacaggaagttaagatggcctctggtaatcgattaccaagggcgtgtaat

SEQ ID NO: 8044 - DNA, 399 bp, Glycine max
  unsure (1)..(399): unsure at all n locations
tattgagcattaaagtttctgaactttgactcaaatgctgctggtgaacataggaagctccaactccatgaattggaggaactgagatttcaagcttatgagaattccaagctttataagtaaagagtaaaaatttatcatgatcaaaagctttcaaaaaagaaatttcagcctgtcataccctaattttgtccagggactatcgttcgttgatcttttgatccttgctagttgacttacggtcttgaatgccagttacagtgcaaagcaaggaaccattcagtgtttcgatcaggaatgcgaaaaataccaaaaaagaggggcaaaaaggtcttttcattgagtttcctggaccctagctcgcccaggctagcctctggctcacctgngccctcaaat

SEQ ID NO: 8045 - DNA, 387 bp, Glycine max
agcttgaagctcaaggaaaagcttgaagaagttttggcttttacttgcccaactcctttgagtgacatttgtattggttgttatcttgattgatgcatcttagtacatttgttatctgctttgcatcctgcatcatcatggttagtatcaagaaaagtttctaagttaaaaaaatttcttcagaggtaaaaactctctattttaatcgattacagagttgtcgtaatcgattacaacaagctgtttgaagcttaaagagttaagtctcatatcggtttaatcgattacaatagtattttaattgatttcactgttgttagaccatgactgatctttttcaggagtctcaactttaatcaattaccaagtggattaatcgattacttc

SEQ ID NO: 8046 - DNA, 397 bp, Glycine max
  unsure (1)..(397): unsure at all n locations
ntgagccaaaatcctgactcaccataaaccttgacccatggtgagaatgtcaatccttaccctcggaagcaaaaaagaaaagaaggaaaatttccaatcaaagagaaagcaaaaagaaaagaaggaaaatttccaatcaaagagagagcaaaaagaaaagaaaggaaattcccaatcaaagagtgggagaaagcaaaaagaaaagaaagaaaattcccaaccaaagaatgggagaaagtaaaaaaggaagaagaaaaaggaaggagagaaagttcctgatcaaagaaactagaataaatgtgcagaaaggtcttttgaccagacaatatctgaacaatatagcattgtcaccaaatgaacaaaaggaaggaaagggaaccatgacctaaagtggtct

SEQ ID NO: 8047 - DNA, 298 bp, Glycine max
  unsure (1)..(298): unsure at all n locations
agcttaacccgcatatccctcatgtaagattaaggttcgatcctgcttcaatcaagttctaaggcaacaatacgctccccaatgctaaaacacctaattgtgcacacaagtgggtgatcagaccaaaagcatacaaacattaagcatttaaggaagcattgaacatagagaacacaatcaactatatattangtattgacatcagttgttattagaaatcccaattagggtgtttaccagcattacaaagaaacccacacaataatgatataaaagcgagaagatagtttctacacaa

SEQ ID NO: 8048 - DNA, 378 bp, Glycine max
tataagcaacaacacccacacgatcaaccacttgaaagggaccaatgtatgtaggactaagcttagcattggccctttgtgcaacagaaacttgtctgtaagaatgaagcttaacaaaaacaaggtcaccaatggcaaagtgtcttttagatccatgcttatcagcaagttgcttcatacaattctgagcttgctgtaaatgaaacttcagaactctaagcatttcctccctcttgctaaggcttcgatccaccaaagcaaccttggattcaccaggaaggtaaggcaatgaaatgggaggaggccagttgatatagctccaagtggagcttgtaggccttggatcttcttcatcaatgcaaaaaagatgattggaga

SEQ ID NO: 8049 - DNA, 413 bp, Glycine max
agcttcaatgttaatgtcacctaagataatgtctaaaaccgtatcaaattatggagatcgtggaatggtattgtaagtgacatccttgtctagaatgggtttaattggtatggcactaagcacatgatcacaattgagaatgaaaatgcttgtgatgaacaatgcactgtaagtattctttaatatgttgctatttgttattcaaagtagattggatttgactttttcttgttttccagtcgcataaatcggctaaaccgtttcgattcaaggtgcttcaaaactgggatgatatagtggatttgtgtgctaaagatagagccattggtcatggagctgaaatggctatggatgctgatgaagcgatgagtagagaaacaaataaagtggaatgcatcgggttaagtgttact

SEQ ID NO: 8050 - DNA, 373 bp, Glycine max
  unsure (1)..(373): unsure at all n locations
cttttcttcatttggatcagaacagtttgaggagctnttataccaagaagggagatgtaataacaagtgactaggtgcctcttattttgagaaattaatggcttttttttagttcgttaagataatttttagaataaaaacaattatttctcataatcgattacaaaacaagtgctgagtatttgataatcaataattgatgtacattatcttttagtatttgataatcaataattgatgtacattatcttttagtattagaattgttttgcacaattggtgatcacggtcaccacactaatgtttgatattaagcacaatcatcaaatactgtaattgtataactatttatntttacttatgtacagatgga

SEQ ID NO: 8051 - DNA, 371 bp, Glycine max
  unsure (1)..(371): unsure at all n locations
agctntaagattacacttttctctttctttatctctcaactgttcttcattcttcttcctttattcactttnggtcttccttcttcttacacaaatattgatgctcttccactgatgatgatcatggaaggctaaacactcaatcaatccaaggatccactccaaaataggttgaatttgagttctggtttagtatttcaattacgcgagaatgttcatctttttcttcaatcatattttttattttcatgattatgaatatgcttaggattgaaaacaaaattatgttatggaatcactttgtaattttgaaatttaatcacagattgtttggatgatacttcaacctaatttgcgatctcaatgaatct

SEQ ID NO: 8052 - DNA, 377 bp, Glycine max
  unsure (1)..(377): unsure at all n locations
taaaattcgtatggtccagctagaccaaaaaggctttattagattatggatntaaaatcttacatcatgtagttcatatgcaaacttatgtaagttaaataaactactgcgaaaggaaactatgtactcacctgtacaaccacaccgccatctgaacctccctcctctttgatgatactgaaaatcttctcaaatgcgccttcaaagacaacgattttttgaatctcctgccctcatcagaataaatagattataatttaactntagcatccaataaaaagaatctaaaagatagaaattgaaggaagtgaccattagatcaaataggttacctcagcttcacaggtcaggtgagtaagaagtaacaatgcttcatt

SEQ ID NO: 8053 - DNA, 407 bp, Glycine max
  unsure (1)..(407): unsure at all n locations
gatgtaacatntggagaggttaatgaaacaacgagatgatgcgctccatgagaggttggatcaaatggagaatagagaccatatgaattgctcaagagcttccattgtttattttctagcgtctagatatataatgcgcctcaatcggacctccgagttaaaagttatgaccatttgaaatgctcaagagcttccattgttcaatttcgagcgtcacgatatattatgcacctgaatcggacctgcgagtgacaacttatgaccatttgaattgctcaagagcttccattgttcaattttgagcgtcacgatatattatgcacctgaatcggacctgcgagtgacaacttatgaccatttgaattgctcaagagcttccattggtcaatatcgagcgtctcgatata

SEQ ID NO: 8054 - DNA, 432 bp, Glycine max
  unsure (1)..(432): unsure at all n locations
tacccataaattgttagccaataattccttagacatacctttgcacaaaatgtcaaactatgttaccaaggaattagtataaataaagcaattgtaaggcacaatggagatatgaaaacttaagcttaccttccactcttaccttgtctggaggtgctggcctcgaatccaatntttcttttcgattttctgtatcaaatacacagcatcagtagtatacaataataccctagggtatatatattcaaaactagaagtgtataatcgtcgacgatctggcctgtataatcgtcaacgacaaccacgacattgctggtgtgcttcacaacggcaaccaacttagagagacaagcgtaagggcacaaaatgagtgaggtaatgcgggctanggtagagtgcaagtatgctatggaaaaagatgaaaatntactt

SEQ ID NO: 8055 - DNA, 395 bp, Glycine max
tctgcacttccaggagagaaaacccaagaaggaaaagccaactcatgcagttgaaaagcatcacaagcaagcatctcgaacgttgcaccctcaactcgacttggagtcttattttagcacttttcaatcacttctgatgaaagacccaaagcttcaaaaatctgagcacctttgtatgatgccaaagttgatattcccatcttggcaagaaccttcatcattccatagttgcttgctttgaaatacttcttgaccaactcatcttttgagtggaattcaccacttgcttttggtggtatctttccatcaacctgcaggcgccaaattgcatctattgccaaatatgggcatatagcatcagcaccaaaaccaacaagggtgcagaaatgatgcac

SEQ ID NO: 8056 - DNA, 303 bp, Glycine max
  unsure (1)..(303): unsure at all n locations
cattatatcnnnggggnggccaccttntatatgcgtatacaatagatttttagttcctcttagattacattaataatgaaatggatacttcttgtgaattgtatattggttaataattggagtactttacgtccttacctaaaatagattatagatgggtatcccaatatgcagaccaatttcaaacaggaatcgtagaagaattgaacagctaaaccaaacttgcaataatttctataanaaagttatcatactgaagccatgataggctaaatagcaacaaaagtatgtcacctttcgtct

SEQ ID NO: 8057 - DNA, 411 bp, Glycine max
tgccacctagctcgcccaggcaagctaggttgcttcctccagaaggcaccgccttctggggaacttcctagaaggcccaagtgggcctacattctatttgcaccccctgtttactaaatacaccccctgcctttttttgctgattcttttttcgtaacgttacggaactttatgaatttcgtaacgatacttgttttctttcggtaatgtcacagaaccttacggattacgtaatcatcccttttatggctcccgggatgttgcagaacttcacggattgtgcaacaatgcttccttttgacttccagcatgtcatggaacttcacggattgcctaacgatgggtgccaagtacctcaaagtggtcaaacgagggtcgcatcccaacaaacagatggtccccggaaaaaat

SEQ ID NO: 8058 - DNA, 401 bp, Glycine max
  unsure (1)..(401): unsure at all n locations
tgcaccaacattcagtagttcaatacacactcaacaaatagtcatcatccatccacaattccaatcattcatgcttaatatgatgcatgcacctgacctcaactctcatatgcaatgtggtaccatccccaaggaagtagcctaagcgtgtccacatgacactctcacttangaaaactaggaagtaagtgtcgaggtcaccctatcgtggacaggaaactctcccccccacatggtgatcagcctgagtctcaagggagttccaaaccgagagatatgccccctagtacaagtattcctcctcacaagaaactataattacttactaacaaagtttatactatttccatgtcatatgaagtatgaaacaccggcaccatcaaatgcactaaacgtggata

SEQ ID NO: 8059 - DNA, 515 bp, Glycine max
  unsure (1)..(515): unsure at all n locations
agcncacggcnncntttganacccatggannnccttgagacactagcgattacgcgacactataggatacacaagactcgaacgcagcaactgaatctgatgcgcaacattaaagacaaaaacgcaaatatgacactggctagatcatatataatcaatcgaacgcagcaggcaataataatggatcagtgctgctcaccaatcaagtgacagtaaactctgtatgtgcaccgggcctagcagggaagactgcggattgaaacaagcgcgaagagcaccgcagactatgacaatatacctgtacttgcaccacaaagcagaatagcaaccctactagaagtcgctaaacccacagaagttcacatgataccgtaaccatagatgtgtatacagccactgcactagatcgagcaacaacagctggcttcgtacatatcgacacaaacagaacctgcatctaggccagatactgagtggaggatctaacatgggacaccgggccacttgataacagg

SEQ ID NO: 8060 - DNA, 205 bp, Glycine max
gggggctcaccaacacaccccccgaccctccacagagaaaagtacaccccaaacctccgcttcagacagccctagcacaagacaagggcatcaggaaacctcacacagagctcgaccccaaaccccacaacccctgacccctgacccagtaacacaagcgccacctccagaaaggcccagccagagccccctagaccagcggcac

SEQ ID NO: 8061 - DNA, 453 bp, Glycine max
  unsure (1)..(453): unsure at all n locations
tgcacatgtttcactaaatntccttgcgtagtgaaggaataacaacagtaacaagagaacaagaacagaagttaatatgctaatgagacagtgaaaaagttaatgtggttaactaaattcacatttatataaaccacacatacagaaactgaaacttttatccaagttattaaggaccaaaagcataagatatagcacatgacaagaagactntgttcaaaagaattcaagatgcaaagttatgtctggtgaaacccaaatattaccaggaaattgagctttaaagcttatgacggatcaacatagaaacacaatagtataaaatatcctcatgttccaccaatacaatattacaccatatacatggcaacaatatgagtttccatgtgcaagtggatgggcatgcagttgcgccattgtactgcatgaaaagaaaatgcaagctgacctcta

SEQ ID NO: 8062 - DNA, 428 bp, Glycine max
tcttgttttccttgtacttgccactgatggagaggatctacgagagggtttactgctacgaaatggtgatggagatgcagatcataatggagattgcggccacggcgttagtcactggaggcatggtgtacaaaggagggttttctgagatgagggaagaagctgagagggtttttgacaagggatccactttttactggttgacggttgtgtcaagtgtggtgacatggcagtgttgctacatgggaactgcagggttggtctttctcacatcttcagtaactggaggggtttctgctaatgctttgttgtccctgaatgtgttggcagggtggtttgtgtaccatgatgccttcaatggttttaagattgtggccactgttttgtgcatttggggcttctgctcttatgtctattgcatgtacttt

SEQ ID NO: 8063 - DNA, 426 bp, Glycine max
  unsure (1)..(426): unsure at all n locations
aaagagttaagtctcatattgatttaatcaatttcaatagaaatttgaatcaattacactattgtttgagacaatgattgatttttcaagagtctctgttttaattgattattaggtggattaatcgattacttctctcttgtttaagttgttcagaggtgaacaagaacactntaatcgattacttaggtcatctattgattacattgttcttgagtggttttgtcagatgttggatgaacactttaatcgattactttgataatataattgattacttcattaaaataatcgattaccatatagatttaaccgattacaatcggttataactgttttatctataaataaccagcttgngttcatctctaaaatacatttgaatatcatgagatcataagagaatactcattacatctcgaaaat

SEQ ID NO: 8064 - DNA, 366 bp, Glycine max
  unsure (1)..(366): unsure at all n locations
tccttgttatcatcaaaactctctgaatcaatcttgattcatcatgaagcttgcttctacaatgatgaaatctaaagagagatccacctaaattctagcgggagtantcaacggnngaagcaagccagggggtttctggttttcgtttttcattcgctggtatgtgaggcaattggtgatctagcagtgtacgtctctatgcattccttcccagaaaaaattgtcttggagacgacaaaaggttttggcgatgcccatgtggcctcctagcggaattccgccaaaagtaatggaatgaaagagttttctggtggaagccatattttacctttgtaaaatatcaggtcgcatgggatggagtagtca

SEQ ID NO: 8065 - DNA, 356 bp, Glycine max
  unsure (1)..(356): unsure at all n locations
ntctagctnttcattggtttaatttgatctccttttggtgctctaaattgtgggaatgtactcaaatatgtggggcaattttggnttgttttctttcttgattaagnngaattgngggtttgtatgagatggccctaggcctataatgcattttgaagtaatggggcatgccacattgtccccgttctcttgctattgatgcctaaacgcgcgcccaccaagtgttcggtgaaatgcctcaacggcattagcgcgtgattgttgtagggaaacaacccatggngcaatttggtttgcacatatttttgggacatgcattcattttcgaaagagctagagtaatagccccgcatatg

SEQ ID NO: 8066 - DNA, 151 bp, Glycine max
  unsure (1)..(151): unsure at all n locations
tcacgtgacactataaaactaagcttgaataagctggacatttctttgaaattggtgaagggtctcatatgaagntttgtcatcaccttcgntctcagtggccccctggggtggggatgacttctcttactcaagcattacaaattaaaaa

SEQ ID NO: 8067 - DNA, 410 bp, Glycine max
  unsure (1)..(410): unsure at all n locations
tgaaggtgtgcagcccaccattttccatagtagaatactagtaatgtgtctactatcattgtcatcattttttcgtcattgaggtgccacttgagctgccaggtctctccacctttgggtgtattctttgaaagatctgtgcccctttttgcacatgttctgttgttgcatcctatccggaaccatatcaaacttgtactgatactgcctaatgaaggcaaccattangtccttccaagagtggactcgagaaggttctaggttagtgtaccaggtaacagctaccccagtaagattttcttggaaggaatgtatcagcagttcctcatcttttgcgcatgcccccatcttccgataatacatctttagatggttcttggggcaagtagtccccttgtacttgtcaaagt

SEQ ID NO: 8068 - DNA, 387 bp, Glycine max
cttgttggatgattggattggattggattgcaatcaatgagtttcataattatatctataagaactgttgtgcttttgatctttaaattttgctgttatagttcttgcttgtaatttgtaaccatggtgtatttttttttgttataattctatcttttatttttactatcagtgatttggcacatgggtgcatgttaattcgttttttttattgaaaaattaatacagctgtttttaatttaacaaagatttacttttctttatgtagaagagtaactctaaattagtatagtagtatttctcttatcagtaaactaatatagcagtatatttaggtttcgaaaagagaggagaagatatctttttcgtgttgctataagtctctca

SEQ ID NO: 8069 - DNA, 310 bp, Glycine max
  unsure (1)..(310): unsure at all n locations
tgccacccagctcgcccaggcaagctcagctcgcccaggcgagcagggttgcttcctccagaagcaacagcctgctggaggaatctacaggaagtactatatgggcctggnngctatnngcacccccatttttactaagtacaccccccgcctttttttggtaattcttttttcgtaaagttacggaaactcacgaatttcgtaacgatacttgttttctttccgtaatgttacggaaccttgtggattacataatcatccccttttttacttacggaatgttacgaaacctcactaattgtgcaacgat

SEQ ID NO: 8070 - DNA, 357 bp, Glycine max
tattactatgtccgctacgaagtcttcatcggagtgccccgtactcaagaaccgcgaaagcatatcaacagattcaagcgattgtttctccttcagctcctttttcttctctctcactatgtacctggcgaactcgtgcacttccttcaccgctcttcttagacgcctttcggaacctatgtgaagtaatctctttattttccagactaacggcaacggctcgcggaaccggttgctgctgatctccggtggttattcgaaggcttgtgcgaacttgctccgttcagctgacagcgtcaggtattcggtgtcgaagccaaacgcgattttgcagatgttgtcaaacgcgaaacgttg

SEQ ID NO: 8071 - DNA, 408 bp, Glycine max
  unsure (1)..(408): unsure at all n locations
ngaacaacccgatattctntgtcctaccaaaccactgttggttctaaaagaaatcagaagaattgttatttgtttggctcactaactaattcttaattgtctcactggttttaaaataaaccactattggctctataattgtatcactaaggtcttttctctcaagatgtttaaggtgttttgaacttcacaaagagcttcatagaagaattcaaagagatagcatgcatgtttgtaaaccatttcttcgaagcttctggtatttataggccttcttcaataaatgtttgttttctctaaacggatattattcttcactaaagctcatgtntgaagaatgtgcatattggagcatttaatgcttgcattaaatgcatgtccttctttatgctggaaactcactctcat

SEQ ID NO: 8072 - DNA, 393 bp, Glycine max
taacagtattacaaatctcaatatacgttgccaagtgtgagtatggatcttcatttggtaaaccatgaaacaaattgctctgtattagctggatcaatgaaggtaggtaattttagttttgtgcctgaacctctggccgcgcaacacttgagaaatattatggcaccgaagtacttgagtaatcttccaaggtcactcgtcgaggttgctcttcagccatgagttcgacttcaaaatcttctgtttgagattccctagatgtaggtgaattagaagatgatgactcagaaaagtgagcctcttcaggatggatgctactgttctattgtgcaaaagctttcttttctctctgcattggttcttctaaaggtggcttcaatttctaaatccaat

SEQ ID NO: 8073 - DNA, 350 bp, Glycine max
  unsure (1)..(350): unsure at all n locations
tgtgcaaatcaaatcactcctacatctcatctctagcatgcattttctttctttacccactcctcacgtttggtttttttagggaaaaacaccataactaaacgcgccgcaagggatccctatcgcaccagatccaaatctagaacgatgggtgatcaagaggagacgcaagaacagatgaaagccgacatgtcggctctgaaagaacaaatggcctccatgatggaggccatgttaggtatgaaacaactcatggagaagaacgcggccactgccgccgctgtcagttcggctgccgaagcagacccgactctcttggcaactacgcaccatcctccctcanacatagt

SEQ ID NO: 8074 - DNA, 417 bp, Glycine max
  unsure (1)..(417): unsure at all n locations
atagattgagggtgacccaatatttcctctntaaagtctcaactattctaaatctctagagttnnnnnnnaaataaacaaataccacacaaggaagggaacttaattgtgtgtttgtgagcttacaaagtttttttgcaaatgcaattataagttcaaaaacaaaagtgtacaggctaatangagttggaaggtgggtagcttcagacactacctccctaaccatattgtttccaatattttgttgttgatgatcccgagtttggatgccaatggtgatggttttccttggagtgggactagtgaaggtaatttttctataatgtcagcttatgatttagttagtgttggatcaagtggcctcagaataattangaaggggaggggggnntcaattaatattactanacctttacta

SEQ ID NO: 8075 - DNA, 347 bp, Glycine max
cctatccgatgcagccgtaatgatggcccgagttatgttggggaacggttacgaacccgggatgggtttaggcaaagacaacggcggcataactagcctgataaatgttttagaaatcgtgggatgtatgggttaggctataagcccactcaggcagatataaagagaagcatcgcgggaaggaagagcggtcgtcaaaactcgcgggtgagacaagaaggtgaaggaagcccaccctgccacataagtaggagctttataagcgcgggtctgggggacgaacgtcaagtggtcgcgatgtactaagatggtgttctgagtacattggatatggtatgaccatgccc

SEQ ID NO: 8076 - DNA, 435 bp, Glycine max
  unsure (1)..(435): unsure at all n locations
gtggagttcccaagcgccaaggcgtcttcttctatagaccagacttgttctggcgtcaactcatcagcgggctttccttctgtgtccatcattttgggatgttcccacccttggatgacagcttgccaggctctgctatccagtgatttgaggaaggccgccatcctaactttccagtaagcatagttggatacatccagaataggaggtgcgtgcactggaactccttctttctacatgttcagtcaaaattagtcttctacgactcacgcagtgatntcgagtgcccgctctgataccaattgaaattctgataccaatgccagatgtcgacacgatgtcacacatcacgcctcaagacatgcgattatctttgagcgctgaacagatcaaccaagaaaaacaccagagaattgtcactccgttcggccaacn

SEQ ID NO: 8077 - DNA, 353 bp, Glycine max
tgtaatcgattacacacatactataatcgattaccagaggagatggttagataatattctcaacaatcacatcttttcattgggtcttgtatttcatcaaaggcctatatatatgtgacttgagacacgaatttgctaagagttttcagaacaaaaaggtcttatcctcttaaaaagcaaaatcgttgtatcctcttaaaaattccttggccaaacacttgtgattcaataaggaattatttgagtgctcaaattgttcaatctatctctttcaagagagattcattcttcttctctttctaattcactaacggattaagagaccgacgatctcttgttgaaaagaatctaaa

SEQ ID NO: 8078 - DNA, 388 bp, Glycine max
  unsure (1)..(388): unsure at all n locations
tctgctcattatgctgatgatggctgctaggagaaagctcaatgatgcagaaagtggagaacaacctatttatttcattgttttgattgtttgatgattcgatcttnttgttgcatcttcaactttcaattacttatcattcgaggcagtctataaataacaattattggattcttttagaggttgtgttaattatggcattgtttttatctgttgatttatttggttgtgccatgagtttttttatccttcagattttgcatttgaccctatttggttgtctcccagtccctgctttctttatctacctccttatttagtttgacttgccatttccagggactgaggtctccattgaagcttattgtatatgatgataatacatcac

SEQ ID NO: 8079 - DNA, 102 bp, Glycine max
gacacagacaaactcgagctactgattgcgccgcatctcagcatagacgagcatacgaacctggcatacggccggtaccacaaaaggaggaaggcaccgagc

SEQ ID NO: 8080 - DNA, 292 bp, Glycine max
  unsure (1)..(292): unsure at all n locations
tgttggtcttttcataaagatctatcccttggttggaattctgggccagntgacttctccgctccttgnngaactagatccctttatgattcctncagcttgagccttgtgtgaaattactccaatggttgaattccgatggtcttacttgggtgtaaccttggaatctgnggcgattctgagctcccatgtagatcacctcctaaaagaatcttcatgggctatgcattaccctggctcgtgtgctccaccgtatatgtggcatcccactattttgatgactgaagagtga

SEQ ID NO: 8081 - DNA, 386 bp, Glycine max
  unsure (1)..(386): unsure at all n locations
tagacatgttattctcgatgaaactatcataacacanaatntatgccaaagcatgctttcaaatttcaaaatcattacttggtggaatgaaaatgannacttatttcaaataatctccaataggggagtaaccgaaagatttgcaatacacactgattttgtgtgaaaactaaattaatgtaagcattaacaaaacttcacaagaaagcttgagaagcagttcataaattcttgggctacatagtattgttgacaatacaagcaagatgaacactgcatataactacagtcctctaatcataagagcaaattacgggcaatacctgtcactagccatgaaaaaatcactaattcactaaaaattctatcaatattcacaaaaaatc

SEQ ID NO: 8082 - DNA, 430 bp, Glycine max
aaattgatgcaataacaggtcgcactaaaaccttcgaaatatgatagctataccactgtctatataggctatttactttttttggttgggaaactgactgattttttgtttgattgctgcttaatcacattttttttacagtaaacaaaagtctgttatctcgagaaaataaattcaatttaagtttacaatagtaggtctatttttcaattgttaaataacatttctaaattaaaaatgtgacaaaaaattaacttaatatgataaaaaaaaataggttaataatctaataaatattatattatgtgcttcatatcttttttaaaaaaattattattcttttcaaattaaactatttagctctaaataataaagaatctaatttatctaaatataacttggctagggcatcgtacggatcacccaacta

SEQ ID NO: 8083 - DNA, 427 bp, Glycine max
  unsure (1)..(427): unsure at all n locations
ngtaattagcattgtaagctttgagacctttaatttatcatatagttactttatatttgtaactaatccctagattctctcattaacaacaaattatcaccgaattatcaaccgttaatttcctgcatatttggttgaatgcttgactgcaacgtcaaaattaaagcaactacttagtttgttctgtatttttcaggaaatttgacgggtaaaaatgaataatagacgcaaatccaaacccatgtttcacctatttatatatttgtattttctttaacccttatttctttataggatgtggatatttattaaattctttgttttgctatataaatgattatatactccagagaaagtatttgtaattaaacacccttganaatttacttactgtacttggtaggaaggaaaaaatagattcaaaata

SEQ ID NO: 8084 - DNA, 432 bp, Glycine max
  unsure (1)..(432): unsure at all n locations
tagcccaactgctacaatttgcaattcanaacatagcattttttcccctaaaaatgcacagatttcatcattaaatccaatggaaatgttctagagatagcgttaaccataaaataagatttattttcaaaaatcactacaaaataaccataaattggggaactatacaagctntggaaaatgatttatgtacaaaggttagtcatatggagcgactaacacacaatcttaggacctgacagaacatgggtggtgaatggccaaagattgaaactataccatggtggagagtttggaaaggaaaacaccatcttaaatttgatatcacccaactctgatttctttcattttgtttttcatgcattgcataagttggaatttgctntatgatcattgaanaaggggtatatcagcttatactaagttatagat

SEQ ID NO: 8085 - DNA, 117 bp, Glycine max
gatcaaatctcctttttataggtagatagcttcattatgagtttcggcccatgatatgataaatcctagttagagaaatttgaactagcttcaggattagccaacaaaatatcttca

SEQ ID NO: 8086 - DNA, 354 bp, Glycine max
  unsure (1)..(354): unsure at all n locations
ngagatgaggaagtgtagaagggtgaaacttcctgcttttattcgttgaccacaaagtggtacctggagatatgtcgcgggggtcaagagatcttgtggacgtcaggtagggtgctattgcccaaaaccaagcttgaccaatcccgacccaacccgggcatagtcagtcagtgagaacctgtgatgtacctaagcaggcgagctcctggcagtcaacagataaaaggaacaaggaccacatagcaaggaggcttgtgtggtggctggccacctgtgaatcttgtgtgatatatgggttatggcctctggtaatcgattaccaagggtgggtaatcgattacaaggcctaaagat

SEQ ID NO: 8087 - DNA, 298 bp, Glycine max
  unsure (1)..(298): unsure at all n locations
ctgaaggacattctctcatgaatcatagattacatcaactgtgacatgtgtatggctaatcgcagaanaggaactgagactagaattatatgttgtcatatagaagtttaacagctctagctccacttaacagatcaagattcgaatgcactaagctnggtcagctaatcagcatatctcagctctgtctatagctaacaaagcgcaatgccctaagtaaacatacaaatgggttagtggtgacctaaattganaatggttgccgatagaaaaatgaccaaataggatactgaacatc

SEQ ID NO: 8088 - DNA, 369 bp, Glycine max
  unsure (1)..(369): unsure at all n locations
tctcggctcatgctgggaacgcctctagttcaacacccgtgcagcctaaggcacccacccagagggaagctccccaagttccaactccgaacacgactcgaccggccggtaattccaacacgacaaggaacttccctccgaggccattgccggaattcaccccgctcccaatgacgtacgaagatcttctaccatccctcatcgccaatcatttggccgtggtaactcccggaagggtcctcgaaccccctttcccgaagtggtatgaccctaacgcaacttgcaagtaccatgggggtgtcccggngcattccgtcgaaaaatgcttggcccttaaatacaaggtccaacatttaatggatgctggat

SEQ ID NO: 8089 - DNA, 270 bp, Glycine max
  unsure (1)..(270): unsure at all n locations
nttcaagagacctactcttggtgattattttcaagagaaggttttcttggttacaaacactgaacacaagggaccaacgttccttgggttcattgcaagaagcgggatttgcttcttggttgatcactgaacacaaaagaccaacgtcttttgggttcattgcaagaagtgggtacttcttgcttgttatcactagacacaagggaccaacgtcctttggggttcattgcaagaagtgggaataacttcttggttgtagtcactgaacac

SEQ ID NO: 8090 - DNA, 402 bp, Glycine max
  unsure (1)..(402): unsure at all n locations
cttctgggtgatgttggactagactntagccatgtcacacattaggttgtattgtacttttttcttcccattagtctccttgaggttgatccattatatagtctttggaacatggctcttatatgtcttctcctagacttcctagcatatgtttcccttttctaatgcaccttattacttttgtgatggaatctatgaaaagtacaacctcatttcgaagaaccttggatacgatagtcttctagtccttgaactgagcattgctctagaacattctaatgagttttgggtatatcaggtgtggatcattggagtagccacggataccacaatatagtaaggtatgttntatgttgagccctaacccttccagcactccaatgtcaaagaagtgctctatat

SEQ ID NO: 8091 - DNA, 410 bp, Glycine max
  unsure (1)..(410): unsure at all n locations
nacaaggcttcctgacaacaatnttaatatgagtaaaactgtatataagtggccggaagtgggaaccgcatcactgatcacttatatgccatcagagcacaaaaactcacagacatgcttgccttcatgtatgtttgggaagccactacaattactatggtttagggtccaataaaattaatcacaaaatactaaattccagcgacatggattaaacacttgtgcaaaaaatgttgcttccaaaccttgtccaaaactgatgcccgtggttcttcacgcatctccctctagcccgagcttaatctcttcataaattctgaagccgaaaaccctcaaatcacagatcgctatcaagaataaagttaaactctttaagaagtaaagctcatctatcagtctgaactaatacn

SEQ ID NO: 8092 - DNA, 412 bp, Glycine max
tctattgctcttattcatctttactcgcgttatctcagaccttttatttctgttgcctaagattttgcatacacctccttcaaagtgaagtatgtagcctctctccatcatttggccaatgcttagaagattttcttttatgctgggaactagtaagacatcatggatgagtcgcgtacctttatctgtctccaccatgacagtgcctttgccttttgattcaaccacactttcatttcccagtcgaactttgactttgacagactcatcaatacttttgaaaatagtctcatccttggccatgtgattgctacatccactatccaagtaccagtttcctcccttttcttttattgagtcttaagtggcgtagaacgtacattgttcttgatcatgatcctctgcgatattg

SEQ ID NO: 8093 - DNA, 157 bp, Glycine max
tgagtaccttggccataacgtgttctatgcatttgactgacacatgtaaaaccatgttatgtcctctcccctcggcggggatttcctcttcattttatgtgaggtaattgatggctgtgatgttattaacgattcccccaaaaccttctatggagat

SEQ ID NO: 8094 - DNA, 442 bp, Glycine max
  unsure (1)..(442): unsure at all n locations
actcaacgcatggtgtcttctatttctgttgcgtttgagggtatgaattattttgggaaattaaaattaaagcaaaacatgtatgtttatatttggacgtcccttgttttcatgtactatattttagagacacggagtttctcgatttggtgttcctcaatccatttatgatgcatatcaaacatttcctacattaagataataaattaacatcaatcttgtcttccacacggcaagcacgcgaaagcatttaaacattccctttcctcatttgggctgaggctcctaaagagaacaagttaaaacaaagggaagagtaagccggtctaacatgattttagcaaaatatctatcggattntggttctcttccctctctatatttcttttcgcaaccaattctcacactntgcaagcagtgtcattaaaattntcaaaattct

SEQ ID NO: 8095 - DNA, 429 bp, Glycine max
  unsure (1)..(429): unsure at all n locations
taactcgaattgcaacgttccaattgatnttttaatggtgttatcgattacaatatattggtaatcgattaccagtgtatctgaacgttgaaattcaaattcaattattaagagtcacatcttttcataaaatgctttgtgtaatcgattacatggttttagtaatcgattaccagtgacaagttttgaataaaaaagtcaagagatgtaactcttccaatggttttcaggtttttctcaaggttataactcttccaatggttttcttgaccagacatgaagagtctataaaagcaagaccttaacttgcatttgaacaactttttacaactctttagaacaacttttgagaaacctttgctacttattcttcttcttcttcctttgccaaaagctttctaagttttctggtttccaaaccttgctctt

SEQ ID NO: 8096 - DNA, 361 bp, Glycine max
  unsure (1)..(361): unsure at all n locations
aagagatcatccnctcgacaacattattggtgatatctcaaaaggggtaacaactagacattctcttaaagatttatgcaataatatggcttttgtatctatgattgatcctaaaaatataaaagaagctntagtagatgataactagatcattgccatgcaagaagaacttgaaccaattgaaagaaacaatgtgtggaaattagtagaaaaacctgaaaattatcctgttatagggacaaaatgggtttttagaaataaattagatgaacatggtataattattagaaataaagccaggttagtagcaaaagggtgtaatcaagaagaaggaatagactatgaagaaacatatgctcct

SEQ ID NO: 8097 - DNA, 231 bp, Glycine max
  unsure (1)..(231): unsure at all n locations
ctgttgntggtgtggacctctatgtgaaaaacctncataagagttgttagaaggacctacaaaagaagtgttagtgggaccagacatttattgtctctagccacaaggctgatttgaacctgagccacccctatagccttggtagcttccttaaagggtttgttgagttctggcttgggtctacaaataatgggccctctcttcttttttttccatcaccaggaactgaac

SEQ ID NO: 8098 - DNA, 344 bp, Glycine max
tcctttcctttcgttgttacctctttaggcctcaaacaactcttgccataacaaattaatttccgcaagcgagagattaccccttgcttgctatctatataattctaagaagctcacggtcagggattgatatatatgaattaagttactctcagctctctcacaatacatggctaattaacatatctgtgtcatcttctgcaaagttggtgaagctagtggaactttccttgttaactaagcttggccaggtggtgcggcagacttaccagctctggtgaacaataatttcaaaaaagaaatgatgcgacattgatacaatatatcggagacaatgcatggac

SEQ ID NO: 8099 - DNA, 399 bp, Glycine max
tcgcatatcctttgataaaccttcgatagtaaccagtgaggcctaacaaacctctcagctgcttgatattgagtcgtgtaggccactctagatctgtctgcaccttaatagcatccatagcaactccttcacctgaaactatatgtcccaagtactctatctccaatacaccaaaagagcatttagacaacttagcaaacaaaacattttctttcaacactgtcaatacaacctctagatggcataagtgttcatgccatgtggaactatataccaatatatcatcaaaaaactataacacatatttccttaaagcatgttggaaaatatggttcatcaaacactgaaaagaagtcgtagcattggtcaaaccaaatggaattaccaaccactcataat

SEQ ID NO: 8100 - DNA, 415 bp, Glycine max
  unsure (1)..(415): unsure at all n locations
tgcatttggaattgcgaaagcccncctccatcattaggatttgttcctgccatctcaaacaaacaaatcanacgtaacaagactattatagatgctggttcaatacctcacccactcaagtgtatcacaccaatttggctnttctctaatgaaacactcttgccttttaccactctaattccccttgagttcttaggcaattcaagagattatggccacaacaaagaacaattcaccaatatgtgtaagctaaggctagagagacaaggaaaaggttaaccaagaaaaaagctaacaatgtttttaggcacagatgaaggaaataaaattcataatttaggaattcaagtaacaatccttcatgcaaccaatatattaccttaaagagatcttnttgtaaagatcttcaagcatg

SEQ ID NO: 8101 - DNA, 446 bp, Glycine max
  unsure (1)..(446): unsure at all n locations
tatatacaatgagtattgatgaactcgcttagcgccgcatgctctcttagcgagttcatcgtgttttccagaaaacgcataanacatagcttgttttctcgcactttttatagcctctaaaaggcatatcagagatgcaatgtgtgccccatactcaattcagtatacaaccttacatagccctaatcttaaactaatcttaacaaaacataaaaaccataaaaatctaaagctacagttaacatcttcaaccctaaaattaagataataaaaagagaaaaaggatcaaggaacttacttggacggtgtatgattgatgctacaaagtcaaaaatgcacaaagagagtacaaatgcaaaaatgtgccaaatttttggagagagagaatgcanatgcgaaggtttctgtatctggaaaatgtgagtgtaactactgttacactcact

SEQ ID NO: 8102 - DNA, 419 bp, Glycine max
  unsure (1)..(419): unsure at all n locations
aaatcgatgaggatgatcttcttgaccagaaagtggaaatacacccatcaaaaattgatatggtccaaactttatatacgctctatgaatntaatctttntgattagcatgataattccaattggtggatgttttccatgatcacatatcaatattaattatcccttgttcaatcctcaatttaaaagtaggtggttggacaagttgttctatggttgacactctaggttattcttcttcatcaatactttgaacattagtatctaacttggaagcaaatgcattagacaccggttgtggctcttcgttatatctctttattttctcttataaaatgagtacatagttgtcttcttaaacatctttcaacctaaaaatacatagaaattaaccacaatatnatttaattaaaattagta

SEQ ID NO: 8103 - DNA, 439 bp, Glycine max
tggagaggatgcttcaatggatgaaaagaaagagggagagaaagagagaggggggagcacgaaattgaaggaagaaaaagggagagaagttgaactttgagttgtgtctttttagactctcattcatcaaagttacaacaagtgttacacatgcttctatttatagactaggtagcttccttgagaagctttcttgagataacatccttgagaaacttctttgagaaaacttccttgagaagctagagtgatggcacatcaaaaccccccatacttggccttttgcactcctgggaaaaatgaaacaaagaacaaaatccaaggatatcagagggagacaaacaaaaacattcacatatttctcaatgaacatcaaggaatgaaaggaatggaacatctaacataaggagatccaaaaagtcaagacattcatgaaaat

SEQ ID NO: 8104 - DNA, 448 bp, Glycine max
  unsure (1)..(448): unsure at all n locations
tactcaagcttcaacatcagaccacttccgggtgctggaactacttcacatggatttgatggggcctatgcaggttgaaagccttggaggaaagaggtatgcctatgttgntgtggattatttctccagatttacctgggtcaactttatcagagagaaatcagaaacctttgaagtattcaaagagttgagtctaagacttcaaagagagaaagactgtgtcatcaagagaatcaggagtgaccatggcagagagtttgaaaacagcaggttcactgaattctgcacatctgaaggcatcgctcatgagttctctgcagccattacaccacaacagaatggcatagttgagaggaaaaacaggactntgcaagaggctgctagggtcatgcttcatgccaaagaacttccctataatctctgggctgaagccatgaacacagcatgc

SEQ ID NO: 8105 - DNA, 340 bp, Glycine max
aactacatatgtatatagttcaatttgaaaagggcagatttgttaattggaatgaataataataagtgcaactttttattgtttgactgttggagggagtggaataagtaatgtgaaatacatgagggagtgcctagggatcaaatttaagactatccacccaagctcaccctccaatcaccatagctaaatgttgaagtactttattggagattgataataaatgtcaaattcagtagaacccatgtaaacagattacacatatactccatcttaacttgttacgtatgctctgggtctcaaaagaagtgcttttatgatattgtgaatgacatttgaa

SEQ ID NO: 8106 - DNA, 359 bp, Glycine max
  unsure (1)..(359): unsure at all n locations
tacaagtgagagaaccacaccagtgggaaagaaaagtcatgataaaaataaatccaagcaaggcacattgtttagaaataacaagttcattttgcatgcaagcgtgcctcttgtgtcacaaccagctgagaaagaaagccttcttgtggaatctaacgatgatgacgacgatgatgacacagaaaccgaggaccaagacgttgaaggaggaagaaccgttgcttataacaatgacaggggaaagggtccacctattattggtggagaaagttcanaaacagatggtgatgaaggaccagatgtggataagaaggctgatgagttcattgctaagagaattgagtcaatcaagaggagta

SEQ ID NO: 8107 - DNA, 364 bp, Glycine max
  unsure (1)..(364): unsure at all n locations
tatgcctctgctaaactagaagagttgttcctagtacccaatatcatcacccctcccaagttcaaggtgtcagactttgacaagtacaaggtgtctacttgccccaagaaccatctaaagatgtattgtcggaagatgggggcatacacaaaagatgaggaactgctgatacatttcttccaagaaagtcttactgnggtagctgttacctggtacactaacttggaaccttctcgagtccattcttggaaggacctaatggttgccttcgttaggcagtatcagtacaatttcgatatggctctagataggatgcaactacagaacatgtgcaaaaaggggcacgaatctttcaaagaataca

SEQ ID NO: 8108 - DNA, 423 bp, Glycine max
tggcaccaagtattaagacaattaaactatagtattaaaaatatctttcaagtttcaaccctctagtacatgaaataataaccgttttctgcacttgtacttattatggccttacttgctattctcatgagctacagcagcaatctgggtgtttgtttgccccagcaagctgcttatggaacgggctttcaccatgccaagcttcatcctcttcttcgtcattattatctctggcttcttctcctcatccccaaagggctcagcattatcaacacactcaatttgattctcatgatcaagagaacaaaaagaaggaggaggagaagaagaagaagaagatgggtcaggcaagtggtgcacgtgcacctcctttggtgcagttgaagcaatggaacggcttctaacacttgtcatgcttctgag

SEQ ID NO: 8109 - DNA, 317 bp, Glycine max
  unsure (1)..(317): unsure at all n locations
tgtangattatggggtacccatcacatgtggtactaggtggcggtcgggcgatggtgcacaacaagttttctacatccacaaatcgcgcatattttcaccatcccctgttgcccacctccaactgagctcacgtactcccacgtagcccatatcctcgtttctctcaacaccgggtccccatcaatcctcccaagcttccccaacatccaagtaattcaacattcaagcaacacaaactatcacagccaataaaacagggcaaaggcagaaaactctgcccaaaacaccaaccaaaatcacagattttctcacttaa

SEQ ID NO: 8110 - DNA, 401 bp, Glycine max
  unsure (1)..(401): unsure at all n locations
tcagaatccaaaatcttgaacaagaactcatgtccttgaaattaagccttcaattgcacaacattgttacaaaagcagaaccatatttgatcaaaagccagaagatgaagccgtgtggcatagaaactcgatcactgagcaaaaggagcaacccaattggacaagcgactagttgcatcagttctggaaactntgcttcacaaagaagatatgcaaacaggctactcaaggtctttcgccgcataactttgtttggaagtcggaaactgaagagaaaaccgggaactcctagtcaattgtccaagtaaatgtagcataagaactttactattgatgcgtatgaatatggatacgaataaaaccatggagagttggagactcaattctctntttcctttcat

SEQ ID NO: 8111 - DNA, 409 bp, Glycine max
  unsure (1)..(409): unsure at all n locations
tagtggattatggngcacccgtcatatgtggtactaggtggtgatcgggtgatggcgcaaatcaactctctcccatttccacatgtcatgcacaagcataccatccccagttgcccacctttaacttgagctcacgcactcctacgtagcccttatcctcattcttctcagcaccgggtccccatcaacccctccaagctttcacaatatccaaacaattcaattccaatcctcatgaaactaccctaaaccaagaaaacagagtagaggcagaaaactctgcccaaaactcattcaaataccacaactttccttactcatataccccagtaacattctctttgttccaattcgttaaccattggatcgccttgaaactnttactggaggttcctagtacataaatcta

SEQ ID NO: 8112 - DNA, 441 bp, Glycine max
  unsure (1)..(441): unsure at all n locations
tcaatatctatataggatntaggtttgtctgcctcagttgtggtttattatttaggttaattggatatcaggaaccttccgttaagaatcatcggaactgagtgcctaactgttaacttaattttgtttgacatttttaatctttgttaaagtaactggtaagtgttgttttcactatatactaagcaaatataatgttcacaagtcatttgaagctgaagcacttaaaaatagatactccaattatatatcaatataatcatcttctgcacttccctctagcaatatacattcaacaaatgttctcacatctcatacttatctctaacaactgatctctgactctcccactatgcttcttggtacagtctctttcatagtcaactattatcccacaaaatttggaattaaatcaaagagataaaaccgaagaacagattt

SEQ ID NO: 8113 - DNA, 434 bp, Glycine max
  unsure (1)..(434): unsure at all n locations
nggagaggctggttgtgtgtggtagaggagaagaatgaaggggttggtttgtttgtttttttttttactttttctttctttaaagctgatgtggtatgaaaattcccatattgtccccactaattatcaatttttttatcagtccacttactatcacttagtaagggtattttgggtatttttaaacaattttgatgttgtgcccattccacccctgtgattgtgtttgttccaccactcccggagttgtgatggctgcaccactgaactgagacgcgatagtctcgttgtagtggcccagggaagcgatgcactgcactggcgggatagtgtattgtaaagcaatcgtattttatgttgataaatcaacaattttaaagcttacaatgttggaagttcaatgattgattntgatttctatctcttaccatacc

SEQ ID NO: 8114 - DNA, 354 bp, Glycine max
  unsure (1)..(354): unsure at all n locations
aatctatataatcataaaccaaaatctaccataacatctttgtaacatatcaatgtaaccactcatcatataatccactctagttntatttaaaattgatttctactaaaaatatatatttctagaaaggaataaaaagttatagcaaaaatccaccataccaaaggacactaggatagcagtaattctactactacatcataagttcatagcaaagagcaatattttaatgaaggggaatggtacttcacaccaacataggtcaatcctaatgatgaggcgaaaagaattangcaagactcanaactatctcagattccatgaatgtaaagttgattctttcaacagtgggga

SEQ ID NO: 8115 - DNA, 391 bp, Glycine max
acgagtcaagggtggaaagcatggttttagaggataaattgaatgcttgtcaaaggtcgaaaagaagtttgactgagcagctgagtataactttataaaatatgttgacaatcattgaccagtataaggagaaggtaaacctagttgctacccatgagcaaaggctagaggatgagcatgcaaaggtatcggctctgcaagtggaaagggaagcaagagagagagtgatagaatcattgcatggtgaagctatgaaatggatggataggttcgctctcactctgaatgagagtcaagagcttccaaggctattagccaaagccaaagcaatggcagacatatactcagctcctgaggaagtttacgggctttttgattattggcaacatat

SEQ ID NO: 8116 - DNA, 398 bp, Glycine max
  unsure (1)..(398): unsure at all n locations
tcaaccaaggtgagatggaccatttcaagtgctaganagaatcaatgacaatgcttacaaagttgagctgcccggtgagtataatgttagttccatcttcaatgtctctgatttatctctttttgatgcagaaggagaatccgatttgaggacaaatccttctcaagagggagagaatgatgaggacatgaccaagagcaagggcaaggatccacttgaaggacttggaggacctatgacaagggctagagcaaggaaatccaaggaagctcttcaacaagtgctgtccatactgtttgaatacaagcccaagtttcaaggagaaaagtccaaggttgtgagttgtatcatggcccacatggaggaggactaaatgacaccactntatttcaaattta

SEQ ID NO: 8117 - DNA, 407 bp, Glycine max
  unsure (1)..(407): unsure at all n locations
taataaagtccttagtgatccatattgtgtatgtgtgaatgcattgaatatgatgatgntgaaaagtggcgattataacttcagtcgatttaaatgaaatacacataacccgaaacacttgtgtgcttgagagaaacactagctttgtgaagagtgaaacataagtgatctttatttgatacctgtcatacttgctaacctatntcaaactctgagtgcattctttacatgatcccatcatgaaaactgtgacaagtgtgaacttgaggattggaagctaaaattgttcgaaaagtacgcaattatctcagttgttgtgattcattacatcctanacattgtcattaatctaacttagtgtagtattagtttacttttgatgggggacaagcaaagctttaaatttg

SEQ ID NO: 8118 - DNA, 401 bp, Glycine max
cttttgtgtcttctttaaataaagatctagtggtagagatcctaactagtggttctatgttaacatctaatgtgtgtttgaattgtcctgtggattatttaggtagaacatttgtgattgatctgatttgtttgcctttgagccaaattgatgttattctgggtatggactggttatcttccaaccatgtcttgttaaactattttgataaaactatggtgtttgatggttttggagtgagtaaggatatgatatttatctctgccaaccaagttatgacatctttaaaagaagatgctgaggtgtacatgatcttgtctaacttggaaatagagacaaaggtttccatgtgtgacctccctattgtcagagagtttcctgaagtgttccctaaggatata

SEQ ID NO: 8119 - DNA, 416 bp, Glycine max
  unsure (1)..(416): unsure at all n locations
ttaaagaactganggaaaatcaagaacaagcttgtacgcacatcgttcgcgtgtatgatatccactccacaaggttgagtagaagagatatcaaccctataacgccacgtggcggacaaaagtgggcagtaaacttgaatggtcgtcattggcaatgcggaaggtattctgcgcttcactatccatgttcacacattattgcaagctggggttacgtgagcatgaactactaccaatataccgatgttggggatccaaacaacaccatcttaaacgctttcacacacaatgggacacttgtgaaagagacaggattgctccatctgctgaccctcgggacatataactgacccactacaaaattgcgacaagtggcccgcattatcacgatgataatgagatgaatgagtcaaccn

SEQ ID NO: 8120 - DNA, 387 bp, Glycine max
  unsure (1)..(387): unsure at all n locations
tgagagggagaggttaatgattgaacaggcatggagggagagggaagaacagaggagaatgagagaagagagtanggcagagagaatggatgctttgttgacgacccttttgaacaaactcattaatgaatctaactaacggaggcaatggcttggattacttgtagctgattactntgttgtttccatttattatatgattctaagtttagcacagaacgaactaatcttcaccgtagcttttgattacagagaatatgggaaaggagaatttggttgatgaaaggagtacttataggggtatatgaacattttcttttgaaaattgatacagaaagagtttttactatttagggatacttctgaatgataatatgttctgggaca

SEQ ID NO: 8121 - DNA, 412 bp, Glycine max
  unsure (1)..(412): unsure at all n locations
ggggtaatttataattntctatcactgtgtctggcatgggttggtggtcctggagctgttgtaataagtttgagtggtcgagttctgtaaccatcattntgtctgatgaacttgtgctttcctcctataccgctggatgggtgggtttgtatctgattcatatgtttggattaaaagcttttgtgccggaaaatagttatatatcccttgaacgttctatgtagtgttttttaattacctatttttttgtcacttaaagtactaggatgatgcatttgccacacaatatggaagatttattttttatagattattggaaaatgacctagacatcctggagatgccaatggatttagtagagacttctaacatggtggcatgacattatatcacaanttacgttcatctctca

SEQ ID NO: 8122 - DNA, 430 bp, Glycine max
  unsure (1)..(430): unsure at all n locations
tctgaatgagctaagatcacgtgatgttattagttaaataaagaagagaagaaaagttcttagaagaagtaactcaaaccttcaaatcttttgattgtgaatatcttttgtgataagtgagttgtgtcactttcttgagttcaagaagaacccctcttcagtcaagtaagattttgcagaaaggattgatcaggttgtgtctatctttactcttggtttttgtgtatggttttacacatatttttgtttgtacatgaatttcttagggcatgctaaaataggtgtttctagtttgggctaagagtagggttctcttatgctcttattcacaaagggccctagagttgggtgcctaagtctctttttctanggtgagaactgtagatnggttgtgattgcttgtaaggattctatatgcataatgaaaatg

SEQ ID NO: 8123 - DNA, 402 bp, Glycine max
  unsure (1)..(402): unsure at all n locations
gcgcgggtctgggagacaaaggtcaagtgttcgcgatatgcgaagatgatgttccgagtactttggatttggtacgaccatgccctcctgatttccagctgggaaattggcgagtggaagaacgccccggcatttacgcaacgagcataatgtaaacctttatggttttaaaagctctatagttgggcctaggctttagagtttttccttttgttaaggctttgtgtcttttgtttttgaatttataatgcaaggatctttcttcatctgttcctatgtctctacccattctcattcatttgcatgtttacttctttttctgaaacggcagatccgatgacgagtcccccgaaggtactaatacctgngacccgcctatcgacttcgagcaagaaatgaatc

SEQ ID NO: 8124 - DNA, 304 bp, Glycine max
  unsure (1)..(304): unsure at all n locations
tagccctagaggggatgaaccttttcaggtgttggagaggatcaataacaatgcctataggttggacctcccagaagagtatgaagtcagcaccacttttaacatttcttatttaattccttttgcaggtagagttgatattgaggaggaggaactaacagatttgaggtcaaatgctattcaaggggaaggggatgatgcaatcctccctaggaagggaccaatcactagagccatgagcaagaggctccaagaggattgggctagagcttctgaagaaggccctangattctcatgaacctc

SEQ ID NO: 8125 - DNA, 442 bp, Glycine max
  unsure (1)..(442): unsure at all n locations
tctntggagccattgcctataaaggcacatcaataaaaaaattagtttgcacgaaatgcacaactatcatttcatttatcttaaacaagcaaaggccaaacaattttgaatggtgcatatttctttttaccaaatacaagtgtcaccttgcaattagaaaacaatcatacatcggtgcatatgtcatttttgatggaagcttgcttgtggagcttctatggaggctggatctttgagcttcaatgaggtccttcaatggtgatttttcaccatagagatgcagcggaagacaaaggagaagaggtgagaggaggcgccatccattaaggaataagccatggaaaaaagagcttcaccaccaagatgagccttggataagaagcttggaaggatgcttcaatggaggaaaagaaagagggagagaaagagagaggggggagca

SEQ ID NO: 8126 - DNA, 331 bp, Glycine max
ggcttctacattaatagctagtagctgctagaatatttgtgctagactctaggacaaatttcctacgtttgtaaaggatttgataattgtacaataaagaagcccacatgcatacaatttttccctaaaattgttcttggcttttatcatggtatctcttgatttgtgactcaaagagtcaatgtaaaaaaatgcaagtttcaccttcatccttatagttatttatgtccaaaagacatgtagttcaagaagctattcactcacactatggcatgtatctttatcggaaatcatcctaaaagaaaacaaaaatattggtgacacgcttaat

SEQ ID NO: 8127 - DNA, 416 bp, Glycine max
  unsure (1)..(416): unsure at all n locations
ntgcggatntggtcttcgccggcgaaatgatcgaagtgggtctaaaaagaggcanatctgatcatcttgctttgataaatgcaaaaaaaactggtgcaaatgaagagggtgaggatgaaggagaaggctgtgctgtgactgccattcctatacaaccatgtttcccaccaacccagcaatgtcattactcagccaataacaaaccttctccttacccaccgcccagttatccacaaaggccatccctaaaatcaaccacaaagcctacctaccgcacttncaatgacaaacaccacctttagcataaaccaaaacaccaaccaagaaataaattttgcagcgagaaagcctatagaattcaccccaattctagtgtcctatgttgacttgctcccatatctactngataattcaat

SEQ ID NO: 8128 - DNA, 418 bp, Glycine max
  unsure (1)..(418): unsure at all n locations
tcaagaaaaagatggcctcagcaaactccttatttccagaagggaattctatcaatagaccttccatctttaatggagagggttacccttactggaaaacccgaatgcaaaattttattgaggccataaacctaaatatttgggaagccatagaaataaggccctatatacccaccacagtagaaagaattacatagatggcagttcatcaagtgaaagtataactatagaaaaacctggagatagatggtctgaagaggatataaaacgagtacaatacaatttaaaagccaaaaacataataacatctgccctgagaatggatgaatatttcanggtttcanattgtaagagtgctaaggaaatgtgggacactcttcgattaacacatgaaggaactacagatgttaaaagatct

SEQ ID NO: 8129 - DNA, 211 bp, Glycine max
  unsure (1)..(211): unsure at all n locations
actaattaatcaacgaacagctacaagataacganccaaccaaatgctatatatgaaaaaaacttgggaacaaaatttttcttaaaaaaagaaagttagaaaaatgaaataaacaggtccatttggcgggttgaagaagaggcttgtatttgccataaacggcgttccattcgaattgatccttgcaacgagagcacaccccagtgatctc

SEQ ID NO: 8130 - DNA, 318 bp, Glycine max
  unsure (1)..(318): unsure at all n locations
ntanaagatgattctttanagggtcaactacatgatgtaataaagcttcatgaagaaaccgacactctaaaaaagagtctagccaaatatttttgatgatctaacaaccttgacaaactattaatgtataataaaagtcctatggacaaatctagtcatggatagaagggtaagaaatttgctcataattagtttctaataggtcatcaagtctgtttctaccactacttagtaagggtgatcatgaatgagttaggtagggttgggttaaagcctaaacccattatccaacttaatcaaaattgtataggttgactt

SEQ ID NO: 8131 - DNA, 323 bp, Glycine max
  unsure (1)..(323): unsure at all n locations
cttgaatctgattctagaacttgagacgcagaggatgaaagattcagagacaatcaaagttatgcggacagcccacagtaataatatcaaaaacggctncttggcactgaaagtcttgactctcaaaatggtcaaaaaatacttgtaacaattccagaaaaatatgaagccacattgacttccttggagaactcaaaagatctttctactatcacctgggcagagcttgtgaccgcacttcaggctctgaaacaaagaagactcatgagacaagaaggcactattgaaggggctctggtagctaaatcactggacaaaaaaaa

SEQ ID NO: 8132 - DNA, 396 bp, Glycine max
  unsure (1)..(396): unsure at all n locations
gctattacgtgacactataaatctaagctgcaccagctcgcccaggcgagcaggttgcttcctccataagcaacagccttctggaggaatcttctggagggcccaagtgggcctggttgctatttgcacccccatttttactaaatacacccccttgccctttttctggtgattcttttttcgtaaagttacggaaacttatggatttcgcaacgatactgttttcttttcgtaatgttacagaaccttgcggattacataattgtcataccctaatttcgtccggggacctttgcttgatgacatgcgacctttgtttggtccttgtaaggtgcttgtcacccatcattangcaatttgtgaaattctgggacatgccgganaacaaaagaaaat

SEQ ID NO: 8133 - DNA, 387 bp, Glycine max
  unsure (1)..(387): unsure at all n locations
tatattctcaaaggttntcattctcttctgtcaaattcgatcgttctgtttttctctcttttcgtattgaatttacgctcttcttatctatttaattgcgtgtttttttttttttgggattggtaattgaactagttaggttttagctaaacgtaatctaatttgccgattttccttatgtatttcgccttgaaaatttactgtgccgctttttgactttttcaaatatgctgaatgaaattttatggtgaagaagatttgaatgaatttttttcatgctctacatatgtgttatattttttgaacttagggctggttttttctgttgtgtaggttctgcactgtctgtgttgggaaggcaagaaaatgctctattggtatgggagc

SEQ ID NO: 8134 - DNA, 251 bp, Glycine max
agctttctatccaaggctcatcttggtggtgaagctccttcttccatggcttattccctagtggatgacacctcctctcacctcttctcctttgtcttccgctgcatctccatggtggaaaatcaccattaaaggacctaattgaagctcaaagatccagtctccatagaagccacacaagcaagcttccatcaaaattagacctacgtagttctttcataagaacagaacgttggttaagttgttttgat

SEQ ID NO: 8135 - DNA, 251 bp, Glycine max
agctttacttattagaataaaaagaatgaacatatgcactgctcacaaagaagactctaatgtgaaagttagacattggtttgacaatttagaactcctattttgtcgatgtactaagagtataataaatttagttttatttaatacagataagttgaactgctttgcttcggaagacaagactgtgcacatctcctttaacttttgcagcatattgaaaatgttcatataaggaaaataataaagaacaa

SEQ ID NO: 8136 - DNA, 481 bp, Glycine max
  unsure (1)..(481): unsure at all n locations
tgttattagcattcagaacatcccatataagcttacctagtttagccacatgttggttcatagctatgcacgcacccaagccaccctgcatgtttccttggtttcattacgtgacttcatctaaagatgcatacactatcaacatatgaacacagattcacagatatgttgttgattatataccagttgatctgcatattataagatggtatagaagtcaacacaacattatatatatatatatatataggacttaagtagacgatgttttaaaatcaattcaaaccatttcaaataactaaattattttaaataaattaaaattcaaaacaatttgttaccttaatgaatcgaanacaaaaaaaattgtattttttttatatatgggtcagattaatttaaaaagtttatgtttggaatcaacaacgtcaaccgaatcanacaatanacatgttaaatntatactatntttcttattcta

SEQ ID NO: 8137 - DNA, 247 bp, Glycine max
  unsure (1)..(247): unsure at all n locations
agccncaattttttgtaggcctcaacaaaggccttattttcagaagggaaccctatcaatagacctccaatctttaatggagagggtcaccactactggaaaacccgaatgccaatttttatggaggcaatagatctaaatacctgggaagccatagaaataaggccttatatacccaccacaggagaaagagcctcaatagatggcagttcaccaagtgaaagcacaactatagaaaaacctagag

SEQ ID NO: 8138 - DNA, 452 bp, Glycine max
ggtatttaacaatggtttaaaaatacatttaatcaatatgtgttttcttattcctttattaatatatatgtgaggggtagagggtgtcacactctcttatcattatcctatgttattattatattaatgtttatcctattcttaccaataatatgttgagtatatatgtatatgcatacaaatctaattaattgattttctctgctttccttattcctttgtcctaagcattgatgcgtaaaaatagtacttgtacaaaggcaagtgcatcctacacagtagtgatagtagacttaagttcgaatatcaaatctagaggaccattcgtgtttccaatggatttgtttagtaaacaactcgaaaatttgaattttatcaattgaagaaagggtatgatcaatttactcttcacataatgaagaattaagtagaagattgtgaaaaatagtatt

SEQ ID NO: 8139 - DNA, 252 bp, Glycine max
agcttttgtatagaaacttcccaagctatttatcttctctctcagagaggctctctacttggattgactcactctacggtggctcactcaagcttgaggataaagacttcccaagctatttatcttctctctcagagaggctttttctcactctaagaagtggattcactcttatcttggatggataggaatgaaggctcctacccttatttatactactccatctccacaataaatggtggagatttcttg

SEQ ID NO: 8140 - DNA, 447 bp, Glycine max
  unsure (1)..(447): unsure at all n locations
gactcttgactctcagcttcttcttttggtggtggattgggttctggtggngtagtattgggttctcatgtggatggggtcgcattccagaatgcttattctgtaaccaanaaatgctttccagaatgtctttccagaagcaaaaaaagcttccaaagtggtccttccataagcaaaaaaaccctttggaatgagcttttcataagcaaagaanacttctagaatggcctttcagtaagccaaaaaaacttttggaatggttgttctggaagtactntaactcaaggaatgactatttttaacattgtgttcaattcattaaacggttgatctcctatttaattatgaagtaatgtattatgcataaaaattaaccaattggtggattaatactctagtagaagattcaaggagacatttttttgtccacctaatattttacatatc

SEQ ID NO: 8141 - DNA, 252 bp, Glycine max
agctttatatccaaggctcatcttgggggtgaagctccttcttccatggcttattccctagtggatgacacctcctctcacctcttctcctttgtcttccgctgcatctccatggtggaaaatcaccattaaaggacctaattgaagctcaaagatccagtctccatagaagccacacaagcaagcttccatcaaaattagacctacgtagttctttcataagaacagaacgttggttaagttgttttgata

SEQ ID NO: 8142 - DNA, 324 bp, Glycine max
  unsure (1)..(324): unsure at all n locations
tgcaaatttcaatcaagtttcctactaatacccatacatctctcttcgattgtaccatggatcgctgaaatttactggagttcctagtacataaatctacattttgaccatggggatctgctagaaaatatctagaacacaagatgtactacctttcccatgactagtggctgcacaaccattttctgcacatttggtcaagctggctgcacaaatttgacagctttggctgacaatttggcagatttcgaaatccaacttgcccacantccaatttacttcaaatggattaacaagtcctaaatcatgataaatcatatttaa

SEQ ID NO: 8143 - DNA, 251 bp, Glycine max
  unsure (1)..(251): unsure at all n locations
agcttttcctctaattcaganaagagcaacgcaaagctcacattatctgcttcaactcctaaacaatccaaaatttttggcttctggttttatgtcaatacatcaaaatcttatgttttacttgtgtcatcatgtaatgcttcctctactattgattccataaaacagaaaaaaaaacactaaaaaatgaaacctaatatcatcaacaacataaaccaaaatttttggctgctggttttgtgcccattccc

SEQ ID NO: 8144 - DNA, 368 bp, Glycine max
  unsure (1)..(368): unsure at all n locations
aagcttggatgaggaagtgtggaaaggtgagactttctactnnnattctttgaccacatagtgagacctggagatatgtcgcgggggtcaagagaccttggtgacgtcatgtggggtgctattgcccanaaccaagcttgaccaatctcgacccaacccgggcataatcagtcagtgagaacctgtgatgtacctaaacaggcgagctcttggcagtcaccgattaaagaacaaagaccacacagcatggaggcttatgtggtggctggccagctgtgaatcttgagtgatatatgggatatggcctcttgtaatcgattaccaacggtgggtatcgattacataggctaaaaacgagatcaggaagc

SEQ ID NO: 8145 - DNA, 88 bp, Glycine max
  unsure (1)..(88): unsure at all n locations
agcaagtctttttttcannttcaattccggagcggcgtcgtattttattatgcgggacatcagatactacacattccggaggtaaaaa

SEQ ID NO: 8146 - DNA, 454 bp, Glycine max
  unsure (1)..(454): unsure at all n locations
ntaagccaattcatacgacaataacncnttattcgtgatgtcttgttgagncccgcnanagaacgaaacactcgaaattgaatgtttaacctgtgagccaatcctaacgataataactatttactcggatgtccgcatgagtctacggatatatcgacacgctcgaaattgaatgctgaagctctgagctctattaaacgacaataacggtctactcggatgtccgattcagtgacgtaatatatctagacgctcgaaattgaaagatgaacctctgagccaactcaaacgacaataactttttactcggatgtctgatagagtgccgtgatatatcgagacgctcgaacttgaaagatgagcctctgagccaattcagacgacgataactttttactcggatgtctgatgagtccataatatctaagacgctcgaactgaantgtgaactctg

SEQ ID NO: 8147 - DNA, 249 bp, Glycine max
atcttttgtaatggagaattgcactaagcaatcactacgcatagcttcaaactcgaaggtggaggacacatgaacgaaaacgcaattcatgggtctccgaaaagattgagaatggagaattgcactaagcaatcactacgcatagctccaaactcgatggtggaggacacatgaatgaaaacgcaattcatggggctccgaaaagatggagaatggagaattgcactaagcaatcactacgcatagctc

SEQ ID NO: 8148 - DNA, 301 bp, Glycine max
tttgcacatacacaatgcgcgcataaacgcaccagtccctgttgcctacctccaactgagctcacgtactcccacctagcccatattctcgttttctcaacaccgggtgcccatacatacgttcaagctttcccaacattaaagtaatacaacatttcaacagcacaaactatcacagccaagagaacagagcataggcagaaaactctgtcaaacaccaacgcaaatcacagctttgtcacttaaagaccccagttacaattccgttgttccaattcgttaaccgttggatcgactccaa

SEQ ID NO: 8149 - DNA, 431 bp, Glycine max
  unsure (1)..(431): unsure at all n locations
acacaagaatctaagctatgatccattcctggtattcttggatggagccttttccattggcttcccagcccagntctatacttgtatcatggaatgtgtttcttccacttcctttaatgtggcagtcaatggatccatttattgtcacttcaataggcagcgaggtcttagacaacgggatcctctctccccttatctgtttgtgctctatttggagtacttttcctgagatattagcagcctcacagatgatgccaatattaatttcatcccaactgtgcaagtattcatttatctcatttggcctttgcagatgatattatgcttctatctagaagagatatccattctgtgtcaactatgtttgccaagcttcagcacttctgtacgagttcaaggctttccataagctctgattaatctgcatatac

SEQ ID NO: 8150 - DNA, 265 bp, Glycine max
cacccgatattacaagcttcacgttcttgcgatggtagcaatttctacaatcacctatacttcagccactatgtcaatgatacgatccttctctatcaatacattcctctagaattctgtgaacgtttcaacaataactactttgtccttgttgagaagtatacgatgtcatagagaacaaagttattcttatgtgaatccttatgtcttccacatgttatgttgactgatgttcatataatcattgtagttgttgagctcaatg

SEQ ID NO: 8151 - DNA, 247 bp, Glycine max
  unsure (1)..(247): unsure at all n locations
ttgcaagcattttctttttttanagacagcangggagagaactccattattaatgatagcgcaacatttatcaatgatgaaaaaggcaagtcctaataaaaaagaaaacgcaccttttattaaagaaagagaaagcccaagtgaaaaaaaaaggttgaaaattttaacgatccggtaccacagagactaatgcaaagtgaaggacatttgtgtgtgttacttcaataccatgatgacagatgtgctg

SEQ ID NO: 8152 - DNA, 373 bp, Glycine max
  unsure (1)..(373): unsure at all n locations
agctgtatatgttcaantagtccattgaacagcaatctgttggttttctaaaaannaaagggaacaatatgtcaattcatatacatagagataaattcgatttcaacagatggaatacaccctggactatgaaccctgggaatagatattaactattacgaanagcaaatgtgatgaagacacatattcagcggaagcacaccattccatgtgaccagcaatttgaactttggcctaaatatcatcgtcaattcatatttgttcctgaatttgattttgacaaagctctatagttaagtgccaaaatagttctcatagtgtgaagatggggcttgcaactgaactaactgaagtctcggctgagcatatatat

SEQ ID NO: 8153 - DNA, 134 bp, Glycine max
acagagacaacgaaacaaacaacccccaagaaaggagaccccaaacaaagacgacagccaaagccacacaacaggaaagaggaaagaagcgaaagaggcgccgaaacacaaacgaacacaaggcgagaaaccaa

SEQ ID NO: 8154 - DNA, 251 bp, Glycine max
agcatttcctttttgagggtcatagagagcgtggtattgtcaagaccagcaagggcctcgtcgaggttgcggaaggccatgatgacaaacgaaagcaccaattgttagggtaagaacctagagctggcttcgagggcagcggcctccataatgaataaaagaaaggggaaaaacaccaaggtaagaagggaatattatttttctcatatcctgcttgattatttacatagctatatatagaagaattcccc

SEQ ID NO: 8155 - DNA, 423 bp, Glycine max
  unsure (1)..(423): unsure at all n locations
actcaagcttcatgatgaatcaagattgattcaaagaagtnnggaggattttcatatgttatgactaaaagctcataggggaagaacacttcatgataacaaagatgatgatctcaagaatcaaagaatgagttcaagatgttcaagattgaatcaagaacatttcaaggttcaagaggaagatntgattcaagaatcaagaatcaagattcaaggttcaagcttccaagaatcaagatcaagattcaagactcaagattcaagaatcaagagaagacttaatcaagataagtatgaaaaagttttttcacaaactgagtagcacatggatttttctcataacctgtgtaccaaaggggcgtattacctaacccggtatcagaaaatgccgaaacatagaccccaggcccatacaccccaagc

SEQ ID NO: 8156 - DNA, 204 bp, Glycine max
  unsure (1)..(204): unsure at all n locations
agcntttttttattttttatgggcgcaagcaggcccccaggcaatggattgaaaggcttcagactaccttacttcaaattgggtttgaggcaagtaaatgtgatctctctatgttcatttacaagaaccacttctcacactgaatatgcaacttgatatgtcgatgatattataattactggaagttctattcctctaattata

SEQ ID NO: 8157 - DNA, 240 bp, Glycine max
tgaagagtatgacagagagagacctcattgtaaaagatcctccattttggcacacatcagcttgggccaattctgctctttctagggtcaaattgggctggaaagtcagaacctcaacacttgaataattgtgccaccaattagggctgtgatttgtgatattagtttacttacgtaaattttataggtcagaacaaggctcattcctttcttctgagtagtcactgcatatattatggg

SEQ ID NO: 8158 - DNA, 250 bp, Glycine max
atttgtatttatttgggaagaatggtgtatgactcttcccaattaccatatacctactcgagggcccattgttttgccagccatgctttacaatatgtgatggtgtatccgaactcttgtcttacgaattcaatgaatgtaggaatggttagttgctcattttcttcaaccatcgcaacgatatttttgcctacaagtttcaaatccatcttattgtgatcttgtgaaatggttggcatgacacatgtgt

SEQ ID NO: 8159 - DNA, 444 bp, Glycine max
  unsure (1)..(444): unsure at all n locations
actcagctctaccttctagggaccttaacatgtcaatgtattctgcattgaaccatgaaggcaaaaagtaagataataggataagaatttacaaatggtgcagcaataatgaaggacattaactctgcattttatcgttgaagatccagttggttcagctatatctgttctaacagaatggcaatgggagttagctaagtattcattattttttttagacactcataatgagtttctcaatatcgaagtacatcaattccaccagtgttaataaaatgccataaaaggaaaagacagagtgtctctgtaaaaacagttattcttgcagaacatttcctttaacaagtatctaagtattcattaacttattctggagtgagtccttntcttctagttataggtaacatataataggatcactcttctatttgtcaaatcaatccc

SEQ ID NO: 8160 - DNA, 252 bp, Glycine max
  unsure (1)..(252): unsure at all n locations
agttagttgttttgtcaaaaagcangcgctagattgttctttaggcaacacgggctggtatgatggaatcccgatctgaggggaacttcatagccaagtgagggggggacactataacacccaaaacattttaagacggacgatcaagaattatattgtatgaagtgtaagcatgcactatcccttatcaaaattttaaacctttttgttttggtccctcatggccaaacttagtgtatagctatatgcatc

SEQ ID NO: 8161 - DNA, 204 bp, Glycine max
ccactgaaaccggagcaaagagttttctatctaagctaaaagagagaacaaggcgtatatgcccataaccttgatgaaaccaaagccaaggaaaaccaccaacaatttgagggctattggcgcattgactcacctcaaagtaaagaactcacggcaagcatacttaagacactaagttgctagtcaaaaattgccaacgtaaca

SEQ ID NO: 8162 - DNA, 244 bp, Glycine max
agttgtatttttggttcttctctctgatacctgcaacaactcaaaataaacactagttaaaaatttgagtgaaaggcacaaagaagccacaacaacttccactaaagtacctcctcagcttctacggctaccgcttccctatcttccttacaatgctccacatgctatcatgcaccgcttattcctacgcctccatcaacttccttgaactcgttctgctccagcacatccactccaagaagca

SEQ ID NO: 8163 - DNA, 425 bp, Glycine max
  unsure (1)..(425): unsure at all n locations
aggagctctctctctctaacgaattgnattcattttttctcctaaatgcnngcagaagccattgagggtaactctgctgctgccgctttaattctttttcatttttatgtgccaaaaaaagagtctctaacttacattacttccattgaatcatagcttcggttggcccttctttccttaatatttttaaactttaatgtgacttgttggattatatatggagtagagttcggatttagccttgtgtcatctaaagagtgtgttattgcggcgttcaatatgcacgttccacttcgacgctttcattttcacgacagtaacgtcgagtaacaatctgcttggtaagaatatattgcaaataacgatggaatgtattgcattgtcattctcggataacacacattaaaggaagggatgctcatcta

SEQ ID NO: 8164 - DNA, 247 bp, Glycine max
atttattctttctgcatacatatatggcagttctctcacgagacaatagtgatcgtagtttaataattacttgattagctttccagaagcttatatcttttttcttgaaatggtacaactgatcactattaataattgactgcgccatttgttcttatatgcggtgcaacagcgaaatgcaaaaatcaaaagtctcacacgggacccacatgtgcttccaatctaaaaaattcaaagaattgaagat

SEQ ID NO: 8165 - DNA, 329 bp, Glycine max
  unsure (1)..(329): unsure at all n locations
aactcagctggggaggcctgaccaattgcaaagccttttgtagtgnctagtggactccgaaccgagcactggttgtcacgaagatctataataacgctcttaccctttcttgtcaatcaaagcaggaccacacttttggggaaataatcaatttcatgactgttgatgcggaaagagatggtgctctcagttggtttatccatgattcgtgaatggtggctctgcaagttacattaaccctgatgaattagcataaaaaccttgggctggtctcaattgcttgtattgtagcaacaaatggtatttatgtggcaaatgctccattggga

SEQ ID NO: 8166 - DNA, 208 bp, Glycine max
taagcactgtgcagcattttgttaaggagagacagcttaaggcaagctgagagccgagtgcgagagaagtcaagcctaccacagtctgaaaagagatgatgaactaagggacgcataggccaccgtgaacctggaacgagaaaccagaggcccgaaggaaaaccgtgcagcaagttgggggcttatgggacaatatagctagctccga

SEQ ID NO: 8167 - DNA, 256 bp, Glycine max
  unsure (1)..(256): unsure at all n locations
attgatactttgcgggangataatagccttactttcacgtgtaaagaatgaggccaattccagttaagaaacgaagaattcccaagaaaaacgggccggatggagtgttccgcttttttttaccaaaagggaatttgccgataatgaaataataattttacctctttttttattcccaagggggttacggcccacccgaagggggggaattcatgtgaccggacattaacggatattacaaatcaaatgatcaggg

SEQ ID NO: 8168 - DNA, 288 bp, Glycine max
acacagctcagccgacacctcaccagccatgaacatagacacatagtcgataccttacataggaacacaaacctatttgcatggcagacatctgacatatcgggtatccacgccagcattatatgccacaagctcgccatctgtctccaggccaaattagtgtcatacgagaagaggaagatgggagaagatagacgtatattggtcagagaggaagtagataagactcttaaagccaattttatccgagaagttaggtactccactagactctccaatgttgtcatg

SEQ ID NO: 8169 - DNA, 246 bp, Glycine max
  unsure (1)..(246): unsure at all n locations
ttttttttgatgaggaagngttgaagggtgaaacttcctgcttttattgctgaccacagagtggtacctggagatatgtcgcgggggtcaggagaccttggggacgtcaggtggggtgctattgcccaaaaccaagcttgaccaatcccgacccaacccgggcatagtcggtcagtgagaacctgtgatgtacctaagcaggcgagctcctggcagtcaacagataaaaggaaaacaagaccacaa

SEQ ID NO: 8170 - DNA, 367 bp, Glycine max
acacaagaaactcagcttgagccacatcccgactttcatatttcttacccatgttaaatggcactcttaccctctgaagcacaataataagggagaggtgaaatttccaatcaaatatgtattaacactatgtgagaatgaatatttccaacctaatgaataaaagacatgatacgtgattcccaattaatctatgtgatacagctataagaaatgaaagaaaattcccaatccaataatcggatatttaaaaaagatatgacacaatgtgataaagctccgcacctaaaaaaaataacttgcttatatgtctttggacctgacaacatctgtactatacagaattgacaccatatgaataaatata

SEQ ID NO: 8171 - DNA, 402 bp, Glycine max
tcaaccataacattctatattgtcaagcttcaatagcagataaatatctcattcagggctaaaggcgtgagatattttcaaagcaaacttatagtcaaatgatgaatgtgcattatttctataatttatcttctgaaattggtaatttcatgtttcacctacaagactgcatcatttctttcataataattgttgcaaaacactgaatatgctgacaatgtgttttctagtgatggaatttgttaacaaattttttattgagatatttctgcccaatttgaaccatcaattgttgattattgctatatatcaaagatgtggtcatacaattttggtgagccatgttattattttgattttgactttgaaacatacttgttaattctaccattctaggaattt

SEQ ID NO: 8172 - DNA, 398 bp, Glycine max
gagctttcacaagtaaattatgtaataagtagttattaaataacgtagtaataattaaaagagtttatctggtattagctatacgttaagacaccaaatttcaactttcacatgttcctattttcggtacctacactatggtattatttattcatttatcatgtcattgatatggagtattgattaattttgttgcttattaattctgattgaaaaatttaactgattatcgtaatgcgttttctttcctttcatttatgtgtttttatcctccaaatttaaattaaaacttttattacaaataattaaatatatacgcctattgggcacatgctacttcacttataagatacatgatacatactcagccttcaaacatagagaaatggaatgtctct

SEQ ID NO: 8173 - DNA, 247 bp, Glycine max
agctttttcttttattgagatgatgttgtttcagttggtagtctgctttaataccagtgttgttcctgacatgaggtgttaaaaaaaagtgggatgagaaataatcacatgaaaggaaaacagtgtgttagtcataaagcagtggttaaacaattctcgtgtgcctttgactgtccagtaactgaagtagacaaatccctatacataattttcatttttccttgcaagtcaataacaattatggttt

SEQ ID NO: 8174 - DNA, 382 bp, Glycine max
  unsure (1)..(382): unsure at all n locations
ctaaaaggatggaattctatagtctctcaagcgcnnnnttttgtaacgctatgatacaacatattacagaataacaagtaccacacgtactacatattacataacagggggtcctgacaattcaagagatacaacacccctcacaaatgaaaaccctactaacaaaaacttaactaaaagctgtagacatatttgaagaccagctataaaaaggaatctggaagtatctttcccaacccctcaaccaagttcatgataggaacagagtgctatctgtcagcctagtgatatcaaaagtttgattcttgaaaatgatatcatttctgagcctccacatatatattatactgtgactcttgtgtaaattattgcataaagcact

SEQ ID NO: 8175 - DNA, 249 bp, Glycine max
  unsure (1)..(249): unsure at all n locations
agcttttattttcatatgangaacatgagtggatcatggcaggagagcaactagcagcaacaaacgtttatcagatggaagaagaagctgaataagaagctcagcaaaagctagctcatcaatggaacttgagtcccttatgattcaaaagatgaatgttatccttcatctccatcaagagcattaagccgaagttcacatatccttagagaacattacaactaggcttgagaatatagaaactaggtt

SEQ ID NO: 8176 - DNA, 360 bp, Glycine max
  unsure (1)..(360): unsure at all n locations
actaagctgcttggaagctttatggggctgatcttgagcacattatggtctcttaatggngannnntaaccatggagttgcagtggaagataaaggagaagaggtgagaggaggtgccatccattatagaataagccatggaaagagaagcttcaccaccaagagagtgtcttggataaaaagcatagggaggaagcttctatggaggaagagaatgagagagagaaagagatagagtggcatggaaattgaaagagaatatggagagaagttgaactttgaagtgtgtctcacaagtttcttattcatcacagttatgacaagtgttacacatgtttctatctatagcctagcacatgg

SEQ ID NO: 8177 - DNA, 103 bp, Glycine max
aagaaaaggaaaaacggtgaggagaaaaatgaaaaggaggagaagggaagaagagaagaaaaagggggaaaggaggaaagaaaaagaaggaaaaaagaggaga

SEQ ID NO: 8178 - DNA, 358 bp, Glycine max
ccatacctcactgataggatacactaaacagtttgcccttttgaagggacccacgggcaggattttccgcaccaatacgtaaccatgaaccacccatctgtgtgacctcggcgatttctaatgtaacaatagcagcttcaaaaaccatcctacactcttacatccggagtccgttatcaatcaatgactctttcttaccaagacgacaacatacgtaaacatcatacacccggattacttcttacagagaaatgcttctttccttcgttaacctgcaactcatggtgcgatccagcgcaccacacagtcattcatggccttaaaaactgagttggaaccctgcccccctagtacattt

SEQ ID NO: 8179 - DNA, 272 bp, Glycine max
gatccttatagtcacctgctgctgcagtttttttttttaagagagttgggggtcatcctcatatgaagctggtggcgcaacatattactttggcataataagaactccaatattatttacagcttctgatgtcatgaatcgataggccccaccttccacatgtatagagagccaatttcctatttatcctatgcactgtgacatactcctcatctacaaatctacttatatttttcttaggacttcctttttggaccctttaatgtggtggg

SEQ ID NO: 8180 - DNA, 437 bp, Glycine max
acaaaaactaagcttgggagacactaattaattatgcagattttctgtctttcttaagagcaaagaacacccatcaagaacctagagatacaaatgggacaattagcctaacaagtggcttaaagacccactatcatctttggagccaacacaaagaagatcccgaacgaagaatgcatgacagtgttaactataagccagaggagagcattagaagaagaagattaagctgaaggagacctatctgaggaaggaatggcagatcaagaacaatagatggaagatgacgagacgataaagtaaagaataatgtcttatccactaagaccaaaactcaactagctcaatatgcttggaaagaagagccaccagcctttctaaagagccctcatacccttagcgttgcaaagagaataatgacgctactcaagcgttct

SEQ ID NO: 8181 - DNA, 238 bp, Glycine max
atttttttgtaaaaagcgctggattttaggccttagattcttatctgtggtgggagttcgtttccaagggaatgggactatgctaggttcagacagggtgctgataagtgtggggcagtgttgatgtgtgatttggctcatatcagtggtcttgtagcggctaaggtgatttgattttactgtcttttctcttgtttctgtttgaattatgttatcgattttatggttgtttatgcat

SEQ ID NO: 8182 - DNA, 246 bp, Glycine max
attctttttatgatgaatcaagattgattcaaggagttttgatgataacaaaggtgatgacaaaaagcccaagagaatgagttcaagattgagtcaagaataattcaagaatcaagagaaagattcaagaatcaagtttcaagtcaagaatcaagaataatcaagatcaagattcaagactcaagattcaagaatcaagaaaagactcattaaagataagtactaaaaagtttttcaaaaacattg

SEQ ID NO: 8183 - DNA, 344 bp, Glycine max
aaatactaactaactacaaacagttgcctttccattattttttagcccactgaactcactacaaagaatctgggcttaccagagacccttacaaatttataattttacgaaggaaggggctatgatcatcacctagccactgctaagtgcactaccagaaatgtgggcttaccacttgtgcctactaaccatcaccataatcggggtcttgcctacacatacctcggtactcggaaagatgcctatccaagttgccttactataaaactaaatttctaaaattttacttattctacaatattaaaaccctttgtcatctcacagctgaataaaccatccaaaaa

SEQ ID NO: 8184 - DNA, 77 bp, Glycine max
  unsure (1)..(77): unsure at all n locations
cgcccgccagaccacatgatctgaagctgcaccgnaaggaaggcgagcgaaggaagcagcagccaagtttgccatac

SEQ ID NO: 8185 - DNA, 413 bp, Glycine max
  unsure (1)..(413): unsure at all n locations
agctctaaagagatcactggatgtctatgcttcctgaatttgcagtcttgaagaanctcttggaaagacattcttaaattcctgcataaaggttgaacactaggagaaacataaatagttaactgattagaattatcactctctctcttttgtgatcactctcttcctcgggtgtatcactcttctctatcatattcctttgtggagcctcactattttctttctcttgttctctcttttctctcattctgatttggtcatcacacacttctctatgtgatagagggttaagagtaaacaacgaagaattgatcaacaaacgttgcatttgtgtagtccacgcgtccagaaataagcgttgagattcattcacgtgatgatatacaccaccattgtcaccagctcttgccatg

SEQ ID NO: 8186 - DNA, 253 bp, Glycine max
agcttttatttattcaattcaaaagccttttgtgcttgttcattccacccaaacgcacccttcttcaaacattcggtcataggacttgctatagtgctaaaattctggataaagcgtcgataaaatgatgcaagaccaaggaaagatctcacctccgaaactgttgtagggctcggccaagtcttgatagcatccacttttgtttgatcaacggatactccatctttagacaccacatatccaagaaacacca

SEQ ID NO: 8187 - DNA, 443 bp, Glycine max
  unsure (1)..(443): unsure at all n locations
ttcatgcgtctcgatatattatgcgcttttatcggttcttcctgngaaacgntacgaccatttgaatttctcgagagctttcgttgttcaaattatgagcgtcctcgatatattatgcgcctgaatcggacctccgagttaaaagttatgaccatttgaaatccccgagagcttccgttgtcaatctcgagagtctcgatatattatgcgccagaatcagacctccgtgtgaaaagttatgaccatttgaatttctcgagagcttcacttgttcaatttcgagcgtctcgatatattatgcgcctgaatcggaccttcgagtgaaaagtttgaccatttgaatttctcgagagctttcattattcaatttctagcgtctcgatatattatgcgcctatatctgacctcgtgtgaaaagtatgaccatttgatccttccgagag

SEQ ID NO: 8188 - DNA, 277 bp, Glycine max
cccgggatccttaagtcaccgcggcatgcaagctttttactttggtggctaacattccaagaagacaacccatatgtaaagacaaatccgctttctaatcatggaggattggtagtaaacacaatagaggagtgcatacagtagaggccgaagcaaatgaaggacgtggtaacctctaagagatttatatttgaggtgctgcaagaggcgggcatggtttcctttgatgggcacaaggaggattcatgtttgatgcatccgggtgcatcacatgaca

SEQ ID NO: 8189 - DNA, 457 bp, Glycine max
  unsure (1)..(457): unsure at all n locations
gctcgcataactcttaaagaataagagtccaagttatgcctcgttattgatacttatgctagcgaattagctacccttctgtagaactttcaggagttggaaaacaagatgaaagatcttcaaaaagagcttaatgaacttcataatcacccaatagaagacagatatggtctttggagagaatgtgcccaagtgcacaaagtatatgaagacttcacaatgagtaaacataatatttgggtggaatgtgaagaacacaagaaatctgtgagtttcttgaataatgagcttctaaagaatcaagaatttaagggtcaacctcaagatgttgtcaaacttcatgaggaaataagaaccttaaagattacattatccaatattttcaatgaaacaaatactctnaacaaactattatgatactatagaagttcttatgcaatctggaaatagctatgat

SEQ ID NO: 8190 - DNA, 248 bp, Glycine max
agctttttttgtgtaaccaaccattttctcattgtagaacaccggtaacgtgtatactatcattgggatcatctttttctctgtcattgaaggtgccacttgagctgtcaagtccctccacctctgggcgtattccttgaatgactcatgctcttttttacacatgttttgtagttgcgttctatccggagccgtatcataattgtactgatattgcctaacgaaggcaaccattaggtccttccaaa

SEQ ID NO: 8191 - DNA, 435 bp, Glycine max
  unsure (1)..(435): unsure at all n locations
actcagctaaagtatgcccgagtcattcatccctatgagatgttgtttatttattgtttatcagaattgccattccttggattatagggttgaaccaagctcatgcttttacaaaaaggttcatcaagtcaagttgaaatatggaagtaaccgtcttgcaaaattggggcaaaagatgaattgagtcacatcactgcttcgtctactgccaaacatatttaggattattgatgtccttgttacttccagtttcaccttgacaaagatgtcatggaccatgttgaaaatctaaattgattcaaccccatatcttgcgtaaaaattcgcaatacttcaactgtgcatcattcgcatgcattcatgcttttcattggttgcattgctcgttgcattctctccttgaagaataanataaaatgaacttaatcattgtta

SEQ ID NO: 8192 - DNA, 244 bp, Glycine max
  unsure (1)..(244): unsure at all n locations
ttttttttttttaanccaaggaaggagggatgatataagaacctacccatcaaggggtggcctactcctcatatatctaaactgttaataaggggtggggtccttaactttttttcccacctaggactaaaaataaggaatgaaaaaaaaatactgacttttttgcccgacaaaaaaaaaattgttggggggaaatttaaacttttcctactcctaaggggaataaatgtgcgaatcattttta

SEQ ID NO: 8193 - DNA, 248 bp, Glycine max
attttttttttatggcttgcctccggactttaccccccgtgccaccccggaagatttaagccaagcccctactttcgaggggcaactcccaccttatgacgactatcccgggcaagacgatgaggaaggagatacccatcttggccccctgctccacctcaaagatccgtccccccatgaactaccccaactgaacataatccgccatatcccggcctcacccacacccgtaaaagaatctgttccct

SEQ ID NO: 8194 - DNA, 481 bp, Glycine max
  unsure (1)..(481): unsure at all n locations
acttagatctagctatgctgcaacttatataacctcttatcgcaattctcaacaacagaataattatgatctttcaagaaacaaatataatccgggttggaagaatcatccaaatctgagatgggcaagtccaccacaacaacaacaacctgtccctcctttctagaatgttgttggtccaagcaagccatatgttcctnctccaatgcagcagcaacaacaacaacaacaagaacaaagacaacaagcaactggggctccttcttaaccttccttagaggagttagtgaggcaaatgaccatccagaatatgcaatttcagcangaaacaagagcctccattcagagtctgacaaatcagatggggcagatggctactcagttgaaccaagctcagtcccaaaattctgacatattgccttcacanactttgcagaatccanaaatgtgagtgccatcaccttgaggtcttgacaagaaa

SEQ ID NO: 8195 - DNA, 274 bp, Glycine max
agttttttcttagtcttaagagacacgagggtatttaaaatatctaaactagatgatcaataatcaaagagtatggatagaaaaaaacatgcctaacatcaggtggcaaagccctccacaaaccttaggcacgaaacataatgtacttgttaacatgaaatcgagatggatttaaccctaatttctacaaggatcgagcttcctaaggtgttgaccctacaatgttagaaccaataacccggccccgaggtgaaaaaacggggtgttaaaaaaa

SEQ ID NO: 8196 - DNA, 364 bp, Glycine max
  unsure (1)..(364): unsure at all n locations
ctatgaacactcaagcttgatggtgtcgagaagaaatcacangcatgttatctttttttatgtggagaatgtgaaggcccgcatacatgatttagatgatgtccaagaagaatctaacaatgctgctgtcaatgataagcatttgcttcaacaataattcaagattgctgtcacaaacaaagccttgtttcaagattcattaaagaccaagccttgccttaacacaaagtgctttcaagacatgcaacgctctggtaatcgattaccagcaagtgtattcgattaccacaagacagggctgagaaatatctgttgaaanatgttttgaaatttgaattttcaacatgtgatccattaccatatg

SEQ ID NO: 8197 - DNA, 249 bp, Glycine max
  unsure (1)..(249): unsure at all n locations
atctttanatattttgctgcaaacgatcacgacatctctgttatcaaccaaaaaaccagagtttacgctccggaaaaagctatttctaactgaaaaagtgaacatctaactaaccatgatgatgaataatactatgaggcaacacacaaaataacgacccatacaaatgccactcatgggagttaggcatgcacaacttaaaacaacggcaaaaacataatcaaactttccgtgagagattgttcacaa

SEQ ID NO: 8198 - DNA, 266 bp, Glycine max
ctttgaagtattcagagactggagactaatacttctaagagaaaaggattgtgcgagcaacacaatcacgagcgaccttggctgagaaattgaaacagcaggttcactgaatggtgcacatctgatggcatactcaagagcttatgcatccgttcaccgcaacggaggggctttattgaattgaaaaacaagagcgcgcaagaagctgctctggttatgcgtcatgccaaacacgtgccctataattctgtgctgaagcctgaaca

SEQ ID NO: 8199 - DNA, 247 bp, Glycine max
ttatctttttcccatatgctatacgcgtcatcttggttccaaagaaggacggaactcgaagaatgtagatagattgtagagccatcaacaacatcgctgtaaggtatagacatcttatccctagactttatgacttgttagatgagttgcatggttctagttatttctccaaaattgatttgaaaagtatttaccaacaaattagaatgagaaaaggtgatgagtggaaaaccgcttttaaaactaa

SEQ ID NO: 8200 - DNA, 373 bp, Glycine max
accttgaactcactgctctaatacattttttgttttgggagatttctccttttcttaaagtacgtcccttgtaaactacttccaatgttgcttctcagaattgccccaaggaatgctgccttaaatatgtccaagaaagacaatgctgtctaaagaactatttcctccccggagtacaacaatcaccgctttatgagcgttgtacaccagcagcgcttctaagccatcaaaggatggtctgttttccaggagcgacgcgtccagctcagggacgaccagtatacttgattttatgaggaaatatggcgcctgctgttggcaccacttgttactcctatggccaaatttgatccagaaaaagtacttgaatttt

SEQ ID NO: 8201 - DNA, 438 bp, Glycine max
  unsure (1)..(438): unsure at all n locations
agctattaagtacttctaaatctaatattnggcttaccttacattattagaattattcaaaatttcttacggacgcattgtgtttagattgaaagatatttctaaaaaacacaaaatattaaataatagtgaaattatatgtcataagaagaaaatataataagatcatatctttatcttaaagatggaatctgagagggtttttttttaacgaaattaaactcanatttataatataactattaatatacaaatagtgttaacaggagcaaccgaaattccaaaattagagtgaatacacacaaacacaagattaacgaggttgagcacagtatgttacacatccttgtgaggaagagtgatagttgcggttgtttctactatccgctttaacaaatatgggtacatcaataaaatacaataccaaattactatatc

SEQ ID NO: 8202 - DNA, 252 bp, Glycine max
agctttttttattatggggtacccatcacatgtggtactaggtggcggtcgagcgatggtgcacaacaagttttccacatccacaatgcgcgcataaacccaccatcccctgttgcccacctccatctgagctcacgtactcccacgtagcccatatcctcgtttctctcaacaccgggtccccatcaatcctcccaagcttccacaacatccaagcaaaacaacattcaaacagcacaagctatcacagcc

SEQ ID NO: 8203 - DNA, 486 bp, Glycine max
  unsure (1)..(486): unsure at all n locations
cttgctttatagactcttcatgtctggccaagaagaccatttataagatttatacttttagaaaacttanaccaattgaaaagtcaaaactttttgaagagttacatcttttgatttatcagaaatagtcactggtaatcgattaccanattagtgtaatcgattacacaaggcttttaagtgaaaggatgtgactcttcacanttgaatttgaatttcaacgttcaagggcactagtaatcgattaccaaaacattgtaatcaattatagctttttgaaaataattggaacgttgtaaattcagtttgaaaactttntcaaactcattntgctactggtaatcgattacaacaatatggtaatcgattaccagagagtaaaaactctttggaaaagggtttgtcaaaacttatgtgctattcanagtttngaaaaaactttaatacttatcttgatngagtcttctctttattcttgaatcttga

SEQ ID NO: 8204 - DNA, 247 bp, Glycine max
agcatgataatatttaacggtccacattttttaagaaaatatgtttgagtgtgttggttacaccactcaagccaaaagactttcaatatatatagaccaaagcaagaggtctgattacacagattgaaaaataatattgcatagggggaaaacttaaatctactatatcagagtagataaactaatttagctttattgctgtcactaatacatcataaaattgtagtataatctaacaagaaaatat

SEQ ID NO: 8205 - DNA, 391 bp, Glycine max
  unsure (1)..(391): unsure at all n locations
tgtggatgcctgtcggaccgtttttgccttcacacangntgnnannnaaaccatgcaagcacgtgtgtttgcgtgtttttttaagtcactacacaatcattatgaaacaggatctaactaactctgttgcggagatttatgagttacttgatcttactcttaattaatgcaaccgcttcttggcaagataacagctacaaatataaatatttaaagcttaggtcttcaaattttatacaatttaattttaatcttctattaattttaacagtatttttggtctcttacaatttattcattttaataactatgtcggcttattattcaaaatagttctatctttactatttatttaagataatttggtataaaatacaaaaatctttagaac

SEQ ID NO: 8206 - DNA, 250 bp, Glycine max
agctttttttaatttaaaattgtcataacttttcactcggatgtccgattcaagcacatcagatatctagacgctcgaaattgaacaatggaagctctcgagaatttaaaattgtcataacttttcactcggatgtccgattcaggaacatcatatatctagacgctcgaaattaaacaacggaacctctcgagaaattcaattggtcataacttttcactcggatgtccgattcaggcgcataatatat

SEQ ID NO: 8207 - DNA, 272 bp, Glycine max
  unsure (1)..(272): unsure at all n locations
aagcttcattgttcaattntgagtgtgtcacatatgatgcgcttaatcgtcttctacgaaagnangacctttcatttctcagaacatcggtgtcatttccacggctcgaatgtgaaggcctgaacggacctcctggataactatgaccattggattctcggagcttccgtgtcatttcaacatctcatttgagtgcccgatcgacatcgagtgaaagtatgacaattcattctaagagcttcgtgttaattcagcgctgattggggtcctga

SEQ ID NO: 8208 - DNA, 252 bp, Glycine max
agcttttatgttattttcacacacataatgtacatactaagatgttcctgagagagaatcttattcccccagctaacaggattaccaagaagaaagaagaaaccaaaaaagaagataaaaaacagtaacatcacaagaaattagtagtgcactgtatcatgtgcaaaagacagcatcctttttcactaaagagacagtaacatcaatttgtattattcagcaatatcacctgagctaaattttgtaaaagaa

SEQ ID NO: 8209 - DNA, 436 bp, Glycine max
  unsure (1)..(436): unsure at all n locations
taatttttttggtttattgtttgngtgttcctcatccttctctactttgtttcgcataanagcccggacaagactaaagctntgatntttatctcaagaaaagcaacgatttttatcataacaggtgtgttatctttgtagttcttacaaagcttatttttttggnttattcttttgtggtcctgatcattcttctactttgattcgcatagtagtccggacaacactaaagctntcatttttatctcaagaaaagcaacaattnttatcacaacaggtacgttttctttgtagttatttcaaagcttaattntttgggtaattgttgggggtccttatcgtcttctacatgagggcttttatattctttttttgctttacgtcctggtatatattggtggaccttggttcaatgtaatgccctttgatcatgtgt

SEQ ID NO: 8210 - DNA, 251 bp, Glycine max
atcttttctaataccaacactattactaatgaacaagttatactttcacaacattgacagataagattcacaatgttcaccaagcctctgaagtataaaaatattaccattggaagcagtgaaatttaaagtttaaaaaatgaaaaagttactttgtgtacctgtggacagtatttttagcatgtcaattttccaagtcctgacaaaatttgttgagtacctatggagccaccaacaactgataacaatag

SEQ ID NO: 8211 - DNA, 381 bp, Glycine max
  unsure (1)..(381): unsure at all n locations
ggacacttgaaactcagctgaataggaaggtaaagatgaaactttctgctntttcattgaccacagagggacctggagatatgtccggggtcaggagaccttgggacgtaggtgagtgctattgcccaaaccaagcttgaccatcccgaccaacccgacatagtcagtcagtgagaacctgtgatgtacctaagcaggcgagctcatggcagtcaacagataaaagaaacaaaaccacaaagcaaggaggcttgtgtggtggctggccagctgtgaactttgtttgatatgtgggttatggcctctggtaatcgattaccaagagtgggtaatcgatacaaggcttaaaaatgaagacaggaggctaagatggtctctggt

SEQ ID NO: 8212 - DNA, 250 bp, Glycine max
tttttttttatcataatgagcctttaatcatggttgaacaagctaaacatgcattttatgttgaagatccttgtgatgaaagatggtcagtggttctaaaccaaaaaaaaaaaaacaattggtgttaatattgaagatgataattcaacctttgaaagttgtctcactccgttctccacacaaatgtcgagtaacatcaatggagaagaagaagttgatgacgtccttgaaaatcataatgatcatgatg

SEQ ID NO: 8213 - DNA, 479 bp, Glycine max
  unsure (1)..(479): unsure at all n locations
ttacatccgcangttgtatataatgctacctttctaatcatgtctattgagaaacatatacttaacaatntgatgtatgaaactatatgagaacattatttcaatattataaataactatcataaattaaaattaatttcaatttttttataattatttaggtattttacagtcaaaattcctgttaagttcagtatagctcaaaatattctcaacttttcatagaaattatatttttatgtattttattaactaatgaattgacattgtcaatcttattaagttttaaagttaacctattttcctgacttttcaatagataatctaagtttagataattatcatttaaaagttgtccttatgaattcacaattacaaacaatcttgtaagtaatcggtgttttaaccattatagggctctagcccanaataattattcaaaatcatgattaagtacttgcattttgatattccctcta

SEQ ID NO: 8214 - DNA, 248 bp, Glycine max
attttttttggaagctacctagtctataaatagaagcatgtgtaacacttgttgtaactttgatgaatgaaagtcttatgagatatacttcaaagttccacttctttccctcttttattccttcaatttcgtgctccccccttctctctttcttttcctccattaaagcatcctcttcaagcttcttatccaaggcaattcttggtggtgaagctccttcttccttggcttattccttagtggatggg

SEQ ID NO: 8215 - DNA, 431 bp, Glycine max
  unsure (1)..(431): unsure at all n locations
gacacttgaaactcagctggaatgcattgtgcacctatttgaatcttctatgttttcctacatataagaaacagncccactctcccaattntacaaaatcatattcatatatcattagggcatttcaccgagcacttggtgggcgcatgtttggacataaattgcaagaggatggggacaatgtggcatgccccattgcttcagaaaacaacacaggcctaaggccttctcacacaaatcctcaactcaacaaatcaagcatcaaagcaacccaaaactgccccacaaatataagcacgttctcacaatttagagtaccaaaagatgaagaaaacacaccaatgggaagctaaaaactcaaggattgaatacttacttgttggagtgagtaataacaccaaaaatgaaagcaaaatgcaaccaanagtgac

SEQ ID NO: 8216 - DNA, 249 bp, Glycine max
atttttttttccgaaaaataatcgtttattcttaaaaagatcgcttagggagttggcaaaggcaaatagtcatttctttaatataaaccttgaatcaaacatgtatatctaccatgggacaatgcatgcatatggcaaatgcttgccaaatatacatattcatgccatgagtagccagaaaaaaaaagtgcaaatacttcatcattcgtgttttttaccattctattctaagttttcatcatctaatat

SEQ ID NO: 8217 - DNA, 462 bp, Glycine max
  unsure (1)..(462): unsure at all n locations
ntagttntgttcaagaagctatatccaggacttttaagatttatatagaanatntcattaccaatgcagntcgattccttgaagatacacaaacagctgatggttcatggtatggaaaatggggaagttgcttcacttatggctcttggtttgcacttggaggtctagcagctgctggtaagacttacaccaattgtgctgccattcgcaaagcccgtaaatntctacttacaacacaaagagaggacggtggatggtgagagagttatctttcaagcccaaaaaaggtttgtagctgaatggttattactgaattaccattcttcaacttcattgggaattaatgataatagtaataatgtcttactaaatgaaaataatgcagatatatgtacctctagaaagaggccgatcaaatgttgacatacagcatgggctcttatgggacaattcatgcttgac

SEQ ID NO: 8218 - DNA, 250 bp, Glycine max
attttttaatactttcaataacactcgcagaaacgtgttctaaagaatatttttatccaaaactggtgtatcatacagtccacaaagcacaaaccattctaaatttgatgaaagaaaaggaaataagaaactgatttgtagagccttatggcattaaaatacctcataggacatgttatcaatattcaaccgcatgcctttggggtgatcataaaagtttaatccattgaggaataagttggtctccaac

SEQ ID NO: 8219 - DNA, 422 bp, Glycine max
  unsure (1)..(422): unsure at all n locations
ntanagccacacacccctctttaccccaaagttttgtgtttatatacgaaaactctcaaagacaataagggcataatctattaccgagtcttatttaacaaaatgtttggaatctgcccctgcaaaatattcgatatgtttttcgtctttgcaaaaccaaaatatgttattttctggcccaaaactaagttaggattaatctgaacctaagtgtctgatgtgtgtccactaaaaagtggacatgtggagctatgtttccattttatttttcccagattctctctcctttgtctgctccattctcaacccatctcaaatcccaatccttcatgtcctccattctcaacttgtgctgcgaccatgctacatacaccttccttggattatcaccctccccaataacatcttcacctcaagtcctt

SEQ ID NO: 8220 - DNA, 248 bp, Glycine max
agtcttttgcaaatcaaatcactcctacatttcatctctagcatgcattttctttctttaccccctcctcacatttggttttttagggaaaaacaccataactaaacgcgccgcaaggtatccctatcgcaccagatccaaatctagaacgatgggtgatcaagaggagacgcaggaacagaggaaagccgacatgtcggctctgaaagaacaaatggcctccatgatggaggccatgttaagtatga

SEQ ID NO: 8221 - DNA, 462 bp, Glycine max
  unsure (1)..(462): unsure at all n locations
ntntacggaataccttcttctgtnagaagcttattgaagattttcttcgatnagcttcttagtttcatttttttttagttttttttaaattcttttaaggtttggtttagatttgtgaaaaaattaatattgatgaatattatataattgaaggataataatctgtatttatggataattatggataattggtttaattaggtataatattaaataatttaggtataataattgtattttgttgtagtagtaaaatgtctaattagttgctagttatagctgtatatattttagttgctaattagggtgcaaaatttgtatttgtttgaagtattttttgtgaaattagatatttggccaaattattattattggtgtttttagtacgtatcgggtacttgctatagaaatcaacaatagtacgtattaagagttaatatatgataagtcaaaatcgaatta

SEQ ID NO: 8222 - DNA, 246 bp, Glycine max
agcttttgtgttaggataaataatacaaaaacataattttatataaaaaaataataaatcataattttttttaaaaaacatctttaaataatttttttgtttaaataatagtttattcttctcacttttatcgtaaaaaacatattaaatactaaatttataaaacataaaaaatactttgaaaatacttttttatgggtgaaaggaacataattaataagtaaactaaaaatggaaatttaaatt

SEQ ID NO: 8223 - DNA, 381 bp, Glycine max
  unsure (1)..(381): unsure at all n locations
tcttcaataccttgatgttctgtacctcttgcaactnctttgtttggtctacatacatttntatcaggcccttgtgnatccattcctgtaaggataaaaatcatttgcgtctcacttggacatagatagtggaaagcttaaaaccgatggtgaattcagcttcgatacagcagaagcctattactgcctttccaaatgattcatgcatcttcagctgtcaacttcctatgcctattgcttacataaattgcaaattgcaagatcaatgaatatcaagtgatgagtcaaattaatttaatttttctctatagataacaaccatcaaccatgctgcactagtctagagatcaaatattatgtaacatatgtgcagtagttttt

SEQ ID NO: 8224 - DNA, 237 bp, Glycine max
  unsure (1)..(237): unsure at all n locations
agganaggaagaaaaaaaagaaggaagaattatagagaaaaaaagggaggaaggaaaaaaaagaagaaagaaaaaggaaggggaaaggagaaaagaggagaaagaaaaggaaagaagaagaagaagaaaggaagaaaggaagagagaaagaagagaaaagagaggaaaagaagggaaaagaaggaaggaaaagaaaaaaagaggagaagagaaagaagagagggggagaaaagaaaa

SEQ ID NO: 8225 - DNA, 131 bp, Glycine max
gacgaccagcaagcaagcaaacatttaatcatggtccaccaaaggaggagaacaaaacacgaaacgcaccccacccaacagaagaacaggaccaccacaagcaaaaaaacaaacacacaaaaacgcaagcc

SEQ ID NO: 8226 - DNA, 253 bp, Glycine max
agctggttaacttatatatttagcttgagacccgctataagagattttgcggacatattagctagttgatcattggaaatgacaaaaccagttgtagtttctcctgcaagaacctttttctctaacaaagtgacaatcaatctgtgtttgattcttccatgaaaaactatgttggaagcaacgtgaaaagcatccatgtgctactctaatttcaactacatgtgttattttctaatattcttcctcaagtttg

SEQ ID NO: 8227 - DNA, 421 bp, Glycine max
  unsure (1)..(421): unsure at all n locations
acacttgaaactaagcttacctcctttcagaccatacttcttcgggcaactgatatattaaaggatctgatggtcctctattgatgagatatgctactgtgtttattgcttttgctcanaatgctttangcaagccaaattggatccgcatacaccttactctctcgttcaagggtctattcatcctttctgtaacacccgtttgctcaagtgttcctggtattgtcttgatcattctgatcccatgttctgaacagaagtctttaaactcctgactatcatactccccgccattgtcagaattcagactnnttaaccttagacctgtctgattttcaacttctggtttccacctttttaacacagaanacacatcanaattatttttaagaaaataacacatacctctctggtagagtca

SEQ ID NO: 8228 - DNA, 250 bp, Glycine max
  unsure (1)..(250): unsure at all n locations
agctngctcgttctaagcgcatagacccctgattggttggttgaatagtttagctaagcgcacaacactgtgctaagccccacatctttgcggtaattgaactttaaccagtggggttatcgtggatttattcttaatctcctcttttttttgggtaaaattttctttggttctctcgctctgccctgttttgttgtcctaattcctctgattcattttctattttattcttcagcttatttaagttttc

SEQ ID NO: 8229 - DNA, 159 bp, Glycine max
gcgtcaagaagccaatccaagattcacgattctcgagaagaaatcgagaagcaaccagccaagacttcatatatgataagtattaaaagatctctcttaaaaaccaaatgactcagttgtgttctacaaagaaattgtctaaatccgctaagttgccag

SEQ ID NO: 8230 - DNA, 244 bp, Glycine max
atcttttttatcaaacaaaaatgagacagggaaaaattaaagcacataaaagaatattttgcttcagggggaaaaagaaatatacgaacaagaaaaagagaaatagaagaatagggatgtagaatggagagacaagggaaaattcattggccttttaacagcacctggaatagaggaattacaggtgcaacctatgcaaatgtagaaagggtttgacaaaatgaagttaaccatataaatggag

SEQ ID NO: 8231 - DNA, 363 bp, Glycine max
  unsure (1)..(363): unsure at all n locations
ccttgaatctcacttttatcagcacattctgggngaatctttctttctggcanagccctagggatggtgcctcccttctctcttgttctatgcctttcgctgcatctacatggcgaagaatcactatagaaggacctcattgaatctcacagatccagcctccatagaagcttcacatgcaagcttccatcactggcgctcanaaggatttgacctgtgaggatattcacgtatttcaactaaatttagaatgtcgctataatatgtcgtactaaacatcttaatgttgtaatagactagctacatactgtatctattatatcatacactaaatntgatattcctgaatcatctaatttgagt

SEQ ID NO: 8232 - DNA, 247 bp, Glycine max
  unsure (1)..(247): unsure at all n locations
agttttttttttcaaaanngcctcaatcatttccaaatatgcatgtgaattaggacgcatcaacaagaatcaagccaaggctattgtgcaagcaatcaatggggcaaaacacaccaaatgattatgatgatggatggctcatattctcacaaaggtaaactcatcactttcaaattgagctttcaaaactatcatgacatgtagaggagaatcaaggatttcaagtcacaaaatgtcaaacttttat

SEQ ID NO: 8233 - DNA, 459 bp, Glycine max
  unsure (1)..(459): unsure at all n locations
cttgatctagcttatggaagagaaacaagagaaaatgttttcacttcttagatggacagnataagncaaaggccttggataaattnttgaataatcactcaataaaaaaaatttaaagacaataagctttattgtaaattttaccaataaatatttattattttgtgaattttaccactcaagttttatttgtgtcaattgtatcattcaacttttataatattgcagatattattcctcaagttttttttttcacaaatattatcttccaacttttaacatttcgcgaattttaccatttaatttcttttagggattttatagtgatgggtataaaacgatataacaagtcaatcttctagatcgttgtacattcggtatagctataattgatgcaggaaagtaactctctatattggtggtggttataaccgatgtgcgaaagtatttttctacatt

SEQ ID NO: 8234 - DNA, 197 bp, Glycine max
aaagacaaacgacaagaactttttacatggacgacagaagcagacccgtaagagatggagacagctcgaaacggaattgccgaagcactgagcaaagtcaaacgacaagcgactgtgacccagagggctgatcgaaaaccgaaataaggcgagacgctcaaaagtgaaaacagaagctctgagcaaatgcaaacaac

SEQ ID NO: 8235 - DNA, 247 bp, Glycine max
  unsure (1)..(247): unsure at all n locations
ttttatanctcttcaccctattgtgcctttcaatgttccccatgtctctatcaaagacacaatagttggaaactacctaatcccaaagggtagtcacatattgttaagtagacaagaaattgggcgaaaccaaaaagtttggggttaacgaagctcacaagttcaagccagaacgtcacctgataatgaataagagtgaggttgttgttttgacggagccagatttgaagtttattttgttcagcac

SEQ ID NO: 8236 - DNA, 159 bp, Glycine max
gggggaaaaacgggaacgaacacagcttcttttggagagacaaagaagggggggagcgagagagagcgccccccaacacacgagcacgcagacgggaacaagaagacgcaagagccgcagggaagaaacgcgcacccagcgagacaagagacggaggcg

SEQ ID NO: 8237 - DNA, 66 bp, Glycine max
agacttttcttgatttttggggcacccccgcaacgttagagatctaaatttacatgctaatatgta

SEQ ID NO: 8238 - DNA, 353 bp, Glycine max
  unsure (1)..(353): unsure at all n locations
taccttgaagacaagttgtatggcacgacaactctgaaatgtaatcttcttggctagcgcagcggngagacaagatgagacgttggacgtgcgacaatgtactacgcccttctaccgatgtcacaggggtgcgactgaaatgcatgccaacgacagaggtcacanaagatccaaatttcaaagatacagggaagcgggagctctagcgcgagtgtttgccgcgcaaaacattataaacctcaatcttaacgactgtggatcaagaaaacgtcattgccctttcaaattcaacgacggcgtttaaaaaacaccttaacttacctgtcgcatacccacaaagacgtgctacccag

SEQ ID NO: 8239 - DNA, 253 bp, Glycine max
  unsure (1)..(253): unsure at all n locations
agctnnctcatttaaattgcccaaaaatttgaaaaagtagagctcggtcagttcgaaacatattactcccaagatattccaggaagaatgaaaggaaaatttaaataaaatttccatttaatttgctgctgggtcctgtacacagtgacagatccaaattttatttctaacggacaatttttttttataatatttccatagaaaaaaatattacaaatttttaaaaaatacacaatatgtaggaaataaatct

SEQ ID NO: 8240 - DNA, 115 bp, Glycine max
ggcaacagaggcgaaaacaatccattaaccaacaggggaaagaaagagcaaacgagccacggaaggaacacccaaagcgagaccacaccaagcagggggggggaggaccaaccaa

SEQ ID NO: 8241 - DNA, 249 bp, Glycine max
  unsure (1)..(249): unsure at all n locations
atttttttttttaacaaanggagaaaggggaaacttttacaaaacatacagggtcaacatcgttgtttatcttgaagcagtaattctttgcccttgtagcattggatcttgttatataagataggcttatcaacataaatttgaaggcgagtttcgggaatggccaggcaagagaattatgacctatcatgaaaggcatttgagtgttgaacttttggattcttcaaaaagaagcttgccttgatctaa

SEQ ID NO: 8242 - DNA, 261 bp, Glycine max
actggtaatcaaagcttaaaaaaaaaagtctgctacatcaaagcttccatgtggcacggagaggcggatagcttataacataatttcctaatcaaccaacactaatctcaatatctatcaactaactgatcgaatttcttcatcaaaaagctaacatttaacagaatgttacctaaatccaaagcattacaaatccgatcgaatataatactatctcaattcaagccaactggtcatagagtttaccaatctcgacgccaa

SEQ ID NO: 8243 - DNA, 247 bp, Glycine max
  unsure (1)..(247): unsure at all n locations
atttatttttttttgnacaagaatgaagctctgattccacgtgttacacaagtggcctcatatatcttaagaagggggggttgaattaagatattccaaactgtttcccctaattaaaaatctatttcactttttactcaagttatgaattcccttaatgacaatcttcttaaatattaattcaaatgaagcaacttgaatatgaatataaagcaataataactaaaggagattaagggaacagaaa

SEQ ID NO: 8244 - DNA, 267 bp, Glycine max
atctataatttcttcaacagcacaaggcgcggtaatgaaaagaagagcaccaccccggggaacctcccagcccgacgaaagacacgggacacaaaacgcgaacgttcaccacctatggacaaggtaagggcaaaggccaagggacaaggaaaaacatcacctgccattacgaccccaggaagccaacggccgagcgggacgccccgcaagcagcacagaagccacgacaggaaaaagaaggccataccctcatcaagcccccaggaa

SEQ ID NO: 8245 - DNA, 248 bp, Glycine max
agctttatctatctgaagacctcctagtacatttggttttgatctctcttcccgtgcaatacattcaattcaaggtaacttataattgtcataaggaaaaatgaactcttaatgagtttatttcttatcttgtggaagaggaagaaagactgaagcatgatatcactaaaagtgttaatttgggaagcacctctatgagaaagggcaaaaagagaaagagatttgaggttgtaagtgattcagattaa

SEQ ID NO: 8246 - DNA, 255 bp, Glycine max
aataccacacctagatctactttgcataacatgagtgtttggaggtccttgaggagatgtgggattaataatagaagagggggcttctgaactgattgtcggaacacaaagtacagtaactagaagagattgattgtgggttcactacttaatgaccgaactaaactatacgtggactatacgcctaatatctgtcagtgttcaaatgagcagaaatagatttatactcgtcaacattctgaggattctaatgat

SEQ ID NO: 8247 - DNA, 245 bp, Glycine max
atctttatgtggggaagaaggaggtgaaaataaatctattgcaatatgtcgatgataccattttcatatgtgatgtttccttgaggaatgtgatcactatgaaaatcatcatgagaagctttgaattggcatcaagacttaagtcaatttcaataaaagttgctttggaggtataaggatggagagaagggacatagaaaaagtttgtggatttgttgaattgcaaggatatggattttccattt

SEQ ID NO: 8248 - DNA, 250 bp, Glycine max
agccttaattcatattttaccaccctaacatcccttccgaggaccactccctaactctaaaccccatgtgtctctcttgacctttttaaacaccccattttttttcttaaaagaaattaaaaaggattatatttaaaaataaatagatttttataaaaataatgaatattttggaattaaataaataaataggcaaataaaataaatatatgtgcttaaaaaatgatttatttattcatttgataggtat

SEQ ID NO: 8249 - DNA, 430 bp, Glycine max
  unsure (1)..(430): unsure at all n locations
gctccttagtttcagatgatgcagatgagtttgtagctaccttatgcactcctctaatgactatggcatcatntttggcactaaactgctgggagttggaagccatcttctcaatcaagtttctggcttcagcaggagtcatgtctccaagggctccaccactagcagcatctatcatacttctctccatattactgagtccttcataaaaatattggagaagaagctgctccgaaatctgatggtgagggcaactggcacatagttttttaaatctctcccagtattcatataggctctctccactgagttgtctaatacctgagatatccttcctgatggccgtggtcctggaagcanggaaaagttntctaagaatactctcttaaggtcatcccagctcatgatggaccttggagcaaagtaatac

SEQ ID NO: 8250 - DNA, 250 bp, Glycine max
agcttttattatctcattatggtctcaagcaggcccccaggcaatggtttgaaaggcttcagactaccttacttcagtttgggtttgtggcaagtaaatgtgatctctctctgttcatttacaagaccaagtctcacactgtatatctccttgtgtatgttgatgatattataattactggaagttctattcctttaattcaacatcttacctctcagttgaactcaaaattctctctcaaacagcttgg

SEQ ID NO: 8251 - DNA, 352 bp, Glycine max
  unsure (1)..(352): unsure at all n locations
actcaagcctgctttatctgggtntatggattccacctgacgnncncaatatgaaatgttatgtataatgggatggactgactgagtcatgatggagggattagctcacgctcatatgctgattaacattatccatgtgagcaatttctctttctccgtgtttgtcactgaatgctgattgtcttgtgaacacttgctttaatttgtttgttctaacacaataacactggatatgcagaagcatgctactggttggttcaacttcacacatgaatgtaaagttcaaggcattcgacctcgtgctctcgagacaaagtgtggccatttaacatttcaaacgattggcctttat

SEQ ID NO: 8252 - DNA, 168 bp, Glycine max
cgagcagtttttttttttgccatgataattaatttatctactttttaaaaggtttatactcgtcctaaattcttaggttaatctcttacttttttcccccaggactcggggcgatgagaaaatctaactttggccataaaatattaggagaaaataatttcaaattag

SEQ ID NO: 8253 - DNA, 86 bp, Glycine max
  unsure (1)..(86): unsure at all n locations
gacctgcaggcaagcaagttttttttttgccctcccccctggggagggtatttctccttcgncctaaggcaagataacttgtcgag

SEQ ID NO: 8254 - DNA, 240 bp, Glycine max
attttttcttttctttgtatggcttgctagcaagcaagtatgcagtggagtgcaaaattaactgaattcctcatgcaggggggttatactctgtaaaatgtacattattcattaatcaaaaaatctgttcctgcaggattcactgtagttctgatatattttgatgacttcgttctagctggaaatgatcttactgagattgagtccatcaaacacaaactttacaggctatttatcata

SEQ ID NO: 8255 - DNA, 441 bp, Glycine max
  unsure (1)..(441): unsure at all n locations
accttaaatctcagcttgaaatgttgaggctctcggcggaatgataaattatatattannatactacaatacgctgacaataatgtgtgtgttggtgaggccacgatgactaatgttgctgccatcaaaaccatgctttggagtnttgagatggtgtcacgacagaaaattaattttgcacagagctgctttggtgcttttgggatgtcagatgagtgggtaaataacgccgctcgatttctaagctgtcgcttgctatctgngccatttacctacttggggatccccattggggctaacccatggcgaagcgagacatgggaaaccatcattgcgaagtgtgagaaaagactatcaatttggagactaagacacctatctcttggatggaagtgactctatanaagtgcttacatctattctatcttcatttccttttat

SEQ ID NO: 8256 - DNA, 305 bp, Glycine max
cacccttctaggaactaagctcaccttcttgagaagcttccttgagaagcttgagctttgcttcacacacccatctataaactaagctcacctccttgagaagctatcttgagaagctagagcttagcttcacacccctattatagctaagctcacccccatgacagaaagacatgataatacaaaagaaatcctactacaaggactactcaaaatgccctgaaatacaatgcttagaccctatactactagaatggccaaaatacaatgccgcaaataagataacaacctattctactttttac

SEQ ID NO: 8257 - DNA, 141 bp, Glycine max
taatctatattacctttgatggtgttttttttcttttatcatgggcactgtctattttataaaaacataatattttttgtcaatgaaaatattgcggactatttctttgctcccatcaaagaaaatttcatgagacttcat

SEQ ID NO: 8258 - DNA, 390 bp, Glycine max
  unsure (1)..(390): unsure at all n locations
tccttaagaagattcctatataagctatatgctanctactcttacctctctaatagcggagctcacctccttgagatgagaagctaagacttagctacacaccccctataatagctaagctcacccgcatgacaaaaaacatgaaaatacaaaaagaaaagttcttactacaaagactactcaaaatgccctgaaatacaaggctaaaaccctatactactagatggccaaaatacaaagcccaaacgaaggagaaacctattctaatatctacaaagataagtgggcttatacttggcccatgggctcgaaatataccctaaggctcatgagaacactatggccttcccttggatctctagcccaatctacttggagtcttctcccaat

SEQ ID NO: 8259 - DNA, 208 bp, Glycine max
cggaccggatcttaagcactgcagcactttttttggctggtgaagatatttatccaaacatcgttttgaatctactcaactttggttacctctatagtttactcatgggggcaaatttaaccctcattagatatttatgacaacatgcctggtgtaaaagacaatagattacgtgcaaacatggttgattgattcagtaatttgcaaa

SEQ ID NO: 8260 - DNA, 398 bp, Glycine max
  unsure (1)..(398): unsure at all n locations
gaccttagaaactcaactgaggctttgcgcattttgctttttcttaanatgtttgaacaacnaacaggaagccagagattgatgcctatgacactactggtcggaagcttgaagacattcgtggtgatatagagcttccggagggttgctttanttatcctacaagacctgatgaactgatattcaatggattttctttttcaataccaagtggcactaccgcagcttttgtaggacaaagagggagtgggaaatccacggttgttagtttgatagagagattatatgatccacagtctggtgcagtgcttattgatggtatcaacctcacagaatttcaactgaaatggatcagacagaaaattggtctattcagccaggaaccaattctctttact

SEQ ID NO: 8261 - DNA, 251 bp, Glycine max
tttttcttttatgatatggccttcatcgacgaaaggatcaaagtgggtctaaaaagaggcaaatctgatcatcatactttgataaatgccaaaaaaaaaactagggcaaatggagagggtgagaatgagggagaagcccatgctgtgactgccattcctatacaaccaagtttcccaccaacccaaaaatgtcattacttacccaataacaaaccttttccttacccaccgcccagttatccacaaaggca

SEQ ID NO: 8262 - DNA, 354 bp, Glycine max
gccatgaaactaacgctccagagaccttttaagttttttgagctttttcccataacagagctgtgtgcactgttgcacttgagaatgagagctgtgagacaactcaagtcccctctctctcttttttgccttcatttgggctgcccctctcttcttccctcttctttcctccattgagcatgcttcagcttctatgcaaggctatctggggggaagctcttcttcatggcgatacctagggaggcgcctcttcactctctcttgtcttcctgctctcgggtgaaaccccttaaggcctattgactcaagatcacttctaaagctccagcagctcatatactctctttttagatt

SEQ ID NO: 8263 - DNA, 453 bp, Glycine max
agcttgtgcaaatcaaatcactcctacatttcatctctagcatgcattttctttctttaccccctcatcacgtttggttttttagggaaaaacaccataactaaacgcgccgcaaggtatccctatcgcaccagatccaaatctagaacgatgggtgatcaagaggagacgcaggaacagatgaaagctgacatgtcggctctgaaagaacaaatagcctccatgatggaggccatgttaagtatgaagcagctcatagagaagaacgcgaccaccgtcgccgctgtcagttcggctgccaaagcagacccgactctcttggcaactgcgcaccatcctccctcaaacatagtaggacggggaagggacacactggggcacgatggcagccctcacctgggatacaaccgagcggcttacccttatggatggccgcccaactattcaccaccc

SEQ ID NO: 8264 - DNA, 462 bp, Glycine max
  unsure (1)..(462): unsure at all n locations
attcatctctntggtggttcatgtctntgtcaaattggctttaaatggagaatttccagtaacaaaaaagcatcattccagtacaaataggcttttagcttataggctaaaataaattaatgtccccttttcattcaccctgcaatgcatatttgtagtatgacgagattggccaagttttctaagcaggcagaagaaatggagctaagaagatcgaggcacatntaaattttaagttaaatcagtataaattttctattctttccatgcactcagcggaaagtgcggtaatattcctttttcattggtctttcgtgttaattactatcggttgtatttttaagtaaaacttttgatataattggtataaaatacctaatttattataattctctcatacacgcgagtcattaattgcataatagcatataaaagttntatataatcaatatatatacttaa

SEQ ID NO: 8265 - DNA, 191 bp, Glycine max
ggccgcagagctcgcgagataatatatggatcgaattgatagtgtatagattacaatcgtgcataaatcatgaattgatatttgtggagtgagttctaaacacaactaagtcaattgtgagaggtttatgtagggtttcaaccttcagcaaaatcaaataattgtgagagactgaagaaagaatatatgga

SEQ ID NO: 8266 - DNA, 383 bp, Glycine max
  unsure (1)..(383): unsure at all n locations
gctttgcttgaagctccaatggagaatgaagaacattatagctacgtgagagagggagagattaggcttctgaatttctgctttggctgagtgttgagagagaaaagctttttggttttaaaataaaaagggttttcccttttttttccattattttattcaagctctgccacatgtccctattcgattggagcaaaagggcacactttctctttntgactgtgacccatactcagtcacaaaagtgagagaaatctgacctttgaaacgctaaaatcctgcctcggtttgcgtgtcgtttctctgattccagtttctcgcgtttctctgcgtccgccggggccagttttcgaaagcaagcaatatatatatcaaaacgctca

SEQ ID NO: 8267 - DNA, 360 bp, Glycine max
caatattcttgtcctgcatgaattgcttttttcttgtcaaccacgatcaatatatgtctttctacacctactatatgtcgatttcaccaaggctgttatcggtgtgttgcgacaatccttcaataccttatttacacattcggacaggctggttgtcatgtgaccatatctaacatctacttcatcattaagcatattccatttttccttagaaatgccatcaatccatgttgctatggctatgactcaattgacgaaattcttctagatgttgatcaaatatatgcttgcaaggagtgtagcctgcatgaaaatagttgtgcataacatatctgaagtatatatgaaacttaaattact

SEQ ID NO: 8268 - DNA, 226 bp, Glycine max
  unsure (1)..(226): unsure at all n locations
ggagattntgggcgcgtataggatctaattgttataaaatacattagaagagttaatatgaatagggcatgtcccatgtttatataccgaagaagaaactctgctaagaaacactttcataacaaggaccagantttgtattaccatgaaaatgagcttctattgccataagaaatttcgaaaaaacaaatttagaagtcattaacagctgtgtgagcatgtgatg

SEQ ID NO: 8269 - DNA, 115 bp, Glycine max
gcactagtaacgattattaatacattgtaatcgattactgcgttttgaaaataattggaacgttgttaattcagttagaaaactttatgaaactcattttgctactggtaatttt

SEQ ID NO: 8270 - DNA, 323 bp, Glycine max
  unsure (1)..(323): unsure at all n locations
gtgttgaagggtgaaacttcctgctnttattgttgaccacagagtggtacctggaatatgtcgcgggggtcaggagaccttgtggacgtcaggtggggtgctattgcccaaaaccaagcttgaccaatcccgacccaacccgggcatagtcggtcagtgagaacctgtgatgtacctaagcaggcgagctcctggcagtcaacagataataggaacaaagaccacaaagcaaggaggcttgtggtggctggccagctgtgaaacttgattgatatgtgagatatggtctctggtaatcgattaccaagggtgggtaatcgatc

SEQ ID NO: 8271 - DNA, 360 bp, Glycine max
  unsure (1)..(360): unsure at all n locations
agctagagcttatctacacatacctctctaatagctaagctcacctccttgagatgagaagctagagcttaagtacacacccnctataatagctaagctcacccccatgacaaaaaaacatganaatactaaaaaattctttactacaaagactactcaaaatgccccgaaatacaaggctaaaaccctatactactagaatggccaaaatacaaggtccagacgaaggaaatacctattctaatatttacaaagataagcgggctcatacttagcccatggactcgaaatctaccctaaggctcatgagaaccctagggccttcccttggatctctagccaatctacttggagtcttct

SEQ ID NO: 8272 - DNA, 203 bp, Glycine max
atctctataaatactatgctagaggccaccatgaacctgacacctcacttattacaagtggtcaacttttaaggaaaatctgatattaataggaatgaagtgagcagacttagtcaatctatcaacaattacccaaatagaatctaaacctctatgggttctaggtagtcctaccacaaaatccatggaaatactgtcccact

SEQ ID NO: 8273 - DNA, 272 bp, Glycine max
  unsure (1)..(272): unsure at all n locations
agcttctttatcctttgatcgtccatcgttgacctattgggagacaactgggagaaaaagaaacaagagaatctaatcctaattgattatttgttttcaaaatgtggagaggcaatgagaacccttttggccaaactataagaaggggacaattatttttgtaatttaccatatgaagataaattacaaattaatactcacaaagggttgtagggtgtcatgccacttctgaagacanagttgtaaantaattcatgactactttttgtttg

SEQ ID NO: 8274 - DNA, 299 bp, Glycine max
  unsure (1)..(299): unsure at all n locations
gttcatngaagttactcgaacactttcttgcatctgtctaatgctctattcctggattactttgatatctctcaagcattccaagcacataagcaatgttagatcttgtacacacctatgcatacataaggctttctacaatggaagtatatggaatgtatctcatatgttcctcttcaagctcattttatgacattgattcaattgaatctatcacctctcacaatacgtgccatgttgggtgaacaatatttcattcgtaatcattctagaacttattaacataggccttttgagac

SEQ ID NO: 8275 - DNA, 432 bp, Glycine max
  unsure (1)..(432): unsure at all n locations
agctttcataagtgaaatcaggtgcagccatctccttaagagtcctctcacgaggtggaggttgagccatgttctcagtatgaaaattagtagttgaatgctcaaaatctgaatattcagaatcaccagcaacagaatgctcanaatgattaggatgctcaaaatgcacaaaatgaccaggatgcacactatgcctaactaatctatgaaaggttctgtctatttcaggatcaaatgggagggttaaaactacaacaatagtcaaataatatccaaatgagctgaaattttgtgagcaacaccctanaatcatgaaaagatagcacanaaaatttcaaacaaaaattcaaagtctaactatgaataactacttaagcatagttataaaaataggacaataatgcttgataaaaaaaacttagtanacaactg

SEQ ID NO: 8276 - DNA, 442 bp, Glycine max
  unsure (1)..(442): unsure at all n locations
ngagcagcagttccagactntgaatngngattgatccaatgttttatgttctgacagatccagaggtgtagggaatagattgaagtgtagttggatcaaagaagatgaaggattcgtgaggttgataactcatgtcagaacagaaatggcaaacattcagtgtgaccatacttaagacaatctggcactgaaagttggcaaatcagccaccaccatgaccttttctggaactaccaccactgcgaccaaagccaccactaatgccacagtagtcactaaaaccaccatggttaccaccgctgcaaccatacgaactacaaaaaccaccggaatcagcagatttgtatgaattagggttcgaatatccctgagtatagttcagtgaaggagaactaagacattgagtttccttgttgatacgaacaatgcgagtctcatgact

SEQ ID NO: 8277 - DNA, 461 bp, Glycine max
  unsure (1)..(461): unsure at all n locations
cgctagctngacggggatgctntaatggaggaaaagaaatagagaagggggaagcacgaaattgaaggaataatagtaggagagaagtggaactttgaagtgtatctcataagactttcattcatcaaagttacaacaagtgttacacatgcttctatttatagtctaggtagcttccttgagaagctttcttgagaaaacttccttgagaagtttctttgagaaaacttccttgagaagctagagtttagctacacacacctctctaatagctaagctcacctccttgagatgagaagctagagcttagctacacaccccctataatagctaagctcacccccatgacanaatacatgaaaatacaaaanaaattcctactacaaagactactcanaatgcctcgaaatacaaggctaanaccctatactactagaattgccaaaatacaacgcccaaac

SEQ ID NO: 8278 - DNA, 344 bp, Glycine max
attcctaatatctctacaattgcctacctctcaatgagctggtaaagaagcatgtggcatttacctgtggtgaataacaagagcaagcctttgctttgctcaaagaatagcttactaatgcacctgttctagctcttcctgactattctaaaacttttgagctagaatgtgatgcctccggagtgggagttggagctgtcttgttactagggtgatgcctcatgggctatacacatccctacccattccatctgcaccgtgggtagacattagtatggactttgttgtggcatccctaaattaatgactagtttaaatgtataaattaaatagcataaccatgg

SEQ ID NO: 8279 - DNA, 157 bp, Glycine max
  unsure (1)..(157): unsure at all n locations
agctctctctactcgtaataaanaacattatcggccatctgtttgtaaaagaaaatgcgcaatgtcggctgaaagatatcagtcggngccatataaggaccgacaccggccattggttattctattcaatccctgaataacaattggatgatgtcga

SEQ ID NO: 8280 - DNA, 174 bp, Glycine max
  unsure (1)..(174): unsure at all n locations
caacatcagaccacttnatggtgctggaactacttcacatgtacttgatggggcctatgcaagttgaaagccttggatgaaagaggtatgcctatgtagttgtggatgatatctccaaatttacctgngtcaactttatcagagagatatcagacacctctgaagtattctaag

SEQ ID NO: 8281 - DNA, 313 bp, Glycine max
  unsure (1)..(313): unsure at all n locations
ctccaatcatcatgatacttatttcaaccaaatttcggctatttttgtaagtttatattgtagccaacattaattatcagttaatatataatttgaccagctactaaaccaaattaacttacatcgtccacaactgtagtatggatatgttcaaacatatgtcacctaaaattatctccgttacatatgtgtgtgtgatgaanaaaccccatttgacattaggtatcccaaatattgccccatcccatggcaactcatatggctattggtaaacatcataaagggtcttaaccaataatcccaatggatcaat

SEQ ID NO: 8282 - DNA, 182 bp, Glycine max
gtcaacctcttaactcagcttgccatgaaccagaaatctgcatctgcacctggtgcaagagtctgtggtctatgttcttctgcagatcaccatacagatctatgtacttcttttgcagcaatctggagtcaatgagcaacctgaatcttatgctacaaatatttataatggaccctctcagc

SEQ ID NO: 8283 - DNA, 197 bp, Glycine max
tagtatgacaccagtgattccatatcttggacgcttggaacatatacactgataacattcttggccgaaatatcattccggagagaaatgtgcagatttatcatactgagtttgatgagtttaaagtggagttagagaggtgttatctactcaaatgccttaccaaccttcaagaggaagcattgatgtggcgatcg

SEQ ID NO: 8284 - DNA, 288 bp, Glycine max
  unsure (1)..(288): unsure at all n locations
ttgacagcaagatgcctatgcattatatttcgtgtataatatagtggaaaaattatttctctgtcgtgctttgttacaacttcanttgccaatatatctgtttacatgttttatcacttgctttgaactggtttctcttaaatgatctggcatttttaataaatctataggttntaatgtaagatttgactttntcttgaacttcattcaagactttngagttaagctgtatgctttgtttgaaatatttaactacttgtatacttaatttggtgtanatgcacttga

SEQ ID NO: 8285 - DNA, 144 bp, Glycine max
aatctcttatgctgtctttacatacataaatcatgtctcaccatcccaattgtgcaaaaccatattcatagatcattggggcatttcaccgagcacttggtgggcgcacgtttggacataaattgcaagaaaatgggggcaatg

SEQ ID NO: 8286 - DNA, 379 bp, Glycine max
aaaaaatatgttgtattaggttgtgaaagggcaatatatgtataaacaatacaaagattagtgagcgcaaaactaactattggaaccagaaatgtgggcatccttttaaattaaaagggagatttatgagaaccataagatggaaacttattgtagaatgtgattttcataaccataaagtgatggcaacatatcctggtcattcatatggtagtcgatttagcagcgaagaaaaaataatggttgaccaattgaccaataacatggtgaaacctggtcaagttttgtataccatcaaacaaatgtaagcaccatctatatcatatacaatgaatgttaaaatattatttcaaccaaaagggtctaaggatggaaatag

SEQ ID NO: 8287 - DNA, 454 bp, Glycine max
agcttggttatctccttctttatccctgagaaccaccgggttgagtcttctctgtggctgtcttactggtttagctccatcctctaaatttattcgatgcatacatgtggatgggctaataccaggaatgtccgccagggtccatcctatagccttcttatgcttcttgagaactgacaacaacttctcctcttgctcatcagcaagggaggcagatataatcactggaaaactcttgctatcatccaagtaagcgtaatttaaatttgatggcagaggcttcaattctggcgtggtcggctggacagtggtagaatgagatggtttctcagccttgacctcataaagaaagtcagaggtatgtgccatctcttgaacatggttagtcctatctgactctataaaatcatctcatgaggtaaacaccaccatcagcatgcaatcaatatcactc

SEQ ID NO: 8288 - DNA, 382 bp, Glycine max
  unsure (1)..(382): unsure at all n locations
tatgcgaccatggcatgaatntcactatcatcttttaacatctctgtcaacagataagaaatctatctttcaatcttctctctcaacattattcaactctttcaacaaatatttcctgaatcgtcttctcttcatctttctaaacttttttgttcaaaactttttctttcaaaaaaaatcttggatcaaaaacttgtgttattcatctatttcattctcttctctctatgccaaaagaccgaaggactaaccgcctaaattctttagtgtctctcttctccctttcgaagagaattcaaaggacctcgactgagaattcttttgatattacctcttcccttaagcaaaatatttcagaggactaatcaccctgtgatatctt

SEQ ID NO: 8289 - DNA, 461 bp, Glycine max
  unsure (1)..(461): unsure at all n locations
gatcctctgtatgccctgaggcacgcnagcttagctagatacttaatgttaattagaggaatctcttatgcctccatcacgacatncttttccaaccttaagtccaaacttccctctactaccttggccatccaaactagccctaccctagtttccaccataattgttacagatgcttcgacttcccttccctcatccactgccccgatttatacttccctcaccctacccttattgatccctattacaacccccatctttactatgacctcgtccacaacaatgtctaccatagcattttccaccacaaacatgactagtttttgcccaccaggctttattctcccatgtcatgttctgctaagtattatgccttaactaggtcattctcgttntacttttccaaatttcaagtttacccctcacttcagaacctgcactagccctaaccctaacccctt

SEQ ID NO: 8290 - DNA, 525 bp, Glycine max
  unsure (1)..(525): unsure at all n locations
agactatgtnaatgaaccactcgaanaggcgactcntatgagacacttgtaatgacgtacatattaactctaattgatgatgacaaacatntnatntcttcgtgacaccatcagagcttgcatgatttacattctattcctttattatgatgactaccacctgtttgttaggagcaacaacaacatgataatttcccttngagtatcgttaactccacctgtgatttgcaatgattgccatattgagagaattgaagatgtcatagaataaaaagctgtgacacggagatgtactctacatttgattccattttgccctacttcggtggggtctaaaacaactaataaatattggattagatggtgtgctacacatgtgtataaacgtatatcaacataatgacacattagcgtttttacttccgttgttcggtgggtatgctagacgacatctaatctatgttgatcgaatatttgttagggtaaatgtataaatatcttttacgtactgtacacaaatgggcg

SEQ ID NO: 8291 - DNA, 337 bp, Glycine max
  unsure (1)..(337): unsure at all n locations
ttaaatgttacgagattcatgtttctccaacttgctgggtcccacacagagcttcttcctctgtctatttccctcgcagatctcaaccaattcttataaaccctttggagatctgctcaagctctgtccccttcttcacatncacactcccctctaggcaagtttcacccttcaattcacttctgcatttgcatagntcaatacaaaatctacctttttcaattttattatttgtctgagaataacatgcaaacaactggatgggattgctgaaggtgtatcaatttggatatgttattgactctttaatttatttttttaataaatgggactgtct

SEQ ID NO: 8292 - DNA, 392 bp, Glycine max
  unsure (1)..(392): unsure at all n locations
ctgtccgtggcatatataatatatgatngcaagaatacacattatatcnngggttatatacatccgtattaatatcatggtggcaagctaggagaggagcgggttngatgaatgaaaaagggtggtcgggttctacccaaatcatacaaggcccaactcatatagaaacttcaacattgttggaccaagatccaaaacttgtattaattgaagacttaaatantttttagtncttataatattatacttcttttgttcttataaaatgtgttngtattgttattcatctttaatatatgcttgtcttgatgtgcctacacatgggtggtgaacattcctatgtgggatacactctattttcctggcacacacaagacaaatcaccctctata

SEQ ID NO: 8293 - DNA, 231 bp, Glycine max
  unsure (1)..(231): unsure at all n locations
agcttctanatacaataatatcataatgcaatacnatagataaaggtgaaacttttataagttcaactagatatgacatttaataagccttccaatcttctaatttcaccttctaatcatggacctcacccaaccaaaacccaccttggtggtaaaggcaccaaccatggaatgacggtgtaaaaaaccttatacccgccatggatatatataattattccctttttttta

SEQ ID NO: 8294 - DNA, 298 bp, Glycine max
gcctcctccatccaccaccactcatgaccaacactttctcttaacttatgtttgccaatgttagatataattcgtcacattgactttgtatcccactcaaacactttcctcctccattcaaactttcacacccatacccccttccctccaatgtcccacgttatttgtacactcatattggtgtttagacaaactatatagcctacgaaacattgacgctaaactttcttcccccacccaattattaagccaaaatttagctggatcaccttccccaattcttcacttcaatcttcta

SEQ ID NO: 8295 - DNA, 282 bp, Glycine max
  unsure (1)..(282): unsure at all n locations
agctntcaacatatgtcttcacaaataatcatcactcagcaganaactaacaaaactacccctcatatctcccaaaaccccatacccacgaaatttaagagagaaagaagtccacccaaacctggattntcgaagtcccactcgtagccacgcacttcacgaccccgaaaatgccctcctttcgcgaattggagcagaaatgagcaccanaggttggagcnnttgtggggtttcaatggagaatggaggagaaggaaaaagcaacgtgaggaagagggagag

SEQ ID NO: 8296 - DNA, 189 bp, Glycine max
  unsure (1)..(189): unsure at all n locations
cgagaatggagaatngcactaagcaatcactacgcatagtcctttctcgaaggtggaggacacatgaacgaaaacacaattcatggggctccgaataaggtgttgataatggagaatctcactaagcaatcacttctgcattgctacaaactcggaggtggaggacacatgaacgatcacacaattcat

SEQ ID NO: 8297 - DNA, 294 bp, Glycine max
gtgcaagctttaatttatacttgagaagtattgagtgatatttatagctaactaaccattaattaattccttttatcttttcttgtttatattttatttaattggttgtcatataaatattatgtcaatagtttatatgattatcacgtcaatactaatatgtcatgttaactagcgagcaatcttgactttggacggtgaaccaatgaaaagattaaaattatttattttacaacataaaagaattaacatcacatatttaatatataaagaatcaagattgaatttaacaaa

SEQ ID NO: 8298 - DNA, 535 bp, Glycine max
  unsure (1)..(535): unsure at all n locations
tgggcgatgacaaccattggaatnantcgtgnnnaaatgataccacttgtagttgcggacactnatgantacctatgcttgaacatgattcatgtgtggtcacttatgatgttcatgtattatatattatacgatttttntccacattcagaaatagaatgttgctctcttgctcatggctttgtattcttaaattggatcctgcatgatggctgcccaatcgctctgtcattccatttaacaccaaaactggttttgatcattgaacaacctataaaatatccccaaacctgtcctattgaatgtaaaatctgattactttgtcaccacagtttattattaatgcccatctatgaaatgtactaccacagtaatttaaatcgaactaattacatccgcataaacattggagattaagtttgttctacctattacgactaatcatgtagtaaactattggatcttatatacaatttattggtacattatataattaccttgaaatgtcttttcaacttcttacataagtctaacg

SEQ ID NO: 8299 - DNA, 164 bp, Glycine max
  unsure (1)..(164): unsure at all n locations
atgcacgcaagcttaagctataacctgcctctnaggattgtgtgataacacaaganatacgctgctcttaccaccacgatgatttgagtgatgtcacnaaataaatcagtaagtgatagttatgctaaatatatangcagcaaaactgcaagaagctcaagaat

SEQ ID NO: 8300 - DNA, 292 bp, Glycine max
  unsure (1)..(292): unsure at all n locations
tcctgctcatgcanatggaatgttctgaacttggaagttctntcctgatagaatgctaaatactcatgatttgggacaaaaattgcagcagaatttctaaaattctcaatctatgatccatgagaatacttcactagacattttatgatccatgagaatactttacttgacattttaaaggcattccaacctcttgagccaatgtttagaagatgaaattaaacgtgtattatgccctattccatatattgttatcactttcatcgtagttgtcttcattaccgtttaatca

SEQ ID NO: 8301 - DNA, 54 bp, Glycine max
agcttgcgactcttgccaatttctttaaaactagttactgaaaaagaggtgact

SEQ ID NO: 8302 - DNA, 255 bp, Glycine max
  unsure (1)..(255): unsure at all n locations
agctnttcanatggataaaaggctcacattcacttttttctacatcatattcaaacttgtccaaataaataataaagtcatctcgactaaaagaaaatcatataagtctcatacaattaatataaaacctatatcctaatgtcacatcctatcagagcgtggtgttcccgtgtcctctagcatgaggtttttcatagtcatccacctattcatctgctcccccgaacacaagttcaagatcatcacaggatccaa

SEQ ID NO: 8303 - DNA, 139 bp, Glycine max
  unsure (1)..(139): unsure at all n locations
agaagagaaaaatgaaggatngaagaaattcatagtagtggggatgtctnctccacctctagaacctcacaatcactcacaaactcatctcatgttctcaggaatggcttcctcttcatccttagtctctatcagtctt

SEQ ID NO: 8304 - DNA, 329 bp, Glycine max
  unsure (1)..(329): unsure at all n locations
gatccttattccctgcagccgcaagctgtaactctnggcactgactctatgacaagcacttaaaaagnnatgactctngaaagtaatcttcagaaacaagtcacttgaagaattgttacttttggaaatgtatntttcaaaatcagtcactggtaatcgattaccattaaggtgtaatcgattacacatcaacagatgtgacnttcatttgaattttgaaaatcttaacattntaaaacactggtaatcgattacatgattatggtaactgattacagctttgtaaatcagtttgaataaaatgctggctactggtaattccatactac

SEQ ID NO: 8305 - DNA, 162 bp, Glycine max
aaggcacaaatggcctatatatatgtgtctacttctaaaagtatgagatagatattttaagagaacttcattgtcaaatgctctctcaataactcttaggcaaacactcgaaaatctattgatggttcatctaagaacatcaaaatggattatccacactaa

SEQ ID NO: 8306 - DNA, 297 bp, Glycine max
  unsure (1)..(297): unsure at all n locations
gcttcaatacctctcacagaggagaagacaaagtaaataaggtgtgtctccaaactctaatatgtgagtttgaatccttacatatgaaagagtcagagtccatttctgattatttntcaagaattctcactatttcaaatcaactaaaaagaaatggtgagaaagtagatgatgtaaaattatggagaagatactatgcttactagattccaaattgagcacattgtgtgacaatcgagggaaccaagatttagaaccatgatgatagaacaacttcaggatcactacagtttatga

SEQ ID NO: 8307 - DNA, 379 bp, Glycine max
  unsure (1)..(379): unsure at all n locations
ctaactgggaggtgggagaatataaccaccgctatcttttcaaatccaatccatcttatttgttgttttgtctatataagagaaatagcaatcatgagtgtttccagtagatagaaaaactactatgtcgaagacagttaaatttatggctcattttctatatatggcccagctatacatgaagaatcagcagaaacatgatgacaagtctaagtcatgacttgtgttgggtgaagccatctactcaagtgttactattccctcaatattacctcaacatgctcggacttcctttgtcatttatatgatagcaaaatataatattgatagacatgtatgctntacatatttcatgtctaacccaaactgatatggaaga

SEQ ID NO: 8308 - DNA, 315 bp, Glycine max
agacacttctatgagacgataaatagcattgaacttcttcataaactaaaatatattacccattaactaatttacagaagctcccttatacaccttctctaaaagatgagagaatatcactaaatttgctaatggtcaagtaattgagagctaattttagtttatgtagaagcttattttaatttttcttcttatttcattctctaagtgtttttagagaaacttatccaacaggtttatattgttatctcatcacaagttatggtgtgtattctaagtttgctaactcttacataattattttacaagtcatat

SEQ ID NO: 8309 - DNA, 471 bp, Glycine max
  unsure (1)..(471): unsure at all n locations
ttttttatgcatcgcttgattctctgttntaatgtttgtgcctagtccaattttttttattattgtcttttattaaactcatttcatgatatnttgnnaagtgatgcatatcaagctattggctactaaaattttcttacctcatgatttattcaagtcaatagtgaaatagcaatgggtgcaaccatttccccaatttctgcataccgaaactcccagttcaatattagtgtacttatctggaaggtataatcccaagaatcttcctagtgattaatctgcaaatggaaaccagcctttaagcatcttgggtctcatctcattattcttccgactaggtgtatggcatgcggaccactataatgtctcaagtgtttggattcttcaaaacccctatcatctaacaagcatntgtatgaaacaagacatgtggagatccaagcctatgtatgctaattcatagctaatatg

SEQ ID NO: 8310 - DNA, 145 bp, Glycine max
caaacaattacccattcttgacatatctatattcaaagaaaacatgcaagtcgacttgccacatattgcccaaatataactaacatcgcgaactacacataccatacaaacctgaactccaaccagacttcccctctaacacctg

SEQ ID NO: 8311 - DNA, 298 bp, Glycine max
  unsure (1)..(298): unsure at all n locations
gctaggaatcttgaagaaggatagcaaataaatgggtaaggctgttaagactgaattaatgatggttattctaccccccattgatagatttcttttgtttncattttgtaagtttagcctcgcatttggtaataatgggctgccacacagnacctattttagagctgacccctacaggaattccaaaggtaagacaatggaatatcccattgactacaatngagagaagatgcttgcctcctacaccagtcctcggatntgccaaacacccaaattntctcttattgaagttatctta

SEQ ID NO: 8312 - DNA, 365 bp, Glycine max
  unsure (1)..(365): unsure at all n locations
gagaggttactagcatgattagtcttctacccttacaaagataggatttgaggtcgattctacaaatcctcgctgagatttggttggtgtagttttgtatgcctggaagcaacccttctctntatcaattatcgttttcataaataaaatatgaaaaaaaacaaatagactaaatactttattgatttccaatgtaaagccataataaacaaagtgcaaaataagagaaatatgaattatacagaaaaacaagcttaggacgattgtgaaattataacacacccttatatgtgtcctgtccgttgtttctttgctttaattttatgaaaatcaatacattcagatactagctatgacacatcacg

SEQ ID NO: 8313 - DNA, 338 bp, Glycine max
  unsure (1)..(338): unsure at all n locations
agcttctcctttcaatttctataaataggtggagaatgtgaagtgagaaaggttcagcctcttaggcactttctctctcttatcgaaatttgctgggaaaaatgtttccgtgaagaaaatccaagccgaggcgcttctgannacgttccgtaacgtttccgtgagggaattcgcgaaggtttcgaccggtcttcgacgttcttcattcgttcttcatcgttcttcgatcttcaacgggtaagtaccttgaaccaagctntttcgattcattctatgtacccatggtgatccacattgtgtttcgggtatttttattctcgtttcttttacattttata

SEQ ID NO: 8314 - DNA, 364 bp, Glycine max
  unsure (1)..(364): unsure at all n locations
tcagcttgacatgagtcatcaaagatataaatatgtgaccatgaatgaattntaagatgatatcaatcatctatctntcaatcttctctcaaacatcattcaatatctttcaactctttctacaaaattntctgattctttttctttccatctttctaaaaagttttgttcaaaactttctcttccaataaaatttgttcaaaaacttgtgctattcatncttttcattctcttctccctttgccanaagaacaaaggactaatcgcctgagaatttnttggttcttccctttcccttaagcaaaagatttcaaaggactagccatctgagatatctnttggttccccttacacagattcaaag

SEQ ID NO: 8315 - DNA, 69 bp, Glycine max
  unsure (1)..(69): unsure at all n locations
tagcacgcaagctnggagaggatgcttcaatggaggaaaagaaagtgagagagaaagagagaggggggg

SEQ ID NO: 8316 - DNA, 372 bp, Glycine max
  unsure (1)..(372): unsure at all n locations
agcttactctagagttataacagtaaatatcaggttattattgaggctatgcaggttggcatggttgtgctatcgtcctttctctcttttaatgatgtcagacagctttcaacgtccatttcctctatgtgagaaccttctgccagaaaaaaaattgcaacttatgttacattaggaaaaattaaatgcaaaaaaagaaaatatttttttttatccagatgctacaatttctgcctanttttgcatatgaattcaacttcacaaggcccaaccaagaggaaaaaaagtatttttaccatcatccacacatcactcaagcattatgcagccattttttccanatttacaatcgcaaattaagtctggcaatct

SEQ ID NO: 8317 - DNA, 384 bp, Glycine max
  unsure (1)..(384): unsure at all n locations
gaaccatgtacattgtggagattgtgtgactacatggctacctcttgagcatagtgccaaatagagacctttngtttacctctaggttntgggagagtttacaagaagccatatagactaaagtggaacttagttcatcctatcaccctcaaatagatagttaaaccgagagaactatctaatccttagaagaccttcttatagcttgtgcgattgaacaaaaaagtagttggaacgagtgttaacccttgtagagttacctataataataatatccatgccagtacanggatggcaccatntgaagccctgtttgggcagaagtgtaaaacacccttgtgtttgtatgagatagatgaacctctcttgtaggtctagcgtgtt

SEQ ID NO: 8318 - DNA, 468 bp, Glycine max
  unsure (1)..(468): unsure at all n locations
aatcttgaacagctagcatgcaagcttattatctatcatctcagaatctacgtatctttcatccctcaatttaggggattctcaaggctcgatatgtgaaactgagaatggcggtaatattggagcanactctcatctcaaacaagtctataacattaatctaaactcgctcaaactagttntatgacgaaaactctaccgaatcaaaatttgactcctcaacacccaatttaccctagaagagggctctcgccttcactttggacactcatcttcctgcttagcacagcccaagctttcccacagtcctaaatgacattgtagactaggatttactcactttaacctccaattaccactagatccagatttagctnttcagatcctcatagcatcacanctttccactcatatcactacattctcacctcttaacgctaggttaactctacccttcatctctatcag

SEQ ID NO: 8319 - DNA, 330 bp, Glycine max
  unsure (1)..(330): unsure at all n locations
caatcggttatattgatgtttcatttagagtcatgtacaatcagtatcctatgagtgtggatattacgccatgcattggatgtggtgcatagtcagcggcggtttgaagaatgaatggaacaagttattcttcctattagaataactaacgaatttcttggaagcaaatatcgtacctcaatggttgacgtacttaaccaatttctnttttatatacttgtagtggttctcagatggaacatcataataaaggacatcatgacgacactatacaagaaatgggcaaccatatttctagagattcaaaagatggatgtcactgaaatttat

SEQ ID NO: 8320 - DNA, 376 bp, Glycine max
  unsure (1)..(376): unsure at all n locations
gatcttaagtcacctgcggcattatgcttatgaggagcctgcagcagtacccaaggtatttgagatctgttttatacttttagtgcacatgccattntgttctttcatgcctaacatggtctctgtccccctaattccaagagacaaagcctgtatatttattaactttatgtgtatgcattatcactattaattttcttgaaaaacgctaatgctttcaggttttaataactggattaggctcacctatgctttctcttgtagcacctatccttctaacccttccaaaacatatttacatcagcacaagttggttgatagttagaactattctattgccttctattccatgccttttcattntatttcttctttg

SEQ ID NO: 8321 - DNA, 362 bp, Glycine max
  unsure (1)..(362): unsure at all n locations
tctcccacttaagtatctgtcngttggaacagcatcaactcctttctccaaatggtcatgatgtccttggccaaggaaccaaagctccatagagacagaccaagaatagataattttccagttcagttttgcagtcgtgattgatggggttccagaaaaggagaaaactggtccagaagaagccatttctgatcaacaacggaaacccaacagaacaaaggatagaagaaagcacgtgcaggcacaagagctngccaaaaccaaaaaccaacgcctgaaacaagcttagaagagaacgaagaagctgccgaaacaagttgggcgagcttccgacgaaaggatggcggcgcgtggactacacg

SEQ ID NO: 8322 - DNA, 341 bp, Glycine max
  unsure (1)..(341): unsure at all n locations
atccttaagcgacctgcaggctgcagctataacatactcttatttatttatatacataccttttttctaanaagaaaataaaccatattgtcagtcgtagctgttacatacagttatttttacaagtattctaataaggtaaaatatgaatgattttgtcatttttttataacatttagcacaacgtttcataacgaatattgagttctttcagaatcacatacaatttanagggtaaaaaaacttcattgtgttacacccacccctccccaaaagaaacaataaacttgctgccagcttagaatgctaataaaaatccagcgaaattaatcaaatgaact

SEQ ID NO: 8323 - DNA, 297 bp, Glycine max
  unsure (1)..(297): unsure at all n locations
acactatgaatctaagctgagtcttatagttagaattcggacattaaagtttaatttcatgacccaaagcctaattcaagattaaatatatttaaatnttgataaataccaaattttatttgagtctctattaaaaaaaacctttgcgttgagctttaataaaatagaataaaatattttatccttattattctatcttaattcttttaatatgtctattctgttggttttctccctaaaatacgtagaccatttgtctttagtttctatcaaatatttttatagagactattccaa

SEQ ID NO: 8324 - DNA, 261 bp, Glycine max
  unsure (1)..(261): unsure at all n locations
gcttcataagtgaaatcaggtaccactcatttcccttatagtcctctcacgaggtggaggtttgaccatattttcagaatgttcaaaatcagaatgntcaaaattataatgctcaaaatcaagatgttcaaaattaccaaccatagaatgctcagactcaccaataatagaatgctcaacatgctcacaaagtacagaatgttaagggtaatcaagatgcacactatgcctaactaatctatgaaatgtactatctatttt

SEQ ID NO: 8325 - DNA, 142 bp, Glycine max
  unsure (1)..(142): unsure at all n locations
ggagcgccagagaggttgtgttcattcagggcaacattttatatacctgngatgaggatgtttagaagcttctaaaagaatatctcctagaatctaaaactggagagggaaacagagtaatcacatcattccatcgataact

SEQ ID NO: 8326 - DNA, 358 bp, Glycine max
  unsure (1)..(358): unsure at all n locations
agctctgaccatttgaattgctcanaagattccgttgtttcaatttcgaacatctcgatatcttatgcgcctgaatcggacatcctagagaaaagttatgatcattcgaattgctcaagagcttccattgctccatttcgaacgtctcgatatattatgcgcctgaatcggacatccgagtgaaaagcttgaccattngaactgctcagacgatcccttgttcatntcgaacatttcatatcttatgcgctcgatcggacatctgatgaaaagcttgaccattgaattgctcaaagctcccttgtcaatttcagcatctcgatatttatcgcctgatcggactccagttaaagtttga

SEQ ID NO: 8327 - DNA, 200 bp, Glycine max
acggacataactcttcactcggaggtccgattcatgcgcataatatatcacacttctcgagctgataatcggaagctcttgagaaatacaaatgaatataacattatatactcgtaggtccacattaaggcgcatagaatatcgatacgctcgaaatggtacaactgaagctctatactaattcaaatggttataaccgt

SEQ ID NO: 8328 - DNA, 275 bp, Glycine max
  unsure (1)..(275): unsure at all n locations
agctttgctgtaaactcaggcttcattggttgngtagttgaggcaaactttgttacaggggtactcaagtatgggtgaggttgatcctcagtatcatcaaatgtttgtgagtctaacaaattggtggaaaattgtgtggaaagaggttgagtaaaagaaaatgtgtttggttcaaataaatttttttgtggttgggttaaatcaaaagtgtcttaagttgcatcggatgtatgtgaataatgggacttacaataatattgaggttcgtgagatac

SEQ ID NO: 8329 - DNA, 473 bp, Glycine max
  unsure (1)..(473): unsure at all n locations
ttgtgttggatggttagttaatatagtggttactgtgaagaagggttttatttgattcacaaaggtgggttagtgcctgattggttgaatcacacgatttgngctacagtttaatgcggattggttgagatttattggcctcttaattgctatgactatgtacgttgagattggccaagtaatcttagagtatctccaacccgagtggttcatgggttacttaaaattaagtaacgttgcttaacaagtagtatagcaaatgacttgctagtgcgttacttaagtgagttgcttatataagtaatctttgcttgattcatacttaccaaataaagaatcatttttcaattacaaaatntaatgtggctcaagttaagcactcactctagcaattatagcattggagtaagattttgtgtaaaggttttaaatcaatgtgatattgtagggctcactaatttaagataaacaac

SEQ ID NO: 8330 - DNA, 121 bp, Glycine max
  unsure (1)..(121): unsure at all n locations
gatcctctacaggacttgcagctcgaagctcgaagaaatctttagaggaagaacaagtcatcttgtgtatgaaaatccaattctcccctagaganagaagaacttagagaggaagggagat

SEQ ID NO: 8331 - DNA, 340 bp, Glycine max
  unsure (1)..(340): unsure at all n locations
ataggtcttcatcttcaagtgtntgttgcttcataatatatgaacttcttcacttagcattgtttgatgactttggtcattggagcatctaatgcttgcattaaaatgcacttcttttctcatgcagagaaaccattcttattggtttttgtgttaaacacataagcagaaaactacttctctttggtcagagcactctgcacaacaaagtgcatcttttgatggagcgtagtgactttcagattttgggcttcattaatatcttatggggtacatcaaatcctatgtgaatgtttttgtcaaacatatctcaaacatatgatttaatgaaatcttgata

SEQ ID NO: 8332 - DNA, 117 bp, Glycine max
  unsure (1)..(117): unsure at all n locations
acaattgaggaaacttcgccaagaatccccatggaanaacctttattcaaacctttcaaagntagtgagaaggcttaaagaaaaattagggaacttagaaaaactaaatccttaatt

SEQ ID NO: 8333 - DNA, 536 bp, Glycine max
  unsure (1)..(536): unsure at all n locations
atacctgtccctcgttagcgacacttgatactaagcctggacaactcgttacataatctgatatggcttgggcaacagatttcataagtatttcgttacccacctagaaagagattgctccatccacttngttcaattttattacacactcttctaaatgctagagaaaatcatcttaaactntcccaataaagtggtagcccaagatatttgtcatgaaaattgtaacgacctgtctggtcgttatgatatcaccactctaaagtacgtaaattttaatttttaaatgaaaatttcattaattggcttatgaaacatgagagtaaatttttcgcgatatagattcaccaaacaacgcacaattatttaaatgaaatatatatatatatatatatatatatatatatatatatatatatatatatatatatatatagtatataactcagcacacactcacactatagaaaagtaaattagctcatacatatgatataatctatgatatacaccctcaactcaataaaagaagtttt

SEQ ID NO: 8334 - DNA, 343 bp, Glycine max
  unsure (1)..(343): unsure at all n locations
agcttggttcttgtatatnaacttgaagatgtnttgtcttttacatgtccaacttccttgagtgacatttgtattggttgcatcttagtccatatcatnatctttgtgcatcatgcatcatcataagtaagtgagaagaanaatttccaagttagaaaagtttcttcagaagataanactctatgtnnttaatcgatacaaccttatcgtaatcgattacacaagttgtcttaatcttgtagagttatgtctcgcatcggtttaatcgattacaacnctatcataatcaattacacaattgttttcgtgacaatgactgtattattcaggagcccttgcttta

SEQ ID NO: 8335 - DNA, 381 bp, Glycine max
  unsure (1)..(381): unsure at all n locations
ctggttctgattnttccttagttctntaacaagctntgaaaatatacttggccttcatttaactgtctatgcgctnggcggccacgctcaacaaagtattttcgacacctactgtacgttgatttgaccaatgctgttatgggaatgtttcgacaatccttcaaaaccttattgatacattctgaaaggttggttgtcatgtggccatatcgacgtccttctctatcataagccatcgtccatttntcctttgaaattcgatcaacccatgtggctatggctggactcagttcacgaaaattttgtaattctgatcaaaaatgtgctatgcaggagtgtaggctgcataaaaatagttatgaataacaattntaagtatat

SEQ ID NO: 8336 - DNA, 398 bp, Glycine max
  unsure (1)..(398): unsure at all n locations
agcttctactataagtttgttcctaatttctctacaccgnctcacctctcaatgagctggtgaataagaatgtggcattcacttggggtgaaagataagagcaagcctttgctttgcttaaagaaatgttcacaaagacatttgttttagctcttcctgacttttctaaaacttttgagctcgaatgtgatgcctctagagtgggtgtgggagctgtatttgtgcaaggtgggcaccctatnttcttttttagtgaaaaaattcatggtgccaccctcaactaccgcacctatgataaagagctttataccttaataagagccctccaaactnangaacattaccttgtttccaanggaattgtcattcgtagtgatcatgatattcttatgtacatt

SEQ ID NO: 8337 - DNA, 536 bp, Glycine max
  unsure (1)..(536): unsure at all n locations
cgagaggatgtttatttganaacgattggaanangcctggnnnnactgataccatgncannatcntaganaactgataccctcgangngcatncaatatccngatgagggtgtnccatatgttccaagactggactaatacatttgctgcctaagtttcatggtcttgcaagtgaagaacctctatagcatcttaaggagttccatattgtgtgttccaccacgaagccccctgaggtcaaaacgatcatgtctggctaagagctttcttgattctctagagggagtggcaaaagattggccattctaccttgctccgatgtgcattattagctgggatgaccttaagaacgtgtgactggggacagtttactatttataaagtgcacctgcatcttaggaatatttcacgcttaatgtgatcaagtgtgaaagtgcatanttcaccgggtatgttcaagataatgaggtcatcatgtactcgaaatgcaactagatactgactctcgaacttcttctaaggggtaacgacattcg

SEQ ID NO: 8338 - DNA, 371 bp, Glycine max
  unsure (1)..(371): unsure at all n locations
agctagtcctatcgtttatgcgagatggagaccattatgctagctatcatcgccaagtaccaagaagagttaggtctagccacggctcacgagcataggatcgtggacgagtatgcccaagtatacgcggaaaaagaggctagaggaagggtgatcgactctntacaccaagaggcaaccatgtggatggatcggtttgctcttaccttgaacgggagtcatgaacttccccgattgttagccaaggccaaggcgatggcagacacctactccgcccccgaagaaattcatgggcttctccgctattgtcagcatatgatagacttaatggcccacatatatagaaatcgctagggaaactgtatggtctc

SEQ ID NO: 8339 - DNA, 433 bp, Glycine max
  unsure (1)..(433): unsure at all n locations
ntatctgaagaactcgccaagcgcacttactgcactaagcaagttcatcttttgaggatgaacactcatcctcttgctgaactacctgtggctaagcgaggctgaatcgctaagcccaggtaacttaaccatnnttttttgtgatagccacatgttagacaagtggcctcagatatcttaagaaggggggttgaattaagatatcccatactacttccccaattaaaaatctatntatctttttattcaaattataaattcccttaacaatgaacttcttaaatattgattcaaataaaacaagttgaatatgaatataaagcaataataaataaaggagtttaagggaagagatagtgcaaactcatatttatactggttctgccacacccttgagcctacgtacagtcctcaagcaacccgcttgagagtt

SEQ ID NO: 8340 - DNA, 437 bp, Glycine max
  unsure (1)..(437): unsure at all n locations
tgacatcctagactaactacatcgtgaacaaaaccctcgaatctttatataagggaatcagctaagcaagaatatatgtgaaatctggaagtaagaaatgtggaatggaatgctatggtaattgctacataccttcactgctgctgctaccaaccgagagcgggaactttctttctgacgcaacccgagtcctganttgttttgctttcctaaactccctatcacacgtcgtttcactaaaacaaatgctgacttaattggtaaatttatcacccaaaagttttattgttactgtgattcaactnttacaatttcacagattttatgtttttaagtttttcacanattntatcattntaattttaatattttataattntttaccgttcatttattttgtattttaccattggtagtgaaatgatatanaaatcact

SEQ ID NO: 8341 - DNA, 312 bp, Glycine max
  unsure (1)..(312): unsure at all n locations
tgatagganatnggaggagcgattgggtgagatatgatgatggtaaggatagggatgttttatggggaactgggttcttctactctntgtttatcccatcgctgcaataactctacactttcacatatacacaaacatccccctgctctaatatctccaaactatgctgctactcacactcacaacaaacgattagttgcttctgcttcttcaactccatcagttagcggttcatgtgctgaatattccggtctattatttcttttcaatacctaaccatgtcctaatttccgtntatctattatgcatatc

SEQ ID NO: 8342 - DNA, 267 bp, Glycine max
gaggtccaggaaggacaaggcagtagatagaactagttccgctccggagtatgatagtcaccgctttaggagcgcggtacaccagcagcgcttcgaagccatcaaggggtggtcgtttctccgggagcgacgcgtctagctcagggacgacgagtatactgatttccaggaggaaatagggcgccggcggtgggcaccacctggtactcccatggccaagtttgatccagatatagtccttgaagtttatgcctatgcctggccaac

SEQ ID NO: 8343 - DNA, 319 bp, Glycine max
  unsure (1)..(319): unsure at all n locations
tgactngagtcatcaagatattataaatatgtgaccatggctgtaatttaattaataatttatctttctatcttttttcatcatctctcaacatctttgaactctttctacagaattttctgattcatttctcttcatctttcttaaagnttttgttcaatactttttctttgaagaaaagttctttgatcaaaaacttgtgttattcatctttttcattctcttctccctttgcctaaagaacagaaggactaaccgcctaaattctattgtgtctctcttctcccttttccaaaagaatataaggactatccacctg

SEQ ID NO: 8344 - DNA, 127 bp, Glycine max
ggaatggagaaggaagagagagagaggagatgccacttcaaggagaagatgagtctagaaaaagctcaccaccataggaggccatggataaaagcttggaggaagaaggagatgaatgaagggagag

SEQ ID NO: 8345 - DNA, 435 bp, Glycine max
  unsure (1)..(435): unsure at all n locations
taccttaaattatattgtatcnattgcaccctttgtgagctgtatgatattgtcaataattgaaccctaaacataaatgattatctncagataccttgcttagattctagaagagcatatggttcaaggaaaatntaccccaaatttgggggagtggagttgattgngatgtaaagtaaaaggtaaagcatcagcacacacaacaattaagttgtacgttaaaaaaaaaaaaaagagaagagcaatcgaagaaaatgtgcatctgtttaataatgtcaataatgaaataaagtgaaaggctagtgactaagctaaatgtattgaaaagattacttggataagtctaggatttgtgctctcttagaatctaagcctttgaatcctagaaaaaccaatgatttttgtagccaatcctcactacaagcctgtgaaagt

SEQ ID NO: 8346 - DNA, 257 bp, Glycine max
  unsure (1)..(257): unsure at all n locations
tagcttgtattctgttntttctctcttctcttgttattatttttctacatggaataaagattcaattgagggtgagaaaatcagctagaataacttatacaacccagaaaaaaaaaaacacaaccagtatgacatgcagtagcaattccttgcttccgcctccattatttgtaagagaaaattatgatttgtgggctgcaaaaaatagaacttatatgagagctcaaagtctgaaacttggtggaaaattaaagcaa

SEQ ID NO: 8347 - DNA, 185 bp, Glycine max
tctaagctgactaacgagacgcatgtaacaacagtggtttgtgagctatgccacaggtatacataattacaaaatctcacccaataactcccaataataaaataaactttattaaacgttaaacaaacttcgtccaaattatcatgacttataaacatggcccaaatataaaagtataacaactt

SEQ ID NO: 8348 - DNA, 119 bp, Glycine max
  unsure (1)..(119): unsure at all n locations
agctngtcaatgaaccaactgaggcaatgcatgcatgctgacatattgttcagtatatgacggaggaggaagaaatcatttaaaggttttttctaactggcttttaagaaaaagatata

SEQ ID NO: 8349 - DNA, 431 bp, Glycine max
  unsure (1)..(431): unsure at all n locations
cgtcccgggatcctttgtcgcctgcggctgcagcttatgatgaatcaagaatgattcaaagagttntgatgataacaaagatgatgacaaatagctcanaagtcaataacacttcatgataacaaagatgatgatctcaagaatcaaagaatgagttcaagaattgaatcaagtacacttcaaggatcaagaggaaagttgaattcaagaatcaagaatcaagaatcaagtttcaagattcaagtttcaagaatcaagatcaagatcaagattcaagactcaagattcaagaatcaagataagactcaatcaagataagtattaaaaagtttttttcaaaaactgagtagcacatgaatttttcttataaccttttaccaaagagttcttattctctggtaattgattaccacgatatttgaatcgattac

SEQ ID NO: 8350 - DNA, 387 bp, Glycine max
atatctagtcattccaatccacttaaatcatataattgctcattcaaatcatctcaatcactcatttcattcaaaacaatccactgcatatcattttcaaccaattcaccattcaaacacgctttttgtacaagcaaacaactcaaagtactgaaatttaaagaactgaaacataaaaactgaaattaaaatgactgaacataaatcataaaataactaaaaataaactaaaatgttcaaaatgcacaaatttaaatgtcctgctcctgtggttgctcctgtgcatgctcattaagatccaacacttgagcaactggtgaatcctgagagataggctgctctaactcagatgctggtgcagatggtatggcatcattagttatgggt

SEQ ID NO: 8351 - DNA, 390 bp, Glycine max
  unsure (1)..(390): unsure at all n locations
cacctgcggctgcaagcttacaaatagaattcttaatagattacaatgtattcaactcacaaagtgatgatattataaatgtagctcgagtacaagtaactgtgcttataaaaatgtgaaatgtttaagtgattaagacttttgtccagagaatatctntagagcanaatattgtatntctgctcattccttcttcagtcttctcccttagtactatgtctcgatatttgttttgattttgattagaggttgtacttatacttataatttcccacttttcaaaaaatgttgaagttcataatattatagcacaattgaaaacaccaagaatttagtctaagcttatgcgatgaaaatgctaaagcatataacgagcacttatgttaacac

SEQ ID NO: 8352 - DNA, 367 bp, Glycine max
agttgtagttttaatctaaatattttggtactattttctcttatgagataatagtgatgcaatcctaccccccaagggtattggatagaagactccaagaggattgggctagagctgctaaagaaggccctgtggttctcatgaacctaatggtagattttatgagcccatgggccaaggttgggtccactattctctgtaaatattagaatagggttttccttcttttgggccttgtatattggtcattctagtagtatacggttttagccttgtatttcatggcatattgagtagtctttgtagtagggactctctctattgtatatacatgtatttatggaatgggggtgagcttatctattat

SEQ ID NO: 8353 - DNA, 428 bp, Glycine max
  unsure (1)..(428): unsure at all n locations
tatagtagaccacactcccttacaaaatctgatttcaggcttaaataggtggtcttgttcgtgctcgtgcccttagcgcacttatggactgcttagtgcacattagtgaattctggcttagcacgtgcctttctcgcttagtggatgaactgaagcggtgcgcttagtgagatgaagcggtgcgcttagcgaactgtacaactcatcttcttccagagtcttcctcatgcttagcccaggagtgttgcgcttagcagacactcactaagccagcagattggcttagcgagaaggtgaanaacaacactttccaaagcatgcctaattaacctgaaatngagagcaaatgattattaaacacacaaaatgaaaatactaagtatttattacctgtacttaatagaaaatacttataacactactaaata

SEQ ID NO: 8354 - DNA, 463 bp, Glycine max
  unsure (1)..(463): unsure at all n locations
atgcgagacagagaccaacatgttagctatcatcgccaagtacgaagaagagtaggtctagccacggcccacgagcatagaatcgcggatgagtatgctcaagtatatgcggaaaaagaggctagaggaagggtgatcgactctntacaccgagaggcaaccatgtgggtgggtcggtttgctcttaccttgaacgggagtcaagaacttccccgattgttagccaaggccaaggcgatggcagacacctactccgcccccgaagagatccatgggcttctcggctattgtcagcatatgatagacttaatggcccacataattagaaatcgttaggaaacttgtatggtctctcagaccttgactagatatgatttcttnttttgaaataaaatgagtgggtccatgttcttactccacaanatagacttgtgcaaatcaaatcactcctacatctcatctc

SEQ ID NO: 8355 - DNA, 368 bp, Glycine max
  unsure (1)..(368): unsure at all n locations
gcttgtcctttgggtggactactcactagattaattaactctcattctgaggtttaattatatcttaaagatcttcactcattctcaaaaatatattacaaactgagttacactcattactcattgagttgtattatatatgttntaaatggataaagatgcatganaatctcatgctatttgacaccttgagagagaaagaaaaaagtgagaaaaatatataaataattagtaatatgaattgataggatgagagagataaaaatagatgggtgtcaaatngataaattgatatttgtaatatatggatgttcatatattactactcttttaaatacaacactatatacatgtcaattattcttcac

SEQ ID NO: 8356 - DNA, 318 bp, Glycine max
  unsure (1)..(318): unsure at all n locations
gtttgtcataaaaaatgttaatgtagttaattataatgtngtctcttcttgaaggcaactatggaagactagcggttagtctttgatgctgtctataggctaagaagaaccagattgttgtaagaagcggatgctgcaggagcaataactgtgggtggggtagaaatgttcctaaggcangccattggtcagttcaatcttttcactagcctagaaggtataatcttcactttctgctttcacctttgtatcatcaaacttaagttaatagaataactttaaagtaggtttaaaactaataaagactatctaaatttg

SEQ ID NO: 8357 - DNA, 452 bp, Glycine max
  unsure (1)..(452): unsure at all n locations
agcttatcatatatatgctcgtgaatgttatgtaaagagttacaagattgaaccatacaatatggtgaaagagaagaanaacaaatacaaaaatctccaataacaacattattatcaccatattggaggatctttctccttgattagattctgaagatcaaagaccaacccccatagaagacatcaattgttttcagtttggaagggagtcacaccaatgcaccanaatcgacaatcaaatagaggatgtagtgcaaaaagaagtagaacaagtgatgctaagcaatgttgacctgtgttccttagagtgcattcgacatgccaggcatcgatcccagcttcatatgccacaagcttgcaattntctctaagggaaaatgcaaacttggaaaagaaaggagaaaatcagtagtggcagaaactaacaagttatngagganaactttattcgt

SEQ ID NO: 8358 - DNA, 360 bp, Glycine max
  unsure (1)..(360): unsure at all n locations
ntagatgcctntaangtttttatggctgaagttgagaaaaatgttgaaaacaaattaagatcgtgagataagatagaggtggtgagtactatggtagatacatagaggatggacaaacaccaggttcatttgcgaaatttcttcaagaacatgagattgttgcccaatacactatgcctggttctccggatctgaatggtgtgacagaacaaagaaatcgaaccttattagacatggtgagaagcatcaggagtaatgtaaagcttcctcaattcttatggattgatgctcttaagacggttatgtatatattaaaccgagttccaaccaagggtgtctcaaagacatcttttgatgtat

SEQ ID NO: 8359 - DNA, 457 bp, Glycine max
  unsure (1)..(457): unsure at all n locations
agcttagcatgatgaagtagctntntatcctcttctcttgtccacccaatctatacacaaaaagcatcatattgaanaatcactcattagaaaaatatcacaacaattaataacatagttggtacatactccttatcaataacatcttaaaaaaagagaggctcttaaacccaaagaaagacttgttaattcaacgattacttaactcacaggaatagacaggtttcttgggtttaggagcaacaacacttgaagactgagcattagatgacccttcactcttcttgctctntggtgtctctgcatcaccaccttgtatattgattctcatatctcatcattntgtaccatattttcaagattaaaatatgttacctttggtttcattttctatttaaatggnttcttatacaagcactgctacanaacatttatttaacatcgcaaggttaacatc

SEQ ID NO: 8360 - DNA, 321 bp, Glycine max
  unsure (1)..(321): unsure at all n locations
ttaattgactcactctnttataataaactaaagtttggtatttcttacataaaagttgaaacatcacaatcttaaaatgctcaaactttgaaatagtggtaaacaacaattattgatgtggatttatatgtatgtgatttcagggtcattggagctattctcatagtaatgggactttactcagttctgtggggcaagcacaaggagaacaaagagaaagaggcagagataactattgaggtattgtaagtgttgttagaaaatgggatgacgttggagactatggtaaaagatgtcgaaacatacaatgacattgacatg

SEQ ID NO: 8361 - DNA, 381 bp, Glycine max
  unsure (1)..(381): unsure at all n locations
agctagatatgatgaagtgtagaagggtgaaactttatgcntttattcgttgaccacagagtggtacctggagatatgtncgcggggtcaggagaaccttgggacgtcaggtggngtgctattgccccaaaccaagcttgaccaatcccgacccaaccccggcatagtcagtcagtgagaacctgcgatgtacctaagcaggcgagctcctggcagtcaacagataaaaggaacaaagaaccacaaagcaggaggcttgtgtggtggttggccagctgtgaaatttgatngatatatgggatatggcctctggtaatcgattaccaagggtgggtaatcgattacaagtcttaaaaatgaagacaggagactaagatggtc

SEQ ID NO: 8362 - DNA, 419 bp, Glycine max
acacttgaaactaagctgtggatatgggtacctatacatgtggtactaggtgcggtctggcgatggtgcacaacaagttttacacatccacaatgcgcgcataaacccaccatcccctgttgcccacctccaactgagctcacgtactcccacgtagcccatatcctcgtttctctcaacaccgggtccccatcaatcctctcaagcttccacaacatccaagcaaaacaacattcaagcagcacaagctatcacagccaagcaaaacagagcaaaggcagaaaactctgctcaaacaccaaccaaaatcacagcttttctcacttaaagaccccagtaacaattccttcgatccaattcgttaaccgttggatcaactccaaaattttactggaagtctatagtgcataagcctacat

SEQ ID NO: 8363 - DNA, 382 bp, Glycine max
  unsure (1)..(382): unsure at all n locations
tagcttattgtattgacaaatgtgaataaacaacttttaattcttaaatcgtctataacaaattaaattattatagagggaagactctantanattcttgtanattaatcacttgtcatctntanaatagtaatagtagattataaaagaaaatactattgaaggaaaatangtgatatctgaatatttataatgaaaaaataattggatgactacaaatgtgaaagacctaattcaatctaattagcatagaaattcnattttgactagtataatagctttacctatagagctaataccatatataactantatcataaatatgagccctaaaatagaatacattgtttttacaagaaccctaagacggtcttaataatta

SEQ ID NO: 8364 - DNA, 450 bp, Glycine max
  unsure (1)..(450): unsure at all n locations
ctaaacatcttcgcagcattgagtctattgtatagccagatggacggaacaacaaatgagcatcccagggccaaagtaaaaccaaatntaaactagatgttgacagaatatactagagtttgtgctattgctattgtgaataattggcatttgctctaactcttggcgtgttttgaattttcatgaatgcatgagtattaaccgagttatgttctccactttgcagtctgatggattccccactcttctcttcttcccagcaggaaacaagagttctgaccctgtacgttattattaaatgacactgcacaggttttctattcagctatcctggattagcatgcactgtatcactagatgatctaatatgtatctgtttcattgtatatgcagattcctgttgatgtggaccgtacagtgaaagacttttatagtcctcaggaacatgca

SEQ ID NO: 8365 - DNA, 414 bp, Glycine max
  unsure (1)..(414): unsure at all n locations
gggatgcccaagaaaggntttatcatttagatctctnaaaatcctcatccaaaagttttccaagactgaagcatggacaaggacaatacataggcccactttaccttaagctgacttttaatttggtaataaggaacaggctacatggctcaaaatcttgaccacttggttatagagattttgataccatgccaaaagatcaactcccttagaaagctaaagctataaggaggatgcccaaaaatggttntagatctctaacaaggtatacactgagtttttattgatggcaggaccatgcatgagcttaaaacatcattaactaaacctcaatatcaagccaataggttgattaacaaggcaggctatngctttgatgttttgaatntttttaanaatataaactaccatatg

SEQ ID NO: 8366 - DNA, 360 bp, Glycine max
  unsure (1)..(360): unsure at all n locations
aaaaaattcaaaggtccataaaaanaagaattgcctagtatcctaataaaaataacacttgaaatgaagttgaaactcatacaatttgtgtcaaataagggctaatattagcaatctttgatcacataatttaaaatgaattaaaaattgaagaaaagtttacaaaatattgaggcctcccagctgatgggacaagtttacacaagaattggaaacccatgaatcagtgtgacncacgatagcaaagtnaacttctagcaacaagtaaactattctcctatccagacataaaatacaaaattggcacaatgctcagttagatgtaattagatatgaaatttcctacttgtctttcttctt

SEQ ID NO: 8367 - DNA, 93 bp, Glycine max
  unsure (1)..(93): unsure at all n locations
agctngcatggctcactaagccttattctatgacttagagnctaatgtgcttagcgagactcactcgcttagcgcgacacactaaacaggctt

SEQ ID NO: 8368 - DNA, 420 bp, Glycine max
  unsure (1)..(420): unsure at all n locations
gacacttgatactaagctgtcaaaaatgtcgacactatttatcaaaaaggattgccactcaaacgctcccacagccttacatcnttatattttgcgtggtgtcaaagtgaacatctaattagtataatctatgttatttattggatcgctgctgagaacaatntgaattagaatagaataattctatttcctccacatatctattgtctctattctctactctgatgtttataatatcctcctcagaaccaacaattggtatcaagagctgtattcttacgggacctgtaccatggaaggtgatggagagaattatgatctttgggaagtgaaaatgcaatcctacatggattgcttggattaatgggatgactgagaagaggaatatgaaatatatccgatggctgaaaaatccaccat

SEQ ID NO: 8369 - DNA, 398 bp, Glycine max
  unsure (1)..(398): unsure at all n locations
catgatacatgtcggtgtttggttnggctcaaggataaaaggggtgccccacatttatntcatgacacaaatgcaaaaatgatgaattgggaaacttatgcaaaactggtcatgcatgcacctatgcngacactcaagtgtcaaatttttatggtcatgtgatgctagggctcaggattcatttcctctaatttaatcaacccaatgtttccaaaatatnngtctttatcaatttgngcattcatccgagtccatttcgggcgtgcggngaaattcacaacattcacccttcaggtgtaacacatttcccaaaattggtatgatcaatgaactttttaaagaaaagttgaaaatcgcctctttcaaaagcagctgtcttaaataaacacctatatttc

SEQ ID NO: 8370 - DNA, 410 bp, Glycine max
  unsure (1)..(410): unsure at all n locations
ngtgctgatccaatttctactatttcttcaaggcgttttcttcatgttttttcattcaattttcctcaaaagcacttatttcattcttttgtatccttgatgtgtcattattntctcctatntcttaaccctttttatcatcattttaattactgattaaccttaattgtcaaattaattatgcagttttatcatttgggcctacttgactaattttgtgtttttaatttgatttcatgagaattataagcaattgggcttgaatccaaaattgggcttgaactcgaaaagagcagacaattttattttatcaaaatttatcttatccagaatttatttcatctagattttatttcatctagaatttatttcgtccagaatttatttcatccaatcctatcttatcttgt

SEQ ID NO: 8371 - DNA, 367 bp, Glycine max
  unsure (1)..(367): unsure at all n locations
tgtacgttctggcctgtgttcactttctctcattatcagattaaaatcttntggcatttcgattcttttacaagataggtgcacatatatggtatttaactgcaaactctgcaattagtgaaatcattaaatttagttcctttttatatcctgaaaaccacttaacataaactttaaaaggaaagtggtttggttcatatgatttcagtaattatttcttttagcatttagaatttccgatggtcagtttataactgatatgtatggcaagaaatatttttatctactgaatttgtctttattttatccattagatattgattagcactcaagtacttgtggaaccctccttaaaagctagctggta

SEQ ID NO: 8372 - DNA, 380 bp, Glycine max
atgcactcctctaatgtttatggcatcatttctggcactaaactgctgggagttggaggccatcttctcaattaaatttctggcttcaacaggagtcatgtctccaagggctccaccactggcagcatctatcatacttctctccatattactgagtccttcataaaaatattggagaagaagctgttctgaaatctgatggtgggggcaactggcacatagtttcttaaatctctcccagtactcatacaggctctctccactgagttgtctaatacctgagatatccttcctgatggctgtggtcctggaagcagggaaaatattttctaagaatactctcttaaagtcatcccagctcgtgatggaccttggagcaa

SEQ ID NO: 8373 - DNA, 216 bp, Glycine max
  unsure (1)..(216): unsure at all n locations
gagaagaaatcacatgtgtgtcatcatcaaaaaggtggagaatgcgaatgtatgatactattatttngatgatgtcaaaagaagaatcaagcaaagttgcttcaatagataagcatggctgcaagattaatacaagatcgctacaacaaacaaggcccttcttcaagattgacgtacgatcaagccttgcattaaaacaaagtgtttgaagacatg

SEQ ID NO: 8374 - DNA, 452 bp, Glycine max
  unsure (1)..(452): unsure at all n locations
agcttcttatccaaggctcatcttggcggtgaagctccttcttccatggcttattccttaatggatggcgccttctctcacctcttttccttttcttccgctgcatctccatggtggaaaatcaccattaaaggaccccattgaagctcanagatccagcctccatagaagcccccacaagcaagtttccatcaatatggataacatatagatatgacaataatcactgaaataaacttcatgaaacaggacctcaacatcgggcaacatgtcgagcacaatgttgatgaaacttaagtcacttgagcatttcagaacaactgaatttttatacttttggtggaccttgattntaaaggcaagcacattacccaggaacttatcaagtgcttcagacgaatgcattaaattgagatcaccatccttgaacaaagataaatcaattctgcatc

SEQ ID NO: 8375 - DNA, 468 bp, Glycine max
  unsure (1)..(468): unsure at all n locations
cttgccctgttatcgatacaggaaactggttatcgattaccagagagtaaaactctggtaacttagaaaaatttgagataaactntttttgtaaaacaaaactgtgctatgtttggtttttgaaaaattattttcaatacttcccttgtgaaatcatcttctcttgaatcttgattcttcttgatgttattacttgaatcttgaaattaatcttgatttaatcttgatcttgaaccttgtgactcaatcttgaaatcattctcttgggctttttgtcatcatcaaaactacttgaatcaacttaattcatcatcatgaagcttgcttctatagtcgcatgttatgttcactcatgcatactcctgccatatagtttctcatgccttgcattctnttcttcatcatcaaagtcacaatgaagcgtgaaagtctacaccacattcttagtngcatgtgttgngtaccatg

SEQ ID NO: 8376 - DNA, 478 bp, Glycine max
  unsure (1)..(478): unsure at all n locations
gatcctctatattcctgcagcaccaagctcgtaatcgattaccgcgagctgtaattgttacattaagctccctgtctataaaagctgtatttctcttccttgcgcanaaccctttcttcctctttctccttgatgacgcccaaccctctccaaacttcaaatcttcataactttctcatttattatccaaatcacttcaaacaaagctcaaatttcttctttttcaattctctacaaagcccgccgatcaaaatttgctgaaacaagctacaatggcagaatcctcaaagaagagaaagggatcctcctccaccaccaccactgcaggccaacgccgccacggcacatccgatgacccaccaacatcaaatcctccttccttttcatctcccaagtcattaactntgtttcctttcaatgaccagcgctagaggtattattcccaattctccaatcgtgttattcttgaccctaagta

SEQ ID NO: 8377 - DNA, 476 bp, Glycine max
  unsure (1)..(476): unsure at all n locations
gctctggacagaaaccaaatagcaaagtgaaagcttcctcaataaaattacttgccccattatgcaattcctacaaaggttagtcagattctttgtgatatggaaatactatcataatttgcaattgtcattaacactggtttggaaagaataccgcgcttttcaatttgtcatttgattgtcttttctntggaattatgttacatacatagcagttttgcttctaatgtttgatctaacaacttagtcatgtcataactnttgttttgaaatattattcctcattgtgggtttgcatacactactaaatactggacattctatgtcggttatttaggacattctaaatcggttattaaccattgtcatagacaacgccgtataatattcgcatctacgatgatggggtaccatttagaatgtaaattttnttaataaaaaactgagaattctaaaacgggttttgaaagaaccgt

SEQ ID NO: 8378 - DNA, 515 bp, Glycine max
  unsure (1)..(515): unsure at all n locations
tatgnacantgnannnccccnnnnnnnnnttgtggacctttgcagaccgngatccttagagnncanagatgagccattgacaactctatgaagcactctactggcatggtccttgtctgagtttgtaaaaccctaggaaaaaaatagaacaccnacattatggctgatagaaaatttaatgaatctggcccaatttaagcctttaaaaagaaccaagaaacccaccatttttggaaccagccagctcaacaaaaattccctgagaacaggggcagggttcagcatattataatgggcatctccatgaataaatctgcttaaccacaaataagtttagattctcaatatatatcacatgatttctaggcattaaagaagtgaacacacgagaaccaatctcaatatgtagggtaataacactccgccggaggttattatgcgggcatcgctctgtgtgggagtgtcaacactataactccatatgatttcggagggccaaatataaaagcaaaact

SEQ ID NO: 8379 - DNA, 397 bp, Glycine max
  unsure (1)..(397): unsure at all n locations
acaagggagtgtttcttcaagggaggacatttttggaaaagaaatntaaaaggagcgtgtcttaagcaaagagggggaatggaaataacaactcctcattttattttattttgcttatggatataggagtatttgttaaaggatcttgttaattacattatttaagaaattaaaagtcaaaagtttttgatgcgtaaataggagagtgaaaaaaataaatataattttacatctatcagttaaaaaaactttntacatcttgttctttgactagtatccttgagacacttttagaacatattcgatttcctctttacataggtaaaacttgagtcttaaatcattcaaatttaatttttcattgatcatcgtgtttgccaatcagacataaacttga

SEQ ID NO: 8380 - DNA, 324 bp, Glycine max
  unsure (1)..(324): unsure at all n locations
catgcgagcttgttgctcgtgtgctgagtgtgtgatgagatcgtgtagaggggtttgatggaacttatatttatattagttgagtgtggctgctagtccttgtttgtaggggatattgtagtctttgcagttaattctcggcttgtagatattaatcaatagcttacatataatgttagagataaacatttgcttatagataaaaaggtagaagataatcaaaccttgtagataatgtgtgggcttataaataattattctaactgccaatagataagatattcacatacattngaatattagtaggttagagataacctgttt

SEQ ID NO: 8381 - DNA, 351 bp, Glycine max
  unsure (1)..(351): unsure at all n locations
taggatgaatcaaattgcctcttttcggacccacatcgatctttctctggcgaagaccaaatccgcaaagctttgagggtgcgtagcccaccatcttttcatagtagagtatcgataatgtgtctaccatcacgattatcgtctccctttccatcattgggggtaccacctgtgccgccagatcccttcaccttttgggcgtgttcattgaaagatccgtccccctattgcacatgttctgtagttgcatcctatccgaaaccatatcaanaatgtactgatactgcctaacaaaggcaaccattatgtcctttcaagaatggactcgggaaggttccaagttagtgtacc

SEQ ID NO: 8382 - DNA, 191 bp, Glycine max
  unsure (1)..(191): unsure at all n locations
cnacncntngnnncgtccgcccnnnnctctccncnncccccctctnctcctctttttctctattcctccctttttttcttttcttcatctccatatctctttataccctctctatgccctcctactctnctgacctaaccattgttactccagtcttggctatctccactacgtcgacacctcaaatatct

SEQ ID NO: 8383 - DNA, 218 bp, Glycine max
  unsure (1)..(218): unsure at all n locations
tgncgcccgaggctgatgacacttactttagttgagcatttcataacaactgtactgctatactccggttgacctctcttataaaggcaagcacaccatccagtaactgatcacgtgtctcagacgatgacaaatgaccgacagccctgtcctcgaactcagaatatgactttatgtatcaaactacctgtgatatctgcagacacacaacactgtcc

SEQ ID NO: 8384 - DNA, 405 bp, Glycine max
  unsure (1)..(405): unsure at all n locations
agcttgcattgcatttcctcccttaacctanaagatctgagccaattcatattaacaagttctgctctatcaaaaaagaaaaactaaagcaacatattgtgatcattcattcagttgtaagatgactcattccttaagcagagccagaggtgccaggcttcatggacaatatatctgccgctgattctggtcccgcacttcctgtcgccccaccanaatcacattcaaattagtactaattattcttgcttagaaaagacaccacagtaaataataagaccaccaacaacatttcagcatcattcatcaagtcaagggtcataanntaataaccatcttcaaaggctggtgagtaaataacctattatccaagaaactacctgaactgggcatcatacataaaaa

SEQ ID NO: 8385 - DNA, 450 bp, Glycine max
  unsure (1)..(450): unsure at all n locations
tagttctaataaatgtaagagnttgcattatttccgtaagttaacagttatagctagctatctaacatggagatcaactagttagaatgttagtttatagctcttcccattccgtattaagttaattntgagacagttaggtttagaacattaatataatgtattttgaggagtagcttgaattgtaactagtccaaagtcntaaatttttataatttacaatatataacattcataaaaaaaactatatacataatgttaatattgctatattataatcacaaatcagattaactcanatnntgtccatatattntaagtattaattaggtcgagtttgagttcaaattaataaataactctattaaaatttcacgtcacataggattaaagataaactngtctctcaacacccttacaacctatcctncgattatcttaagaaacata

SEQ ID NO: 8386 - DNA, 133 bp, Glycine max
taaaaataacctagctattgttggtcaaacataaccccagtcgaggtcaaccaaaaactacccttaccgtggtaggctgaaaatagtcatggccaaggttggctgaaaacaactttgacaaaggtcagagaaa

SEQ ID NO: 8387 - DNA, 257 bp, Glycine max
  unsure (1)..(257): unsure at all n locations
ctgctagatatgttaactctgcttaatgatgaagatggngtggtttttgtgtnatagataatttaaggaatcaagtcaatgacattggttgcttgtggaatggaattgaattgattctgaattgcacaaagttggggaagcttggggaaattggccactgattgcttgtgaatttaacttctaaagtgctgaataatcaacatagtaggtctcttatatttgatgtcactattgacaatctatggaagaatagaaat

SEQ ID NO: 8388 - DNA, 53 bp, Glycine max
agcttaggatgtcttggtttattctctatgcactataacttcagttaagtaat

SEQ ID NO: 8389 - DNA, 390 bp, Glycine max
  unsure (1)..(390): unsure at all n locations
tagccaataaactggccttctcttaattgtctatgggctnggttaccacgatcaacaaagtactntctgcacctactatatgttgacttgaccaacgctgttattggaatgctgcgacaatctttcaacaccttattcacacattctgataggtnggttgtcatgtgaccatattgtcgtccagatgtatcgttagccatgctccatatattccttgaaatgcggtcaattcatcttgctatggctggactcaattgacgaaaattttataagttttgatcaaacacatgctngcanggagtgtacgctgcatcaaatttgttatcatcaaagttgtcgtgacatcaactcaaataaataatgttaaaataaacttacccaattcttgac

SEQ ID NO: 8390 - DNA, 247 bp, Glycine max
  unsure (1)..(247): unsure at all n locations
tgcttcaacaccgttaagggtaaagactctttcctttgtaagctccattggagcttgtaggcctaggatcttcttcattaatggatccctttgcttcttggaagatgaatggcagcggaatggagaaagaagagagagagaggagatgccacttcaaggagaagatgagtctagannaagctcaccaccataggaggccatggataagagcttggaggaagaaggagatgaatgaagggagaggaag

SEQ ID NO: 8391 - DNA, 279 bp, Glycine max
  unsure (1)..(279): unsure at all n locations
taccttaaatataatgtatcatntgcaccctntgtgagctgtatgatattgtcaataatngaaccctaaacataaatgattatctccagataccttgcttagattctagaagagcatatggttcaaggaaaatataccccaaatttgggggagtggagttgattgggatgtaaagtaaaaggtaaagcatcagcacacacaacaattagttgacgttaaaaaaaaaaagaaagagcatcgaaaaatgtcatgtttaatatgtcaaaataattaagtgaa

SEQ ID NO: 8392 - DNA, 199 bp, Glycine max
  unsure (1)..(199): unsure at all n locations
agctatagtcttcatgttgatgatgctgtgccccctatttaacaggttgngaaaggttctattatttgaactcaaccaacccatacatatgattaaatntattattatatatgaattaattataaatataaaacaccattaaatttagctcacatcacttattaaaatattaaattaaatcactcatgctcttccttca

SEQ ID NO: 8393 - DNA, 264 bp, Glycine max
agttgttctacgatgatgcgttggaccaatggcagaatatataagcatattcgaatgatgattggtggtgtctacgagttatgttggatttggatttgattttgtcatcaacaatggtgtctaagaattgaagaaaattattataatcacagtgatgtctggtttagaagaaaaattaaccgcctgtgaccaatatatgcatctatgattaggttggagggtaccgttaattggatgtgatattacgttgggcattttattgta

SEQ ID NO: 8394 - DNA, 172 bp, Glycine max
  unsure (1)..(172): unsure at all n locations
gcttctcggctcatgctgngaacgcctctagttcaatacccgtgcagcctaaggcacccacttcagagggaagctcccaagttccaacttcgaacgcgactcaaccagccggtaatttccacacgacnagggaccttccttccgaggccgtggccgaaatcaccccgctccc

SEQ ID NO: 8395 - DNA, 286 bp, Glycine max
  unsure (1)..(286): unsure at all n locations
actcaaatcatacttttgctcattcatatcattcctattactcatttcatgcaaaacaaaccactacatatcatntntaatcaattcattgttcaaacacacatttggtacaaacatacaactcaaagtgctgaatattatataattgaaattcaaaaaaattgaaatataaaatctgaacttaaaatgactgaacatcaatcaataaatatatgtacataaactaaaatgtacgagatgcacaaatctaaatgatctgctcctgtggctgctcctatgcatgctc

SEQ ID NO: 8396 - DNA, 398 bp, Glycine max
  unsure (1)..(398): unsure at all n locations
gatcctctatatcctgcagacgcagctttcccaaattttgatgagaccatatcatcaatgatttgattgatagtaattntcgttacattaatttatttgtttaaaggatataactgtttttctttcacatgagtaacttttattattatcgacaagccattgtaggcccaagtcctgtcacatacaagccgtacacagtgcctacttttgcgcaaaccatctttcatagaagccacgtaactatagcattccaaacccaataagacagaatcagctaaatccaaaccttcgaaaactacatgaaatttctatgatttaactcctttgtttcttctctttttagacattcggcagcttcccttggcacttntgtgcctcatatagccacgagaggactt

SEQ ID NO: 8397 - DNA, 445 bp, Glycine max
  unsure (1)..(445): unsure at all n locations
cgtgggctgtaactgacccaaatgtatggtacaatagtgnggcttttaatgcanggaatgttggggacaaataactattgaagagacatgctattagtatcgggagaataatggagctcttaacttggtaatgattttgcagctcgggagttgtaggtggaaactgagtatgctggctttcagtaactatttatgatatttgatgaacaagaactaatgtttgcttcgtttgccctatcatctttgcatggatgttactgagctgttaatacaacacacatacaatgaatttagtgtttttagaagtntttggcaaatgggtcccttatttaatgtctcgttgaacatgtatacttaatgcatgaagtgttagctttgccttatcttattgcatgaaatataaagcataaacacaatcatggcattgctaattaaaggactggtt

SEQ ID NO: 8398 - DNA, 183 bp, Glycine max
ttgcacctgcagcatcgagctcgtctcgctaaacaggagttcacttttggcgctaaacgtgacagtttgcgctcaatgctatttcctcttgggttagaattgcgcttggcgagcttctcgcactaagagagaggtgaaaagttgttaatttacaaatctcaacggtcaaaccgtgggggtgag

SEQ ID NO: 8399 - DNA, 172 bp, Glycine max
  unsure (1)..(172): unsure at all n locations
tgacttaccttgaattaattcctntgatagcccttttgagccttgtgtccctntcttgttttgaagctcactacaagccttaagtgaaaaaccatgatattaccatatccttaaggaattttggagctttggaattgttttgggaataagtgtggggggttatgtataatta

SEQ ID NO: 8400 - DNA, 379 bp, Glycine max
  unsure (1)..(379): unsure at all n locations
gagaggatatatataagctatgctaaccaagccatctagggagaaagaaggttgtcttcgaacccggagattgcgtttgggtgcacatgagaaaagaaaggtttccgaaacanagganatcacagcttcaaccaaggggagatggaccatttcaagtgcttganagaatcaatgacaatgcttacaaagttgagctgcccggtgagtataatgttagttccaccttcaatggtctctgattatctctttttgatgcagatggagaattcgatttgaggacaaatccttctcatgagggagagaatgatgaggacatgaccaagagcaagggcanggatccacttgaaggacttgangacctatgacanggctagagcag

SEQ ID NO: 8401 - DNA, 350 bp, Glycine max
attgagatgctagatattgagaaatggaagttctcgtaaattcaattggtcataacttttcactcggatgtcagattcaagagcaaaatatacagagacgctcgaaattgaacaacggatgctctctagaaatataaatggtaaaattttttcacatggatgttatattcagacacataatatatcgagacgttcgagattcaagaattcaaaaattaaagttctcaagatatatagagatgaaaaattatgaccatgggtgtacgattgagacccatgatatatcgatatgctcaaaattcataaattggtccaattcataaattcaaagagcccttacttttgacatg

SEQ ID NO: 8402 - DNA, 320 bp, Glycine max
  unsure (1)..(320): unsure at all n locations
agcttgaattatattgttcaggcaagaaatagttgtttatgtaatcattactgccatggatcactactgtcaatgaatttgctaagtgctgactcannatggtgtgctccanttggatcttcatctgccttacggttgtattaaaatcttgcacctgctgccgaaagctaatgcgttctccctgtgtcatttggtccttgagttaataaaaatgttgacatatacaatacacaaactagttagctaatgtgtgaaatagggtttgatctctacgtctgtctgtaccaaaaaatatatgntaaaaatatcatttcttaatg

SEQ ID NO: 8403 - DNA, 410 bp, Glycine max
  unsure (1)..(410): unsure at all n locations
ctggctcctggaatactacaaatacaacaataataataatattgttacattgaagtgaaaagaaagaagcaaagtagaatcttagaagagtgaatngaaagatgaaagagaagtgagtaacctttcgccggcgagggacttggagacgaaatgagcgtggtcccagcgcgtggtggacttgcggaggcgcttgacgagaagtgcgccaccaaagagtagcagagtcttaagggccaaccctcgagcacggtttcatccattcgcatccgaatccgaatccgtacccatctttcttctacgcttntcttttatggaagtggaattagttgcggcgcaatctgagtgtgagtggaacaacaaccacaactagaagaagaagaagaagccgaaagttgaattacgttacctct

SEQ ID NO: 8404 - DNA, 274 bp, Glycine max
  unsure (1)..(274): unsure at all n locations
agctatggtatgatctgngacctaaccatggctgttgtctccacggaggccattgcctncctcgcccattattatgaccagcctttgaggtgcttcacctttggggacttccagttaacacctacggtggaagagttngaagagantcccggatgacctttgggaggaaggaaaccgtatcttntctcangattttatccctccttagctagaatntcaaaaatagtcaaaatctcaacacaagaattggactgcgggaagcaagtcgaaaatg

SEQ ID NO: 8405 - DNA, 440 bp, Glycine max
gagagaacttccttgagaagcttctttgagaaaactcgcttgagaagctagagcttagctacacacacccctctcataactaagctcacctccttgagaagtttccttaagaagattcctaaagaagctagagcttagctacacatacctctctaatagctaagctcacctccttgagatgagaagctagagcttagctacacaccccctataatagctaagctcaccctcatgacaaaaaacatgaaaatacaaaagaaaagttcttactacaaagactactcaaaatgccccgaaatacaaggctataaccctatactactagaatggccaaaatacaaggcccaggcgaatgaaaaaccttatctaatatttacaaagataagcgtgctcatccctagcccatgggctcgaaattaccttaagctcatgagacccta

SEQ ID NO: 8406 - DNA, 244 bp, Glycine max
acttatgaaggcgatcataattataactattaatatattttgccttacttagcttactacaagtagctcgtgactacactgtgtattctactcttacatctatataagttattgattctgttattcaactaatttatataactctaaccatagattcctaggatatgaatcatacaatatatattactttcatttgtgtatcagtcttcatatgattaatattttaacatctatcttatctccc

SEQ ID NO: 8407 - DNA, 426 bp, Glycine max
  unsure (1)..(426): unsure at all n locations
ggcacgttagctntaacaattntaaagtgattccaattgaatctctacatcttctagttccagaaacaattaagcaaatatgccaaagagaaaatcgttgcctataaaaatagacaaatcctctatgcattagaagtctcaaagtgaccaatgagcaaagagctcaagtggcaacagcatcagacttcattntgattcctgttacaaactcctgaccctttccgttgcctcaattcctaggtctacacagcctcccttggaacctggaaaaatctattaaactaatattggtatattttatgacttcagatggaagttttgaatatgctataggattttggtagtgaaaggagggcttaaaacctgcaaaacataagccagcatccctacaggcaagagcagtcatcatcatgtgtgaaccatcca

SEQ ID NO: 8408 - DNA, 391 bp, Glycine max
  unsure (1)..(391): unsure at all n locations
aaatggatattatccggtgaattgcttgaatcttgngacaataaatggaatggtagcccaccaaacatggtaatgttattcaaccgactctgattaatagactctgaaattggttctcgaaatgcaatcccctctgatctttgcatcgggattctgaatgttctctctaattccatttcctttctcacttcgtcttccaactctcgtcgttgtgcaaaagccatctcactagcaatgatttctctcctgattttttccttctctagctctcgccatattttctccttctccaactctcgtnggaatacttcgttgacattgatcggcatgaccattgtgaaaacttatgcgctgaaacattgctaggaaagccacctgatgccaagtcaca

SEQ ID NO: 8409 - DNA, 392 bp, Glycine max
aatcttcttctagccacttatctgtccagaaattgatttttccccacacccaacccttccaggcaaatgaatttcaaaaataccgtgaacagaatggtgatacaggtttctaaaggcccttcaaccatggagaatatcccctttggctctaccattttggaattctgacacaccctcatatttggagaatataaatctggcccaaagctgctgctgatcagaatgcaaggccaatatccatcttcccatcaaagctacattgaatttcgaaataatcttgatccccaaaccccaacaagtctggttcaatagaaaatatacaccaccacgtgaaaaggaagtcttcctcggcccatgactaaaatgacactttcttcggtttgcgttagacg

SEQ ID NO: 8410 - DNA, 305 bp, Glycine max
  unsure (1)..(305): unsure at all n locations
tctgtccctgagaaacggttcccagaagacaacagggagtgattattgctgaanaccctagccttgcaacaagtcctatggaagtagacacggagatggacaagaaaatccgcagtattgtgagtagcatnttgaaagacgcctctgttcctgatgctgagaaagatgttccaacatcctccaccccagatgttgttgtccctgaagctgatgaagatgtcccaacatcttccaccccgaatgtttctgtgcctgatgttgagaaagaatgttcaacatttttcggcccacatgctgaagtactc

SEQ ID NO: 8411 - DNA, 71 bp, Glycine max
  unsure (1)..(71): unsure at all n locations
agcttncacctttggtcctcctcatagttgttgcttgaganaacatgctctattttcatctcccactccaa

SEQ ID NO: 8412 - DNA, 351 bp, Glycine max
  unsure (1)..(351): unsure at all n locations
tctagtctacttcacttagttatcgtagtcatgtccatntcatatcctcttaanttcccaaatagctcagcatgtatggtagaggtaagatatatggactcatagattgtcgtgacctcaattgccatggtctatcgagggatgctagtatcattacattcaactcttctttcttaaacagtctcccctaaggccctttgagatgattcactatatgagcaaaccatttttgaacatctccaatcgcttcaccttgttgcatctaaaatgtatcatacatctggatgagagagctctttcctgcacttcntaaatctagagtaccatcttgagctacttgaactatatcca

SEQ ID NO: 8413 - DNA, 139 bp, Glycine max
agcttgattaggtttctaaaatatgaagcctattccagcctctgactttggagagtactttctcctacagcattacatccccaataaaatccctacaattcttctcaatttcataaaaaatgacggagaccgaaatgac

SEQ ID NO: 8414 - DNA, 168 bp, Glycine max
ttaacacgaaagaaatttcacttataacatgagtataaataatgaattatcatcatttttacacaaaatcttaagtcaagttatgtgttctctctacttattgatattaacattatcatttgcagtaaaaaagatctttattaaatgaataaaatatgaagatgaatt

SEQ ID NO: 8415 - DNA, 193 bp, Glycine max
ctgagcgcaacgccacgacgcgatactcaattgtagacgaacataacttaagctcatgaagctaagcaccagtcatggcagcgaagctgaattccttgtggcaatgcgagcactaagcgagtccttatcatctaagtgcatgctcccctgtacttaagatgcatcattttaagctaagccggcccagatcccg

SEQ ID NO: 8416 - DNA, 359 bp, Glycine max
  unsure (1)..(359): unsure at all n locations
atagatatatcgtcttacattgtcaaactgtgtggaacatattagtccattcaattattatcgattagaatgtttcactatatgtagactaagaatcaaaatagttttctcacattctactattctcttcacaagtctctattgtctaaactaatgtatactttcgtcaagatacctctctagcctcacttataagaaagaattgtggctattaggagatagacaataaatactccgtgataactgaaagtattctctaacactgcacagaaggtgcatgaacntataatgaaacttagaaatgaacaaagggataatgattcttatgctttttgatatgtagcaggatcattatcctc

SEQ ID NO: 8417 - DNA, 311 bp, Glycine max
  unsure (1)..(311): unsure at all n locations
gcttatgatgagagaactgagcaccctcttaacctttcattacacaatttaataagaacgttgatataatccacttctacactaaaaattaaagaatagcgatttcctcacacatataccagcaacggtatatcataaatactaactttcagaaataaatcatgttattgattcacagatactacatgagactgtgggtacacattntaaattcccaggatcatgcagctatcccaagttggtttaattacaggtgtaagggttcatccctcgtaacaagttcccatcaattactctctgtgttgttggag

SEQ ID NO: 8418 - DNA, 256 bp, Glycine max
agatcaacataattcttgagatatttatggaaaacagtttgtacagttttgattatgacaataactgagtacgctataaacagacgacgcttaagtggtatatgattagactgtatcaactgaggtgacaagtctgaaatcaacatgtgatcaatattgcgcgttgacatacactcacgacactatagacatattaatgccactgcacatctttcttggaaatcagacaaaagttcttataactacaggctacgtg

SEQ ID NO: 8419 - DNA, 350 bp, Glycine max
  unsure (1)..(350): unsure at all n locations
acaataagtgtgcattgtttgagtttagtattgtagtacattatttgaatcgcatagttactttattattngtcactttgaattgaattcatagaatgtggattatgtttgttgacacttgacttatttgcattaattntttaatggattgagtatcataatattttacactaaaaattatttattttcaagatcacattctttctatagaaaatacaaaacataaataccgaataattcatcttatgtgagtcatcttatgtgagcagacgagaatgctaatctaaagtttgagaaaatgactaccacttattgtactatctactcttattacatatgtagtgatataa

SEQ ID NO: 8420 - DNA, 353 bp, Glycine max
  unsure (1)..(353): unsure at all n locations
taattatggcttaaattatcatcctgtatgtgtaattcatttattttgtatgtgggatctattacacnttattttatgcttccagcaatactgttttactgcgcccttgcccgctttccattatatggtgactggatgcttgactggcaaggataacttaagaagaaaatttgcacagtcattctttcttgctccacaagacaatggctattttgttctgaatgatgtttttaggtatgtagaagaccatgaaccatcataactgccttcagttactggagatggtgatgcagctgctgttacagtaacaccagatacaggcaagattataattcaaaattcttttatcttct

SEQ ID NO: 8421 - DNA, 242 bp, Glycine max
gctgtcatgatttcctctatgtgcattaatgagcattatacattcgatttcatcatcaagttttacttcaatttcctcttgtgttgctttttccattaactcaaaaaggagagaaaagaagaagaagaagaaaaaggatattgaggagagaagagaaagtgattatcaatattcaatattaccttgaagccttctgactcttgggtgtgccaacctgtgccctcttgcttcaaggtcttctt

SEQ ID NO: 8422 - DNA, 318 bp, Glycine max
  unsure (1)..(318): unsure at all n locations
gagtcctcacagttctaaaaaatcaatgagtttcagatatataccactattgaaagctgcataatgtacgtgaaacaaagtctatatacatatataaggcatatatccaggtaggaccaaaacatttggcttagttaatctaattaaagtgagaaatatgattattagtatattggattggttctcttgtgtttttgcaataatgaggttgntggggattatcagtccaaactctgtatttggttattcaaaatttacacacaataaaatgtatggacatatgaagatagaggaaatgatataaataatgttaatgtg

SEQ ID NO: 8423 - DNA, 154 bp, Glycine max
  unsure (1)..(154): unsure at all n locations
cctagtgtgataaggcatagttattgtggagatagattaagcttggactttggacttattaattagcagtatctattgaataattaattagttatcatgccagtgcagctaatgcatataacattttattatagnattactcatttaggtatac

SEQ ID NO: 8424 - DNA, 338 bp, Glycine max
  unsure (1)..(338): unsure at all n locations
nntaagcttgttgttcgatgaataanaaaaccacanaaagctagttaatgatacacatgcaacatcaaaacccaacaaacctcgaccaaaatggtacataacaacaaaccactcaagaaaaatcgaaaagcttcgtatacaaaacaacaaactcatgataaaatgcaaaaaggtcaaaccttttggcttgaaataccatcatacttgcaaaccaagccgaaaacgaacaacatacaacgctttttatgaacaaaaaggtcgaaccttgtggcttgaaataccatcatacctgcaaaccatgccgataacgaacaaacaacacacggttttatgaacaa

SEQ ID NO: 8425 - DNA, 361 bp, Glycine max
  unsure (1)..(361): unsure at all n locations
agcttattagagancctcaattgttccncaatgattatgtcaacgttttttccattgctaattctttgtgtccaactcacaagatcgttgagaagcgccttatgttcctaagcccnacccatacaattcactaagagaataaaaagtatatggctaataagagaggcagaanactgaggaatcaaaccttgcatgtcccctaatgcatttcatatctggtgcaaggtttatgttagcattatataatatgtactttgttaaaatgtgatctatggagacctagttctcatacatctaaagagagaaaagtgtanggagggtccatatatcttgactntacttttgttaccatatttttctt

SEQ ID NO: 8426 - DNA, 400 bp, Glycine max
  unsure (1)..(400): unsure at all n locations
ntgagccanaatcctgactcaccataaaccttgacccaggtgatattgccaatccttaccctcggaagcaaaaaaaaaaaggagaagagaaggaaaatttccaatcaaagaggaagcataaaaaggagagaaggaaaatttccaatcaaagagaaagaaaagaagaggaaagataactcccaatcaaagaatgggagaaagaaataaaaaaataaaagaagttaaaaagaagaaagctcctggtcaaagaaactaaaagaaatgtgcagaaaggtctttngaccggacgatatctgaacaatacagaattgtcaccatatgaacataaaaatgatggagaggaaatcacgacctaaaatggtcttctctccttaattaccaaccaaaatcccgtgcgcta

SEQ ID NO: 8427 - DNA, 377 bp, Glycine max
  unsure (1)..(377): unsure at all n locations
cgctgctntacagcagaatttagtaatgacccactaacctataattaanataacttaatgccattaacctatggaattaaaaaaacttaatggctgagtgtaactgaaattgtggcaaccaaaagtcacccccaacagccaacaagtcagccaccatttggtctcccaaaaggctgatgcctaggttgccaattgggcccttattacaacttgaactaaacctaactaaagcccttttagttgattaaccaaaaacatatttttggtcagccaactttacaaggattgggccattatttagacaaactaaacactctaaaattgagacanagtggtgtcatttagtccttctnncattgggccatgatacaactcac

SEQ ID NO: 8428 - DNA, 369 bp, Glycine max
  unsure (1)..(369): unsure at all n locations
tctgcatcatatttctgcatccatcaagattagtagttgagtgttccaccatgtattctgcccaatgctgagactacattatctgtcaagttccagtaaccaatgaggtttacattgacaagtctagcctaacaattatgcaaaaggtggagaagaccaacatcatttatggcatagagtttagtcagattaagatgctgaagtcaaggacacaatttgaacaattatgacttggctagcattgataaaaccaagtcacntttgaattactaaaggtcgaagagactcgcaaggagaaagcatatacacttccatatcgatatctttgactcccatgcacttcacaagggaaagagangaactttattt

SEQ ID NO: 8429 - DNA, 71 bp, Glycine max
agcttctaaactttatacaagaatgaagctcggatatcacttgttagacaagtggcctcagatatcttaag

SEQ ID NO: 8430 - DNA, 406 bp, Glycine max
ctaataaggttgcgttcctaagcttgggattggcattgggccctattttgactttcctatgctgtctctacatacataaaacagccccaccatcccaattttgcaaaatcatatccatatatcattggggcatttcaccgagcacttggtgagcgcatgtttggacataaattgcaagagaatgggagcaatgtggcatgccccattgcttcagaatacaacctatgcctaatggcctttcattcaaatccttaattcaagaaaacaagcaccaaagcaaaccaaaaccgcctcacaaatataagcatgttctcacaatttaatgcaccaaaagatgaagaaaacacatcaatgggtagcaaaaacatcaacgatggaatacttgttggagtgaattgaaacacca

SEQ ID NO: 8431 - DNA, 338 bp, Glycine max
  unsure (1)..(338): unsure at all n locations
tgacacgctagcttctcatatgtgggctgagtgaagagagagttgttttttggtttaaaaaggctntttctctnttctattattntattttaagntatgccacatgtctccatttgagtggagcaaaaggcccacttttctcatgatgtgactcatgctcagccacatgaagagaaaaatctgaccttttgaaatgccaaagtcttgcctcaatttgcgtgccgtttctctggttccagtccctcgcgtttctctgtgcccgtcggngccagttttcgaaagtaggcaatatatatcanaacgctcagaatgaaaccccgagcatggttcagaggtta

SEQ ID NO: 8432 - DNA, 559 bp, Glycine max
  unsure (1)..(559): unsure at all n locations
nggaaagtgaaatgtggttgannccccttngaanannccgntgnnnnactgagacccacttgtatataccngacactaattgagtgcgatgctactacgactgcataagttttggtgtacaatataaatatctagcctttcgtataaccgcaaaacatgtattgaatggtgatgataacctggaatgaacataagagatcatgcagctgagttcaaacgggatgggggtcattgcctccatgaagaaatattggtctacatcggagatagtttaaatgtgcttatgttaaatgcagtaaatcatacgctgacataaatacatctagacatatatcctaaaacctgatgtaatccatatagcaagatataattgtgccataatcatctagatgtgacagtgattgcaagtgaacatgaaattcccgctaactaactgtcaattttctacatgatnatataaaagctagcgaagagacatgcatcatcgcctantgtgttcgcatcttactatgcacgagtgcatgagacgctangtagttatatatactcatgaatgatg

SEQ ID NO: 8433 - DNA, 176 bp, Glycine max
  unsure (1)..(176): unsure at all n locations
agctntgcattgttgcagatcctgccaagagtacttgatatnggatctataagcatactcgctgtataatgatagatgagnataatgtattatgttgcattccaatcagcaacaagatttaattcatcatctctgccctatgtaaagatatgacgaggactctaatacaacgtttt

SEQ ID NO: 8434 - DNA, 165 bp, Glycine max
agcttcggacaatcaaccttctcagccaagtggtatttctagtcctcctagatgtagcatctgaaggagtatctgaatgtggaggcgaggttcgacccatcccgggcatagtctttctgtgagaacctgtgatgtacctaagcacgtgagctcctggcaattatt

SEQ ID NO: 8435 - DNA, 518 bp, Glycine max
  unsure (1)..(518): unsure at all n locations
ctntgaagatacannactcctctcatacancccannagatggttagagttatattccatttttagcagggggagttagtaatttctatatccaactcaattactatagtgccttgtttagacgtgtgtttngttcattcccgatataactatgtcagcatacattgaacgtcttgtggacttaccttctagtaatagaaacagatatgggtgtatgttgctttctccatacttatctcacatggagaactnantgaaattatntaaaaaggggaatcagacatggatattctaggatagttgtcacccggttgattccacacaacactttagttatggcattcaaaaaattaattgttgaacggtctttgagctaatttttacaacatacatgttattctaaccgcgaggacttgttggctaatcaggtgatcttacatctcacacttattatgtctccaccaaaacaatgcggactctctatattgaatgttgaatacacatattattttagacgcc

SEQ ID NO: 8436 - DNA, 455 bp, Glycine max
cgtcccggatccttaagcaccgcggctgcagcttatgcaagattttgtgattcttcaaataaaggaaagagagacagtgaatgcatatttttcttgtagtctaaccataaccaacaaaatgaaggctcatggtggagtgaaacagtcattattgcaaagattttgagatcaatggtctcaaaatttgattatgtggtatgctcaattgaagaatccaacaacttagacatgatgagtattgaggagttgcaaagtagtctttttgttcatgagaagaggatgagaagttgtggagaagaagagcaggttttaaagatctcccacgaagaaaaagcaggtagaggtagaggcagaggaagcggaagacaatcattcaataaagttgctattgaatttttcaaatgtcacaagttaggacactatcaatatgaatgtcttgattgtgagaaagatgc

SEQ ID NO: 8437 - DNA, 357 bp, Glycine max
tataagaacaaaatagccttaatcatttccaaatatgcatgtgaattaggatgcatcaacaagaatcaagccaaggctattatgcaagcaatcaatggggcaaaacacaccaaatgattataatgatggatggctcaaattctcacaaaggtaaaatcatcactttcaaattgagctttcaaaactatcatgacatgtagagaagaatcaaggatttcaagtcacaaaatgtcaagaacttttattttcaaaacaattacccatttcttgaacatatcctataattcaaagaaaaacatgctaagtcgtacgtgcacacgaaattgacccaaaatattaaactgaaaatccgacaaa

SEQ ID NO: 8438 - DNA, 430 bp, Glycine max
  unsure (1)..(430): unsure at all n locations
agcttcacgcttttgtcctcctcagttgttgcatgagaatacatgctctattttcatctcccactccaagtaggcctccggatcattctttcctttaaatggaggaatgttgagtttaataccatcaattcggttttgtctaggaacaccatcattccctcttctcctcctttcttcttcattatgatctctattctccatttgatccaacctctcatggagcgcatcatctcgttgtttcattaacctctccaaatgttgcatcaaagcttgcatttggaattgcgaaagccccactccatcattaggattagtacctgacatctcanacaaacaaatcaaacgtaacaagacaattatagntgctggttgaatccctcacccactcaagtgtatcacacaattatggcttttctctaatgaaacactc

SEQ ID NO: 8439 - DNA, 350 bp, Glycine max
tcctctaccggtgaaaaaacattgtctgccagcgcttgtaaaaaaattgcgcaatgtcggctgaaaaacatcagttggggctgtttaactaccgatgctggctactgttttttctattccacccctgaataatacttggacgatgtcgatttggaaatgttcgatcggagtcatccggtcatgcttctttttaagacctcgatctgtcatcttttcctggccgacgtcggctagcatttttttcgatcaatatcagtgaatcatgctttttgccaaggtgggctaacgttttcgtggctcatgaaatgagagcatgccagtgtcggccgaaacacaatctcccacgaaaa

SEQ ID NO: 8440 - DNA, 433 bp, Glycine max
  unsure (1)..(433): unsure at all n locations
agctnttagcaagggagaacactcttgatgcaaaagcttcaatgctcgatctaaatttaaaaaaaggaaaagaaagaaaaagtacttatataaattagggtaaggtaaaacgcataaagcatggtaacacaatgaaggcatatgaaagcatatatggccacaaagaatagtaatgctttggtttttagaatagagatgtttttctctcacttcctgatttttctatccctttccacgtttccctacccctcctaatttttgttatcttattactagtgctgtttaaattcctgcattttgtatctgtattaaatattacgtttcaattttgccaaagaatacaaagtaccactcattttaaaataattgaacgagaaggggtgtgtttggattgcagtcatgtttaacggaatctacgttgaactcaatccat

SEQ ID NO: 8441 - DNA, 350 bp, Glycine max
tgcttgtggggcttctatggaggctggatctttgagcttcaatgaggtcctttaatggtgattttccaccatggagatgcagcggaagaaaaaggagaagaggtgagaggaggcgccatccactagggaataagccatggaagaaggagcttcaccaccaagatgagccttggataagaagcttggacaggatgcttcaatggaggaaaagaaagaggtagagaaagagagagggggagcacgaaattgaaggaagaaaaagggagagaagttgaactttgagttgtgtctcacaagactctcattcatcaaagttacaacaagtgttacacatgcttctatttatagac

SEQ ID NO: 8442 - DNA, 432 bp, Glycine max
  unsure (1)..(432): unsure at all n locations
agcttgtaataatcaattattggttcaaagacaagtttgaattgatataatcacataaggcttactctcatattcaattattggcttgataaaagtgttccatagaggaattcgacgaataaagattatctaaaagaaattttaactttttttgaaaaccttaattatatttttaggtttcaaaatatttttaagccaatctagttcaattttgaagccttaatatttaaacgacacttagaactttcctcgttttttggcaaatagtcaaacaattcattatatttagtcattattaattgtaattatgtttctatgaaaatttgaatatattctcacaccattgattaaattaaaatagtgatattttaatccaatgtcgaatatatatgtgcaaccaagaagctntcgtggagcaagacaaatatccat

SEQ ID NO: 8443 - DNA, 257 bp, Glycine max
agtcaagcttttctgtcttctcaatcaatctctttgaatacttaatttatgttgcgttaggccacttatctagggaatgagctgctatgtattggctatgtgttgcgatcaaagcctaatatataacatatgaacactgtctgaacaggattctaatgaaggtgtaccaagaggccgtttcctttgatctcaatagtggccctattgatcatgacactcattacaagctaaatgcccttcctcaagattaacccaaa

SEQ ID NO: 8444 - DNA, 437 bp, Glycine max
  unsure (1)..(437): unsure at all n locations
agcttgtaattnttttttaaaaaagtgcctaattctttataaagtaataaatatgtccttgtatattactaaatttaataaaagcttaacttgttttcgctgaactattttttacaaaatatcgcattgattggcgtcatactttgaccattacattaccagttatttggaacgggacattttactaaaatgagacatatgatatgacatgtacgtagaaaatgatatggtttttaaagttaagataggaaagaaaaaaaatattttttatgctttgttgtatagaaagtaaaagcaaataaaactgtttatgtaaaatgatataaatattcttaaggagaaaaaaatgagatttgataatgttgaaaccagagccacaacgggatgatgaaaattttaaaaaattagagtatttccaccgaggtttatcttgtaag

SEQ ID NO: 8445 - DNA, 353 bp, Glycine max
tgatgagaaaagttacatgaattggcaccagcaagttaatgctgtccttcgagctcatcaattagaaaaatatgtcgtcaatcctgttgttcctctcaagtacctctccgaagaagatcgtgcagctgggacaatcaatccagaatttacgaattgggatcgtcaagatgctctaatcatgtcttggcttctttctacgctttctgattcaattctcagtcgtgttgtgacttgttgtcattcattccaagtctggaatgccatttgctcccattttcatggtcttacgcgtgcaagaactacgcaattacgcttggaactgcgaaccatcaagaaaggcaacaaatcttgca

SEQ ID NO: 8446 - DNA, 389 bp, Glycine max
agcttgacaatttgtatatcggtatgctatatatgtaccagtataccacgtaagtaacttgtatagctgatctacatagggatatggacttcagaatgttgagcatatatatatatatatatatatatatatatatacttatcgtacccatcttagatatatacgataatttatcaattcacactcttgattctgaacaaattctttcatgatcagtggtactgttactatctagtggacgagaatttataaaatagtactttctctgtgtcccgaatataagtaacaatttttttatatttgttatatcaaatataattaaagctcaactaattctgttctatataataagattatctttaaaatataattctcatttaataaagtca

SEQ ID NO: 8447 - DNA, 231 bp, Glycine max
gagcttacctattcggacgagggagcatggcagttaagttccagctttccatcgtggattcagtcacaaaaaaaacttaaatatttacgcatgtataacacagggattattgattctattcctacacagatgtgggaagcacaatctcacgttttgtatttaaaccactctcataatcatatccatggtgagcttgtgactacatttaaaaatccaatatctatcctaact

SEQ ID NO: 8448 - DNA, 368 bp, Glycine max
caaacttggaataagtacataaaatttccccctcttctaaaatcattggggacttcagaaatatgttcaacgtatcctcatcaaatttcactagatgacctctcaccctcacctgcttaggtgatttatcctcggggtcattaaggttagcataaaattccttcacaatagcaacgtccatgtatatcctccacaagacagtggaggatatacatggagaataagatgaatgacaaggaattatagtgaattgaccgagcaaaaagatagaggaagcaaaagaacatcacctacatgacgatgctcttgataccacatgatgtagctccatgtggagcttgttggccttggatctttgtcatcaatgg

SEQ ID NO: 8449 - DNA, 348 bp, Glycine max
tgaagtgaggaagtgtggaagagtgagtcttcctacttttatttgttgaccacagagtggtacctggagatatgtcgcgggggtcaagagaccttggggacgtcaggtggggtgctattgcccaaaaccaagcttgatcaatcccgacccaacccaggcatagtcagtcagtgagaacctgtgatgtacctaaacaggcgagcttctggctgtcaaccgataaaagaacaaagaccacaaagcaatgaggcttgtgtggtggctggccaactatgaatcttgagtgatatttggaatatggcctctggtgatcgattacccacgatgtgtaatctattaccaaagatg

SEQ ID NO: 8450 - DNA, 420 bp, Glycine max
agctataggcaaattctaacgacaatatctttctactcggatgtctgattgagtcccgtaatatatcaagacgctcgatattgaatgttgaacctatgagccaattcaaacgacaataactatttaatcggatgtctgattgagtcccgtaatatatcgagacgctcgaaattgaatgttgaagctttaggcaaattcaaacgacaataactatttactcggatgtctaattgagtcccgtaatatatcgagacgctcgaaattgaatgttgaacctatgagccaattcaaacgacaataactttttactcggatgtctgattgagtcccataatatatcgagacgctcgaaattgaatgttgaacctctgagccaattcagacgacaataactttgtactcggatgtgcgattcagtgg

SEQ ID NO: 8451 - DNA, 338 bp, Glycine max
ttacagcagattttagtaatgacccactaacctagaattaaaataacttaatgccattaacctagggaattaaaacaaacttaatggctgagtgtaactgaaattgtggcaaccaaaagtcacccccaacagccaacaagtcagccaccatttggtctcccaaaaggctgatgcctatgttgccaattgggcccttattacaacttgaactaaagctaactaaagcccttttagttgattaacccaaaacatatttttggtcagccaactttacaaggattgggccattatttagacaaactaaacactctaaaattgaaacaaagtggtgtcattta

SEQ ID NO: 8452 - DNA, 409 bp, Glycine max
agcttgctctaaatatacattgatgtttgtatatatgggaggaggttgcatgtcatttttgttatttaagagtagtgtcccactggtaaaactaactttccaaatgtttgccttcgcaggaaatggctccgaggaagcttgcctcgaagaggtccaggaaggacaaggcagccgaaggaactagttccgctccggagtatgatagtcaccgctttaggagtgctgtacaccagcagcgcttcgaggccatcaagggatggtcgtttctccgggagcgacgcgtccagctcatggacgacgagtatactgatttccaggaggaaatagggcgccggcggtgggcatcactggttactcccatggccaagtttgatccatatatagtccttgagttctatgccaatgcttg

SEQ ID NO: 8453 - DNA, 342 bp, Glycine max
ttgagggtgcgtagcccaccatctcttcatagtagaacaccggtcacgtgtctactatcattgggataatctctttctctgtttttgggggtgctacttgagttgccaagtctctccatctttgggcgtattctttgaaagattcgtgccccctttttgcacactttttgtagttgcatcctatccggagccatatcagaattgtactgacactgcctaatgaaggcaaccattaagtccttccaagaatggactcaagaaagttcctaagttagtataccaggcgacagttgtcctagtaagactttctcaggaaaaatgtatcaacagtttctcatcttt

SEQ ID NO: 8454 - DNA, 425 bp, Glycine max
agcttgacaggttatataaaaccacactatctatgaatgacaaagtaaaacaacttaatagtaagtaaatgcacagaatccaggacaccgattagaaccagtgactgctttttctttttttttttttatttcaaaacttggtgaatctttctatacagaacagagatcctttccaacaattttatccaatcattctctgttggttcttatattattttcccctcatacatgaatctgttttaaaaatgcatcaacgaaattaaacatttctaaagtttatcacaagcaaacccaactacttagcaaggacaagtgtcttgcgttgcatcttctgtgctataaattcagtcaacagtttacaactttaccatcatggtttatacaattatcaaggtgaagaacacctcactatttagaaagaaaac

SEQ ID NO: 8455 - DNA, 329 bp, Glycine max
ttgaataaatcacttaaggatttacttgatggaatacaagtatgcataacaatgctctttatcactttgaatctgcttgtgtgcttctgatatttgtgagatgaagggatctggatcttctcaatcataagcatagtagcgagagactagataagatttaggcttattggttttttgtgattgaaaaagaaatttatttaaggaagaaatggagagaataaggcatcctaacaagaaacttacagaagaaaaaatttagaaactaatagattgagtcatgtagcaaggcatgccaatctccctgcgtatgaaatccatgagaagaacat

SEQ ID NO: 8456 - DNA, 247 bp, Glycine max
aaacttgaattaacctgtaactagctatttttgtattcattgtaactaacggagaaactaaatttccacttaatatgagaagatgtaccttttatgagaccttattgctactaccatttagcatctctggcgccatccatagaagatttccacgaacaccaccacacaccaacgtatttcgcttaatctttgataagccataatcaccatcctggtgaaaagcaagtttcttagctgtatcacaatg

SEQ ID NO: 8457 - DNA, 361 bp, Glycine max
gaagctctataagtccatctatggattgaaactagccctctgctagtggcttttaaaatatcaggaagtttttatcttcgttgagcgtttctagagaatgacgagaattgctgcttctgcgatgctggtcacaggcaataagaccttgatacttattatatactgccactgtgaaacttttttatttcaagtaaaggccacgctattgcaggcgtttgcagccgttctggttgctctaaggatactacatttttcccccagcgaatgctgatcaagtgtggagttacattaacagcttacattgagtgatctttgccctcaagtttatttatttatatgtgaagttttcccttgatttttt

SEQ ID NO: 8458 - DNA, 523 bp, Glycine max
  unsure (1)..(523): unsure at all n locations
ctctctccccgntactcattattaataatgngattttnttaacgttttggtaagacncnatagagggactganacctgattgacttgatacctactcgtacccggatgcttagagcgacctgcggcatgctagcttataataacaatagtgcctaaatcttttcgcaagatgcatgcgaattatgaagcattatcaagaatcaagcccatgctattgagctaactatctatggggctaaacaccccaaaatattctgaagatgggagggtcaaattcttgccattggagacttataacttttcaaatgagcctttaaaattatattgacattgttatggaataacaggtttgtaacaccaaatggtagaaactttattttgaaaactccccattgtttaactgtctattattcaaagaaaattggagattgtattgcaaacaaattgactcaaattttatctggacctccgtgactttcaagctaacaaattttctgttttccccacactttaaaatgttggg

SEQ ID NO: 8459 - DNA, 332 bp, Glycine max
tgtctcaacgtttatgcgagacggagaccaacatgctagctatcatcgccaagtaccaagaagagttaggtctagccgcggcccacgagcataggattgcggacgaatatgcccaagtatacgcggaaaaagaggctagaggaagggtgatcgactctttacaccaagaggcaaccatgtggatggatcggtttgctcttaccttgaacgagagtcaagaacttccccgattgttagccaaggccaaggcgatggcagacacctactccgcccccgaagagattcatgggcttctcggctattgtcagcatatgatagacttaatggcccac

SEQ ID NO: 8460 - DNA, 433 bp, Glycine max
  unsure (1)..(433): unsure at all n locations
agcttgaagaggatggtttaatggaggaaaagaaagagagatagggggagcacagaattgaaggaataaaagagggagagaagtggaactttgaagtgtgtctcataaaactttcattcatcaaagttacaacaagtgttacacatgcttctatttatagactaggtaacttccttgagaagctttcttgagaaaacttctttgagaaaacttccttgagaagctagagcttagctacacacacccatctaataactaagctcacctccttgagaagcttccttgagaagattcctaaagaagttagagcttagctacacacacctctctaatagctaagctcacctccttgagatgagaagctagagcttagctacacacccctataatagttaagctcacccncacgccaaaaatacatgaaaatataaaa

SEQ ID NO: 8461 - DNA, 330 bp, Glycine max
  unsure (1)..(330): unsure at all n locations
taataagtccatctatggattgaaacaagcctcctgctagtggtatttaaaatttcatgaggttatttcttcattcagctttgaagagaatgtcatggatcactgtatatactagaaggtcagtgggagtaagatttgtttccttgtattatacatagatgatattctacttgcgactaatgataagggtatgctatatgaggngaaacaatttctctcaaagaactttgatatgaaggatatgggagaggcatcttatgtcataggcataaagatccataaagaaagatctcgaggcattttaggcttgtctcaagaaacctatatcaa

SEQ ID NO: 8462 - DNA, 286 bp, Glycine max
ttcaattgggttctggaatggccatcaaaggcctatttatttgtaactggaaacacgaatttgctaaaagtttttaaaccaaaaaggtcttatcttttaaaaagcaaaatcgtgttatcctcttacaaagttccttggccaaaacacttgtgattcaataaggaattatttgagtgctcaaattgttcaatctatctctttcaagagagatttcatcttctcttcttctgtattctgaaaaaggataaagagaccgagggtctcttgttgtaagaaaatctgaaca

SEQ ID NO: 8463 - DNA, 344 bp, Glycine max
tctcccccaattttctataaatagggggagaagttgtagtcaaaagggttcagccccttaggcacttctctctctttcgaatttgctgaggaaaattatttccgtgaagaaaatccaagctgaggcgcttctgtaacgtttccgtgagtaattacgcgaagattctcgaccgttcttcaagattcaccgatcgatcttcgttggtctttagtcttcaatggggaagaacctcaaaccaagcttttcaagtcattctatgtacccgcggtggaccaccatatgattcgtgtataaatattctcattttcatttactgttgtgcccccttttgcgggcttaagcca

SEQ ID NO: 8464 - DNA, 435 bp, Glycine max
agcttgaaaggtagtcatacctcacaaaatatatatgtatgtgtgtttaggtagcaagataccttggatatgcatgtatatagcaaaaatacctgacaaagatatacatgtttaggtagcaaaatacctaaaaaaaaacaaaaacaaacaagaaaaaaaatatatctttgggctgaaaagccaacacatttttgaaaagaaataacttctagcttttctttaaaaaaagattcaccgatcaaaacaaagggtttttttttgaaaaaaatgtgtatacacctgaagggtgaatgctgtgaaaattttcccgaacacccaaaatggactcgaatgaatgcatgaattgataaaagaacatgttttggaaacactgggttaacttaatcgggaaaattaatcttgagccctagtgtcatgtgaccataaaaacttgat

SEQ ID NO: 8465 - DNA, 344 bp, Glycine max
ttataagtgcgggtctgggagacgaaggtcaagtgttcgcgatatgtgaagatgatgttccaagtacttcggatttggtccgaccatgccctcctgatttccagctgggaaattggcgagtggaggaacgccccggcatttacgcaacaagcataatgtaaacctttacggttttaaaagctctatagttgggcctgggctttagagttttcattttgttaaggctttgtgtcttttgtttttgaatttataatacaaggatctttcttcatctgttcctggtctctacccattctcattcatttgcatgtttactcctttttctaaaacggcagattcgatga

SEQ ID NO: 8466 - DNA, 425 bp, Glycine max
  unsure (1)..(425): unsure at all n locations
agcttgaaggtgcgtagcccaccattttccatagtagaatactggtaatgtgtctactatcattgtcatcgtttttttcgtcattgaggtgccacttgagctgccaggttctccacctttgggcgtattctttgaaagatccgtgcccccttttttgcacatattttgtagttgcatcctatctgaagccattataccgacactgcctaacgaaggcaaccattangtcctcccaggaatggactcgggaaggttccaagttagtgtaccaggtaacaactaccccagtaagactttcttggaaggaatgtatcaacaattcctcatcttttgcgtatgcccncatcttccgacaatacatctntagatggttcttggggcaagtaatccccttgtacttgtcaaagtccagcaccttgaacttg

SEQ ID NO: 8467 - DNA, 347 bp, Glycine max
tggatttccttttagtagggaatctatccttcctaagatggagccaaacccagtcaccctcattaagaactagctcttttcttcctctattgcctttagttgaatacacctttgtttgattctctatttggttcttaaccctctcatgcatcttctttacaaattctgacctagattccccttctttatgtataaaagaagtgtccagtgggaggggaatgaggtctaacggtgttaggggattgaacccatagacaacctcaaaaggggactgcttggtggttctatgaacccccctgttgtaggcaaattctacatgaggaagatactcatcccaagacttatgg

SEQ ID NO: 8468 - DNA, 436 bp, Glycine max
agcttccaaagttatgtctcgtatcagtttaatcgattacaaccttatcgtaatcgattacatagttgtttttggacaatgattgatttattcaggagtctctgctttaatcgattaccatgtgctataatcgattacttctttttccacaagtgtttcagaagtgaacaagaacattttaattgattactttgagtatctaatggattacattattcttgagttgtttccaggttttcagaagaacactttaatcaattaaaaagataatctaattggttacttcattgaattaattgattaccttgtagatttaatcgattataggcaattataactattttttccataaataaccagcttgtgttctcttcaaaaaagaaacaatgaaataagctgttgaatgagccaagatcacatgctattattagttaaa

SEQ ID NO: 8469 - DNA, 336 bp, Glycine max
tgtctcagtgtttatgcgagacaaagaccaacatgttagccatcgtcagcaagtaccaagaagaattaaatctagccacggcccacgagcacatagtgacggacgagtatgcccaagtgtatgcggaaaaggaggctagaggaagggtgatcgacttgttacatcaagaggcaacaatgtggatggaccgatttgctcttactttgaatgggagtcaagaacttccccgattactagccaaggccaaagcaatggcggacacctactccgcccccgaggagatccacggaattctcagctattgtcagcatatgatagacttaatggcccatataa

SEQ ID NO: 8470 - DNA, 292 bp, Glycine max
  unsure (1)..(292): unsure at all n locations
agctttattatgccctctcccctcgtggggatntcttcttcggcaaaggcgaaatagttggtggcagtgatattattgaccagccctccgaaaccttctatcgagatgtcttgggccacgtgggccttgttcacaacctttactatcaaaacccgatgaggctcggaactcatgagttactccaacaacgagaccctagccggagttntgttgagctgttcgataaccttgaattcgctttgctgaattatacggaggaactcactggctttctctagcgacaccttctttt

SEQ ID NO: 8471 - DNA, 303 bp, Glycine max
tattctataagttaaaattaatctatgcataggttaatgtataaaatacaaactcttgataaaaggcaatggatatgtaaccattcactccctttatatcaattcattgttgattataggatttgatttcgtagatcattttatacataagaagatgatcgagtttaaaatcactgtgtatcatttatttaattgggtataacattgtatattagaataacattaatatattttttgtaagttagttatggttggctcattgtaaaaacaaataaagtattttaaaaatttgcaaaaacacaa

SEQ ID NO: 8472 - DNA, 418 bp, Glycine max
  unsure (1)..(418): unsure at all n locations
agcttgtgaaagatgtcttcttaggaagcaacacacataatcatntttaactgaaaaagcatggaaagctaaaggcttgttggagtaaattcacactgacatctatggaacaatgaggacatagtcgctcaacaacaataggtacttcatccttttcattgatgacttctctagaatgacatgggtttactttcttaaagaaaaatcagaagtctttggaatattcaagaagatcaaagcctttgtcaagaaacaaagtgggaagcatataaaagtactcagaagcgattgaggcaaggaatacaactttcatgagtttgataagttttgagaagatgaaggcattgagtgtcagcttacagtggcatattcttcacaacaaaatggtgtgcctaagagaaagaattgaacagtcatg

SEQ ID NO: 8473 - DNA, 349 bp, Glycine max
tgattctgtaaaaaaaaaaaaaaactgaaaacttaatcccattcttccttcgtttttcaaactctcttatatatagtcttttatttttatttttaatgtataatattatcttttgatttgttaagtttgacgaaattttcagtcattagagtgattgaatttaaatttaatgtttctaactttagagactaaaaaactgtcattcattaaagcacaaaatacgttaattagatgttaggtataagaaattatatattcttctaaaaaaaggaaattatatacaagaaattaaattccttttctgtaattgattgaagccatatcaattgtttcaaattttactgtgctt

SEQ ID NO: 8474 - DNA, 414 bp, Glycine max
  unsure (1)..(414): unsure at all n locations
agctttacaacagattttagtaatgacccactaacctagaattaacataacttagtgccattaacctaaggaattaaaaaaaacttaatggctgagtgtaactgaaattgtggcaaccaaaagtcacccccaatagccaacaagtcagccaccatttggtctcccaaaaggctgatgcctacgttgccaattgggcccttattacaacttgaactaaacctaactaaagcccttttagttgattaacccaaaacatatttttggtcagccaactttacaaggattgggccattatttagacagactaaacactctaaaattgaaacaaagtggtgtcatttagtcctcctccatttgggccatgatacaactcacaaccttggacttntctccttgaaacttgggcttgtattc

SEQ ID NO: 8475 - DNA, 220 bp, Glycine max
tcaacattcaattttgagcatctcgttatattacgggactcaatcagacatccgagtaaaaagttattgtcgtttgaatttgctcacagcttccgtattccatttcgagcgtttcgatatattacgggactcaattcaacatacgagtaataacttgttgtccgttaatgggcccacagcttcaacattcaatttcgagcgtttctatttgttacgggac

SEQ ID NO: 8476 - DNA, 361 bp, Glycine max
agcttgagaagctctatgtgaagtgaaataattgattaggaaatgcagaacaaagaaagatttgaatgagttaattgattacccaatttgctaatcgattaaatttgttaaaactataaatacctttgcttattctcactacaagaaaaaatgattgtaacgagggttatttttggccttaaggagggtttaaacccccgtaaagtatgttacctattgttggtgttctcattggcaaaacatccacgataaatggtttaccaatggtttttgtgaaccctttaaaacacaagaattacttgatgttttgaaacccctggttataccaagggtttattaacccctattaacaccacaatca

SEQ ID NO: 8477 - DNA, 341 bp, Glycine max
tagctaaagctactgcgcgaagtaaagtaggaggagtcatagcagcaacatctctatgtaaatcacgatttaaaccactaatgaaacaattaaggaaagcctcatcactcaatccaagagatctattatccaaggacatgaattttaggtaataatcagaaatagaacttgtttactgcaacttaaacaacttatccataagaaaattgaatggagaaggaccaaattgtgactccaaagcacgagtcaattccggacaagtagacaccatagatagcttctgagacatttgaaacaaagccacgacattattatcaaagtgcattgcagcaatgtcaacc

SEQ ID NO: 8478 - DNA, 425 bp, Glycine max
  unsure (1)..(425): unsure at all n locations
agctntgtgcagcatggatgatctgcatagtattattgatcatatgttgaatacaagattgcatacaaagtgctctatatccagcttaacaaacttagtaactgattctactctaactaattgctaactaatctaactatcctctaactgaaaataactaactctattttctgcatagagctttaatacccctctcaagttggagagtaaatgttaatgagtcccaacttgcggataaaggaagagaaagctagaagcattaagggctttgtgaagatatcaacaacttgatgttgggatttcacatgagcaagcttaaggttgttggactgcactaactcacaaatgaagtgataatcaatatcaatgtgtttggatcgttcatggtgagttggattagaagctagatcaattgcagatttgct

SEQ ID NO: 8479 - DNA, 340 bp, Glycine max
ttagccttgatgtaaggatcatccaagaacagctagacagacttctaggttacacaacagcattaatttttattgtgtggggataacataaattgaagaatattcaggatgaacacagtattagtactaggctacaataaaataaaggatttgcttaaaactaaatcaaggggtagggtgtatagaaatgatacaaaagaaatgaaaaataacaaaaatgttcatattttcatccgagaaactgatataatcacattcaacaagtccaggacatatgaatctcttttcaattttcaagttaaacatatatcagacatatgtttctttttctcttaaaatt

SEQ ID NO: 8480 - DNA, 414 bp, Glycine max
agcttttaatctgttagaatcacttgttagaaagcatcttctcaatttgaccattttggttgtaagaatccacaattttcttagcatatgtaggcatgtgcttatcagccctgcatttcaacaatacaaacaaattatccttaatatcaaaggaagggttgccataaattatcctaactcgaaagaaattgatgattctacaatactgagagatacaatacatacaactaacttatgttaattgagagaaaatagggaaataaaattaaatagattatgtacaaatcaatgctaatcaaatctatcctaattacatgatattaggaatgaaatctgaacaataggatcaaatcacactaatattgtgttaattagatttcacaacatcctacatacctttcctttccccacata

SEQ ID NO: 8481 - DNA, 343 bp, Glycine max
tctataagaagagatggccaagaagatcaaggatagactactcatcaaaggcaaggaatgagaaaatcacaaggagttgaattggagcagttgaatattgctaaacaacatgcttgggcttagcgcgagctatctggcttagtgagagtgtctaacttagcccaatgccaacatgaagagaaattgggcttaatgtgagttgtttggcttaccgcgagtgtctggcttagtgcctggacttagtgtgagttgtctggcttagcccaattccaatctaaggaaaaattgggcttagcacgagttgtcaagcttatcacaaacctttagcgtgaatttacgaaaa

SEQ ID NO: 8482 - DNA, 296 bp, Glycine max
agcttcccgtatccgtacttggaaggatctgattaccgcctttctaagacagaatcagttcaattcttatatggctcctgaccgtactcaactgcagaatatgttcaagaaggaggggaaaccttatagaatatccgccacgatggaggattttggcggcacatgtagctcctcccatggttgagagaaagatgaccaccatgatggtaaacactctgccagtgttctctattaaaagcctatggggttccttcccgcccacttttgcgaatctgtggttggccgggaaaaaattc

SEQ ID NO: 8483 - DNA, 293 bp, Glycine max
ttgacttgagtcatcaagagattataaatatgtgaccatggcatgaatttaattaataatttatctttcaatcttttttcatcatctctcaacatctttgaactctttctacagaattttctgattcatttctcttcatctttcttaaagtttttgttcaatactttttctttgaagaaaagttctttgatcaaaaacttgtgttattcatctttttcattctcttctccctttgccaaaagaacagaaggactaaccgcctaaattcttttgtggctctcttctcccttttc

SEQ ID NO: 8484 - DNA, 429 bp, Glycine max
  unsure (1)..(429): unsure at all n locations
agcttgagatgaggaagtatagaagggtgaaacttcctgcttttattcgttgaccacagagtggtacctggagatatgtcgcgggggtcaggagacctcggggacgtcaggtggggtgctattgcccaaaaccaagcttgaccaatcccgacccaacccgggcatagtcggtcagtgagaacctgtgatgtacctaaacaggcgagctcctggcagtcaacagataaaaggaacgaagaccacaaagcaaggaggcttgtggtggctggccagttgtgaattttgtgtgatatatgggttgtggcctctggtaatcgattaccaagggtgggtaatcgattacaaggctaaaaaaatgaagacaggaggctaagatggtctctggtaatcgattaccacggngtgtaatcgattaccaggcttgaaaac

SEQ ID NO: 8485 - DNA, 345 bp, Glycine max
tcccaagaaaccttggacctgcttatcggtacatggctcgggcatctcgaggattgcttttaccttgtctggatccacctctattcctttctggctaacgacaaagtcgagcaatttttttgattttacctcgaacgtgcactttgcgggatttacccttaacctgtatttatgcagtcgcccgaacaacattcgcaaattgactaggtgttcctactccgtccttgatttggcgatcatgtcatccacgtagacctcgatctctttatggatcatgtcatggaataacgccaccattgcctgctggtatgttgccccaacgttctttagcccaaatgacatcac

SEQ ID NO: 8486 - DNA, 428 bp, Glycine max
agcttgcagcaaattctaacgacaataacttttcactctgtagtgcgattgagtcccgtaatatatcgacacgctcgaaatttaaaaccgaagctcatagcaaattcgaacgacaataacttttcattcggaagtctgaatgagtcccataacatatcgagatgcttaaaatagaaaaccgaagcttgtgcaaattcgaacgacaataactgtttactcggatgtgcgattgagccccgtaatatatagagacgctcgaaatttaaaaccgaagctcgcagcatattctaacgacaataacttttcactcggaagtccgatggagttctgtcaactatcgagacgctcgaaacttaaaaccgaagctcgtagcaaatacgaacgacaataacttttaattcggaagtccgattgagtcccgtaacata

SEQ ID NO: 8487 - DNA, 308 bp, Glycine max
tcagttttaaatgtcgagcgtctcgatatattactcgactcaatccgactttcgagtgaaaagttattgtcgttagaatttgctacgatcttcgattttaaatttcgagcgtctcaacaagttactggactcaatctaacttccgagtgaaaatttttgtcgttcgaatttgctacgagcttcgattttaaatttcgagcgtctcgatatatttcaggactcaatcggacttccgagcgaaaagctatagtcgttcgaatttgctgcgagcttccgttttcaaattagagcgtctcgagatattaccg

SEQ ID NO: 8488 - DNA, 435 bp, Glycine max
agcttataagaacaaaattgcctcaatcatttccaaatatgcatgtgaattaggacgcatcaacaagaatcaagccaaggctattgtgcaagcaatcaatggggcaaaacacaccaaatgattatgatgatggatggctcaaattctcacaaaggtaaactcatcactttcaatttgagctttcaaaactatcatgacatgtagagaagaatcaaggatttcaagtcacaaaatgtcaagaacttttattttcaaaacaattacccatttcttgaacatatcctataattcaaagaaaaacatgcaaattcgtacgtgcacacaaaattgacccaaaatattaaactgaaaatccgacgaaactaacaacattaacaaattaacacaactaacaaattaacaaaaccaacaaaactagcaaaaccaaagaacact

SEQ ID NO: 8489 - DNA, 344 bp, Glycine max
tgtgcatccaataccctgatgaggatgtcccatatgttcttaaaactggactgattcatttgcttccaaagtttcatggccttgcaggtgaagacccgcacaaacatttgaaagaatttcacattgtctgctccaccatgaaacccctagatgtccaagaggatcacatatttctgaaggcttttcctcattcattagagggagtggcaaaggactggctgtattaccttgctccaaggtccatcacgagctgggatgaccttaagagagtattcttagaaaaagttttccctgcttccaggaccacaaccatcaggaaggatatctcaggtattagacaactc

SEQ ID NO: 8490 - DNA, 317 bp, Glycine max
  unsure (1)..(317): unsure at all n locations
agctntaacaatatcacagaaatgtttgacacaaatggctccactaatttgtcttaagtttgacttcccttgacttcatctaaacatttaataaacagatatccattgatgatgccttactcttgacagaaagcatagggaagtgatttaatattttccagtaaaagtatctccaaaaatgcaaaatgtcaccgttctttcaccctgaatgcaaatagcccagaatcttatctttcagacaaaggattaacacacatactggcaacagtataaccttagaactaaagagaaaagtgaaacactcatcatataacata

SEQ ID NO: 8491 - DNA, 339 bp, Glycine max
ttacagcagattttagtaatgacccactaacctataattaaaataacttaatgccattaacctagggaattaaaaaaacttaatggctgagtgtaactgaaattgtggcaaccaaaagtcacccccaacagccaacaagtcagccaccatttggtctcccaaaaggctgatgcctaggttgccaattgggcccttattacaacttgaactaaacctaactaaagcccttttagttgattaacccaaaacatatttttggtcagccaactttacaaggattgggccattatttagacaaactaaacactctaaaattgaaacaaagtggtgtcatttagt

SEQ ID NO: 8492 - DNA, 436 bp, Glycine max
gcaactttggttatataggtctcatcttcaagttttcgttgtctcggaatgggtagaattttacacttgatcttcatttgatgaatgtggtcaatgaggacatttaatgcttgtattaaatgcacgtctttttttcagagagtccactcttcgaagcttgtgtgttaagtattgctataggttgtcactaccttcatgttaaagcaagccttgtgcaccaaagctcttcttttgatagtggttgaggaatttcataccttgacttcatttattcttcataggatttgatagatcttatgagaatatttctgctaaagagatctcaaacacaaagtattaaatgtacgcttaactgacatatcagatcatgatcctagttgcctatcatctagaacatcagacacagacttctcaaggcatgctttaataaagcatt

SEQ ID NO: 8493 - DNA, 357 bp, Glycine max
ttcttgtgttgcttatgtagagcactgcaatgctattttacaatcaccggcagcacaccccgaattcataattgtcaacaatctcattcttcaccagaagcgcatttggctaccacgggatttccagatgatccccaccttgctcaccgagtttcacttgactccgacagggggtcacatgggcatagccaagacccttgcccagatatcagagaactttagttggccaggtctccataatgatgtgagaaaattcattgcccaatgcgttgattgtcaacacaccaagtataaaactaagaaaagtgtcgggttgttgtgcccgttgccagtgccgcatcgggcatgggaagaact

SEQ ID NO: 8494 - DNA, 257 bp, Glycine max
  unsure (1)..(257): unsure at all n locations
agcttttccactaatagaaatgccttgttttacacattcttcaacttatgagatgtaagntaggagctcaagagccataagctcgttgatttaatagaaaatatttgataagattaactgggtaaccaactgataaagatcagatgacgtgaaatatatattgaatatttatagcatgtgaatttatgtctaataacttatcatcttaaaaagtagaataagatatctttttaattttgtattataagaaaatgata

SEQ ID NO: 8495 - DNA, 257 bp, Glycine max
ctactcaagctacatcagatgctgcatatcaagacctcgtcctctcatggcagaacggaatgcactccttgcattgaatatccgtttaatggtcctacaacaatagacattgtgttccttcatagttagcagaatgtatcttggcttcaccatggacttcctcctatcacggataattgtcgtctcccctatagtcaaccgcaccgcatatggatgtccaactaatgacttggcctattcatgattatgcactccac

SEQ ID NO: 8496 - DNA, 420 bp, Glycine max
  unsure (1)..(420): unsure at all n locations
agctnttgccacaaaacacattgtttccaacatccaaggctctggttattgattaccaggcagtgtaatcgattaccagaagacaattttgaagcaaagggttntgaatttcaattttgaatcatgtaatcgattaccagatgtttgtaatcgattaccagcaatggcactttagaaaacactttgaaaagacacgacccttcaaaatataactgtgtaattgattactagaaacctttaatcgattaccagtgaagaatttcagaaaaaagtttttgaaaagacacatatcttcaaacctttttgaaaaggcaccaagggcctatatatatgtgtgtctcacttagaaaagcaggagagagatattctaagagaacttaatttccaaatgctctctcaacaactcttgggcaaacactt

SEQ ID NO: 8497 - DNA, 301 bp, Glycine max
taggttctaggagagcattcatccttagatcaacctttttctttttattccaactctattacttgcttttccgcacttagcttttcttttttcttaaatagctgcacatacatttttattttatacttacagtttttttaacttgctgcttattagatgactgtgtgtgttgctcttttcttaccattacaagatttcaccccataattaccccaaatttgggcaaatttgctttgaaccacaatttccctttatgaatgatgctctcctacaacctaatacaaagcttaaagagataaac

SEQ ID NO: 8498 - DNA, 418 bp, Glycine max
agcttttccagtatatatcttctttgttaaaaatattcatcagcctctccttatgctatttggtgctattatggaattccatgcaagcctgcaaagtgactgctctaaaaagttttgcttttgcaatttgaatatttgattatgttttaattagttaagtgcactctattatttgctgctaaacatataacattgatttaacagagcaggggcctggagattgcagttgatgtgtaggtgttatgctggaacttgctcgtggaatttctcaatggtctgacggattggagagagttgttatattcttatttaatactggtgaggaggagggtctcaatggtgctcatagcttcataacccaggtatggaattattgttagttgttaatacatttatattaagtagttttcttacttgc

SEQ ID NO: 8499 - DNA, 329 bp, Glycine max
tagtatgcataaataactttatttccttggtactttatgatagtattcagttgaaactcaagttcgtttgtcttctgaagttgaggtagtaggaacatctataaatttgatcatcatccattataataaatttattggtccgttgctttatgacaggatacaagtagacatcaggttcttgtccaacaatgaagatgattcctttcaatatgaaatcttaagtaatgtcttacaagttgatgcacatatctattatacttaaaaaattatttttattgtaacttcaaatgaaattcatttattcaatgtatctatactttttgtgtgta

SEQ ID NO: 8500 - DNA, 296 bp, Glycine max
ctttctctttaatctttattttgatcttctggaggaaaaaaaactttgaatattgggcgaaagctgtattttttgttgctgcttgacacaatcatgaaacgcatgcccatgtactggattactttcgatgtctcttattatgagaggtggtgcatttctaataatatttattttaagataactgcaattctgatcctatgatgatgtttttttatttattttagttcaaggggttgctatttacttgtgttttccggtacaagacgtggtggatgacgcatagaatgggcacttgt

SEQ ID NO: 8501 - DNA, 425 bp, Glycine max
agctttgatgcaacagttggagaggttattggaagaaggagatgatgcgctccatgagaggttggatcaaatggagaatatagatcataatgaagaagaaaggaggagaagagggaatgatgatgttcctagacaaaaccgaattgatggtattaaactcaacattcctctctttaaaggaaagaatgatccaaaggcctacttggaatgggagatgaaaatagagcatgttttctcatgcaaaaactatgaggaggaccaaaaggtcacgcttgccgccacggagttttccgactatgctcttgtgtggtggaacaagctacaaaaggagagaacaagaaatgaagagtcaatggttgatacatgggcggagatgaaaaggatcatgaggaagcggtatgtgccggctagttactcaagggact

SEQ ID NO: 8502 - DNA, 306 bp, Glycine max
ttgcggatttggtcttcaccggcgaatggatcgaagtgagtctgacatgaggaaaatttgatcatcctgctttgatgaatgcaaaaactggggcaaatgaagaggatgagaatgagggagaaaccctcgttgtgattgtcattcctacacggccaaatttcccatcagcccaacaatgtcattactcagctaataacaacccttatcattacccaccacccaatcatgcacgaaggccatacccaaatcagccgcaagacttacctgccacatgaccaatgccaaacaccacctttagcacaaacc

SEQ ID NO: 8503 - DNA, 397 bp, Glycine max
  unsure (1)..(397): unsure at all n locations
agttgccttgggtgatctactacgcttccagaactttggttgttgctcaagcaaattacactaccacagagaaggagctattagcaatagtgtttgctcttgagaaatttcgctcatatttacttggtactcttgttattgtttatactgaccatgcaactcttaagtacctgttgaagaaggctgaatcaaagcctagattgatcaggtggatgctttggctctaagagtttgatttggagatccatgatcggagcggagcacagaacctcgtggctgaccatctgagtaggattgagcgtgcgtctgaggactcacccattcgagatgattttccggatgaccatatgtacattctgtataagacttttgattccttcctcactcctatgttacn

SEQ ID NO: 8504 - DNA, 341 bp, Glycine max
  unsure (1)..(341): unsure at all n locations
tgaaggtaaactagatgccttggntaacctggtaacccaactgaccatgaatcanaaatctgcacctgccgccagactctgtggtttatgctcctctgccgaccaccacacagacctttacccttctgtgcaacaatctgaagcaattgaacaacctgaagcttatgctgcaaacatctacaacagacctcctcaacctcaacagcaaaatcagccacaacagaataattaagacctctccagcaacaggtacaatcctggatggaggagtcatcccaaccttagatggtcgaatccttcacaacaacaggagcaccaacaaacaactttttttcaaatgc

SEQ ID NO: 8505 - DNA, 409 bp, Glycine max
  unsure (1)..(409): unsure at all n locations
agcttctcaagcaagcttncatcaacacttgtaccaggggaagggaagcacttactcactatctactttaccatcgagaagagctaccaaatgacaaaaaaggtggcactagcactcatcaccttggcacaacgacttatgccctacttttagagtcattaaatggtattcaagatgaactaccctatcaaataggttttgagtattcctaaactcgcaggaaggatggtagcctggtctatcgaactgtcggagttcaacattcactatgaaccacacggccccatgataacacaatttatggctaactctctaacataatatgctggaaactacacaaccaccccatactggtggaccctttatgttgacagagcgtccaacatataatgaagcggggcatggatca

SEQ ID NO: 8506 - DNA, 334 bp, Glycine max
tcatgatgatgaaccaagcaattttgatgatgccaaaagcccaagtgattgattcaagacttcaagatcaagcatcaagaatccaatccaagattcaagagaagaaatcaagacttgaggttgtgctcattgctatgccggaaatgattcatgagaatggaagctgagaaagagatactcaaggttgtgcaaactaataggtgatcaaggtcgtactcgaatcaaataaacattaaaaatgcagtatctaggaagtgatcctaggtcgtctcccaacgagcaatggtcaaccaacgttcataatagatagtgataaaacagtaacaattggggg

SEQ ID NO: 8507 - DNA, 429 bp, Glycine max
agcttgtgccagatcaaaatgtttgcttgcaggtaaaggaggttgaacagaaggtcctgaaggtgagggctgaatttgatatcacccattgaggtatattgttggatttcccctgcagttactttttggtccaattttcctttatacaaatatgttcaagggaaatctgattagccagaaagcacaccgggtcgtcaagtatttaaaattaaaatggagtgatccaagtatcgaactcaaggaacttgcttattagacagagttttattcagaaataaggcattgttgtaacaacattgataaagaatggttaaaaacagaaataaactacttctatggtaaaaacaataaatgcaagtaaaaattgacagcaataggtaaaaagcgttgggtctttcaaacaaacaagcttatgcatatgaagatatt

SEQ ID NO: 8508 - DNA, 356 bp, Glycine max
ttttggagtagaaacatgggaccaactcattttatttcaaaaaggaagtcgtatctagtcaaggtctgagagaccatacaagtttcctaacgatttctaattatgtgggccattaagtctatcatatgctgacaatagccgagaagcccatgaatctcttcaggggcggagtaggtgtctgccatcgccttggccttggctaacaatcggggaagttcttgactcccgttcaaggtaagagcaaaccgatccatccacatggttgcctcttggtgtaaagagtcgatcacccttcctctagcctctttttccgcgtatacttgggcatattcgtccgcaatcctatgctcgtgggc

SEQ ID NO: 8509 - DNA, 423 bp, Glycine max
  unsure (1)..(423): unsure at all n locations
agcttctagagatcatccncttaacaacatcattggtgatatcttataaggggtaacaactagacattctcttaaatatatatgcaataatatggcttttgtttcaatgattgattgaatttgattgtaaagtgtttgattgtgtttaaatgtttgtgtttgattattgtgtttgattgtgtttaaatatttatgtttgattaatttttttgattgtgtttaaatatttgtgtttgattattgtgtttgattgtgtttaatgattgtgcttgattggttttgattgtaaagtgtttgattgagttttgattgtctttgataattttttttgattgtgttttgttgattgcttttgattgtgtgtttgattgattatgtttgattgtgtttttgattgacgtgttattgtgctcgttttcattc

SEQ ID NO: 8510 - DNA, 348 bp, Glycine max
ttaacctcattgtctctcacagtctttagatttgggagccaatccaatccttgtgtccggactctcagccacttatgatagccgccgatgatcccattactacttcccctaagctctctgtcctttcttcacgccgcatcccatgccttgcgaactccttggattaccctcgcgtagtggtcactgaaaccccgtgcgatgaaaggcgtgatgcttttgtctgatggcactcctctcatagggtagccaagctgtcttatggcgtggacgagattataattaatacaaccccttgttcccatcaagggaacatttggacatccttcgcatgaagatagaatcctgatc

SEQ ID NO: 8511 - DNA, 249 bp, Glycine max
agcttgcctgtccgatgcagcagtaatgatggcccgagttatgttggggaacgggtacgaacccggaatgggtttaggcaaagacaacggtgacataactagcctgataaatgccaaaggaaatcgtgggaagtatggttaaagctataagcccactcaggcagatgtaaagagaagcatcacgggaaggaagggcggtggtcaaagctcgcggttgagacaagaaagtgaaggaagcccgccatacca

SEQ ID NO: 8512 - DNA, 295 bp, Glycine max
agcatgacttacatctcccccgttcttcagctaattcttcttgatgttatcagaccctacatgatatacattcgacccctttttgaagacgactaccacctgctagctaggagcaacgacatctaacattatgttggcatgttgtcaaccccgcctagggttaactatgattgcttttatgacacaattgcacatgtcatatgtctcatatactaaaactaggctcaaaaaaaataaataactgcccactaattattgtataaaaaatcttactctccccttttgccaccatcaa

SEQ ID NO: 8513 - DNA, 435 bp, Glycine max
agcttcgaaatcaaatactaaccggttgaagatcgacaaacgacgaataacggcgaagaatgttcacgaaattgatcacagaagtgtctcagcttggattttcttcttctttctccttcttttcactaattttaagtgaaatatgcttgcccagggtgttgaaccttttttcctcagcccctcacgccattttatagcaaaaatgagggagatggttgccgcccagcttgcccaggtgtgcttggtagcttccacctgaagtaacccccctccagaatattccagatgggcccagggctaggcacacccccttaaattgatcagttcacccccctcacttttgtgtttttggctgatttccttccaaaatgtagcgaaactttacgaattacgcggcgatgagtgttaagcacctcaatttggtcaacaaaggtc

SEQ ID NO: 8514 - DNA, 342 bp, Glycine max
tgaaggcaaactggatgcattggttaacttggtaacccagctggccttgaaccataaatctgtacctgttgcaagggtttgtggtttgtgctcctctgctgaccaccatacagacctttgcccttccatgcagcaacctggagcaattgagcagcccgaagcttatgctgcaaatatttacaatagacatcctcaacctcagcatcaaaatcaaccacagcaaaacaattatgacctctccagcaacagatacaaccctggatggaggaatcaccctaatctcagatggtctagccctcagcaacaacaacagcagcctgctccttcctttcaaaatgctgc

SEQ ID NO: 8515 - DNA, 426 bp, Glycine max
  unsure (1)..(426): unsure at all n locations
agcttgcaatctatttaagtacctgcgtggttattaaaaaattatatcatactattctctaattttattattttgaattacctatattatttttatgttttaaacaaactaaattttttcttaaaaataaacacgttggcaattcgggttggcagggtctgaattctgaacggttttgttgcaaatattcttgaaaataacaatgtaaatttcgatcttctaacccgaatttacactttgaatagtaaacttgtatgtttgtgtaaataatgagaaaatatgtatgtttgaatatataatttttttataaatgtatgtttctcaaaaaatttctattcttgcaaaataaattataaccataatttaatataactctttatacaatatacttatgttttacgataacattaaaatntggaaattatt

SEQ ID NO: 8516 - DNA, 344 bp, Glycine max
  unsure (1)..(344): unsure at all n locations
tggaaggatgcttcaatggaggaaaagaaaaagggagggaatgaaagaggggggagcacgaaattgaaggaataaaagagggagagaagtggaactttgaagtatgtctcacaagactctcattcatcaaagttacaacaagngntacacatgcttctatttatagactacgtagcttccttgagaagctttcttgagaaaacntacttgagaagcttctttgaaaaaacttccttgagaagctagagcttagctacacacacccctctcataactaagctcaccttcttgagaagcttcctaaggagaactcttaagaaactagagcttaacgacacatacct

SEQ ID NO: 8517 - DNA, 417 bp, Glycine max
  unsure (1)..(417): unsure at all n locations
agcnttttatccaatgaaattcttggtggtgaagctccttcttccttggcttattccctagtggatggtgcctcccctctcctcttctcctttgccttccgctgcatctccatggtgtaaaatcaccattggagctcaaagatccagcctccatagaagctccacaagcaagcttccatcactttgtggatgagttatggtggactctggaggtgggggcggtgcgtctgttgcccgttgctggcagtccctatgctgttgtggtgcctcaccctacgcttgcctaagagcacagtacttcttgatgaaagccctgctaatagggggcctgatgaccttgctgggggtgacgggcactccgtagaactgatagaggcccataatcagagctggaaaccccaggaccctattggactt

SEQ ID NO: 8518 - DNA, 328 bp, Glycine max
ttgttggggggagggtgcatgccatttctgttttacgaatgctgtcccactgataaaactaactttccaaatgtttgcctatgcaggacatggcctctatgaaatcttcctcatagacgtccagcacagacaacgcatccgaaggaactagtgccgctcccgattatgacagtcaccgctttaggagcgctgaacaccagcagcgcttccagggcatcaacggatggacgcttctccgggagcgacgcgtgcagctcagggacgacgagtctactgatttccaggaggaaatagggcgccggcggtgggcaccactggatacttccat

SEQ ID NO: 8519 - DNA, 348 bp, Glycine max
ttactctcacaatatcttatgagaattgctagttgtggaaactagactcgtggcatggttagaggaacaaagtttaaaaataaaaatagagtggctaacaaaatttatttttaggaaaagtggtagaaatatttttgagaaaaataatcttcaaaactaatttttgatttcgggagcctatcatgcatagaaaagatgtaacattctgatttttgtaccttataaaatttctaacaaaaatagctaacgtttgaatgataactagggttatagcattttttcttaaacaaagaaaacttatgtcatttcattcataacgggaaccacaatacaaattttggaattcac

SEQ ID NO: 8520 - DNA, 386 bp, Glycine max
agctcaatacaagatgcaagtcaagattgggtcttcaaggtgatagataagacaactcatacttttatgctgcaaagtgtgcctgatgctatgtctacccaaaactactgtatcagtgtacaaattacaaaatcattatgaatggtggtagcattggcaagcatgcagggatcacattgttgcaaccttgcaaaagtttctcatacatttccattcatgcggagcccccaaaaggttttggattcatgcttaacaacctcctaatgtggattattgatgagtgttgattccacttcatatgatatgacaggtccatcatgaaatagatcatatgctacacatgtcatatccttgctgatagggaagtaactatcagctggcttcga

SEQ ID NO: 8521 - DNA, 334 bp, Glycine max
tgttgaggttttctgcttgtgtatgtattatatttataattaagtcgaagtgtcgaactaatatggtaactgaaatgaccctttatcactgatctattgatgaaggaggactgaagtttggcatggctattaaatgagaacacgtggagaccctttatctgagaccattcgttttaaccttgcgcgtgattttgctttctaatcacacactctcgtctcgtgtctgttaacgttgtttcttttatttgcttcggtggtggactggtggtcgatgaggaaagttgttgaaaatttgtgctaaggaggcagcataattatcttggtcacgactcgc

SEQ ID NO: 8522 - DNA, 412 bp, Glycine max
agctctaggtctccttcctcccacgttccgcttcttctttctcaccttcgttcttcttccttctagtctaggctggtctcaaaaaagcttgacccacggtcgtcatcaaccacaacgcatttgttccccatcgtcatcttcttcgtcggagtttcattgtgcgaccgcgccgccgtgggtgttgactatcccagccaagttgatggtggtgttgctgcctccgcgcgtcggcattgtcgaggtaagcatcgttgcgctgagtttgccagcgccgattgcagcagtggaagttacggatcaactcgatccgtaaggtttgcacgatcaacatgatttgaaagaagcttacggatcaacttgatccgtaaaatagagagttatatatgaatgtatattaacagtctatcttaat

SEQ ID NO: 8523 - DNA, 325 bp, Glycine max
ttatcagaaagtttgaaatttgaagcttgaaatttcaaatttcaaatttcaaatttgaaagttgtaattgattaccacttgcctgtaatcgattaccagtaatagaactacaaaaattcaaattgaaaagtcatgactcctcattacataactgtgtaatcgattaccagtgagaaaattttaaaagttactctgaaaagtcacatcccttcataagtttttgaaaggccaccaagggccaccaaagattcttctaagaacttcatcttgtatcttcttctctgaaaaagagaaaaacatttggactttctttaaagacttattg

SEQ ID NO: 8524 - DNA, 366 bp, Glycine max
agcttgtacagtgtgggaagaggatttgattgttcaataagaagaatctacttcaaccgatatgcccttaggcacggcattacataacatataaatgactctcggatagggaggacacttatctatagcatcaggtgctgtatcgaatctcattgcacaacaggggaaatggtccacgatacaactaccttttggggaggtcgcgttgatttccgaaaactgctcggccacagtcggacaagtgggaaatgttgtattaagccaaaaaaatttatgtagatccggatctaaatgtaggatatgtaagcgtactgtattaagaggagtagttatgatacccctagaccatgcccatgggggtggtga

SEQ ID NO: 8525 - DNA, 347 bp, Glycine max
tacagattgggaagatgttttgatttttcaatgttaagaatcttctttaaccgaaatgcccctaggcacgggcgttcctaacctggaaaacacacccctgaaggggggtcggtttgcttaagcaaatagagcctgagcctaaatattttcgaaacaggggcaatttgccaccctataatgagctttttggggagaacccttggtatcccaatatcgctccttcacagtgtgctaactgggaaattgtggagttaacccctaaaatttcggtatactcccgtccaaaaagttgctgaggcaacgtcctctcattacatgaatggttttaaacaccctggactctcccg

SEQ ID NO: 8526 - DNA, 402 bp, Glycine max
agcttctaagcaatcaaagatgagtttgcattagagttatttggtgttataatgcatgtgtgcttacgttcataagactatatctaataagtttctttgtctacaactagagatgcatggatcctccatatgcagtcatcatccttacactcaatagtcaccctacatttttcatttttaacccaccatccaaatccttcttgtattgcaaatcccttcagcacttccctaaaatgtgttacatttaaaaacaaatgcccaatctcaaaacagatcttgccatcattgtccaactcaaaatgttttccatgcgatctgtcctcctcataaatttcttccatgtctggaattgaatgcacaactgcaactccaatgacatccactgattcatcaaaatcactt

SEQ ID NO: 8527 - DNA, 339 bp, Glycine max
tcttatccaatgcacattcatggtggtgaagctccttcttccatggctaattcccttgtggatggagcctcccctctcctcttctccttttccttccgctgcatctccatggtggaaaatcaccattgaagctcaaagatccagcctccatacaagcttcacaagcaagcttccatcaagtggtatcacagcacaagagcttcaagtaggtgctccttaaacctccagtaattttttgctttaccttctcttccattgttgattcttcatttttctccatgtcttttgctaaatgttgttaacatgattctttagagtttccaccgattaaactcgcta

SEQ ID NO: 8528 - DNA, 397 bp, Glycine max
ctaacaagagttttcattgcccacaaagtttatcctctcaaaagattaagagtttttctgaactgaactgtcttatcctctcaaaaagattccttggtcaaccacttgcatattcaataaggaattttgattggtcttcattgtacaatctatcccttttaagagagatttcttcttctcttcttcttacttctgaaaagggattaagagaccgtgggtctcttgttgtaggggattcttgaacacaagggaagggttgtccctatgtgcattgttaatccgaaaagagagagtgaaagtttaattgcggaataatattcgtatcttaattcaatcccctcttcttctcaaggtaaccgaggccatttgtccaacatcctattcttgacaactcgct

SEQ ID NO: 8529 - DNA, 285 bp, Glycine max
ttgatggaagaaacatcaagagcacttgtatgaagcttggaaaatgaagaagaatggcttcctctccctcttggtgaacttgtgcaaatgaggaagaaccaggttccaaattggtttttaaagaaacatgaggatgcagtttaaggctgtcaaaaggaaacttgattaagcttatgttgacaagcttcattgacaacatgattgaccacttggcagcccaagtttaatgtgccaagctatgccatttaggagttattgttgctttagaaattttaaccaaaaatg

SEQ ID NO: 8530 - DNA, 428 bp, Glycine max
  unsure (1)..(428): unsure at all n locations
agctngcatatatatcaatatattaaagggtgtttgacgctctccactcagaatcaatgccttcattgtgaattgccttcattgtagacaatttaaccctgaaccagattaaagaacaacacataaaactcatataaagcggaaacaaaaaagcgtaagcttcaaacaggaaattggattaatactgcatgtggttgcaattctttttttaaaactccataggatcctaaaccctttttcattattatttggttaatttttatggaaacaataaatggaatatataaatatttatacattcgctataaagaaagaaaaaaaaaggtggtgcgcgcgtttggaacatacaaaaagaaagtgtttgatatgccatgggatcaacaatgcatccaacaaagagtaaacaagaattagacgcaaatcacatt

SEQ ID NO: 8531 - DNA, 357 bp, Glycine max
tgtcctttaggtgtttttgtttctttttacaaatcacaaactaagttcaggtctctgtggacgtgcacttcttacataagagggaataattatttatttactattattaattattaatgaatacatataggaatcaatttcaaattatgaaacaattaacactaacaataaaataaagctatatgtaattcgtacccaatcataatggatcacaatataaaaatatgctatgaccttacataaacgtcttccaatcttaaaagttaaaattgtcactgtgcgcgaatgacttcatttaagcaccacatttgacttgaagtttaattttataactacgcatgtatatacaaatatcta

SEQ ID NO: 8532 - DNA, 455 bp, Glycine max
gatcttaagtcacctgcggcatgcaagcttgcaaaccaaatgctcaccactattagaggagaaatctttaagttgtttcatataaacctcctcctctaaatcaccattaagaaaagttgttttcacatccatctgttgcaactcaaggtcaaaatgagaaactaatgccaagataatacgaagagaatctttcttagatactggagaaaatgtctttgtgtaatctattccttccttttgagtaaatccctcaacaacaagtcttgccttgtatctctcaatgttgcctaatgaatcccttttggtcttaaatacccatttacatctaatggcctttgccccattaggcatctttacaaggttccaaactttgttactctgcatggaattcatctcatccttcatggcatcataccataaatttgactctttacaactcgtggcttgatcaaaag

SEQ ID NO: 8533 - DNA, 356 bp, Glycine max
  unsure (1)..(356): unsure at all n locations
tgcttgtggagcttctatggaggctggatctttgagcttcaatgaggtcctttaatggtgattttccaccatggagatacagcggaagacaaaggagaagaggcgccatccactagggaataagccatggaagaaggagcttcaccaccaagatgagccttggaaggatgcttcaatggaggaaaagaaagagggagagaaagagagaggggggagcacgaaattgaaagaagaaaaaagggagagaagttgaactttgagttgtgtctcacaagactcgcattcatcaaagttacaacaagtgttacacatgcttctatttatagactangtagcttccttgagaagctttcttg

SEQ ID NO: 8534 - DNA, 437 bp, Glycine max
agcttccacaacacccaagcaatacaaaatccaaacatcatgaactatcaaaaccaagaaaacagggcaaaggcagaaaactctgcccaaaaacacaaaccaataccacagctttccttactcaaataccccagtaacattctcttcgttccaattcgttaaccgttggatcgactcgaaaattttactggaggtccctagtacataaatctacattgtggccattgggatctgctagaaaacgtccagaacccaatctgtactactctttccacaaccagcaaatacacatcattttctgcacaaagccaaaattctgctgcacatttcaccagcaaaattctgcataatagtgaagattttcgaaatcacacttgccctcgtccaattttgcccaaattgaatcctacaagtcctaaatcatgtataaatcatgt

SEQ ID NO: 8535 - DNA, 346 bp, Glycine max
tgtgcaaatcaaatcactcctacatttcatctctagcatgcattttctttctttacccactcctcacgtttggttttttatggaaaaacaccataactaaacgcgccgcaagggatccctatcgcaccagatccaaatctagaacgatgggtgatcaagaggagacgcaggaacagatgaaagccgacatgtcggctctgaaagaacaaatggcctccatgatggaggccatgttaagtatgaagcagctcatagagaagaacgcggccaccgccgtcgctgtcagttcggctgccgaagcagactcgactctcttggcaactacgcaccattctccctcaaacat

SEQ ID NO: 8536 - DNA, 433 bp, Glycine max
agcttaggaacccaaacttgtagcttcaatgcaaggaaacatgcttatggctaggaatccaaaatttggttttagaattagaaaagcatgaaaattaagacttgcttgtgagagtttttgctcgaatttgggctgccccatgtttgatactttgcatagaggtagcgtggaaaacaccttgcaatagtgtgtatacataggtaaatataaggggcatgaaattctttgtaaagggtgaaggaatattgaggtcgcttcctaaatgaatgtatgatagcacgggattcccttttgaatgcaagtatgtgcataatgtaaatagcttgccaatatgcataagtgtgagtgaaacaatgaaagttggtagggtgtatatatttcgagtgtgtgtaggtagtttgtgatagcaaatgtttaggatatagttaagtgt

SEQ ID NO: 8537 - DNA, 345 bp, Glycine max
tctagccaaatggacttaccttgaattaattcctttgatagcccctttgagcctatgttcccctttctttgttttgaagctcattacaagccttaagtgaaaaaccatgatatcagcttacccttaaggaattttggagctttggaattgttttgggaataagttgggaataagtgtggggggtatgtttcattggaagatataatttttggccatgcttaatgttttattttggccatgcttgatgtatttgtatatttcctagttcttgctttaatcttcaaattcgtattgttaaaaaaaatttcaattgctgcaaattctgcaaattcgtactgttcaaaa

SEQ ID NO: 8538 - DNA, 436 bp, Glycine max
agcttgtggattatgggtagtgatggaagggtgagaaaggatggtagggtcaataatgttaagagaaagcagttctcataaaaaatgacattttgagacacttcaatggttcgtgtatgaagattgtacacaatgtaacctttcttgtgggatttaaatcccaaaaacacacaaggtaaggctctaggatccaacttttttctgttagcattgagagtgctaatgtaacatagacaaccaaaaactcaaagtaaattaacatcatataatgcagaatagagtttttgatatggggactcatttttcagaaaatttgtaggaatgatatttatcaaagtagcaacatgaagtaaagcataggaccaaaaaatgtttggaaggttaaattgaaacaaaagggcccgagttacattaagtaaatattgatgttttcttt

SEQ ID NO: 8539 - DNA, 345 bp, Glycine max
ttggtcctttgaatcaattaagagacaaatcatagattcaaggtttagtcacatttaaagtttatctcccccctccaagagcgtattctaccgggataagtgatccttcatcacaaattggttcgataaattaaatagaaactgattttggatatatagaaaattgattcaataaagtagccaataaggtttagtttttagaaaaacaaaaccaaaacatgttcagccatactggatatactatcaacacatgtatgcatacagcttctggatttccaatattcggcactaaattaattatttgctgttgattttttttattttttatttggatttaagagtttg

SEQ ID NO: 8540 - DNA, 345 bp, Glycine max
gtgatgaactatgtgtggcataactcccttagtgttatacagtctatacaaatgagcttattacaattctactagacttagagtgataacatgcaatccccttgagcccttacctatcactctctcttcatgtagagactctggaatgccaacaggttcttccttttccatgtactagaaacaaaactgattagttttttctgcaatgtacctttcaacaatagatgtttcaggacaatgtagattctttgtatacctttttaagatcttcatgtatcgcttaacctggacatgcatcgctataaatatgaccacgacatctaactttcctcaccatatgaacaa

SEQ ID NO: 8541 - DNA, 262 bp, Glycine max
tatggccgtctttatatattatgaacaagagagtaggtatctggtgacacgcacttgttgcattggacggaattcaaagttatctagtagtttgatgtctttaggatatcattcaggtaatgaattgccaagttatgaagaaactctgactaataattcactaaagatatccatggtttgcgatctatcatgatgcattgtaaacaaaacatctgcattgagatgatttaatcgtccttttatggtcatccgtacactccac

SEQ ID NO: 8542 - DNA, 418 bp, Glycine max
agctttctcggggcctattcctgcgaaggcaaacatttggaaagttagttctaccagtgggatactattcttaaaacaaaaatgacatacaaccttctcccataaatacaaacatcaatgtaaatttagagcaagcttatgcgcatatttccttacaaacgttctcttgcacaagacattctattaaccgaataaaatgcacccatatacaatcaaggcagcttcgttacctagattatttacacgtacttgcaaggtgtattcgttacttacatcacacacctgcttggctaaattcacatacatgcatactcaaagcattttggggtaccaaaaattgcacatgtgcacatcttggtatttctaatacctatacatacacaaacttcatgatgaatcttgactatctacacaataa

SEQ ID NO: 8543 - DNA, 349 bp, Glycine max
ttgagggtgcgtagcccaccatcttttcatagtaaagtatcgataatgtgtctaccatcacgattatcgactccctttccatcattgggggtaccacttgggccgccagatccctccaccttttaagcgtgttctttgaaagatccgtccccctttttgcaaatgttctatagttgcatcctatccggaaccatatcaaaattgtactgatactgcctaacaaaagcaaccattaggtccttccaagaatggactcgggaagattccaagttagtgtaccaagtaacagctaccccagtaagactttcttggaaggaatgtattagcaattcctcatattttgcgtatt

SEQ ID NO: 8544 - DNA, 111 bp, Glycine max
actcactgaaattaaaacgtgcttgaagttaggaatgcttgaaacattatgtaacattaatgaattggttaaccaaactgaaccaatgacaaggatatgtataacatcatt

SEQ ID NO: 8545 - DNA, 339 bp, Glycine max
ttgggaggaacatggacaaggatgctatccgaccatttagtttctagacttcttggacgttggtcgggatctacatctccagtatggcagtgcatttgttagggttggcttcaatcccccggtgagtgatcatgaaaccaaggaacttgccttcacctaccctaaaagtacatttttcaaggttgaagtgcatgtcatatttgcggaattccccgaagacttcttctaggtttgccacatgttgagttatgctttgaaacttgatgaccatgccatccacatataccttgacatttagtccaatctactgtcataacttgcgaatgatgatgggagcct

SEQ ID NO: 8546 - DNA, 200 bp, Glycine max
ctaatgtatcttaaacgctatgtacgaacgttcacttattggactatgaatactagaatgacatgtgactctcatttataagaataagaggtacaggtctccttagactaaaatttaaatatatgattttgatgactcatcttacgtttcttatatataatatcacacatatcaaaatgaactcttctattagattatga

SEQ ID NO: 8547 - DNA, 342 bp, Glycine max
ttcatgggtcaaatctcttaaataaatagttgaatcaagtgggttggattcccaggaatgatggctttatgtccttgaaaactactaaagctttttggaatcctatcacttatcaacttcccatggccaaagtgaatagaatatctcaattgctcaaagactattgggcaccagtctaaaaaatgtaagaaattctaaaaaaaacagtatacttgcaatatcacatggagaagaacttgatggcgaatcaagacctgactgaacttggttttaagaaaagtaatgtacaaacttctaaagggaaaattattgacatgattgataatcgagaccaatgaaccc

SEQ ID NO: 8548 - DNA, 426 bp, Glycine max
  unsure (1)..(426): unsure at all n locations
agctttatgtatattctcttttctttntaaaataattaactcttgctacgtacttatctttacactaattgaggggaggcttctgtgatagtgattatgctgaataattgatactataatcttgacaatactcttaaattggaagttaaggagaccacttacatgatgaggaagatagttttaggtataggctgagaccggctagcaaaacttcctctaaaagaccataaaagtactaattactcccttttacttcgcaattactgttcctccctaatcaaactagttaaacattatgatccaaatcaacttatggcccggttttttggaagagagttattataattgaatagggttggtcagaaaaagaaaaaaaaattgcaaactgaacagcgtttgtaagctatgtccaacagataacaataa

SEQ ID NO: 8549 - DNA, 317 bp, Glycine max
tcctcagccacttcatgtcagcagcaagattcttcaagtacaaggggtgctttagttggtaataatcatttagatgatgttgacattggtaatatgcaggttggaagatccaaccaatcttctgttgctggcccaaataactgggccggttttgctggtgctaatgaggcttcaaagggacctcctcaggtctctgctattcaacatgagttgcctatagaaagaagagagaatattcctagtcagtttcaaaatgttggttacaattgtggttcacggaatcaaagatctgataatcacttgtctttttctttaaa

SEQ ID NO: 8550 - DNA, 412 bp, Glycine max
  unsure (1)..(412): unsure at all n locations
agctttaagcttctccaatggtgggtttcttggaggagaggaagtgaaatgaaaggttttcttttgtgagaagtttttgaatatgagggtttataatgggtttttttacccttccacttctctctatcttccacttctactaagcacacctacctctttcataaatcaaaatcccatcccttaaggcccaaacacaccaaaaacttactcatacacataaaacacatactcttgtttccttgcttggttatggagtatcctctattaaatgtgttgtaggagcatagaaatttagctctccataaatcaacactttaggtccttttcctttagatttcatgctaagggttttctaacttgtaaattgttntcatcttgggtggttaatgttgtggaaatgtttaatatgatt

SEQ ID NO: 8551 - DNA, 259 bp, Glycine max
ttgcatccccctaagatccattaggaaattacttgtgaaagagagccatgagggtgggctcatgggccactttgtgatagacaatacccttgtcttactcaaagaaaagctctattggccccatatgaagaaagatgttcataagcattgcactacgtgtgtggcttgtttacaagccacctctatggcgatgcctcatgggctattcacacccttacccatcccatctgcaccttgggtagacattattatggacatt

SEQ ID NO: 8552 - DNA, 415 bp, Glycine max
  unsure (1)..(415): unsure at all n locations
agcttgtgcaaatcaaatcactcctacattttatctctagcatgcattgtatgttggtctcgtcctttgtcacgggaagccggaaggtccatatcaccttcttaattgtacacatggggcactgcgccccaaatgcgtaagtaagaagagataattttccgggctctcgtgtccgtaaaatgcattcatatcatgcatcgcataagcatctcttcataacatcataatggacatatcctgcatttgtccgttatcatattccagcctcacattttgcatgagtcatggcatcatcatgcatatgcgttcaacaaactttttgatctgcaaaattgcataccatttgttttcatgtttgctcatccttgcgttntcctctacaaaacaaaaacaaaaaaagggggaagcgtgaaac

SEQ ID NO: 8553 - DNA, 331 bp, Glycine max
tgtttaagaagagcgagtcctaattccacaatatgtttgtgtttcctttccactacaccattttggtgatgagtgtgtggacagatcaatctaagagtgataccttggcttgctaaaaaattagtgagaggtctgaactctcctcctcaatctgtgtgaacactcttaattttggagtcaaactgaagttcattagcttgaactgttgaaaaatggtgaaggtttctgacttatgtttaagcaaatagatccaggtgaacctagactaggcatcaacaaaggttatgtaatagtaaaaaccatttttggaaagaatgtggacaggacccca

SEQ ID NO: 8554 - DNA, 405 bp, Glycine max
agcttgaccaatcccgacccaacccgggcatagtcggtcagtgagaacctgtgatgtacctaaacaggcgagctcctggcagtcaacagataaaaggaacaaagaccacaaagcaaggaggcttgtggtggctggccagctgtgaattttgtgtgatatgtggattatggcctctggtaatcgattaccaagggtgggtaatcgattacaaggcttaaaagtgaagacaggaggctaagatggtctctggtaatcgattaccacggggtgtaatcgattaccaggcttgaaaacgaggtcaggaagccatgagggcttctggtaatcgattaccaagggggtgtaatcgattaccaggcttagaaagggggctggaacattgtggaggcctctggtaattgatta

SEQ ID NO: 8555 - DNA, 354 bp, Glycine max
ttacagcagattttagtaatgacccactaacctataattaaaataacttaatgccattaacctagggaattaaaacaaactaaatgactgagtgtaactgaaattgttggcaaccaaaagtcacccccaacagccaacaagtcagccaccatttggtctcccaaaaggctgatgcctaggttgccaattgggcccttattacaacttgaactaaagcccttttagttgattaacccaaaacatatttttggtcagccaactttacaaggattgggccattatttagacaaactaaacactctaaaattgaaataaagtggtgtcatttagtcctccatttgggccatgatacaa

SEQ ID NO: 8556 - DNA, 412 bp, Glycine max
  unsure (1)..(412): unsure at all n locations
caagcttgatggtgttgagtagaaatcacatgtttgtcatcatcaaaaagggggagaatgtgaatgtatgcatacatgattttgatgatgtcaaaagaagaatcaaacaaggcttatttttcttcaagattaatgcaagattttttcaacaaacaaagccttgattcaagatttcttcaagatcaagccttgcctcacaatgaaaggtttcaagtcattcaaggcacatgtaatcgattaccaatacatgtaatcgatttccaatggtttgaaagtgtgtaatcgattacacatcgtatgtaatcgattaccagagactctgaacgttgggaattcaaattttaaatgaagggtcacaactttntaagaaaaacaactatgtaatcgattacactaattctgtaatcgattt

SEQ ID NO: 8557 - DNA, 354 bp, Glycine max
tgaaagagcccgggtagtcaaagagaagttcaagtccatagccatcaaagtctgaagagagtatgatgaactaagggacgttaatatggccaccgatgaagccttggaatgagaaaccaagaaggcccgaaaggaagaacacgaccaaaacaagttttgaggggctttatagggcagcaatagtgagctcaaactctgaagaggtgaaaggaatcatcatgggtcaaaggcatgatctggaaggacaagctaaaggcttgccttaggtcgaaaagaaatttgtcccaacagttaaagtgagactgaagggaatatgtgggccatcatcgatgagtgcaaagagaagctaaatct

SEQ ID NO: 8558 - DNA, 433 bp, Glycine max
agcttgcggactataccttcgaccgaacacggccgtgtttctatctaggcccggattcaaggcgggctgcagcaccggctccgcttccctaactgtactggaggcggttgcggtggctttatcctctatggttatctggagttgtaacatgacctccgagatggaagccatttgatcttttaaggccgatagatcggccttcatctgttcctgcacgccctcttcattatccatttttctggatcgagtgttataggggtgccttggtgttttcttagttatgatgaaattcctaaagaaataaacaacggtgagtatgccaccaaaacatgagtatgcaaatggatgatcggagcacttggatccaccccaagatttttagataacgtaatgagtccagaacttctcattttataaaaagaacaaagctttc

SEQ ID NO: 8559 - DNA, 349 bp, Glycine max
tctatataagctgaaccatgttatcaataaacacttgttgagtcttattcagaaaattagagtttatctctttattcttagtgagagtgattctcctaaattcttgagtgattcaagaacaccctggctgtatcaaaggactttcacaacctttgtgtgttgccctcgccggaaagagtgattctttccttcctttcatcttcaaccttgttctttcaaaccacaattccagaaaatccacttctgcccagaattatctcgtggccataactcccattttacgcactcaaattaagtgattcttgagcctaaattgaatttcaaaacgagacctctcacctcgttttgg

SEQ ID NO: 8560 - DNA, 435 bp, Glycine max
  unsure (1)..(435): unsure at all n locations
agctntaagttctttccacgttntgatttttttttttttcctactctttctttaaatggggttttttctatggtcaaaaagtattggctttgcttattcatcatcaaccacttgattgggttttaattattttattccctaacaccaatgttcccttcctcttgaagctccctcaaaagtaagatatcatcaaccacagatcgacaaaagaatggaaccaaaagggttcatatgaagaacaaaatgactcctagagaaaaaaaaaaaaaaaagaataagaagaagtttgcattgtgcatttgtgctcatctggggtagaattatctgtttttttaaaaggagaaaattggcatacaatttcttatgtatctttggtgttgntaatgataattaggtaggtacatcaaatccataaaataaaaatttgtattaaat

SEQ ID NO: 8561 - DNA, 351 bp, Glycine max
tggatttgcggtgagagtgttgttattttccatgttgcaattgagcactccaagtccatggttaggaagaggagcaaaaccctgaaaagaaaggtttttggctggggatgatgtaacaacatgacaagggggacaaaaacctaggatatgtgttgttttgtgtctcttgagggaggaagagggtagtgtcaaaggagctctacctctctttctagtcctggtgggcctggcttgaagctgtggccataaattcctaaggtaaggagattgattgatcttctgggagagagaggaacaagagccctcactcatggacgagtttggagaggtttcaagctttggtgctattgg

SEQ ID NO: 8562 - DNA, 438 bp, Glycine max
agcttgcatggattgggagaaatcgaccttcgaggaatttttgcaattgtttaaatcaggtggcccctaaaagaaattatgcggatctttggatatggaggagttgtgcggtagggacttatactatgaagtaggcttattgctcggtgcaacctaatgaagatcatcaacatgctcctttgttcaaagtcttatggagtattaattgcccatcaaaggttgttgttttcggctggagactagtgtggaatagaattcaatcatgagttgagctaaagacaaggaacattttgggaccaactcaaagcatcaactgcctattttgttggaaggaaaacgagacagcctgtcaccttctattcttatgtagtttcacttatagagtgtggtagcatatatgtgtgtgtgtgtgtgtgtgtgtatgtgtggattgggttt

SEQ ID NO: 8563 - DNA, 346 bp, Glycine max
  unsure (1)..(346): unsure at all n locations
tgtgctacatgaaattcttggacacttagatttatcaaactttcaagtttgtgttgaatgtattaaggggaaacaaacaaacaaaaggaatttatgtaccgagagaggtaaggatgtcttanaaataattcatacaaatatttgtagtccctttcctatctattcatggaatggacaaaagtattttattatgttcattgacgattactctttactctataagatccttatttgagacaagaatgcaagaatccttaaggaagttgagtttgaaggagagggtgtttgtctttgaggaagaatctattattgacaacgaataagtctttgcacctaccattgttta

SEQ ID NO: 8564 - DNA, 422 bp, Glycine max
agcttaacaaaaggcatgcgaagtgggtggaattcctagagcaattcccttatgttatcaaacataaaaagggaaaaggtaatattgtagccgatgctctttctcggcgtcatgcattactttctatgcttgaaacaaaattgattggtcttgaatgtttgaaaagcatgtatgaaaatgatgaaacttttgcagaaatttttaaaaattgtgaaaaattttcagaaaatggtttctttagacatgaaggctttcttttcaaagaaaacaaattgtgtgtgcctaaatgttctactagaaatttgcttgtttgtgaagcacatgaaggaggtttaatggggcattttggggtccaaaagactctagatacattacaagaacatttttattggcctcatatgaaaaaggatgtgcagaaattt

SEQ ID NO: 8565 - DNA, 342 bp, Glycine max
tcaccggatgacgccgatcgaacattttctaaccgacgtcatgcgaatttcgctcagggattgaattgaaaactcgatgagcgacatctgccgtgaatgatcgaccgatatttttcagccgacattgcacaattctttttacaaaagctcgctggtcgatgatggtgcttttacggccgagtaagccctcttgacttggtgatgcataaaaaagttacaatgtactcccgctacgtttttcgtgcgagtccaaccgacattgtgtgtgcgcctggataaccttaccccacctttgcaaaaagaatatttgctgaccgacttcatgcatatttcattccacga

SEQ ID NO: 8566 - DNA, 416 bp, Glycine max
gagcttctaagaattttctaaatagcttctaaggaagctacctagtctataaatagaagcatgtgtaacacttgtgggaactttgatgaatgagagtcttgtgagacacaactcaaagttcaacttctctccctttttcttccttcaatttcgagctcccccctctctctctctctccatctttctttgcctccattgaagcatccttccaagcttcttatccaaggctcatcttggtggagaagctcttttttccatggcttattccttaatggatggcgcctcctctcacctcttctcctttgtcttccgctgcatctccatggtgaaaaatcaccattgaaggacctcattgaagctcaaagatccagcatccgtagaagctccacaagctagctttcatcaatgagggagac

SEQ ID NO: 8567 - DNA, 344 bp, Glycine max
ttcatagtgatcgggtaaagaatagatgatgaaatccaataaggcgtcttccaagacaaggcctcaaacacctcaaataggtataagagtaacaacaactccaggaattataatgcttagacttcacaaaacaaaacctttcttgctcttgtgttgggtccaaagcttggtaatcaattccatcactcataggaagaaattcaatttccacttgctttccatcatttgcctactctatggtcatgtagtcgttcacttatagaaaatccatatgtattcgagaaattcatccacaagagaagggaagtgcttacaagcaagaaaagaagaagactttctcattg

SEQ ID NO: 8568 - DNA, 424 bp, Glycine max
  unsure (1)..(424): unsure at all n locations
agcttcgaattaaaagaggcgttaatcttgcaattcgcgatgctcgtaccagcgatccgtatgtcgtcgtcaacatgggtgatcaggtttgaatttgcagtttgaggaaattttgttcttctaggtgtgtttgatttagaggaaaggaataaaaaaaaaagattttttttatcaagatagatagtaagagatgtggatcacgagataccacgaaatattgtatacattttttttgttatataattgccctttgaaacaaacacaacctgaaggaggatttggtgaactggggttgtttgagttgagagacgggagcaaatcaaacaaatggttttttgatacaactattttttgaacattttctacgagattttttttgattntttgtggtattatgggttttcttaatatatttcttttggga

SEQ ID NO: 8569 - DNA, 343 bp, Glycine max
tcttccggaagatatccatttactttctgaagaagctccttccggaagttagttttttttaaaaaaatattttattttgtaataatttacttttaatgaataaactaaattataaaataattaatattattatacataaataattaaataattagtgaacgtaattatgactaatatttataatttttttttacgcgcatgtaaaatattaatatattaatttgtatgacaatttagtataatttaaaccataaaaattaattaattcgtaaattttattaaaaatataatttttttttattatgataacatttaatttctattacaaaagttaatatataat

SEQ ID NO: 8570 - DNA, 414 bp, Glycine max
agtctggcggggagatgttcaaagacattgttcttgtgcaccaaatctcattttccagacaacattaattcccacactctcaaatcattatcgccaatatcaatcatcttcaaagttccaccaaagcaccctaggtattcaaaacttattatattcatagcatcaacatcctttggacagtcaatgatgctacaaaacatgaaaatggggccaaacacaaaaacaactgtcctccacataaaatatagatttcctccaaatgcgaaacccaacaacatccattgaggagcaaaatcaaatccctccgagctttgaggagaaaatatcaacttcaaactcatgtgttcttcttagagaggatctcataatcaccacccaaaagtagcgattacattttccttcttcgagataagt

SEQ ID NO: 8571 - DNA, 346 bp, Glycine max
tcgtaacctcgtggttattctcccctttgggcatctttaaaaagccaaacttcgctggtaatcaacaccagatggatgaataaaaatctattggaactaaagttcacacaatcattcatgaggcgaaaccaaatcttattcaatcataagatactgcgtcccacatgccggaagatagtgaaagttcaaaaaacgataacttaaatagcatagcctaattctcggctgactataaaagagagtaataatctaaagctaagaaagtggtggaaggtcgaagcaccgatgaagatgagtcacatcctcttcaagctggagatgcgggtctccatgccttcgtagcgac

SEQ ID NO: 8572 - DNA, 421 bp, Glycine max
  unsure (1)..(421): unsure at all n locations
agcttctcctccaattttctataaatagggggagaagtgaagtagaaaaggggttcagccccttacgcacttctctctctttcgaatttgcttagaaaaattgtttccgtgaagaaaatccaagtcgaggcgcttccgtaacgtttccgtaacgtttccgtgagtgatttcgtgaaggttttcgaccgttcttcgacgttcttcattcgttcttcatcgttcttcagtcttcaacgggtaagtacctcaaaccaagctttttaattcattctatgtacccgntgggggccacatttggtttcatgtatttttattctcgttttcatttactttttatacccccttttgacgtgcttaagccatttatttaagtcatttctcgcttaacctanaaataaaataaatttccaccgatcgtttg

SEQ ID NO: 8573 - DNA, 345 bp, Glycine max
tctagccaaatggacttacctagaattaattcctttgatagcccttttgagccttgtttccctttccttgttttgaagctcactacaagccttaagtgaaaaaccatgatattaccatatccttaaggaattttggagctttggaattgttttgggaataagtgtggggggttttttgtttcattggacaacttgttttgttggctatgcttcatgatgtattttgggccatacttgatgtacattgaatattggttaaatgttggacatgctgaatgaaatgttgatctcaaatgcttaaaagttaaaaaaaaaaaaataattggaaaaaaaaaattccaaaaa

SEQ ID NO: 8574 - DNA, 415 bp, Glycine max
  unsure (1)..(415): unsure at all n locations
agcttatcatgttgntgctgctaccatatatagatgcatttccaaggtaccttatgactagctagttagaactaaccttcttccaatctttcccatatttacggtaagcttcatagaaatgttcaagctcatccttattccattgtggccctaacatgtcagcccatcttctcttctgcaaatcattgaaattaaaaaaaaaaacaattataagttgaaatataatccataatgtctgaccaagttaaccaaacttttttcaatacctaagtatacattgacaaaattctaaaaaaatattataaaactggaaaatgagtatggaagtactctaaatgaggtcaatacttacagagcaaaataagtatggaaatactctaaaactggaaagaatatatataaagattgaataaaa

SEQ ID NO: 8575 - DNA, 324 bp, Glycine max
atgtactttgggtatgttataccatgttgctccacctatctctaacagaaataacgccggcactgcattatatgccgcagacaaagaatacttatgttctttagtacatattattcagggctttgcctactttccactgctttattataaggtccaactctttctttgtacattgaatgtgaacctcataactctatatgcgaaccccagaaagaaaccttggcctatccccaatttataaccgattccagacctgagtacctatcaacatctacgaaaatattgcactaatgctatataatgcattaacatccatcacgacta

SEQ ID NO: 8576 - DNA, 418 bp, Glycine max
agcttgaaggcgtgtaacccatcatcttctcatagtagaacattggtaatgtgtctactatcattgttatcatctccttctccatcattgaaggtgctacttcagctgccaagtccctccacctctggcgtattccttgaatgactcatgctcctttttacacatgttctatagctgcattctatctggagccatatgcctaatgaaagcaaccattaggtccttccaagaatggacttgggaaggttccaggttagtataccaggtgatggctgccccagtaagactttcctggaagaaatgcatcaacaatttttcatttttcgagtatactcccattttcctgcagtacatcttcaagtgattcttacggcaagtagtccccttgtacttaacgaagttcgtgttggatcaagtg

SEQ ID NO: 8577 - DNA, 333 bp, Glycine max
tgccatgatgcttggaatagtttatcctttgaagataaccataaccatgatctgatttttaccaactccatcaccttttcatggcctttactgccattattaaagataatggagtttctatgaagccaaataatccaactcattgtgcaccacacaacttcccatctttgatttgcaattgatccaactctcagtatatagtgctatagatagtgatcctgcggttggttatgttgagctcccatgactcccaaccatctaaaacacaaagaccacacttcctgtgaaaaagtgcaaccgaggaaagaaatgtgtacactttccaaatgctga

SEQ ID NO: 8578 - DNA, 428 bp, Glycine max
  unsure (1)..(428): unsure at all n locations
agctngcatctatcggtgctcaaaatatatgcattgcttggtgggattctcccccaaattttattttacaggatctcattaggtacaaatatgagcttcctcagtataagttctcttagttttgtttccttgggctcggtttggtcctcccaagtgcttgtttagattttcttttatattgcaatgatatctgaggtgtgtgttttctaagtagatgttaatggggtgtcaacataattgggatgccatcttcatcttcctcttgcactcctcttcttttttattaaaaaaaaaaatcatcgtaaattcacaatcaacatcaagaacaaaccctcgtctaagcataaaaaaatgaaaacttttaaatccaactaatcaaacaatgaggacatgctctgatacaacttgttagatttctaatctttaat

SEQ ID NO: 8579 - DNA, 352 bp, Glycine max
tacccaacatccaggtaattcaacattcaaatcatcacaaactacaaaccaagcaaaacagggcaaaggcagaaaactctgcccaaaactcaaaccaaaatcacaactgtttctcacttaaagaccccaataacatttccttcgttccaattcgttaaccgtttgatcgactcaaaatttttactggaagtctctagtacataagtctacattttgaccgttgggatctactagcaaccatccataacttattctgtactactctttctagaaccagcaaatacatagcattattctgcacttatgcaaaattatgctgcacatttcaacagcaaaattctgcataaagtgc

SEQ ID NO: 8580 - DNA, 432 bp, Glycine max
  unsure (1)..(432): unsure at all n locations
agctntacaacatttgaaaacccagcttgaaccaacaagggttcaattttggaatttggagaaggcacaacttaagcatatgaatggattacatcgtctgttacctgcagaaatcaaaataataacaatatcattatttatgaatcataacataactaacattcaattaaacataatgtattacatacttctcttgatctatgaaggtgttgtttccaaagaagaggagtaattgtagatgccatggtttaggctttagtactaacatcaagaaaaagttaaaaaaggatatatgagaacgagagaaagtgaatctgtgagttagtgtatatgatggaaaaacatgcattgtatttatagaaaaaatctaacagtaacacagttcatttggttggatcttggccatttgatttatcggtgggatcttggtca

SEQ ID NO: 8581 - DNA, 330 bp, Glycine max
tctgattctgaggtgtaagagagcacataagtgatagcatattaggtgggactccccgttgggccatcatttgataagcactgcatcatgatggtttttttgtgcctaaatgatgtgaaatgcttgctgataatgagtatgtgtattgggtaggtagttaagtgctttgccgatatgcatgggtgctggaagtggcacgaaaaatgcttcttaaatgggaacatatggcgtgaaattactttttataatatgaacaagtaatggacatttctgcctttactctgaatgcataattgctattcaaatgaatctattatttgcatagcatga

SEQ ID NO: 8582 - DNA, 434 bp, Glycine max
agcttatacaagtggattcaaactttctaacttgattgtctttttttaaaaatcaaacaggtcccttaagaacaaagtttaaccaagttttcaagttatacttctattgtatctattaagcacataaaatgaatgaccaagaaagtcaaattacttgtttttgcatctgcaaccatcgcggtccataataatcatattgttgtccatagcccgtatgtgctcaaggcaattacagaacacaacattgataattcaaccaacatttctgtacaaaagcaatttgaattggtacaaaagcaaggcaatatctaaacctacctctctgggcacaatattaacaaaatcaattcaccactataatattcatcaacatcaacatataggtaacaaaatagaaaagaataagcacatgcacaattataatgacttgaaat

SEQ ID NO: 8583 - DNA, 348 bp, Glycine max
ttacattgtgtcaccaaagtctgtgaatactgactatcaaagtgtagatcccttgagccttgaggaggtatactaagctcttggatcaattgtttgtttctcctaaaaaattgtaagtatcaaaacctcactgatcaaaatcttaaaatcataagctgagaaatatgtgcatcttaaggcccgtttacttcaattttcgtttcctattttcatcttcttattgcactttttaattacaaatttttcaccttgtattcaatctatttttcattttcaaagatttatacgtgagacaatgaacgcaactcttttttgtttgtttactttggttcctgtataaattttttg

SEQ ID NO: 8584 - DNA, 438 bp, Glycine max
agcttgcttgtggggcttctatggaggctggatctttgagcttcaatggggtcctttaatggtgattttccaccatggagatgcagcggaagacaaaggaaaggaggtgagaggaggcgccatccattaaggaataagccatggaagaaggagcttcaccaccaagatgagccttggataagaagcttggagaggatgcttcaatggaggaaaagaaagagggagagaaagagggagggggagcacgaaattgaaggaagaaaaagggagagaagttgaactttgagttgtgtctcacaagactctcattcatcaaagttacaacaagtgttacacatgcttctatttatagactaggtagcttccttgagaagctttcttgagagaacttccttgagaagcttctttgagaaaacttccttgagaagctagagctta

SEQ ID NO: 8585 - DNA, 352 bp, Glycine max
tgaaggtaaactagatgccttggtaaacctggtaacccaactggccatgaatcaaaaatctacacctgtcgccagactctatggtttatgctcctctgccgaccaccacacagacctttgcccttctgtgcaacaatctgaagcaattgaacagcctaaagcttatgctacaaacatctacaacagacctccttaacctcagcagcaaaatcagccacaacagaataattatgacctctccagcaacaggtacaatcccgagtggagaatcatcccaaccttagatggtcgaatccttcacaacaacagcagcaacaacaacaaccttattttcaaaatgctgctggcccaa

SEQ ID NO: 8586 - DNA, 411 bp, Glycine max
ttctttatcttgctctcatcgtatcatttcttatcttatcctaaccacgacactacgatcatgttggtgccaataatggtggtcatggtgacgatcatggtggaagtaatgcggcgatggtggtagttgtggtgacgatcttgatgtaaattaatttttttaaatatttgatgttttgtttgataaatcttatagaaattttatgcttaaatgagactttaatttgaatttaaaatattttaattctgaccttttattttaatataatggatgagaatgaccattctcattcttacataaaagagtcattgttatatgatacattatatatatatatatatatatatatatatatatatatatatatatatatatatatatatatatatatatattattttttaaataatg

SEQ ID NO: 8587 - DNA, 353 bp, Glycine max
tctcccctattttcctataaatagggggagaagtgaagggaaaaaatgttcagccctcctggtaatttgagatcacttgaaattactgaaaaaaattgtttccgtgaagaaaatccaagccgaggcgcttccgtaatgtttccgtgggtgatttcacgaagattttcaaccgttcttcgacgttcttcgttcgttcttcgtcgttcttcggtcttcaaccggtaagttcccaaaatcgaacttttcaattcattctatgtacccttagtggtcctcatttgttttcacgtgctttattttcatttcatttacttttcttacccccttttgacgtgctttagtcatttacttaa

SEQ ID NO: 8588 - DNA, 415 bp, Glycine max
  unsure (1)..(415): unsure at all n locations
agctntgcatgcactaacataatccttgtaatggaaaccatgtttcttggatcattattgtctggtgcagccatgattaaatgtaaaaaattatattcgaaaatattattgctaaaacttcctgtccaaaccaatatttggtttatttgtgataagtggtgagatacatagaaagcataggattacatttatagagggagatgtagaagacataattatgtacctagattgttatacacaactaattaatatacttttctagttaagcatgtagaaggtggttttatattttatacattatggactaatgagaataatgttgatgctaatttagtgatattgagccatatcttctttctcactacttgaatattntgcacggtattgtagtgctgtgtacaaaaggaggatttgt

SEQ ID NO: 8589 - DNA, 337 bp, Glycine max
tgcttctacacatactataatgtaactcatgatcttggatcattgccagacttgatattagctattaaatctaattctggcctctccaatagtgactacgggtataatataagttaactcatttaatgtctattttactattcatccatatcgttttgtgtttaatctgtttgttcatgataggaataggactaaagttagacctattaacataattaacagcttactacgatttatgatttgatcagagaaatagaaaacaaaatgttgataagatgattaagataatgagtattactccttttactatccttttcctttgggcaccgtaactact

SEQ ID NO: 8590 - DNA, 420 bp, Glycine max
agcttgaaatgaggaagtgtagaacggttaaacttcatgcttttattcgttgaccacagagtggtacctggagatatgtcgcgggggtcaggagaccttggggacgtcaggtggggtgctattgcccaaaaccaagcttgaccaatcccgacccaacccgggcatagtcagtcagtgagaacctgcgatgtacctaagcaggcgagctcctggcagtcaacagataaaaggaacaaagaccacaaagcaaggaggcttgtgtggtggttggccagctgtgaaatttgattgatatatgggatatggcctctggtaatcgattaccaagggtgggtaatcgattacaagtcttaaaaatgaagacaggagactaagatggtctctggtaatcgattaccaaggctgtttaatcgattacca

SEQ ID NO: 8591 - DNA, 345 bp, Glycine max
tgtaggattatggggtacccatcacatgtggtactaggtggcggtcgggcgatggcgcacaacaagttttccacatccacaatgcgcgcataaacccaccatcccctgttgcccacctccaactgagctcacgtactcccacgtagcccatatcctcgtttctctcaacaccgggtccccatcaatcctctcaagctttcacaacatccaagcaaaacaacattcaagcagcacaagctatcacagccaagcaaaacagagcaaaggcagaaaactctgctcaaacaccaaccaaaatcacagcttttctcacttaaagaccccagtaacaattccttcgatcca

SEQ ID NO: 8592 - DNA, 421 bp, Glycine max
  unsure (1)..(421): unsure at all n locations
agcttcaacctccacctctntagtggctctcaacctcgggagccaatccagaccttatgcgtaggctttcaaccatctacggtagccaccgacggccctgttgctacttcccctgagttccttgtccttctttggcaccatttcccatgccttgttgaccccctgaagcacccccgcgttggggctattgaaacctcgtgcaataaaaggtgtgaggccttcctctgatggtgcccccctcatggggtagccaagttgccttatggcgaggacgagattataattaatgcaacccctcgtccccatcaaggaaacatttggaaatcctccacatgagacgagaatgtcggttcttccttccttccattgagggaaccaattgacggacgctccttctttgcttgctaagagtcggtcccag

SEQ ID NO: 8593 - DNA, 343 bp, Glycine max
tcctcagggccatttcctgcgaaggcaaacatttggaaagttagttttaccaagaaatgctactcttaaaacaaaaatggcgtacaacctcctccaataaacacaaacatcaatgtaaatttagagcaaactcatgcacatacttccttacgagcattcactcgcacaagatattcttctaactaagaaaaatgcacccatgcacaatcaaggcaccttcgttacctagattatttatatgtacttccaaggtgtatttgctacctacatcacctgcacttccttggctaaatttacatacatgcatactcaaagcatcttggctaccaaaaattgcacacgt

SEQ ID NO: 8594 - DNA, 426 bp, Glycine max
  unsure (1)..(426): unsure at all n locations
agctttanggtagattttggacgcatggactaagtatgtgtcgcaacctacccttcggcggaaaggcgacgcagggctcacgggtgcgtcttctaaggaaggaaggcgcgtggagtctccaccaacgtttatttgaggaaaacgtcggaaaaatcgaaaaaggtgtggtctacaaactttaagtgtgaaaggtccgagagttgtttttacgcacgaggaaggtattagcaccccacgcgtccgtcacaagggacgacaacctttaatcaagtgtgcaaatatgacttcaaaatattttattttcccttttttatgtctttttgtgtttttatgctttttatgttttttgtattttttttaccttnttgtggtcgacaagggtgtttccctcgctcctacgtatcctcaattgcgatgaggaaatca

SEQ ID NO: 8595 - DNA, 346 bp, Glycine max
tgcttgtagggcttctatggaggctggatctttgagcttcaatgaggtcctttaatggtgattttccaccatggagatgcagtggaagacaaaggagaagaggtaagaggaggcgccatccactagggaataagccatggaagaaggagctttaccaccaagatgagccttggataagaagcttggagaggatgcttcaatggaggaaaagaaagagggagagaaagagaaaggggggagcacgaaattgaatgaagaaaaagggagacgagttgaactttgaattgtgtctcacaagactctcattcatcaaagttacaacaagtgttacacatgcttctattta

SEQ ID NO: 8596 - DNA, 420 bp, Glycine max
  unsure (1)..(420): unsure at all n locations
agctntctatgctcaatacatactactttctngttggtgatgccttctctgtaattnttacgtccaaaaacacttggtgaaaatatctctggcttgttggctggaattctacaaaatgatggtgcaaggtccctacaagtacctacaggtaacaatctgataccaataccatgatccagatgctaatatgaggactgtaaatttgtttagtggcttagcatcttataatccttgtgtctatcaaagtagtatcaattgattagtttcatgagtgcaattgtggcatcatcaatttctttctagaaactcaatntacaacctgaggtgctcataatattgtttgatatgtaatccttatttatgttgctatttatgttgcaattgtctcttgtgctatggtaactcctggtatgacctgtc

SEQ ID NO: 8597 - DNA, 326 bp, Glycine max
tgatttccctaccaagcctcttacattatcacctcgcacagaaacatcagtcattaatggaacttataggggatttatggaaattatactgcagaacaatgatactaagatgcatacctatcacatgagtggatatgcattttttgttgtcgggtactggctaactcctcttttatgatgccattccatgtttctggaaccaataacacaacttgatttagtaggctgcacgatagattttggtgattggtcttagaatagcaagggtacatataacaagtgggatggaatagctcgcactacagcccaagtatatatatatttat

SEQ ID NO: 8598 - DNA, 416 bp, Glycine max
agctttaatgtgttttcccttgtataactactaactgcagtaacagattctcctgaaatctgttgagtcccacatcgagtagaagtggaaaggttgagcaccatataagtgaggagaagacccataaatctgagccttaaggttttgggttagagtgtgatgtcagatctccttatgtggtggctcgtggtccacaggtgtacccctcgaatctccccaacaattggtatctgagctgatggttcaagttggtgaccggctcagacgagtatgcaagtactgcaggtggccaaaatggctagcggcacagcgtgccccgcaggtggagcggagtggccagaatggctagcgggcaaggcaagtaccgcaggtggccatggctatacttgtggatgataaagacttccgctagaggg

SEQ ID NO: 8599 - DNA, 240 bp, Glycine max
tcaacttacaaagagtagttcagacttagcgcaataggcgcgctaagcgcacttccaagaattccaaaaatagtaagagatcggcgcataacgcttacttttctgctaagcccagcttaaaagctcacgttacaaaatcgatctggggctcaccttaagatagcgcgcttaacgctgctacactaaaaaattttccagagaagaagtggcgcttagcgcatcatccacgctaagcccact

SEQ ID NO: 8600 - DNA, 408 bp, Glycine max
  unsure (1)..(408): unsure at all n locations
agctttacatttattcttatagcataaactatggtgagctcttaatgttttgtggggatatcttttacaaaaatgacattccttatgatcaggtactatgtggaattgtatttcaagttcacagtcatttaattttgttttgaacatcaggttgtatcccaaatcatcaaggatatctccataatgattatatttgtcatctattgggtatagattggtatactcatttctagtgaattcgtttaagattatataatctttgttaacttcatattcttcaaaagtatagtcaaaccaactaactattgaatatatttctgagtcagtagagactgtctcatctatgggaatgagattcatcctacaactttttatcaattctgctnttcttgtaaatagattggtttt

SEQ ID NO: 8601 - DNA, 326 bp, Glycine max
ttgttgggcaacaatggtggaggaagaaaagagaaagctacgtgagagagggagagaaaaggcttctgaatatgtggggctgagtgaagagagagagagagttgctttttgttttaaaaaaaagggttttctctttttctattattttatttaagctatgccacatgtctccatttgagtggagcaaaaagggcccactttctcttttgattgtgacccatactcagccacaaaaagtgagaaaaatctgacctttgaaacgctaaaatcctgcctcggtttgcatgtcgtttctctggttccagtttctctgcgtccgtcggggc

SEQ ID NO: 8602 - DNA, 454 bp, Glycine max
  unsure (1)..(454): unsure at all n locations
atccttaagtcacctgcngcatgcaagcttgtgcaagtcaaatcactcctgcatttcatctctaccatgcattctttctttctttacccactcctcacgtttggttttttagggaaaaacaccataactaaacgcgccacaaggcattcctatcgcaccagatccaaatctagaacgatgggtgatcaagaggagacacaggaatagatgaaagccgacatgtcggctctgaaagaacaaatggcttccatgatggaagccatgttacgaatgaggcagctcatggagaaaaatgtggccaccgctgccgctgtcagttcggctgccgaagcagacccaactctcttggcaactgcgcaccatcctccctcaaacatagtgggacggggaagggacacactggggcacgatggcagccctcacctgngatacaaccaagcggcttacccttatg

SEQ ID NO: 8603 - DNA, 349 bp, Glycine max
tcttcttgactcatcttttccttgaagtggcgtctccaatcatctttcttccttcttcattatgctgccattaaacttcaagaagaaaaggactccattgatgaagaagatgcaaggcctacacgttccacaaggagctacataataattacatattaaaagctcagagaaaccgcccacattcctttataaacaccttagatcaaggtaacagtctatctccactatctttacaatctttcaaaaatcttcaagatttctcttagaaaaagatcacaaaaaccctaattatcttcacaaaatcactatgacatgctacagcaaaaacactaatcctgccatgtccatc

SEQ ID NO: 8604 - DNA, 428 bp, Glycine max
  unsure (1)..(428): unsure at all n locations
agcttctcaaggaagttttctcaagatagcttctcaaggaagctacctagtctataaatagaaacatgtgtaacacttgttgtaactttgatgaatgagagtcttgtgagacataactcaaagttcaacttctctccctttttcttccttcaatttcatgctcccccctctctctttctctccctctttcttttcctccattgaagcatcctctccaagcttcttatccaaggctcatcttggtggtgaagttccttcttccaaggcttattccctagtggatggcgccgcctcttacctcttctcctttgtcttccgctgcatctccatggtggaaaatcatcattgaagctcanagatccagcctccatagaagctccacaagcaagcttccatcatcacctccctcgaataccttcgtatgtgtc

SEQ ID NO: 8605 - DNA, 346 bp, Glycine max
tttcgattcattctatgtacccgtggtggtccacattgcgtttcgtgtattaagattctcgtatgatctactttttatacccccttttgacgtgctgaagctatagtatttaagctcatggggacgcttaacctagaaataaagtggaagagcactgatagatcgaatgatgtcatccggtaagttgggttaaaatgaatttctaccgatcagacgcgccgttaccacgttggaaatcaaaaagaggtatatcactgctgtaataataaaaaatacctgtttattaaaataaagcgaaaaatcaattggacgttatctctttgggatatctcattattaatcgaat

SEQ ID NO: 8606 - DNA, 306 bp, Glycine max
tgatgctgtacccacacgaccgagcagcaactagcctcacaaacaaagtttatcatttctcacgggcccaacataatgcgtgagcgactgtgaaaccctacaatagccactagaccgcaatagttaagactgaaactgacaatgtctgggaaccactatatactacacaagctaacttccatacataagaacttgcggcccgaaaaggtccttacaggcaagaaccatgtattaagaaccataatcaagagtcgaagcggtcagaacgggacacataaaaaaacttaaagaaaagggccataacaa

SEQ ID NO: 8607 - DNA, 409 bp, Glycine max
  unsure (1)..(409): unsure at all n locations
gaataatggattcatttgaaaaaataaaacctaatgtggagttcacaattgtctgactgcttgtttctcccaagaatgccatacttttttgtaagagttgggttacgactgaaacttgtggttttttatagtcttaggcagtgtcatatatatatatatatatatatatatatatatatatatatatatatgagttttaatatcagtgttgcattttttaaagattaaaaatgcgcatgcacatgctttctgtatgtgttgtcaactacaccaatgacgtgatacgctttatcttgcatcagatctgcatgtgtagtcttgctatgcaaggtcatgtcacgcactntctgttaatgcatacaacaatntatcatacancgttttcacaatgtattgtcaactcagacag

SEQ ID NO: 8608 - DNA, 347 bp, Glycine max
tttttaaaaccattatgctactggtaatcgattacaataatctggtaattgattaccagagagtaaaaactctttggtaaaaggttttgagaaaaattcatgtgctactcagtttttgaaaaaactttttaatacttatcttgattaagtattttcttgattcctgaatcttgagtcttgaatcttgatcttgattcttggaagcttgaatcttgaaactttattcttgatttttgaaatcaaatttgctcttgaaccttgaagtgttcttgattcaatcttgaactcattctttgattcttgagatcatcatctttgttatcatgaagtgttcttgacctttgagc

SEQ ID NO: 8609 - DNA, 293 bp, Glycine max
tgcaagctgttacaacccattatttcttgtcctaccaagccactattggctctatacaaatcaaatagatttgttgattgtttgcactaactcttaatcatcttgcaaatgaatatacaatctcaacacttagtcttttctctcaaagtgttcaaggtggtttgagagctttatagaactatacataaatcttttcatagaaagaatttgaatgagagtgcataagttcgtatccatgtcttcaaagcttctatatttataggtcttcttcaacaagtgtttggtgtctctaa

SEQ ID NO: 8610 - DNA, 343 bp, Glycine max
tttctctcctctgtggtgtctctccttccccaaaactttctcatttttttgccaacttcagtcttttaagggctttttgatcctgaaggctcgcttatcgccattttctcgctaagcgcgagttagggaattttcacttagtaagatgggtacgctaagcgcgagaagagacaaatggctcgctgagcgaactgatggcgcactgagcgcgtgcatgaagggaagattctctttcagattctcctaactcgctaagcgagctgagtgcctcgcttagcagatgttacttgctaagcgcatatgcctcccttagcgagacaccaactgcttcaaccttcttctt

SEQ ID NO: 8611 - DNA, 204 bp, Glycine max
agctttcaaatgtgttaaactgctttcgtttagttgcaatgttgtgtacactcagtaagtccactgatcgaggtcgtacccgaatcaaataaacattaaaaatgcagtatctaggaagtgatcctaggtcgtctcccaacgagcaatggtcaaccaacgttcataatagatagtgataaaatagtaacaaatttgggggggggg

SEQ ID NO: 8612 - DNA, 341 bp, Glycine max
tttcgcaaagcttatggtaagatctgggacctagccatggcagaggtctccacagaggccattgtctccctcgcccaatattatgaccagccgttgaggtgcttcacctttggggacttccaattatcacccacggtggaagagtttgaagaaatcctgggatgccctctgggaggaaggaaaccatacctcttctcgggattctatccctctttagctagaatttccaagatagtccaaatctcaacgcaggaattaaaccacagaaaggaagtcgaaaatggggtggttggagtaccaaggaaatgtttggaagtaaaagcaagagtcttggcaggtaa

SEQ ID NO: 8613 - DNA, 415 bp, Glycine max
  unsure (1)..(415): unsure at all n locations
agcttaagacgtgtgttatatgggccattgttctngagatagaaacaatcacttactatattttattggagtaattgaaaacacatgcgtctatgcaacatattgcttggaacaaattaacaaaacaaaaacatgaaagattcaaagtttgttggagtttaggaaaccatacaccaataaaataacacagcatccatataatgaacttaatgtagtcaacatcaaagggatggtatatcactatttcagggaagccaatcgtcatcaagtttttttatattgcgccaagtaattacctcgagcacgttatgtgatcttcaatgtctatgattaagtaattaatttaaatataaatttgggccaaagtttaaaaaaaatgttgttacccagttccgcacgacacaactaataattc

SEQ ID NO: 8614 - DNA, 229 bp, Glycine max
cactactgtgctcgggctctcaagtttcttgatgtgggtgacacttactggaaacttaaatgtgttgctctgcacagatgtgacacaccatgggggacccgtactggacacttaaaactgtgcatatgcacacatggcactcgttatgggtgacacatactaaaggcgtcattcgccataagtgacacctactggagacttaatgctagaatgatggctgaccaagggg

SEQ ID NO: 8615 - DNA, 409 bp, Glycine max
  unsure (1)..(409): unsure at all n locations
agctttctccaccaagttgcctgatgcctgaaatgtcttntttgatggtagtggtcctagatgcagggaagaatttctccaagaacaccctcttaaggtcatcccagctgaaaatagacctgagagcaaggtagtataaccaatcttttgccactccctccagagaatgaggaaaagccttttgaaagatatgatcttcttggacatcagggggcttgatggtgaaacaaacaatatggaactccttaagatgcttataaggatcttcacctgcaagaccatgaaacttgggcagcaaatgtattagtccagtcttgagaacatatggaacacccttatcaggatattgaatgcataagctntcataagtgaaatcaagtgcagccatctccctaagagtcctatcacg

SEQ ID NO: 8616 - DNA, 319 bp, Glycine max
tgtaactcttggcaatttctttaaaactagtcacttaaaaagtggtgacttttgaaaaaatctttagaaacaagtcacttgaagaattgtgacttttggaaatgtatttttcgaaatcagtcactggtaatcgattaaatgtgactcttcattttgaattttgaaaattaaaacgtttagaatgtctggtaatcgattacaagtgttgtgtaatcgattacacaagtttataatgatttaaaactgttaaacacaagttgtaacttttgaaatttgaaatctgaacattttaaactttttgggaatgattttgtgaaaa

SEQ ID NO: 8617 - DNA, 420 bp, Glycine max
agcttctcatggagggtgagcttagttttagatgggtgtgtgtagctaaactctagcttctcaaggaagttttctcatagaagcttctcaaggaagttttcttaagaaagcttctcaaggaagctacctagtctataaatagaagcatgtgtaacacttgttgtaactttgatgaatgaaagtcttatgagatacacttcaaagttccacttctttccttcttttattccttcaatttagtgatccccccttctctctttcttttcctccattaaagcatcctcttcaagcttcttatccaaggcaattcttggtggagaagctcattcttccttggcttattccctagtggatggtgcctcccctatcctcttctcctttgccttccgctgcatctccatggtgaaaaatcaccattga

SEQ ID NO: 8618 - DNA, 351 bp, Glycine max
actcaagcttctttgagaaaacttccttgagaagctagagcttagctacacacacccctctcataactaagctcacctccttgagaagcttccttaagaagattcctaaagaagctagagcttagctacacatacctctctaatagctaagctcacctccttgagatgagaagctagagcttagctacacaccccctataatagctatgctcacccctatgccaaaaaacatgaaaatacaaaaaaagtccttactacgaagactactcaaaatgcctcgaaatacaaggctaaaaccctatactactagaatggccaaaatacaaagcccaaacgaaggaaaaacctatt

SEQ ID NO: 8619 - DNA, 274 bp, Glycine max
gacggagggctcgtcgttagcatgttcatacaattattctatggattaccagtgacttattgaaacaaaccgaatgtgaaggttttaaaaggaaccacacaaagggcgacatacagaggattgtaacggttgtatgcatattacatcataccccacggcatgttacttatgacacaaactgcttcttctactagactaggattacctctagtggaatatccattcacccgtgacccaaatgacccatgtcttcctaccatatacattgtgacta

SEQ ID NO: 8620 - DNA, 140 bp, Glycine max
acccttatcctccatcatgcgcaggaatggggaaactccaccaccgacatgcctcgtgatcatgaaagacacaacgcgagctgacgtcccctttcacttgcaattattacaatccgttaagcaattcatctccaggatga

SEQ ID NO: 8621 - DNA, 583 bp, Glycine max
  unsure (1)..(583): unsure at all n locations
ctcacctccatctctctctcgctnttcttcatctgcgtatantgnnnnttnttgtgtaattcttaaatctnttacagcttgntatgagggnatttgannccannggtgtattccatatcactgtctcggacgccggnatacactcgagccgcgcgcgtggcatgctaacttaatgagttgactcatgtctcattatgtctcttagacgggagtggtcctaaatgcaaggaatacgttcttcctttatcctgcacaaatgttgtgcgctctccacatttgactgtcatcggaggttgaacacttatttacttgaaggatccactccgagcaagacaaaacttgagtaatagtctatcttcttgacaagggggaaggttaactttttcttacacctttgatccacttacatgattattaatgggcttaacatcgaagctcaattacattagggactaatgtgctaactccaactttgatacttatgagatacacgaggtagcaatctaagttgttatctatacgaaatgtgagaatgatcagactgaatcatcacagcctctcatcgatgtgcctgctcgaccag

SEQ ID NO: 8622 - DNA, 328 bp, Glycine max
tcgaagggaacagagagaccaatcactagcacatagcatggtcttgaaataggagtttgctgcttgctcaagggccaaaagaaacttgtctcagcgtttatgctagatagagaccaacatgttatccatcaacagcaagtaccaagaagaactaaatctagccacgacccatgagcacaaagtggcggacgagtatgcccaagtgtacgcataaaagaaggctagaggaagggtgatcgacgcgttacatcaagaggccacattgttgatggaccaatttgctcttaccttgaatgggagtcaagagcttccccgattgctagccaag

SEQ ID NO: 8623 - DNA, 78 bp, Glycine max
atgtcatctaataagacttgcatcctacctaaaaatctaaacttaaactacagcactaagcttcctagcttgcactga

SEQ ID NO: 8624 - DNA, 149 bp, Glycine max
ggtcaaatactacctacttactatcatgaagatagattaccaacctattatgaactactgtcatatcatcctggtgaaaatagtaattatcgagcaaatatatcttaattaactattggttgaaaatattgattgcttaaagtaattat

SEQ ID NO: 8625 - DNA, 171 bp, Glycine max
  unsure (1)..(171): unsure at all n locations
gctatntcatatattaacatttcaatatacacacatctgtggtgttgctgaacgtcatattgattatctcaactcaaataaactgacagcaagtaatctacagttgcctacttgtaagcatactaatgacatgagaaccttactctttgctacaatgtatatgttgactac

SEQ ID NO: 8626 - DNA, 104 bp, Glycine max
tatggtctgatgtaaagcattttgactgaccattgtaagtttaacaaagcttcttaagcacgtacttcatctgcactgacaagaatgagcatgacactaaaatt

SEQ ID NO: 8627 - DNA, 568 bp, Glycine max
  unsure (1)..(568): unsure at all n locations
nacatgaccatgtnactattgactatcngcacngnnggagctctctcatgctatcctgtgatgcgctcttacttttctcttgctctagattcatgngaaacacataaggcctcatgagctaagatcacctcatgaacacacagcagctcataagtgtatagacacagagctcaagangtgctctaacctcatgagntttttcttactctctcattgtttctcatttctctgatgtccacatgctgctaatgtgtacatatcttagagtcaccataactgcttgaactgattgatttatgtcaattcttgctgtctgacatgattggtgagtagtcttgattactgtatttgtgtgactaactaatctcaaattcaaggagaactatatctagcgctgtacttgatttgcgaagcagttgatgactgccaaatctagttcgattatttgtcttgactattgcaaagtaacttgcttatgcagcactctgattctactgctatctagctgtgactttactagtctttgtatgatagttgaatggcattacagttacgatgctcatacacg

SEQ ID NO: 8628 - DNA, 199 bp, Glycine max
tggaccgattggactaggcacgcatgcaaatttcctccattactacacatcagtgcactcatgctacgccccgagctatctgtcttagacgtcatatctcagtccattcatatcattaacttgacactaacaaacagcagcaattgcaaactcatccgttctataacagacttttttgtgtacggacataattactggc

SEQ ID NO: 8629 - DNA, 159 bp, Glycine max
atgtctagctaagtttttatctgatcgtccttccaaagatccatcactgactccacttgaatgaatgtctacacactataggtaccaacaatgagagatttaccttccatcagattctatgaagaccttgcgtgctctttgtcatctgtacactgctgc

SEQ ID NO: 8630 - DNA, 152 bp, Glycine max
gaatttttgctctatataccattaatccatcacacttgataatctttctattatataatattatgcactctagttacaaatatgactgatttgacagtaatagtactttcatagaagttagcaaaaatgtacaagaatttataacaaatact

SEQ ID NO: 8631 - DNA, 456 bp, Glycine max
  unsure (1)..(456): unsure at all n locations
atatgtcttactgctcttgacttcaccactcacagataatacgcttaccctcatatgactatgtgtatgaatttatggaatngacaacctactaccagcttacatatcaactgtcactgttatctaatcacataaatgatctacacattactaaatgcctgttacttgcctctatctattgcagcactttctagcaatacttaactgatatcttacccatacatatcgatagctcattaactacttttacttaaccattctctactagtattactatttacagtctcacatcgctaatcactattaacctaacaggactgtcacactgagtaacttacaatctcatatccagtacttactcttttcacatccaatagaagtcactatagcacaactcatcagttcatgtaagcagtcttgtagggaagtgtaaaaactattgggaactgtaagttg

SEQ ID NO: 8632 - DNA, 537 bp, Glycine max
gtattgtgtcgactgatcgcagcacagcagtgcactgcctgactacgcatatgctactttaactattcttagttgattgactgaaaacttttagcaagcctgactcgacatgttataaggaacaacatggataaactcacattatatgggatgatgatgctaaatcttaacttcatatataggaccggaatgcccattaatcacattggagatggccgactcttttatatgtaacaacctcattgttccaatttggattacctcatctcatatcatactaatcgctccgtgttttatttataatatcatcacaacgtatgcgctcttcacatctcaattctcttcttgaatcgcttcttgcattcactcttatcaatctattgatgttctgactattcacttcttattcacatctcaaatctgtactattaccttatcatttcctatccaaaatatcgacttcatcttttacattacaaattcctgctgtctgtcttcgttcttctctttctttataatctttctatccttatatcc

SEQ ID NO: 8633 - DNA, 188 bp, Glycine max
  unsure (1)..(188): unsure at all n locations
ctgttgtcaacattnttcttttgtcacaaatgcccgttactatatatatgtaacatatgtatgtcaccctatatctttttctcaatgacttacgtttaagacctaattgtatttaattataaaatagtatataatgctataaattgttatctcaataatctattcaatcgtatatctaaacacatatg

SEQ ID NO: 8634 - DNA, 619 bp, Glycine max
  unsure (1)..(619): unsure at all n locations
acgtctgttgacagacnttttgacatgcccncagcngtgcgcnttgtaccctnntacttggatctccanancgcagcnangttgacatggcgttatgagncaanannnngnctgngactgtaaattactaacgacaaatcataactgctgagtgtgacaataaagtatactataagataaaaacttcattagcatgattgagtctcacatcacacatantacttcattgtcgcacacttgatacatctntctcatctctcacaagctatcaagctaagactctgaccagctatgatcaaacatcacctctacaactggtccatgacattgcaaaagtatcaagtcatctctatcgcaccattacatatgactctattgatgtctctatgacgcataaccctggatcactctttaggatgacttatcataactggagctaagagactagtcacgctatatactgaacttatacactgatgtatctctanagatgcatgctgatgctgtctatgctgtaatcatacttgtgtatgatacatgactctagtgtgaacaaaaagcttattgatcttactggagctatgtggcctctcttatcgctcacttctatcttctttcg

SEQ ID NO: 8635 - DNA, 134 bp, Glycine max
agtattactaagccagcgctaacttgaacaatatgagaatacttctacaccagaaagtgtcacgatggtggctaaaagtcgcagaaactcaggagctttgtaaatcctcatctcggatgatcctcgtttacttt

SEQ ID NO: 8636 - DNA, 195 bp, Glycine max
caaaaaatcaaatgaaaaagaaggccgagtaacaagcagatgcacttacacatgcataagaaagacacaatgttctgtcacacgcggatgtccgacacaaaagccaattagcaccacaactaactcagactgcgcctgtttagagtcaactattgcatgactcgatgctggttttgacgcaagtaagacacttgt

SEQ ID NO: 8637 - DNA, 128 bp, Glycine max
acccaacgacaacctcaatctcgtagcaaacttatcgaataagctatacgcaaattcgcgctaaatgtcgtccttcattgaaacgctccaacaacttacaatgatgaatttctatactctttctacgt

SEQ ID NO: 8638 - DNA, 132 bp, Glycine max
  unsure (1)..(132): unsure at all n locations
ctgtcagactaccgtgaacagacagaacatatatcgcaatgtaacttcaatctccgaacgttgaacttgagcctcgtaattctccgaacatntcacaatcaaaaagaggctaggcgacttctctctctccat

SEQ ID NO: 8639 - DNA, 166 bp, Glycine max
actgatgtctatgcatcgatgatctcctacatctgtccattgactggtctactgacctcatttgagtgttttacaccattaaagtatcgcatgactttggagacatatctcttagcctgcctatctacatcactgcagcgaaacagtaaaaatgtggcacttacta

SEQ ID NO: 8640 - DNA, 79 bp, Glycine max
ttttctcacctactctttagcttacatgctatataccatcctgattccctccactacactgcacattaccgatggaact

SEQ ID NO: 8641 - DNA, 179 bp, Glycine max
catcatcaccaactgtttgcaggcgaaacccccaagaatagccacaacaaccaagtgacgagcaggctaatcaagcaatgacaaccaaatacacaacaccagcagacgaaacaaccaagaaagcacacacacgattccgagacaccaaaaaccaagacaccacataaacgtatggcaga

SEQ ID NO: 8642 - DNA, 201 bp, Glycine max
  unsure (1)..(201): unsure at all n locations
caccagtcctatcatgtctaaccccatataccacacgtatcttgcttgtgattatacgatcanactgcgtctgtttcaatataataattctatattttagtctctgttaacatctcataatttatcacagtatacttaatttactgttctcaaatacgatattcatgtcaccgggcttactatgtgtctagctgatagttc

SEQ ID NO: 8643 - DNA, 191 bp, Glycine max
tctattgacgtgtgaaaatcgctggatacacacgagcttgacactacttgctactgctgagaatcactcatggaaacgagctcaaaaagtctactgttaaggcaaaaaaaagagaacctcatgacaaaattaaaagaactagctgcctgtacatcattaaaagttcacttattcaaacttaaacagttttt

SEQ ID NO: 8644 - DNA, 245 bp, Glycine max
  unsure (1)..(245): unsure at all n locations
gtcctcttctttatctcatctgctcctttttttctcttacacttcacttatcagtttgtgactcttctgtatctangtgctcctactttctgctcgtgttctggaaacatagacttactaacactctactccacactctaaatttcttgtaagaagagagtacttctgtcatctacatgcgttctccttctgactgcacattatttataaaaatacatcacacaactatctgtactacagcatgt

SEQ ID NO: 8645 - DNA, 119 bp, Glycine max
ttattcttctatccctattactcccttcttatagccttttctaccttaactctttgtaacattaccccttacactgcctatatatatctgccactaatatgattgagtcatctaccctc

SEQ ID NO: 8646 - DNA, 192 bp, Glycine max
tcgcatctgtcacgcataaattgtctatcgattacggttaaaatatcgtgggaccgtctgttggtcgagaaaaccaacactctatctacatggactttaggaggtacctgtagatactcactaattactgaatgaagattataacttcagcacaactcctctgcaatttgtgcatctctggtgacactctgt

SEQ ID NO: 8647 - DNA, 128 bp, Glycine max
ctacttaggaattgacttgaatgttggataggtggtgttgttcatgaattgattgcatctatgtatttgctctgtgttttatgcatctgttactaatcgctgtataaaataaaatatgtgaattgatc

SEQ ID NO: 8648 - DNA, 418 bp, Glycine max
ttgtccgcccgctcgacgccactgctccacaccagtttagacctcttactcgcatctcactgtaaccttgcgttctgtccactgactactagatcagtgtggattcctaagactactgggaaatctgcctctcgatgctagttctgctgcagttaacaccagcctcgaatggactattttcactcagctcagttcttatatgactgtctaatcagttgtgttggacctcacttacagtgcacgttgaatatgaacacggcaatgttgcacagctagtgagcaccactcccaactcatatgttgatacggactctcatgacaaaacgtgtcctatctactgaggtgctccggctgtatactatttcacaattctattcttcatctattctctctgacaattatcacttccctgtatttc

SEQ ID NO: 8649 - DNA, 162 bp, Glycine max
  unsure (1)..(162): unsure at all n locations
aaaacgacatgcacactcgcaaatcttgctattagctcactctcagctatagaagtcatttcctccttcatttgtggaactagacgtaaggcgacatctatntacaancataatcttgaggatccactatcgactactatctaccttctccaactaattaac

SEQ ID NO: 8650 - DNA, 83 bp, Glycine max
tgtgtaccacctatgtgaagtgaatgcaatacaataaattcctgtcatggcataccactgatctgccatacgtcactcatcta

SEQ ID NO: 8651 - DNA, 413 bp, Glycine max
acatgttcatggcgcactatagcacatataaaccgtgatatacaataagctctttattattaggattcaatctgggacaacacctgtgtaagcttcactgggtgctgtgaaagatttctcttattacctgtttaaccatcaaatactgcgaattggctatcataccctaataggattgacaatgataacagactactgttgacactatgacagactagatgctcatttgcaccatactctactcattctttcaacctaaaccaaacctttcttctaatcgtctagtactaacacactggcggtttttcatctgaccactcatctctggagtaaacacactcagatttattcacacgcacgtgccgacttctaatgggtctcaaccctaaggttatctttataagtttgcgtgc

SEQ ID NO: 8652 - DNA, 121 bp, Glycine max
gtacacactcgaactacactagtaaactaaacagtacctatactaccgtgagatacgtatgttgcgtgttgtgtgtgatgttgttgggctgatatgtagttttttatgcatatatgatgat

SEQ ID NO: 8653 - DNA, 188 bp, Glycine max
gcacgagtgcactgcctccttgcattgccacatgtttgactgatatacaccgcaagaagaaaaaagaatatgctagacatcacatggacggatacaacttatgcgccccacatatatgtaagatacaagtaaaaaacgaataggttaggcgccgtattaaataaaaagactgactgcagaactctgct

SEQ ID NO: 8654 - DNA, 255 bp, Glycine max
aatgttaattgtcgacaaatgcttgctgattatgtagatggatacttacttgagcacaaagataagtcactctggggacagggacatctgaatctaacacacgtgatggtgttatgactggcaggttctgatagcacaaattatgtatcttgatcctacagtctatctgggatatcctgtggacactataggcagctcaccttacggtatcctcggatacttgtgacattaacaggtttttaattagatgcccta

SEQ ID NO: 8655 - DNA, 145 bp, Glycine max
acacacgtcaaactttaacggtaataaaaaaattacgaattcacatggcgtctttttttcgtcacatcagtccctaaacctctcttctcgtacagctgcacgcagcatttgcagaagaagactttatttctgcagactctaccgc

SEQ ID NO: 8656 - DNA, 419 bp, Glycine max
gtatacacgatagcgatctgaaaggacctaaggcaaggcgacatgagatttctgaccacttaacaatttttactcaaacacaagaataagcacttcctttctcaactttgccaaattatataaaatgccttcacagcgtctccaaattcctctcaggttgctctcccatctgtatctctccctactttggcaatgagccttgtttaactctcccctaatattgcttcaaaggccctatctttaattttctaccggaaaccatttttgtaagtgtaaaaggttttttattttccaaccatttttttgactgaaaaatttcacaggttacaaagatgagtcgctacattaccataatgggatatgctttggaagaccaccttttctattactgtggacttcgtagtaaatgaacctgttgt

SEQ ID NO: 8657 - DNA, 73 bp, Glycine max
tcttgaaaatgttatatacttattcaactcacaaactgtacaaacttttaatattgaatgctgctgtgtctct

SEQ ID NO: 8658 - DNA, 554 bp, Glycine max
  unsure (1)..(554): unsure at all n locations
cgtcgactacgatgagctcactgaagatggacataatggactagtgcgcgcatgtccacattttcaacacatgctccactcctcctggcactcacgacagctccgaccattctgttttacacggtccacatcttagctcacacatcagcaacacgtaacagcaacttacagcagcaacaacaaggaaaacttgtacacataacanaacagttttacgaagaccgacattctcatcatcgtacgtgacactcaattactgagtaagtgaagctcgatgtcggtgttcacgactctactcttataattctaccacccacactatctgctggctatcgtgaaatactaaacatgtatgttatcatatcattcttatcaaggcgacttacttgtcgatatctacagttaacacaccgtctttccctatacggcagtggattggtctaacacggttcagtattacattcggaagtatcggtcttgggacagtgattaatcctgctcttctatttagtcccttgatttccgaacacgtgacataactagtcgtacttacc

SEQ ID NO: 8659 - DNA, 60 bp, Glycine max
tctctttctatagaccatctcattgacacttctgacgatattgtgttatacttcaatgtc

SEQ ID NO: 8660 - DNA, 183 bp, Glycine max
atgcgtcttagtgcatcttctaacttacactgtataatctattaatctactagcgtagataattggaaccttctctgaattatgctatcaaagctctatataggctatcaacttacacggtctctggtacaacgccatctaccttacatgactaaatatctccagcagatagttgttaatgtg

SEQ ID NO: 8661 - DNA, 255 bp, Glycine max
tcctatctctccactgctgatcaacaattctctctgtacaccagtcttagaactgtgctgctctctctgcaatatatgaaaagattagaacctgacatgtttagtacttggtatcaatttggagcatcagatgctttttataacacttagttaattcaaactgtataatttgcccccattatctaacgcggttgaccttatcctcattcctctgccttgttcctctctctccctccccttttttcttcttttcct

SEQ ID NO: 8662 - DNA, 75 bp, Glycine max
cactcacgactcgctcacgacaatctgtttaacggtcatatctcagctcactaagatcactcacgcacttcgcac

SEQ ID NO: 8663 - DNA, 553 bp, Glycine max
  unsure (1)..(553): unsure at all n locations
tatcattgattagacnattgangatcatgagagcagacgctggagcgantcaaagtctagttatcncaagcaaggacnacgtttcantgcanannactttatacntgttgtagancacacgacagtgtctangactactgatcatactgaactctgcgacatgtgaaattgatatatactactatgttntcgctcggccatgcactgtattgtgcacgacattatagttgttgtcttggagagctgtgacatangtatgtacagtatttaatatagcatatgtgcgactactctcggacaattgatgttatttgtacaatactgtgacattggcaacaaatatacgtctatgaggaatccaaggagaaggattatcttctcctgtacactaccactacagccacactgggaaccacctaggtcaactgtatctccaactctatatccatcattctcttaatatctgattacacatttaaatctagtttcattaggaacttcatgacgtatcatttaattcattcttttatttcttgtctcgacatgtcatccg

SEQ ID NO: 8664 - DNA, 58 bp, Glycine max
acacacaaacacctcacccactagagcgacaaatacgacctctacaaaacaacacaac

SEQ ID NO: 8665 - DNA, 69 bp, Glycine max
tttacacttgtgatttgttatttttattttgtttttttttttttttctcttttatatgtatgatttttt

SEQ ID NO: 8666 - DNA, 107 bp, Glycine max
ttcagttgccactaactgacttatgatgtgcagacgatgttcacaggtggggaggacagtaatatacaggtgtcttattgtattgattggctgatgcatttttcttt

SEQ ID NO: 8667 - DNA, 59 bp, Glycine max
actacgacgctaactgaagtgaggaggaaactaggagcccccccctgttttcactctct

SEQ ID NO: 8668 - DNA, 65 bp, Glycine max
ggggaccttggccgcacagtaccagcgaccaaagccaggcaaaaagacggaaggaccccacacac

SEQ ID NO: 8669 - DNA, 79 bp, Glycine max
tactatgtataatagataaagtactagaagcatatatcattctaactattatgactaccaacattgaatagcaccaata

SEQ ID NO: 8670 - DNA, 74 bp, Glycine max
tattcttttgcccccctcccccagactttggttcgaccgcgccttctaagagtttctctctaactggttttttc

SEQ ID NO: 8671 - DNA, 298 bp, Glycine max
ttatcttctacatattataacatgaaccacgactatctggatattagatcagaagcatgtgtaacgttcacgaccacatctgccgaatactgcgattctgcttatatgtcaactatgtgcacttatatagcaaatgtaaattatatggttcaccatactctttgctggataatgtaatcagtgaagccttattattgtaagcagtgacaatgctactctgactaccaatggaaggactttatctcgcatactgcaaccgttcgtaaaaactctccgatcgtatcactgttaccaactt

SEQ ID NO: 8672 - DNA, 164 bp, Glycine max
tgttacaagagctcaaatcaatctgtcatatatcctgcaaaaagacatacactgttctaccacatgataatcattattatgaatgtgacttacttatgctcactactggtgtcacatcaaggacaacatatgatgattgatatgtcttgtctataaagctacac

SEQ ID NO: 8673 - DNA, 79 bp, Glycine max
atcctgtgccactcactgactacgctcacgagcatatcttttttacacggtccaaatctcagctccactcagaacacat

SEQ ID NO: 8674 - DNA, 604 bp, Glycine max
  unsure (1)..(604): unsure at all n locations
atttttttcttatacactgagcccagcacgagctcactgcatcttcacacacataccttcatttatatattacatnattgtatgcaataaagaaacccggccggcaatagagtgaacattaatcttgaatgatattactataatgattatactcaaagcgctaatacatgcagacaagaatcataatataaagtgcgacattggtaatactgaatttaantggtaannntagtttctttgatatagcagagtatttattgggtgaaaattcaaatcacgatatattagatanataagcgaacatattgtcttaattacttgatagntctattcccggtcaaantaactgatcaactaatcaattatgtaaattaaatataacaattctgtattatataatattattaatgtgatcaaatctagacattgttaaaactattattattatagtcactctatcttgcaaatcaaattccatattatcttatttcaatctaaaacttattatccatttttagggaatctctctcacatgtgcgatctttcctttctcctctactttctactctcacgttgattgctctccttgctctatcacgttacc

SEQ ID NO: 8675 - DNA, 406 bp, Glycine max
  unsure (1)..(406): unsure at all n locations
tatggcttgatcacccatttgtgtgtaaagttattagctttagcattggaaaatgtactgcatccttagaactggatagggcagggctaggttatcgaactaccagacacgaagtgcagtaatttagtttttatcatgttgtaattgtaatgttgttcgattaggctaagtttatcaagagacatctgagaacgaagtttaatttgaatttggccaaactcgcgagacatcggtgtttggtatttgtgccttcagcatagaacacaaaaataatttcaagaagagaaaaaccccaattgcatcaagtatctcagtataaggacccaacgcttttacatatctattttcacacttgctcacaattactgctnttacttagaatagaattacttctattcttacttca

SEQ ID NO: 8676 - DNA, 316 bp, Glycine max
agcttgtctcatcgtttatgcgatacggagaccaacatgctatctatcatcgccaagtaccaagaagagttaggtctatccgcggtccacgagcataagattgcgggcgaatatgcccacgtctacgcggaaaaataggctagaggaagggtgatcgactctgtacaccaagaggcaaccatgtggatggatcggtttgctcttaccttgaacgggagtcaagaacttccccgattgttagccaatgccagggcgatggcatacacctactccgtccccgaagagaacatgggcttgtcggctattgtcagcatat

SEQ ID NO: 8677 - DNA, 407 bp, Glycine max
tgtgcagctaatccatattattatggcatttgattaaatcttttattctgttttctattccatattcataatatgtgcatttcatttcatattttcttcatacttaatcatactgaatgactgtttggtaatttagattgacgttacttattgctggcaaaagcagaaacatgttcgatttgtttgaatctaatttctgtaaaaattttctcaaatgcaaatcatgtgacttttgaggaaattacatggagatatatttttgatgtttcactcccctcccctatatactagcttctatgagtggttaatttccacattatctggtttttgaaatttggtttcctcatcaattaaactcttaatgtgctactccataattatcagctagagaaaattgttactgcttt

SEQ ID NO: 8678 - DNA, 262 bp, Glycine max
tctaactgtatctaaatggacttggactgaattaactgaaggagggaatctaaccccctcaaagtccgccgggatgagtaccaacatactgatacgtagttggctgtctcactatgcatacaactggaccctacatatatcatcatactatacttataacaatgtcatgtgcactacccaagtctgaccctacatggcctgtacataacactataatatatctaaattgcatgtgattaattactaatcaaaactaaattgg

SEQ ID NO: 8679 - DNA, 409 bp, Glycine max
  unsure (1)..(409): unsure at all n locations
tgaaaaanattagctagcttcacttaattaatctcaaggacttgtatcatactgaatttgtagcataataataagatataacattaaggtggtaaggtttaatttaaagaataggatttttttttcaaattaaagaagactacatatttatgaatcatgaagcatttatgctggagctgacatttatatacttagatagcacgaccttttcaaggaacacaaaaaggccatcttcgtaaagagaaaaattaataaaatttagaggagtggtggttctttcatagttttgtttgcaatggaaaaataaggaggacaaacgaaaaggggaaagagaaaagtagaagtaggctagctatgtcccatgtatggngattttcacgaccaaagaaaggaccacacagagaaacga

SEQ ID NO: 8680 - DNA, 399 bp, Glycine max
gcgcatgcaagtcttcccaagcttttaagttatttctcaaatctgtcctaagcatagttcccaaattcgtattaacaacttccgttcgcccattggtttgagggtgacaagtggttgaaaataacaatttagtgcccaacttgctccacaaagtcctccaaaaatgcaaatcatccagcctaggtataggatgcctatatttaatggtgatgttattaagggctctacaatcagaacacatgcgccatgtcccatcctttatagggaccaaaatcactgggacagcacatggactggtactatctcttacccaacctttgctaatgagttcatccacttgtctttgaatctctttggcttcatgggaattacttctataggctggcctattgggcaaag

SEQ ID NO: 8681 - DNA, 367 bp, Glycine max
ttgactagttcagaataaacaggtaattttagatacatgaatggtataagattggagttttcgaatgcttgaaagcattcaaaattctcatttgagaagaactccatatctatgaattttgggtctataatggaacgagagaaacagaggtttgagtatcgcatacgttgttcctctgatgagaacaatggtccaaagggaatgaacggaggaattggggtttcctgtgacctatagtgccgctgacttcgacttgaagtgcctttccgcttcttctatggctccaccatttgacgagttttttcaagatttcgattggttcaaatgagaatgagtgagaaacgataacgtctgcgctctgtgggga

SEQ ID NO: 8682 - DNA, 357 bp, Glycine max
catgcaagctttgagcgaatttaaacgactttaactttttactcggatgtcagatagagcgccctaatatatcgataccgtccaaattgaatgtttaagctctgagccaattctaacgacagtaacgttttactcggatgtctgatagagtcccgttacatatcgagaagctcgaaattgaatgttaaacctctgaacaattttaaatgacgataacgtttccctcgaatgtctgattgagcgccataatacatcgaaacgctcatagacgaacgttgaacctctgagaaaactcaaacgacaataattgtttactcggaagtctgatcgaggcccttaaaatatcgagacgctcga

SEQ ID NO: 8683 - DNA, 413 bp, Glycine max
  unsure (1)..(413): unsure at all n locations
ntgaaatgttgaattcaaagattgctaaaaaatatattactgttccgcctatgaaatctgcatggaggcaccatcttcaatttttggacaatcatttgcttagactttaagtagtacagttagtgccaccatcattagtttgtcttaggcaccaagtctataatatttcattattataatctacctataaaaggcacctccctgtaccacattagtaatatgaatgatcaattaagtgaattatgagtgaatgaaatttagttctatttttctcttcctccagtaagtgtgtgctaaattctttttatatttctattcttccactgtgtgggtttgagtgtttaatttacctcagtgctaacaattgatatcaaagtatgaggattctagtactactgcgagagaaaaaaaaa

SEQ ID NO: 8684 - DNA, 379 bp, Glycine max
ctgcagcttgccagcttgattatgatttttcgagtttgatgagtcctttgcagatctgagactggaagaaggaatcagaaactctgtcattcagtcgcatcatataagttgaagcatccaatccaccactggatagtcctgagaagaagcagggaaccaactgggtgccatatgagaaagaaccatctgaaaagccaaatcgttggtgattcaacataaaaagttcaaaccaaagcatctctcgggcttgcaggtgataatgcattgatcttataaattgagctcaaagacatagatgatgcaatgcaagatcaaaattatgttaacgccatgcgagacgagctcaactagatatagaaaatgatgtttgggaaataga

SEQ ID NO: 8685 - DNA, 398 bp, Glycine max
ggtacgattatgggggacccgtcatatgtggtactatgtggcgatcgggcgacggtataaatcatctctccacatccacaaatcacacatgaatccactatcctcaggtgcccaccttcaactgagctcacgtactcccacgtagcccttatcctcgttcctctcagcaccgggtccccatcaatccctccaagcttccacaacatccaagcaattcaaaatccaaacatcatgaactatccaaaatcaagaaaacagggcagaggcaaagaactctgcccaaaacacattccaataccacaactttctctactcaaatacccagtaacattgtctttgttccgcttcgttaaccgttggatcgacccgaaactattactggaggtccctagtacata

SEQ ID NO: 8686 - DNA, 363 bp, Glycine max
tgtctgggtatattaagggattagttaattcaacacacccagaaaaataaaccaattttaacttatgtataaatatatatataaaagttgaaaaaaaacatatacgtgaacatttaatcacaattaattatgtgcataaacttattgatggttataaaaattactttgaaatcatggattgacaacaaattatgattgaataaatggtgtaaaggtgttttgagaagtgaagatttctacatgaggatcctaataaaaaattttttttagtaaagctgaagacgaagaacttatggtgacaggctgccattactggctagttatattttatgattaaaataagcttttggctgtgtatgcaca

SEQ ID NO: 8687 - DNA, 346 bp, Glycine max
gcaagctttatacattcatcaacattttttgtttgtttcaaaactgtcatttttacataatgattatcaacatttctccctccaaaccttgcaacaaggctaccttaaaattgtcctaagccaaaggtgcctcagttactcttatgtattgattggattgatggaattaccacaggaaaataataattccttttaacttgcttggttataatgaaaaaacaatcataacacattcgccaagttacaattcttataagtaccaactttaaatggtataacattataattataataatatataaaccacatccgctatttggttctacatggtctgtacataactctc

SEQ ID NO: 8688 - DNA, 384 bp, Glycine max
tgcgaataagtccaacttctgggtcttggggattattttagaaagccaaactcgatttgccttagattttaagcattgttcttcctgcactttcattccaaatctatagcacaaatttacaagtcgaatgtgactctttttcagttcaatcccaagcctctcacatatctgtttacaaaaaaatcccaataaattcaaagtgcagaggcaatgatattcacatttaaggatgcatcattgagaaccagccctaaaaacataacttcatttgaagagagagaagataaaaagaatggagctgatttcaattaaaaagttcgaaagtttatacaagagacaaacattccaaacaaagagaaaaggttgtcgagctgtaaatattag

SEQ ID NO: 8689 - DNA, 379 bp, Glycine max
agcttgccgctagagttgtcccattaactgctctagctcttgtagactggcgatccctaagctcttgcccttgacttgatagaacctctttttaaggtaaaggcatttgacttgatcccatgttttactaaagtgaacaaaacttggtgcgaatcaaaactccgacatctatcatgggtggaatggatgaatgcatgaagaaatgcatataacatagatgtgatttatgaataccggagcccgagatattgtccccatcttagatacaacatcttggggtagccaattgcccgacgtatgtatttaagagagtggtatggaccctctgtggtttgacaaacagatgggaccaaaacagaatccctgcgcgatgcatatg

SEQ ID NO: 8690 - DNA, 336 bp, Glycine max
agaaccacaaacaaaaaattatttgttattagctttttgtaaaacaaaaatattgacatatgttaataaaaaccatttcatacactctgcaaaaccatttcatacagtatttgtagtgtactctcaatggaaatacacttatgagataacctctaatattgttttatcagtgaaaaactctataaaaaaaggtataaccaaaagacagaaactccaatgaccttataagtccaatcagctgagcccactgagcatcaacagtactccattgatccccctcaataaccaaaaaaatatgaaatacggcatgtgagaatagggtccgagaggataaca

SEQ ID NO: 8691 - DNA, 388 bp, Glycine max
agctttaaaaattgaattaaagcttttaataactgctaggaatggattaccatatatgtgtaaacgattacacagtgcaaattttgaattcaaattttaatagctgacgtaaatcattttcggccactagtaatcgattacatcctctggtaatcgattaccatatagtaaatctcttgaaaaagactttttaacttaaatttttggccaaaccttttgctacttcgattaggaattcccttcctatttaatatacccttcctaagactctatagactgtcttgatcatccatcttgaatatctctaatgtctttgtcttgacaaaagcttagagaaacatgtgatcctttggcatcatcaatacattcagcttgatcctttgtctac

SEQ ID NO: 8692 - DNA, 408 bp, Glycine max
tgacccattttgttttttggaagataaccaattattagtagtagcaactctcaagactcacaaaatgacaaaaacactctctaatgggatgaagtttttatttgaatttcttttactgtcaatagaacactccttgctgaagttgcttctgtatcttatttttattggaatacaaatgtgaaagtaatgtcccatatcaggataagaagattaaacattatataaataaaagaaagatcaacctcaaccttaatgttaaccttaagattttgtgttgagatatgttattatttagaaatttttgtaaataaaccataaatattcttatcgaagataattctatttgagtcaaataagactataataaatgataaaatttttcctataaatacatcttaaaatttttga

SEQ ID NO: 8693 - DNA, 366 bp, Glycine max
agcttaaagggattatttagatggtaattgtttagtataactttattcaatgatgccatactcatatccatatgaactatttttgaaaacagagatctattgtttaataatgtgagatcctgtcccagcaatgaatacaaatatatatgtgatcattatattaaagcaaatacagtttacggcccaagaaaaaataaatagatataacgcccacacaaagtgtcattcagcaaaagcaagtgtaaaattattctataatagcaaccagattagtagttctaaagagaattgtgatatatacgcttttgtaccaagtaaagttaattatgaaataccttctttctattttaatttcattttctatag

SEQ ID NO: 8694 - DNA, 321 bp, Glycine max
ttattcagaaaacttaaaggtatctctcgtactttaaagagagagaatcatcttaactcctgagtgaatcaccgacaccttggctgtatcaaaagactgtcacaacctttgtgtggcgcccccgctggaaagagtgaggctttccttcctttcatcattgccccttgttgctcttccaccacatttccaaaaaagacacctcctgccacatatatctcgtggccataacttccatcttacgcactcaaatcacgtgattcttgagcctaaattgaaatctcaaacgagacctttccctcgctcgggatcacctctttggag

SEQ ID NO: 8695 - DNA, 338 bp, Glycine max
  unsure (1)..(338): unsure at all n locations
tatgtctcgttcgtaacatgntcattgagggcattgcgatgtaccacaaaacaagcctcgtatcctgcgggctgtattgataatttgttaatacgatgtggagtttgcttagagaccttgcttagagggggcgattttttctgactgcccaatttttattactaagacctgtcttgcggtctgcattaatgaagataacaacgctaacccaatgtatatgcgcgcccgttctccacgtggtagcctttatcggatagaaattaatcatattttttaatgaaccctttcttcgaaaaatacgacgatttttttccatgttggattgaatgaatacgtcg

SEQ ID NO: 8696 - DNA, 330 bp, Glycine max
tccatcataacctatgttagatcatgaaatattttcttaatgttacaaagcttttcaactaataaaaaaatcctcaataccttccaaattttctcaaataaagaattacaatattctaacctgatcttagcatgtttcttttgttgttttgttcaaatttgaaagaaacctggtatcttgttagcataaacctggtttctctctcaaatgacaacataaaacccttctcaacccctctttatattcatacacaactactgatctgctagcataaacccacccttatgggactaatcaattgctggctcattccacttttttctaacataa

SEQ ID NO: 8697 - DNA, 407 bp, Glycine max
tcatcctcagatccctctagttggactaggccctatttagacagccctcctaggcttagactaactgaaactaagcttcatccttagatgttggactagacttaaaacaaacagcattattgtaacaacatatataaaaccaaaacttaatctgtagatcccacttgtaagactaagtttcaatccttcttcaatcaagttctaaggcaacaatacatttcccaatgctaaagtcacctaactatgcatacaaatgggtgatcaaaccaagagcatacaaaatttaagcactgaaagaagcattgaacacaataaacacaatcaattagatataaagtaattacatcagctattctttagaaatccccaacaagggtgtttagctagccattacagagaaaccccta

SEQ ID NO: 8698 - DNA, 381 bp, Glycine max
agctttgatggttatgaaatggttgttattattcaatatttatatctcaaaagtacctttaacgtataattgtgaactggcacgtcttaattatgtttaatggagaaattgagatgtaagctaattaactaatgtctataaactgaaaaacgaagaacctttaattaactaacatattaattactgttttctattaaaaaaaaaaaaaaaacctcacactaacgtatacgccatttttttctaagtttaccctacaaacatatttaaatgccgttattgctgaaacatggaaacacttgacacttggatggttccgacatatatgattactcttttcttctcaaaataagagtatcatttctagttattttatacatatta

SEQ ID NO: 8699 - DNA, 409 bp, Glycine max
ttataacacgctaaacatgcaaactacaaactgttacaaaaatatctaccgcaattataaaatgttctaaaagcaggaaatgataataaaagtgttcaaaagacaggaaaatagaatataaatcctgtcatgagtcctatgatgctttagatgggtcatcatatggagcagaaggggcaaaatccatggctgcaacatcatcttcatcctcagagagctccatcaccggtgtcgtcattggggatgcctatagaatagagagctccagcacaggtgtggtcactggtgatgcctgtggagtcgtctctggagttgcctccgcagtgtcctcatgagtagctaggtcagtctctgggtcagcctctggcatgtctagctctgggatatctggtgtggcttctgggtcaac

SEQ ID NO: 8700 - DNA, 147 bp, Glycine max
tgtcgactcgagctcaatgcaggagcccacccacccatccacatggttgcctctaggtgtaaagagtcgatcactctcactctagcctctatttccgcatacacttgagcatactcatccgtgattctgtgctcgagggccgtggct

SEQ ID NO: 8701 - DNA, 406 bp, Glycine max
tgaaagagcccgggtagtcaaagagaagttcaagtccatagccatcaaagtctgaagagagtatgatgaactaagggacgttaatatggccaccgatgaagccttggaatgagaaaccaagaaggcccgaaaggaagaacacgaccaaaacaagttttgaggggctttatagggcagcaatagtgagctcaaactctgaagaggtgaaaggaatcatcatgggtcaaaggcatgatctggaaggacgagctaaaggcttgccttaggtcgaaaagaaatttgtcccaacagttaagcgagactgaagggaatatgtgggccatcatcgatgagtgcaaagagaagctaaatctagcggcgactcacgagcaaaggctagaggatgagtacgccaagatatcagcag

SEQ ID NO: 8702 - DNA, 391 bp, Glycine max
gcaagccttaagtctattacatctatggttatttatttatctttatatgacaggcgtgatgagcaatcccttggagacactttctgcaaacgtgttatggtgactcgtggcgacaccataacaaaatcacttgatccaaatgctgcaactctcatcatagatgcattggctaaaatagtttattcaaggctctttgactggaaaattccgtgatggttatgaaaatataaataagtctatatatcttagaaaagctcactttaatatgcatgaactttcgtcattcaaataatgcaagcatctgttgatacataattgtggactaaactaaccacctctattgagcaaaatccagacttcaataacttgattgggtgctagatatttatgg

SEQ ID NO: 8703 - DNA, 416 bp, Glycine max
  unsure (1)..(416): unsure at all n locations
tgggccgattnntgccttttgtgggtcattttatgcttggaagtcaaagcctttgcacttggattttgggatgcaaaattgagctttactttgtgtaattagcttaattagattgattagatgggcctaatcaaggcccacccttttccttctgattagtcacaatatatattagtatagttagttagttagtgagttatatattttcattttgtacaaaacaaaatttagaaacttgttgtgcaagtttttagatcactctctttttctctcaattgtttttcatttttcttcctctcttaaactatgttcttctcctttcttgcacaaattttgttgctcttccaatggtaaagatcatggaaggctaaataatcaattaattcaaggatctagtccaagcaatgaggaatttg

SEQ ID NO: 8704 - DNA, 201 bp, Glycine max
cttaatcttgacctcgatataatatctctccgaataaagatgagcccatcattaacctaaaaaggggcgatacaaggctcagatatgaatgaagcaatgcgcatgcatgaaaccaagagaagaataacccgtggtaatttacatatacaagactggaacagatccatctgtttaatactacactactagcattgcggtgcc

SEQ ID NO: 8705 - DNA, 246 bp, Glycine max
taatatatcgagacgataaaatttttcaacggtttctctcgtgagattaaaatggtcataagttttaactcggatgtccgattcaggagcttcacatatcgagatgcacgaaattgaacactggaagctctagagaaattctaatggtcataaattttcacacagaggacctattcacgcgcttaatatattcagacgctcgaaattgaacaatggaagctctcgagatattactatggtcataac

SEQ ID NO: 8706 - DNA, 319 bp, Glycine max
tgaggcttgacccatcaccctccttccatctgaaattgataatgaggctattgccgtgaagttagtgaaaaacagacctcaagtcctttcaccattctttaagaagctataagctgcctttgtggaatatggtccaccaattatacgcccccatagcagaacgtccctgcttgctggttgaattcgaaactcagcaatgactgccataaaagctgctgccatataaacttcgttggtcaaagaagtttctactccattgaaactctcacttccatccataatacactaaaatacccattgagttgaataaatgggacag

SEQ ID NO: 8707 - DNA, 323 bp, Glycine max
tctgatgaatctaaagatggaactcttcaaaaaggttgtaactttttcaaatgggttttaagtttatctaaaagtgattactattctgaatggccttcttgaccatacatgacaagtctatcaaaacaagggtttgtttcgtatttttaatcaatcacttacaatcttttacaagccttgaatgtctatacacttcttcttcttattttgtaccaaaagctttctgaagtttactggttttctaaaccttgtaaacttgcgctattcatcttttcattctcttcttcctctgccaaaaagaaattgccaaggactaaccgcct

SEQ ID NO: 8708 - DNA, 162 bp, Glycine max
tgcgtcatgagaaacgcgtatctaatgaatattggacatacagacgatgctactggattatatgagctaactacactgaccccctaagtatacacacgagaagactacttttgagacttggtatggtgataaaccatccttgaaaaattttaaagtcttagt

SEQ ID NO: 8709 - DNA, 221 bp, Glycine max
ggcctccatgcactgggtaaccgttactttccttggatctggatgcgcgagtattttttcacgatgttgttcattcatgatcttattcacgtggcgttgtaattcttctttctgccatctaaaagggcgatgcttaaatttaaccagtcaatgtattgaaaatggaacttgacaaaatcaattgatagctgttgttttggagttttatgatatgttctttt

SEQ ID NO: 8710 - DNA, 330 bp, Glycine max
atgcaagcattgaagcttgatagcggaattgcaagcattgggtatatttcaccatgtattatgaagaaaaatgttttgaacataaattaacaactgctaacggggctgagctcattgggattagttaaagagaaagacggatgataatgaacgggacaaagatgcttctgatgaagggttgacaaggaatataggacagaaaatggtaatactgcgaagggcgagataaatggacttcggcccaatactgggagagagtattttttatagagagatgggggagacatgaactagccttgaagaatggtaatgtattggaacgcttgggtt

SEQ ID NO: 8711 - DNA, 289 bp, Glycine max
agctctcatgagagtctcaatctttagtgatatatcttgcatctactttttttatttaaaatgggatacatctatctccacctggttgacgcctctctatataatgctcatatcccttaagttgaggaatgggatagaacacatatctttaatgattttgatggcatcaataaggagctttaaaatgaggtaacccccataagcagcattcagactcatactataatgtgaggacactccaccatacaaaatatgaactagcttttattgagtaatgtcatggtgtgga

SEQ ID NO: 8712 - DNA, 357 bp, Glycine max
agcttgaacaggatgctttaatgtttgaaaagaaatagagaagaggggagcactaaattgtatgaagatatgagggagagaagttgaacattgaattttgtctgacccgactttcattcattagagttccaacgcgggttacagatgcttctattcatagactaggtagcttccttgagaggccttcttgagaaaacttccttgtttgagaaaaatttcttgagaagctagagcttatctgtccacacccctctaataagctaagatcacctccttgagaagctttcttgacaagagttctaacataactgtagcttagctacacacccctcagattactaagctcacctccttgag

SEQ ID NO: 8713 - DNA, 402 bp, Glycine max
tggcttatcgcacgggtatcaacatataaagtgtctaagttacctgggcttagagattcagcctcgcttagccatacgtagttcagcaagaggatgagtgttcatcctcaaaggatgaactcgcttagctcggtaagtgcgcttagcgagttcttcagagaatgcttacatactatgagtatgcatgaactcacttagcgcagcatgctcgcgtagctagttcattgcgttttccagaaaacacaaaaaacgcactccgttttcttgcactattcaagcctctaaaaggcatatcagacatgcaatgtgtgtgtcacactcaatatagcatacaagcgtctatagccctaatcttgaactgaatctaacaaaacataataaccctaaaaatctaaaactaca

SEQ ID NO: 8714 - DNA, 362 bp, Glycine max
agcttgctttgttcaatttcgagcgtcttgatatcttgtgcgcctgaatctgacctccgtgtggaaagatatgaccatttgaattttttgagagcttccgatgtatcaatttatgctggctagatatatgatacgcctggatcggacctccgggaggaacgatatggccgtttgtattgctcaagagcttcccttgtgtcaattttcagcgactcgagatattatgcgccggaatcagaccttctagagaaaagttatgaccatttgaagttctccagagctttcgttgttaaatttgagcgcttcgatatattatgctcctgaatctgatttcgcgtggaaacttataccatttgaatttt

SEQ ID NO: 8715 - DNA, 116 bp, Glycine max
cataatactggcctcttttctaaggctttgggcttcgggaccaaaataacaagaactttctgcacctactatatgtggacttgaccaaggctgttatcggaaagttgctgcaatct

SEQ ID NO: 8716 - DNA, 397 bp, Glycine max
cgactgcagcaagcaagcttgatactgatatggagcaattcaactacaggatcttcctcactgagttcatgtgggagcttaatgatgacaccccataggggcatttgcctctcccaaacgctttcagagggacacatgtggtcaacaacgttcttacacacccaacttttgatgtagttgacgacctagaagataaacaaaaagatggtgagaactacgaacatggaggagcaatctctgccacaggattaaaggaatatggttcttctttaaagaggatcttcaaaacggactatagcttctgaatgcatagaggaatggaggtactttactttggacgttaaagttttacgaataagatgaacatatagcagtaactagtattaatttattacca

SEQ ID NO: 8717 - DNA, 329 bp, Glycine max
ttgttagtgcgggttcgggagacaaaggtcaatcgttcgcgatatgcgaagatgatattccgagtactttggatttggtacgaccatgctctcctgatttccagctgggaaattggcgagtggaggaacgccccggcatttacgcaacaagcataatgtaaacctttacggttttaaaagctctatagttgggcctaggctttagagttttcattttgttaaggctttgtgtcttttgtttttgaatttataatacaaggatctttcttcatctgttcctggtctctacccattctcattcatttgcatgtttaactttttttttaaaa

SEQ ID NO: 8718 - DNA, 345 bp, Glycine max
  unsure (1)..(345): unsure at all n locations
cgcttaacanaaggcatgcgaattgtggtggaattcctatagcaattcccttatgtcatcaaacatacaatgggaaaaggtaatattgtacgccgatgctctttctcggcgtcattcattactttctatgcttgaaacaaaaccgatcggtcttgaacgtttgaacagcatgtatgaaaatgatgaatcttttggaaaaatttacagttttgctcgccctatgcgaaaagagaacacctcagtcgtcctcaactgactgtgatctgccacgactatgtacaaaggtgtaccaaccatcatacattctttcttctacccaaacaactactccctgcgctcctcctt

SEQ ID NO: 8719 - DNA, 425 bp, Glycine max
gacactatgatactaagctttacatgcatgttcacaccatatttactatacttcgatcaactgatgcaatctatttgattgaaaagataatttatattactcttctaatgtagtcgacaacaaaaaaaaaatataacaaaaaatattgttgttcttttaaagggaagtcaaatggcagatgcacaaaaaataataaatttaaatgtcttttatttaataattatttattttatagaaaaattatttcaaatcaaatatataatgtatggaattttaatacttagttggccttcagccaacagtgcctaattctaagagtcatttcaagcacaggttacaggtctttgctttcaaagtaacatggggatcaatgctctcaacaaaaacattattgcaaaataataacacatgaaaaaggatatagt

SEQ ID NO: 8720 - DNA, 395 bp, Glycine max
agcttgtgtttctctcacagatatgacatgcatggagtcctttgacactatatccagtgaaatttccatctgtcggaaagtcatcaatagtacaaaacaccattgaccgtaacctgaaggtctgctatatattcccatcccacacatcaaccccatcttcccacaattttctctagtcttcaatcaacagagtgagatacacattaatatcattccctggctgccttggacccgctatcatcatacacagcataatgtattttcgcttgatgcacaaccaaggagggaggttgtaaatcatcagcaaaacagaccatgaactatggtttgtgcttaagttaccaaaaggattcattccatccgaagcaagaccaagccttaggtttcttcgctca

SEQ ID NO: 8721 - DNA, 83 bp, Glycine max
tccttaaagtcatattattattatgaagacttgcatataactattgacgatacccgttgattatcatttatttaagcgtaaca

SEQ ID NO: 8722 - DNA, 307 bp, Glycine max
tcccgcatccgcacttggaaggatctgattaccgctttcctttagcagtatcagtacaactctgacatggctcctgaccgaactcagctacagaacatggttaaacgagaaagtgagtcctttaaagaatacgctcagcgttggagggacctggcagcgcaagtagcccctcttatggtcgagagggagatggttaccatgatggtagataccttgcctgtgttttactatgagaaattagtgggctacatgccctccagcttcgtagacttggtattcgccggggaaaggatcgaggtgggcttga

SEQ ID NO: 8723 - DNA, 400 bp, Glycine max
gcatgcaagcttgctttaacagcatcatgcttagtattgcttgacaacatctgaattcacaaacaattctcctccttaaatctcagctagcctgcattgatcggactttgcacattatgtttcagggtcattcaatgcttaatggaatgccccagaactcccccatgataagcacgtcacattggagctgtatcctctgggaaatggaggttgaggaatctttgatgggctcacaactaccatttcattatcgagcacatacgggagtaagtcagcatacaacattggaattggggagaattctacaagcttcttttctggaaagttccttccctacttggtgttttgattggtattacggatggtgtttggtctcggatgtgcatcaagtggatcttgt

SEQ ID NO: 8724 - DNA, 386 bp, Glycine max
tgaagttaataaccgatataaaaaaagtggcttttatgctagtttaatgtttgatgtaaaataagtcttacattccacactagtgggatcttcattggtcacgtaaccaacgtaaaatcctcattctaaccaatcacactttctatatgcccttatatatatacttgcattttaattttagttgaagtactttatcaagctgcatcatgatataatttaacactcatgagtactttaccaatgacaccttttcttcgtaaaaaataaataatgagaaagagaactcttgaatacacttttctaataagtacttgttcgcaaaatgttatccttattcacaagtattccggcctttattgctcatgttccacatgacgttaaaatat

SEQ ID NO: 8725 - DNA, 397 bp, Glycine max
agcttatccggcctcccatcatcttagccttcattgagaaatattgcaagcccagggaggcacaacagcaggaggagggccagtagcatccagccgtagatgtgtctccataacctctacaggagacaccatccctggagtccatctccgctcacatgcgaaggatagagctccagatgcacaggtatatgcagcatgtgactggccagcacgcggtcaatcattggggtcagatgcaactaaatgtgaccttcaactgatacactatgcaccataatgtattacctatcaccataatgtattatctatcaccataatgtattacttctcataccctaatttcatccggggatgattgtttgccaacatttgcaacccgtaggggtttgtgacgttt

SEQ ID NO: 8726 - DNA, 418 bp, Glycine max
tgattgaatagtgaattgattgaacattgtatgtcttggcttgttttgtatggaatgagtgtttgaaagtgattgattgagaaaatgtatgaattgaatggattgggatgattgaatgattgttttgatcaagtttactgtcattagaagagaatgagcatatgattggaattatgtctaaaaatgttaatcgattgtcagattgattgtgaaggaatgcattaactgtatcccggtgagaatgtgatctttaaaactttgagagaaacaactatcatttagtgccaatttttgtgtgaatctctgaagtctggcttggatgcatgaacttgaggatgatgaaggcctgtttgattatgaatagctacttagccaaaaagctaaccttctgattgaatgaattatcccttgcacccag

SEQ ID NO: 8727 - DNA, 344 bp, Glycine max
agcagcttgttagcgacatatgaggtatctgagatagcaatctaccttatgcactcctcttatgactagtacatcgatttatggcgctcagatgttgggagtcggaagccatcattatcaatttaagtttcgggcttcaacaggaggcatgtctccgagggctccaccagtggcagcatgaatcgaacttctctccatattactgagtccttcataaaatattggagaagcaactgctctgaaatctgatggtgagggcaactggcacatagatttttaaatctcttccagtattcatacaggctctctccactgagttgtctaatacctgagatatccttcct

SEQ ID NO: 8728 - DNA, 389 bp, Glycine max
  unsure (1)..(389): unsure at all n locations
tatgcgcatatttccttacaaacgttctcttgctcttgacattctattaaccaaaaaaatgcacccatatacaatcaaggcaggttcgttacctacattatttacacgtacttccaaggtgcatttgttacttacatcacacacctccttggctaaattcacatacatgcatactcaaagcattttggggtaccaaaaattgcacatgtgcacatcttggtatttctaatacctatacatacacaaacttcatgatgaatcttgactatctacacaataaggtgctacattttatgctcttttcaagtttttgctacctaaagccgcatgcaaattcaagtatattttcctttgctgactaaaatngtattcaaattaaaaggtataca

SEQ ID NO: 8729 - DNA, 544 bp, Glycine max
  unsure (1)..(544): unsure at all n locations
cgctcactccacactcanacagtaantgnanacgatgagaatttggtaactacgaatgttgaccacacacgccnacnnaacgnnnngnnntttgaaaccttggaaacccctggaanccacgngatactatcgaatactcacgctgcatcgacgagagggaaacagccctattcaccatctaatgcccctacatgaccgatcagagagaaacgacgtaagggtgcagacacaaccaggaggcttgcctagaagcagcgccccttgcaagagtgcgcaatagctcactgatcgagcgctcttgcgccggagacgaacggggctaagcgaacggctgaagctgtgggatgcaaaaaagaatccgcaggggagcgccccgccttacagggaaggacccgcgcgagcagcgctggacgaaacagaagcgagaatgtcagcttgagtaacgcacacggtggggagaatccaatgcctaaataggacgacgcgctcccagcggggaatcacccaacccactgctataatagaaaaaaccaccaaccactcc

SEQ ID NO: 8730 - DNA, 129 bp, Glycine max
cctttcgcgtgacatccccaaccaatggaaactcaaagaatgaactgactctcagaccttaagctacgagccgcagcgctcagaaaatcgtttgtcacttgacggagctatactggcctggtgactcta

SEQ ID NO: 8731 - DNA, 270 bp, Glycine max
ctgagccgaaacgaacaacaataactctttacttcgatgtctgagtgagacccttcatatatcgagacgctcgacattgaatgttgaagctctgagccaatacaaacgacaccaacttttaactcggatgtctgattgaggaccggaatatatcgagaccctctaaaatggatgtgagggctatgagccacttgatacgacaataactgtttactcggatgtctgatagagtaccgggctatatgcagaccctctaaatagaatggtgaa

SEQ ID NO: 8732 - DNA, 353 bp, Glycine max
agctcatcataaacgattacatattcatggcatgagacagggactgatttattcacgagtcgttgccttaatcagttaccatgtgatttaatcgactaccttctctttttataagggtttcacaagtaaacaggaacgctttaatcgattactttgagtatctaatgacatatattgttcttgagctgtgaatgagttcttggaacaaccatttaatctgagaaaaagataatttttgcaatgccttggtgaggtatctattcaagcggtataaatgtttttttataaataaccgcctcgtgtggtctctaaaacaccaattttgaacttctgaatgatctagagcacgtgct

SEQ ID NO: 8733 - DNA, 410 bp, Glycine max
ctcaagcttgaagaatttacataaaattggttatggggatgattctgcaccgaagttatcttatcgagaaccccaaaaggcacctaatgggcatgctgttatgcatgttaaggatatactgcctcgaggccttatcaactctgggaatctatgttttcttaatgcaaccatgcacgctctcttgtcatgctcacctttcgttcatcttttacagcaattaagaactcgcaaccttcctaaggttagtttttctgctgctgcatgtcaactattaaccaattaactaatactgccatgtacaggttttagcttaacttatagatgagataataacattaaaggaataaagacctaaaagatgtattatgcattcagatttcccttatgctagaaaattattgaactgatat

SEQ ID NO: 8734 - DNA, 286 bp, Glycine max
acggacttgaacggcgccatgcagagggccagcctcgtacgaccgatgatggcctattatgtcctggacgagatatcccgatcttcgtgaccatactcgctcacatgcaaatgatacaccttcggaggctccagtgtatgcagtctgagactggccagacagcgagactgtgttgttgacagatgcggattgaccatccgatatactgagcacaatgcaccataatgtattacctcacaccttagtgcattatttatgaccattttgtaatcattcacatacccta

SEQ ID NO: 8735 - DNA, 412 bp, Glycine max
gtaacctcatcgtgcctcacagtctttatatttgggagccaatccaatccttgtgttcggactctcagccacttatgatagccgccgatgatcccattactgcttcccctaagctctctgtcctttcttcacgccgcatcccatgccttgcgaactccttggagtaccctcgcgttggggtcactaaaaccccgtgtgatgaaaggcgtgatgctttcgtctaatggcgctcctctcatggggtagccaagctgtcttatggcgagaacgagattataattaatacaaccccttgttcccatcaagggaacatatggacatccttcgcatgaagatagaatcttgattcttccttccttctagcgagggaaccaattaacagacgcccgcccatgctagccaagagttggtc

SEQ ID NO: 8736 - DNA, 374 bp, Glycine max
  unsure (1)..(374): unsure at all n locations
tcatttatccaatcacttcgtcacaacataaattattctaaagtcacatactttagcatacgtgacatgtgaaggatgttgntggtgagttcaagttctttccttggtttagacttcacaaaggctttttagtctttattctaatgttgcgcaccacatcttctcaaggacattttcaactttcctcttgtatatcttctaatacagctagcattcattatctgatgtgctctcagtatgtatggtcacgtatgaaaagtgagatgctttcaactttagtattctaatgtgtctgtcgaatgtgtgggaagtgccaaaccctcatttcgtcgggaatattgctctatgtgtattatttctcctattcttaacct

SEQ ID NO: 8737 - DNA, 357 bp, Glycine max
tcaagctttttttgttcccttgcatctgtttgctattccttacattccatgtgcatggttcttgattgatcatattatttctttagagttacaattcttttgatctgttttttccctgtttactgccttgcctgtactggttttgtttctctttgctggcttccatgctttcattgcatttgcatgcttttcgatttaccacattattactttaaatatatagcattttgactttgcttttctggaggatacttcatcatacttcagttatgcttcaagtattagaattttgctctatattgcattcattcttgacattcatatatacctgatttatataccttggtatccttgact

SEQ ID NO: 8738 - DNA, 306 bp, Glycine max
ttacaaatagaatcatcttgatatgactggtttttaagtcctcttacgaagctatgcttttgaagctttgagattaaccttcagctagcatggtcaaacttcttattccatacccaggaatgctctttgactaaaagtgagcatgacaccttctgattggatagatcacccagtttaatcttatagtgatttccttgtctcttagtagacaagagtaaagagttgtccttgttttggatgatacacatatccttgttaaagttaaaggtgacattgtatccactatcatacaattgacttatgctc

SEQ ID NO: 8739 - DNA, 183 bp, Glycine max
gggttatgaaaacttgttgacctcctgaggggtgctattgtccaaaaccgagcctgagtcaatcggatccaacgccggcataatttgtgaattacaacttgagaaggctctaaccaagccaacattagtcaggtgggagctaatgggaacaacaataccacttgcaatgacgcttgtggaggc

SEQ ID NO: 8740 - DNA, 394 bp, Glycine max
  unsure (1)..(394): unsure at all n locations
ngagatgaggaagtgtagaagggtgaaacttcctgcttttattcgttgaccacaaagtggtacctagagatatgtcgcggggggtcaggagaccttggggacgtcaggtggggtgctattgcccaaaaccaagcttgaccaatcccgacccaacccgggcatagtcagtcaatgagaacctgtgatgtacctaaacaggcgagctcctgacagtcaacagataaaaggaacaaagaccacgaagcaaggaggcttgtgtggtggctggccagctatgaaatttgattgatatatgggatatgggctctggtaatcgattaccaagggtgggtaatcgattacaaggcttaaaaatgaagacaggaggctaagatagtctctggtaatcgattac

SEQ ID NO: 8741 - DNA, 386 bp, Glycine max
agcttgcttacttcaaaaaaaaaaaatatttattctctttcaattttgttacgttctccacttaaatctgaatccttgcaaatataatatttagatggaatattacattaaaaagaaaagacaggatagattgattaccggtaaagtaaagcagttatgtttttattgggccgaaataataagaggagccacgagtgtctataggtggccaccaactgcataataatagtacatgctatgcttgctaatgttacggggtccaagtccaacacatccgtgattttgataaataccaacgacggttgcgcgagctcacagttactaatctcacgcacattctttctctctctagattctgcaccacaatccgcaaaatgaccaaatac

SEQ ID NO: 8742 - DNA, 273 bp, Glycine max
tggcacaagatctttttttttgccgacattgcgcttttttttatttatgtatcagcacacgccggccaataatagttttagtacgatcaagcaaattttcctttttgatttcgctcagcaataggtttaccatcgaagtcgcctggggtatttcgtgggaactcaaccgccgttgagtttcggttgacattggcctgcattgattgaacaggccaagaataatatagccgaccatggcggcaaaaaaaatccttgacgtacttggataaaaaa

SEQ ID NO: 8743 - DNA, 367 bp, Glycine max
aacttataatatatctattggctctcaattacacgtctgcagactccttgcgaaacccaaaagggcatactttttgacacaggggtccgagaacagcgcatatgctgctgagaggtttgaaaaagaacaacggactcacctgaaaagatcacatgctagaagcatgcatacggaagctcaaatcatgcaacttgcttatcgagacgagcaaacttattccctgtagactcttgagaagttctagaggtcatctcgatctcattcatgtgcgctttatgcccacaacatagatatgatctcaactactagaatcaaacgtgctcctgcaatatgaatcgtgctaatatactacactgacgctccatgg

SEQ ID NO: 8744 - DNA, 336 bp, Glycine max
tttgggtcgtacttccattgctaagttcaagtctttaaaatctctcgatcaattgcaattctttcaccatcataacgaacatatgcaaggacttcttgctcaaagcattcgccacaatgttagccttgctgggatggtatgacaactcaaagtcataatcctttagaaactccatccatctcctctgtctcatgtttagctctttttggtcaaacaggtacttcaagcttttgcgatcattaaataatttgaatattgcccgaaagagataatgcatccatatctttaaccataaaccattgttgccagctctaagtcatgggtaggatagttcac

SEQ ID NO: 8745 - DNA, 386 bp, Glycine max
agcttctggaggaagcctcttaatgaagcttctagagaaaactacatgaagctgcctcggtaaaaatgatgcccagccttcgttaaccgttggatcatctcgaaattttgtttgcaactttaaaagacactttttcatgatctgaccgttgggatctttgagactattgtctggagtgtgctagaagcttccgttcccgagagcatctcttatttaagcatttcagcctttgctttcgtgtagcttaggaaaaacgtcatttattcttctttctttcttccaaaaccatttctaaagttccaagaaatttctccatcacccacatccaccattagccaccacaaaccatcattgttctccattgaaaacccacaccgagaggaacc

SEQ ID NO: 8746 - DNA, 302 bp, Glycine max
cggacaatcctcaacttacaagtcgatctcgtttgatgaagttttgcccaaagcccaaattctaaaacatatatcctaatgccctttgataaaatggtattgctgaatgaaatagtaaacatttacttgaacttgttctgggtatcatgtttgctatgcatgttcctaaatatttgtggcgagaagctgtcttaatagcatcatatttaataaataaaatgtctacttgtttactgattttatttagaaagcttcaatcaaagctctttatccaactctacaatgtatgctaacctaaaaaa

SEQ ID NO: 8747 - DNA, 394 bp, Glycine max
agcttgaaggtaaactaaatgcttatttaacctggtaacccatctagcgttgaatcagaaatctatacctgtcgcaaaagtctatggtttatgctcctctgccgaccaccacacagatctttttccttccatgcagcaacctggagcaattgagcagcttgaagcttatgctgcaaacatttacaacagacctcctcaacctcagcatcaaaatcaaccacagcagaacaattatgacctctccagcaacagatacaatcccggatggaggaatcaccctaatctcagatggtctagccctcaacaacaacaacagcagcctgctccttcctttcaaaatgatgctgggcctaagcagccatacattcctccaccaatccaacaacagcaacag

SEQ ID NO: 8748 - DNA, 417 bp, Glycine max
  unsure (1)..(417): unsure at all n locations
tgacactatagattgctacatcttgctctaaatgtacattgatgttcgtatttatgtgtaggaggttgtatgccgtttttgattttatagtactgtcccactggtaaaactaactttccaaatttttgccttcgcaggaaatggccccgaggaagcttgcctcaaagaggtccaggatggacaatgcagccgaaggaactagttccgctccggagtatgacagtcaccgctttatgagcgctgtacaccatcagcgcttcgaggccatcaagggatggtcatttctccgggagcgacgcgtccagctcatggacgacgagtatactgatttccaggaggaaatatggcgccggcggtgggcatcactggttactcccatggncaagattgatccagaaatagtccttgagttttatg

SEQ ID NO: 8749 - DNA, 356 bp, Glycine max
agcttgagatgaagaagtgttgataggtgaaactctctgcttttattgctgaccacagagtggtacctggagatatgtcgcgggggtcaggagaccttggggacgtcaggtggggtgctattgcccaaaaccaagcttgaccaatcccgacccaacccgggcatagtcggtcagtgagaacctgtgatgtacctaagcaggcgagctcctggcagtcaacagataaaaggaaaacaagaccacaaagcaaggaggcttgtggtggctggccagctgtgaattttgtgtaataatgggattgtggcctctggtaatcgattactaagggtgggtaatccattacaacgcttaaaatt

SEQ ID NO: 8750 - DNA, 364 bp, Glycine max
tgatctgtttcagtgttaagcacatttccatctatgtgcattattgaatcaacaagttcaaagggtccaaaaaccaatatgaagttcaaaacaaaccaaggcaatttttaatcaaaacaccattttcgacaaggaggaataattgcgaaggatgccaattacatcactgacaacagcatacttattactgcaaaattgttacaaaatagaggcccataacaaataaatgaaaaacagaggcataaatgttgtaaattagaataaaacattatgccagacctcccatgaagttgaaatgaggcaaaaaaaaaaactataatgaactaataacggttccagtaggttctacgtctgaaccagttgt

SEQ ID NO: 8751 - DNA, 284 bp, Glycine max
accaatgctgctatgggagtgttgctattgtcctgtgaaaccttatggacactttctgaaaggttggttgacatggggacatgtcgaagaccttctctatcataagccatctcccatttttcctttgacatgcgatcaatgcatgtgggtatggctggactcacatgacgaactttttttaaatgttgatcaaaaatacacttgctacgagtggaggctgcttaaattagtttgaataaccaatttaagtatatctaaacttaaataaacgcgacaatatattc

SEQ ID NO: 8752 - DNA, 250 bp, Glycine max
tttaatttcgagctcttggatattatcttgactcaatcggacatttgtttgaaaagttattgtaattcgaatgcgctcatggctacagtattgcatttcgagcgtctcgatatattacgggactcaatcggacattcgagtaaaaagttattgttgcttgaatttgctcagagcttcggccttccatttcgagcatgtcgatatattacgggactcactctgacgtccgagtaaaaagttattgtcgttt

SEQ ID NO: 8753 - DNA, 346 bp, Glycine max
catgcaagcatccggaagacaatacctacttctgctactcgataacaatacacggatccgcgaacgtaaaaatgatgcccatccttcgtcaaccggtggatcatctcgaaatttggttctcaacgtttagaaacactatattgtactcttcccgattgaatctttgagactatcgcgtggagtgagctagaaacttcgcgacccgagagcatgtcttatttaagcaattcaccctgtgctctcgagtagcttaggaaacacgctatttattcttctttctttctcccacaaccatgtctaaagatccaacaaattactcatacccacactgaaccattatccacca

SEQ ID NO: 8754 - DNA, 349 bp, Glycine max
cgcaatagtattgtgagcaataatatccagcttttttttggatctccccctcttcccccttgattttcctgtaaatcgataagtatgatatccactatgtctggctaaattctttgaaggcaccctcaaggggccttacttatcttcattcagaaaatgcgaatatgatttagaacccacatgtttattttacttttgattttttttttgaacacctggggtttgtaagcctgcaaaggtgtgcccttgatatatgttttcaaaaacaatggaagtcctttatggataggctggtgcttggaggaaaataagatcttcgtaagacccatgagtgtggactattattgat

SEQ ID NO: 8755 - DNA, 147 bp, Glycine max
gaaacttgaaatacacaagctatttttataactttttactgtaaaaagatgattgaagactttgaaacctacatgatcagcacgtgacaccccctatcttccgaatctttatttctaccatcaatatctaaacttgttccgtctaca

SEQ ID NO: 8756 - DNA, 386 bp, Glycine max
  unsure (1)..(386): unsure at all n locations
agcttggcagcgacttataagcaaaggctagaggactaggacaccatggtatcaatcctacatgcagaaagggaagcaagggaaagggtgatcgattcattgcacagagaagcaatgatgtggatggacaggttcacctttactttgaatgggagtcaaaagcttccccgactgctagccaaagccaaggcaatgggagatgataactcgactcccaaggaggttcacaggctcctcaattattgtcaacaaatgattatctgatggcccacataattaggagctactatggcaattgtattgtcgctttgattntgattaaataaaccctgtttgttacccaataaaatgaggttgatctaatcctgtgtgtttaaaactctatg

SEQ ID NO: 8757 - DNA, 382 bp, Glycine max
  unsure (1)..(382): unsure at all n locations
ttagatgtggcaagttttttatttggttaaccatacctcttgctccattaggttcttaccatttatacattccagtgccatcaaatgctgatgttatatgaaaattaataaaacagggacaactttatggatgctataaggcatacgtatggtaaacacataaaatatccagctataaacaaactcacaattcaaaaggcaactcctttgaacttgcaattgctgaaccagaatgtattctatttaactttaaaagtggcaactgaaacatatatttcccatagatttcacacttgttaagatngcatatcatgtcatccagagcatctaacgcaacaagcaatgcttaagaagttactacagggtcaccaaccaaacaaat

SEQ ID NO: 8758 - DNA, 373 bp, Glycine max
agcttgtaatagttgtctgtgcaataataccaagttcttttctggatcctccccctcttcccgtttttttcctctgttaaactgtaagtataagtttcactatgtctggctaatctttttaaaggcaccctcaaggggccttaattatctttatttagaaaatacggatatgatttagaacccagttgtcataaacaactttttttctttctttctgcgtgtttttcgaaaacctgggattggtaagcctgcaaaggtgtgcccttgatagctgtgtgtgaaaaactatgaaagtcctctttggttaggctggtgcttggaggaaataagatcaacgtaagacccaaagaagtctgtgtaggtcgcgatctta

SEQ ID NO: 8759 - DNA, 275 bp, Glycine max
tgcttacctatctttcgtgacccgaattccggttcctgtgcctcatgttcaattacaggtgccgagcttgggacacaattgtgcttcaaattcgtaccatattatagttgcttcatccccgcattttcacaatttgtatcactctgctgacttgcctaaagtctcaagacctgctgcatattcccatggcgtctcctattcaacaacttctgatgacatgtataaatggcatttacccgagccgaatgctctggatgattcgagttgttcattga

SEQ ID NO: 8760 - DNA, 372 bp, Glycine max
agcttatcttgtaactaaccaagccctctggtgtggtaatcgattacagggaattgtgatcaattatcaaaccctagaacgtagttttttttataaaagacttactattgtttactgataaaacctacacactcattgttactattatcaacaacaattaatgatccaaaatagacattgaaaaacaagcatcgtaaactgcttaactacaatcatcaagcacaatcaaaaatacaaaaacaatcatcagaacacaaacaaagacaatggacgacgatcattaatcttctaacaacaattaacatgactatcaaaacacaatcgaagacaattattaagtcacgattaataataaccatcagaaacaaactc

SEQ ID NO: 8761 - DNA, 177 bp, Glycine max
ttgcttctacatgattaaggaacaaagaaatttgctgtaattttaaaaaaaagattcaggacctcaccacactctactcacgtgtttctctctttgatggaagacactcgcgtttgaagctctcaatataggcttttgtgtgatagtttcactcttgccttttaacactcaactcct

SEQ ID NO: 8762 - DNA, 389 bp, Glycine max
agcttatcaaaatttcaaaaaggatataaaaaatctttcaaaagattacaaacaacttcaaggaaaacttgaagaaaaaatagataattcttcaaaaatttccactcaattatgtgatgacattaagagtctaaagttaaacacaacaaagcttcaccttgaaaatgaggaaatttgtaaagaaagatctagtttattggaagacctttaaaggttgaaaaatcaactggaaggcttacaaaatgagtttaccacactcaataaacttcatgatttcctaaatgagaaaaggtgtaatctactgaaagaatgttcaccagtccataagaattatgaaaacttggtggcaagtgaacataacttatgaattgaatgtgacagatataaca

SEQ ID NO: 8763 - DNA, 409 bp, Glycine max
tcagaataattgtaactaagtatatgtcaaaatatacaaaagtttactaacagatctaaaatcttagctaagagcctaagaacatagtttgtccaaagcctcattagagcaggaacatcttcatgatgaaacttgatcaaaattgaacagcaaaagaatacgacagcaagaatagcagagcaaaacatgtagaatatatgtaattcaaatgcccaaatcatgttcaagatacttgcatgatgatttgtaaatccattccccaattcctgttagtctacaacaataaattagcaactataagtctgagatcatttggcagtagtgtggcaagactttagttgaaagaaaaatgaaaagattgataattatttacaagttgaaagtaaaagatatgcaacgaataatgaac

SEQ ID NO: 8764 - DNA, 387 bp, Glycine max
gaaggtgctaaactaggggtgcaacaacttatcaggtcctatcccagtttctatctcaaacttgatagatcttgagagactggacatttcaagaaatcacatactgggtgccatcccttcaagtctaggtcagttgctgaaactactatggcttgatgtatctataaacggaataacagggcaaataccgagtagcctgtcacagataactggtctaaagcatgcaaacttcagggcaaacaggctgtgtggtgaaataccacaaactataccattcaacatctatcgaccggttgcttacgcacacaacttgtgcttatgtggcaaacctttagaaccatgcaagaaacaagggagtatgggtcaatgagatgctgactctatcat

SEQ ID NO: 8765 - DNA, 410 bp, Glycine max
cagctggacaaagaaagtgtcatcctacaaaacatgtgaaacaattctacaagatccttgtattacctttcacctgcccctagggcttacccaaattcgtgtggtattgaccatcattcaaaatgactccctatgcatcttcttgtttgcaggatctagatgataagatgcaaatgcatgtatgtttatgatcggacgtttaaatgtaacaattaaacaagtgttatcatgttcaattttacttaaacgcttacggcaccccgttgatcgagccaaatggctctggattcagtgagcaagatcgagagtgtatgttcttaaagatgataaaagataagagacacgacacagaacgttgagatgcaaatcattaacccacatttattaatgttgcgagtatggtttacaaa

SEQ ID NO: 8766 - DNA, 364 bp, Glycine max
tgaggtcatcttcatttatgaactccttctcctaattggcctgagttcctcttacggtctcttgagtgttacgtaatctaatagggtgttagtacacttcctttgaaaaactcttgacaatgacacattgtaaaattcatctttttataatgtagatgttatatttgtgacttatcactgaaccccatccacattggtgtgagcggaatttcaaaatgatgtctcatgttactaaattccgaaacacccctcaaccctttatggtatgacatgggcatagcactctgaatgttgtaattaacctccgttcgaaaatcaatattatatgggcttcaatttgacatatcaaaccttgtgtttggac

SEQ ID NO: 8767 - DNA, 258 bp, Glycine max
tgctctaaatttacattgatgtttgtatttattggagggggttgtatgccatttttgttttaagggtagcatttcttggtaaaaactaactttccaaatgtttgccttcgcaggaatggccccgaggaagcttgcctcaaagaggtccaggaaggacaaggcggccgaaggaactatttccgctccggagtacgacagtcaccgctttaggagcgctgtacaccagcagcgcttcgaggccatcaagggatggtcgtt

SEQ ID NO: 8768 - DNA, 329 bp, Glycine max
tcctttagtacgtacgtgaaaaccagcttttggaggtgcgagcctttgatggtactcggcgggaagtaatgggggaaatcgacattcctattcatataggcccccacactcgcaatgtggtgcttcaagtaatggatatatatcccgcctatagctgcctcttgagaagaccgtggattcatgccttgggagtggtcccttcaacgcttcaccagaaattgaagttcgcagtgggtggacttttagcgatagtgtcgggtgaagaggacatgttattaagctgcccctccttcgcaccatacgtagaatcagcggaagaatcttggaaa

SEQ ID NO: 8769 - DNA, 212 bp, Glycine max
cttgaactcggcggaccttagatccactgtgcagcaggctgcgatataaaactgattcaatttttcactactgtaggaacggtcccctcactattacataccgacacacccaggcgatttcgaatctaaaaaaacaggactgcagggagctctgtcggctcacaattataaaaaaaatgactctgcgatctaacccaaacagcacagctccc

SEQ ID NO: 8770 - DNA, 406 bp, Glycine max
tctcgacatatgatgcgcccgaatcggacatctctgtgaaatgttatgaccatttaaatttcgcgagagttttcgatgtttaatttcgagcgtatcgatatattataagcctgagtcgtacatccgtgtgaaatgttatgaccatttgaatttctcaagagcttctgttgttcaatttcgagcctctcgacatatgatgcgcccgaatcggacatccgtgtgaaaagttatggccatttgaatttctcgagagcttccgatgtttaatttcgagcgtatcgatatattataagcctgaatcggacatccgtgtgaaaagttatgaccatttgaatttcacgagagattccgttgttcaatttcgagcgtctctatatgtgatgcgcctgaattggacattcaagtg

SEQ ID NO: 8771 - DNA, 364 bp, Glycine max
ctgcacgcttgccagcattgaacaaagtataacaactatatctccttactcggatgactgattgagtgctgaatttatcgagacgctccaaatggaataccgaagctctgagccaatgtaaacgactataacctttttactcggacgcctgatagagttacgttatatatgaagatgcttgaaatggaatgttgaagttctggtcaaatcttaacaagattaactatctactgggatgctcgattgaggaccgtaaatactcagacgctctaagagaatatcgtaactctgagcgattctaacgaaaataactttatcactgatgtgagattgaccacgtgatgcacggaacataacatatgaa

SEQ ID NO: 8772 - DNA, 391 bp, Glycine max
tcataatgaacaccgcatcagagattcaaaatatatgacaaatgtaagcagcaaccctaagtactcccaattattgaaattttgtttatagaagttacaaggatacccatcctgcgaagcaagaggtgcaattggtaggtgtcaataataatatcttttttaagaagattgattttcagtaatgatctaatgaaatgtcacaaggataaaagaaacaggtccagcaactacgacactttcttctaaaaccatccatatttgcacatcagtaccttgatttggagagcactattgatagcatcacttacgagctcccagtttggacccatatcatgcaccagcaccacaagagcctgcaacaggcacgagaataatggtaagctctttacac

SEQ ID NO: 8773 - DNA, 259 bp, Glycine max
actactatatggagtgactacttataaagaagggatgggcattgattacgcccatcagatttactctaatcaaactaattacacatagtctagcccaaactcgcatgccaattattttagttgtcaggttttgaattccaatccgaatttgacccttgaaattgcaaaatggctcaagcttatttttgacaaaatttaaagattttttcttatctttttagggactacttagatgctccacttggagttctttagtgac

SEQ ID NO: 8774 - DNA, 287 bp, Glycine max
ggacggaccttttcaagattcttacaggatccataacaaagcctatagctggacctcccgcacaactatgtagtcgtcaccactttgaacatttctgatctaactccttttgctcgtggagctgctattgacgaagaagaactaacagattcgatgtcgtatcctattcaacgggaaggggatgatgcaatcctccctaggaaaggaccaatcacaagatccttgagcaagaggctccgagaagattgggctatagctgctgaagaacgccctaaggttctcatgaa

SEQ ID NO: 8775 - DNA, 358 bp, Glycine max
catgcgaacatttcatgagtaaccatcatttttgaatccctcaactagtctggttgagttcctcttcaagtcttatgagagcaacgtacactaatagggtgctattacacttcctttgaaaaactcattgaaatgatacattgtaaaacttatctttctataattattgatgctactatcgagactataactgaaccccagtcacactggtgtgagcggaatttcaaattgatgtctacttttaattaaatccaaaccacccctcaaccctttatgtatcgacatgcgtatagcactctgaatgttgtcattaaccttgattcagaattaatattaaatttccctcaatgtgacatat

SEQ ID NO: 8776 - DNA, 275 bp, Glycine max
tgggtcgaggtacttacccgttgtttatcgaagaacgatgaagaacgaatgaagaacgtcgaagaacggttgaaacctttgcgagattcctcacggaaaacgttacggaaacgtttcggaagcgcctcggcttagattttcttcacggaaacaatttttccaagcaaattcgaaagagagagaagtgcctaaggggctggacccttttctacttcacttctccccctatttatagaaaattgggggagaagcttgccgcccagctcgcccaggcg

SEQ ID NO: 8777 - DNA, 269 bp, Glycine max
ttgaattggatgggctatcgattaagatgcttcctgaacaaaacacattgcccaaaaatcacttcgaggcgaagaagaatttatgtcctgtgggaatggaatacccaaagatccatgcatgcactaatgattgcatattatacagaaatcaagttgcagaaatgcataagtgccccacatgtggggtatcatggtacaaagtccaagataacaaatttgttgatggtgcaagcaaaagcaatagtcatttagcaaaggtgtgctggtat

SEQ ID NO: 8778 - DNA, 381 bp, Glycine max
agcttctggtgggacatcttgacttgctttccaatctgacattcaccacaaattctgccttcttctattttcagattgggaatgcctctaacagcacttttgtcaaggattttcttcatgcctcttaagtgcagatgtccaaacctttgatgccatattctgacttcatcttctttggaggatagacatgtggaggagtagctggtttcttggggtgtccataggtaacaattgacctttgatctgctgcccttcattagaacttcactcttctcatttgtcaccaagcattctgactttgtgaagtttacattgaatccttcatcacacagctgactgatgctaatcaagtttgcagtcagtcccttcaccagcagtact

SEQ ID NO: 8779 - DNA, 374 bp, Glycine max
  unsure (1)..(374): unsure at all n locations
gtctcaaattcaccgtatattgagtccaaatacgggggagatattcggtaagaaataaaatggtcactgaaaagccgcatatacacctcgttttaaagaaaaactgttcgtacaaatgaatctaataatggcgtattttccaaaaggccgacacgaagctcccttcttaactaataggcaagtctgggtgtangaatgaacgaagaagcagaagtttatctatacagaatgctctcctagaacctacgccttggaatcctataagaaccatgatttgttggtagcctatcctcattacgagcctagacaggcatacagacgctgacgcaagctatttctgtatggatgggatgaaatgcaaaggttagggcttg

SEQ ID NO: 8780 - DNA, 271 bp, Glycine max
tgaaatcatatgctgcatgcaagcactatttgacgttttggaccttaccttccaaaccaccctcatgctaatatctttgaccgatgaatgaaagctcataccgatggaggagtgatcacaccttattgggtcgattccttcgcacaagcagcaacatttatcaacacttactttgcaggtgctgttggttccagcagaccatacggaacttcaccgatctggcgacgacaacaacatctaaaacgacagaccgttaaggctctattggaaa

SEQ ID NO: 8781 - DNA, 272 bp, Glycine max
gaaaagaaagagggagagaaagagagaggggggagccccaaattggaggaataaaacagggagagaagtggaactttgaagtatgtctcacaagactctcattcatcaaagatacaacaagtgttacacatgcttctatttatagactaagtagctttcttgagaagctttcttgagaaaacttccgtgagaagcttctttgagaaaacttgcttgagaagctagagcttagctacacacacccctctcataactaagctcacctccttgag

SEQ ID NO: 8782 - DNA, 350 bp, Glycine max
agcatgtgcttggtttatttaaattcccaggaacatgagcaactaggcgtgtgctactatgacttgagaaacaaaggtgatcaaataacaagccgagatttcaaagggactaggttgcctcctaatattgcttttttaacgttttgagcgtggacacatgtacgacttgtcagtcatggacctacttctttgctgacctttggccttggacttggtcgcctattagtcggccatgtgtcataggcaatactctaacctttttgtggatgagctgacgggctctgtctgtggtgacggtgcatttgttgcctgttgctggacatccccacgctgttgggtgtctcgccctc

SEQ ID NO: 8783 - DNA, 248 bp, Glycine max
  unsure (1)..(248): unsure at all n locations
cggacctataaaactcagcttgtgtgttacacacgtctcatggagttttgagataaaaatcgcaactttaatgtggtcatccactctgtttgcctacaacgtgccaagaaatatattgaaccattacaccacccaaaaaggatgaaaacacaaaaagcttggcataagaaacgatgagcacgttggataaagctcangaacacaaaanaattataacttttgtattgcgagaagtcagaacactaaat

SEQ ID NO: 8784 - DNA, 396 bp, Glycine max
agcttatgctgcaaacatctacttatacctcctcaacctcagcagcaaaatcagccacaacagaataactatgacctctccagcaacaggtacaatcccggatggaggaatcatcccaaccttatttggtcgaatccttcacaacaacagcaacaacaacaaccttactttcaaaatgctgttggcccaagcagaccatacgttcctccaccaatctagcaacaacagcaacaacagaaacaacaaacagttaaggcccctccgcaaccttcgcttgaagaacttgtgaggcaaatgactatgcaaaacatgcagtttcagcaagatatcaaagcctccattcagagcttaactaatcagatgggacagttggctacacagttaaatcaacaacag

SEQ ID NO: 8785 - DNA, 406 bp, Glycine max
tgtatgagtactgggaaagattcaagaaattgtgcgcaagctgtcctcaccaccagatttctgagcaactccttcttcaatatttctatgagggacttaacaacatggagggaagtatgattgatgctgccaatggtggaatccatggtgatatgacccttgttgaagctaggaatttgattaagaagatggcttccaactcccaacaattcagtgcaagaaatgatgctattgttcttagaggagtccatgaggtggccacggattcatcttcatctactgaaaataaaaagcttaaaggaaaacttgatgccttggtcaacctagtaacccagcttgccatgaataaaaaatctacacctattgcaagagtctgtggtctatgttcttctgcagatcaccattt

SEQ ID NO: 8786 - DNA, 394 bp, Glycine max
  unsure (1)..(394): unsure at all n locations
ngcttggtgaactactttgaaaactatgggaggttcggtctgtgttacgagccaacacatgccgataagagaagggtcgccttataaaggaaagaaagaatcctagcccatttacaagggtggagaccacagatggaaagggtccctatctgtgacattagcaagagctttgttagcgcgaggtggatgcatgagaatcaggttgttgtgctatataaagaaaccaaccaagagcagccaagctgggtgcagccgtgctccccgggtttggaattgaagaattggcgaatcatggagcgacccaagatttcggtatgaaatccaatgtaatccagtagtttgaaccctattgctgggcctaggctataaggtctgcttcttttattgggcatac

SEQ ID NO: 8787 - DNA, 304 bp, Glycine max
tcttttggaccttgaacaagcaatcaactcctctttcagaaccatgctatgtgctcgcgactggtccctttcttcccttcgcaacttgagttcattattgctaccccatagagctccgcgaaatttgttccggccatactcttccttgcgagccctcttggcctctcgttcaagggctcttgcggtaattgcattctcttctcgtaacccggcacactccttccgaacgtgtgtagcagccaacttgaacttctccttggcgagttttgcctttcctaactcgcttttgagaagcttggacttt

SEQ ID NO: 8788 - DNA, 243 bp, Glycine max
tgtacataaactttttcatactacgtcctgtcgaacattctattaccgatgaactagtatcatcatcacatcatctcgtgaacgtgccatatcatccgcattcatttgggattgtattttggactaggcatccctttaaccttgcaaagtccagcattgatacctgtcggcgacttactccttctattactaatcgtagaacctacatgcatgcataaggaaagcccctttaatacttcctct

SEQ ID NO: 8789 - DNA, 247 bp, Glycine max
tgtgcattcaatatcctgatgaggatgtttcatatgttctcaagactggactaatacatttgctgcccaagtttcatggtcttacaggtgaagatcctgataagcatcttaaggagttccatattgtttgttccaccatgaagccccctgatgtccaagaagatcatatctttctaaagacttttcctcattctctagagggagtggcaaaagattggctatactaccttgctcccaggtccttttc

SEQ ID NO: 8790 - DNA, 363 bp, Glycine max
cgcttcattcttgacctccaaactatgtggtcaatatccaaaaatcaaaggctacaaggaattcttgaatagcttgtgtgtagggatgatactatgctagaattggtaatttggtaattgggtatatcacacaatgtacaaacagacaacatctcaatctgctcactaatattatgaaagataaaagttgaagatgccctctacatataaacactgttgggcatgcttctctttaatttaatgaaatgaagctgtgaatgagaatttataggcactcctacactactcatacaggaacataacattactgtgacactttaggttaattttatacattgaatgaacagtcttgggctcattata

SEQ ID NO: 8791 - DNA, 255 bp, Glycine max
tgtaatcaattaaaccgatacgagacataactctgtaagcttaaacaacttgtgtaattgattacggtaagattgtaatcaattaaaacagagagctttgccttctaaagaagttttctaactttagaaattttcttctcactcactcatgataatgcatgatgcataaatgatatgttaaagactaaggtgcaacattcaatataacaaccaatacaaatgccattcaagagagttgggcatgtaaaagacaaa

SEQ ID NO: 8792 - DNA, 290 bp, Glycine max
ctgcagcttaaaataataacgacgttcctttatgacgggactaatcgacgtcgataaaaagtaccgtcgctgaatcgactcaatctcaacactaagttccagcgactcgaatatgacgggactcaaccagacatccgattaaaaagttattgacacttgaatcggctcagaacttcaacatccgataacaaggagctctatatattgcatacatcatcatacatccgataatatcatgtagcccatgaattggttctaactttaacgtgcacattcgagcgtctcgtata

SEQ ID NO: 8793 - DNA, 294 bp, Glycine max
cagccacaaaaacaatccaggacggagcaggcaaaacactagaatgcgggcgatgaatctccacaaccaaaaggaacagcgaacaaacaacatcaacgctgatgaaacgagactaccatacgtcttttcagaccaagagaccaccagcgacagcgcaaaccgcctacaacaaggccactcggtaataatagcttaacaactccagaggcaaatgactaggcaccacatgcagaatcacaccgagactgaaaccaccatttctaccttaactaattagatgggatagggcgacac

SEQ ID NO: 8794 - DNA, 362 bp, Glycine max
tgcccagagaaggaatccacggaggaaatgcttttcaccttgaaagactggaaagcgcgttctaatgattcctctgtggcctccacataaggcatacaggatgggcagctcaccaagatgtcttcctcgcctgatacgatgaccagatgcccttccactacgaatttcaacttttggtggagtatagagggaacaactcccactgagtggatccacggacgccccaacagacagctgtagggggggttaatatccattatttggaaggtaacttggcacttgtgagggcctatctgtactgggagatcgatctctcccctaacctctcggcgggtgccgtcgaaggcacgaaccaccgttga

SEQ ID NO: 8795 - DNA, 156 bp, Glycine max
ttttccacccattctaaaagcccctccaagggactcatactaaaatactgactccagtgttgattacttaacacctcttggatactctaatctcagcatggggtccaaatgcatcctaccgtatcaaacataattcaactacagattaaactcaaa

SEQ ID NO: 8796 - DNA, 233 bp, Glycine max
ctaagtaaaatggatcattttcaaggtccaaccccttaaaatgatcacctcttaaagtaaaaaagaatcacttgataaaaaacaactacgtacgtcttatttcctcatcgcaattgaggaatacgtaggagcaaagggaaacacccttgtcgaccacaaaaagaaaacaatatgaaaagggtataaaggatatatagacataaaagggaacataaaaaccaaatcactttgca

SEQ ID NO: 8797 - DNA, 242 bp, Glycine max
  unsure (1)..(242): unsure at all n locations
tacctggcctcaantgtttgacgttattctactccagttcgatggctccaaagactttcttgaaaagctcgtgagcttaggaccgaaccaggctagagctgggcatgggggaattggctatatcacaacatgcccaatctattcatgactaaacgctctccctaccaatatcaacgagttaatgttcatacgccgcctacatctaaacactgaccaactagcgtctcttaataaattgaaag

SEQ ID NO: 8798 - DNA, 205 bp, Glycine max
tggaaatcgattaccaccacattgtaatcgattacagcttttttgaaatcaattggaatgttgtaaattcatttgaaaactttttcaaatccattttgctactggtaatcgattacaacaatctggttaccagttactagagagtaaaaactctttggtaaacatgttttgagacaaattcatgtgctactcatttttgaaaaaa

SEQ ID NO: 8799 - DNA, 388 bp, Glycine max
gagcttgtacgattattgtgtacctatcacatgtggtactaggtggctggtcgggcaatggtgcacaacaagtttcctcatccacaaggcgtgcataaacccaccatcccctgttgcccaccttcaactgagctcacgtacttcgacgtagcccatatcactcttttttctcgacaccgggtccccatcaatcctaccaagcttacttaacatccaagtggttcaacaatcaaacaacacagaccatgacagtccagaaaacagggcatatgcagatgactctgcccaaaacaccaaccaaaatcacagcttttctcactgtaaagaccctagtgacaattccctcgtaccatctcgttaaccgttggatcgactcgaaaatcttact

SEQ ID NO: 8800 - DNA, 210 bp, Glycine max
cagaccacggctctagccatgcatgggctaatattatacaaagcgtaacgaccatatacagacagcttcatcagagagatatatgcactcacgggctgtgccctctattagaacacttcacacactctttgtgaaccaacaagggacgaggctgacgcactcatgacacaagctagcaaatgagcattgcttaaacaccacacatgatat

SEQ ID NO: 8801 - DNA, 259 bp, Glycine max
tgctcacgagtttctttgcgggatcccttgtttttgatgggtgctcccaatctcaaccaatctattgtctttgacactgttgaaaacagttggaaaagactcaatcacccgcatcttccgctcaaagactctaacattaactgcatgccgggtgcagcctctggtggccttggttgctaccgcaaactttcaggaaacttcattgtgtgcaatcctgttaccggatcttgtactgaactcccttcattgcatttcaccc

SEQ ID NO: 8802 - DNA, 374 bp, Glycine max
agcatatcttagctatctattcttcctatgtgaaagcgaagagacaatggggaaaaaacatgaagttctatttcatgatgtattctttgttgcatgggcatgatgcactaactctatgtctaccgatggatttattaagatgtccctacctttgacatcttctaaaaaatattctctgtccagcgactgatgccttaaaccggtgcatataaaaccttcaatgtgtttctactaaggattaccctctttaagcgccatacccctaaagatgatgcagggttgaaacatatattacatttgttggcattttatgcctcgcccgcccctaactaaacgggtttaacctttcattgtcatgagagacttttacactt

SEQ ID NO: 8803 - DNA, 252 bp, Glycine max
tctacatcagacttctttcaggtgctggaactatttcacatggacttgatggggcctatgcaagttgaaagccttggaggaaagaagtatgcctatgttggtgtggatgatttctccagatttacctgggtcaactttatcagagaaaaatcagacacctttgaggtattcaaggagttgagtctaagacttcaaagagaaaaggacagtgtcatcaagagaatcaggagtgatcatggcagagagttgaaa

SEQ ID NO: 8804 - DNA, 406 bp, Glycine max
  unsure (1)..(406): unsure at all n locations
aggctcgccatttggagaacttaggcaatctacttcccacctgggctctcatgtntctatgatactctccttttgttaatggatccataaacctgcaatcaatcaaacaaattaacaacaatcaactatagaatcttttttttatacctcttttcactttagttaattaatgtgctattaatagcgtttctcataagtcacaacatgcctctacgggaccatgctagttatgcttctattttttgtggtccatccttcattgtctactctcacatccttttcaactgttttatttttgttttcctaaaatacccttctttatgcataaaatggtaaatacctcatgtttgtaatctcttgatcatttgacaaaatcatctcacatggtatccaaaaagacctatgt

SEQ ID NO: 8805 - DNA, 248 bp, Glycine max
tgcgagaaattcaaatggtcataactttgaactcggatgtcctattcaggtgcataatatatcgagacgtttgaaattgaacaatggaagctcttgagcagttcaaatggtcataacttttcactaggatgtccgattcaggcacataatatatcgagaagctcgaaattgaacaacggaagctctcgagaaattcaaatgatcataacttttcacacggatgtccgattcacgcacataatatatcg

SEQ ID NO: 8806 - DNA, 381 bp, Glycine max
gcaagcttgctatcgtgaatgtgcaatttaagactacactctgactcatgaaacatatgggaccaaacggtcattgaccagatcctttctcatgacataacctaattacccaatgacggtgtaccattggagggtacactgaacgactactggcaatatgacttctctgaccctgaagccctccaattggtaagcgccacctacgctgattttacaggacgaatgaaagtcgattttttgtcctatggaaactcaccacaccactctatattacttaaatgaatgtatatatatatatatatatatatatatatatatggggactaagtacacatcatgcacataatggaaagaaattaccctcatacatataactaaata

SEQ ID NO: 8807 - DNA, 246 bp, Glycine max
tgggagcttccaagtgccaattcgtcttcttctttagtccagtcttcttctggcttcaattcttcagtgggctttccttctgtgtccagcatcttgggatgttcccagcctttgatgacagctttccaggttctgctatccagtgatttgaggaaggccaccattcttgctttccaatattcatagttgcttccatcaagaattggtggtctgttcactggtccgccttctttctccatgttcatc

SEQ ID NO: 8808 - DNA, 388 bp, Glycine max
agcttctagccaaatggactcaccttgacttaattcctttgatatcccttatgagccttgtttccctttccttgcttcgaaactcactaccagccttaggtgaaaaaccatgatgtgaccatatccttaaggaattgtggagctttggaattgtttagggaatgagtgtgggggttctggtttaattggataacatgttctgttggccatgcttcatgatatatttggagccatacatgatatacattgcgtattggttaaatgttgcacatgatgaatatgatgttgtgatctcaagacgctacagagcggaaaacataatatattaatgagatgaagataaactggcctcttgagtgaataagaaaagaatggtgagacatctggg

SEQ ID NO: 8809 - DNA, 279 bp, Glycine max
tagccaaattcagatcaaatagaagttggctgatctcatcctatgtcagcttagcggaccaaatcaacctcaaatgcaagggttgggggctaagtgctagagactctcgacttagcacatgaccaaagatgcgtttagcgtgaagctggcacttagcgaacggacttgtcacaacctaccttctgcgggagggcgacgcatgactcgcgggatgcgtgttccacgaaaggaatacgcgcggagtcgccaccaactttaatttgagaaaacttcgaaaaa

SEQ ID NO: 8810 - DNA, 383 bp, Glycine max
agcttgtgactcttggcaatttctttaaaattagtcacttaaaatgttgtgacttttgaaaaaatcttcataaaaaagtcacttgaagaattgtgacttttggaaaattatttttcgaaatcagtcactggtaatcgattaccattaaggtgtaatcgattacacatcaatagatgtgactcttcattttaaattctgaaaattaaaacatttagaagctttggtaatcaattacaagtattgtgtaattgattatacaagtttaaaatgatttgaaaatgtttaaacacaagttgtgactcttgaaatttgaaatcttaatgttttaaaacactggtaatcgattactaccttctggtaatcgattaccagagagtaaaact

SEQ ID NO: 8811 - DNA, 409 bp, Glycine max
  unsure (1)..(409): unsure at all n locations
tggttcgaggtacttacccgttgaagatcgaataacgatgaataacgaatgaagaacgtcgaagaacggttgaaacccttgcgaaattcctcacggaaaacgttacggaagcgcctcggcttagattttcttcacggaaacgatttttccaagcaaattcgaaagagagagaagtgccaaaggggctgaacccttttcttcttcacttcctcccctatttatagcaaaataggggaggtggttgccgcccagctcgcccaggcgagccaggttgcttcctccagaagcaacagccttctggaggaatattctggagggcccaagtgggcctgggtgctatntgcacccccatttttactaagtacaccccctctggctttttttggtgattcttttttcgtaaagttac

SEQ ID NO: 8812 - DNA, 208 bp, Glycine max
agcttgtcagactctacatcttgtttttctggagataaaatgaaaaccagcttaacctttctccttccaaactctgttgtaagtctaccacttaaaacccttgagtcctttaaaaccatgatccagtttggttttaaaatgggcaggaaccaggacgtctatttgtttctgactaaataatctggaaggaaaaatccatcctattctt

SEQ ID NO: 8813 - DNA, 400 bp, Glycine max
tcgtccgcagatcccttatttaagactacaccttatttagacagccctcttaggtttagactaacttaaactgagtttcgtccgcaaatccctcatgtaagactagacttagctcaagtagcttactaaagtttagcctaatttagcctaagcttcatttacagatccctcatgtaagactaggcttaaactaaacagtattattgtaacagcatgattaaaaccaaaacttaacccgcagatccctcatgtaaggctaagtttcaatcctgcttcaatcaatttctaaggcaacaatacattttccaatgctaaagtcacctaactgtgcacacaaatgggtgatcaaaccaaaatcatacaaacattaagcgttgaaggaagcattgaacacgaaaaa

SEQ ID NO: 8814 - DNA, 391 bp, Glycine max
ctgacgccgcagcatgcacttgcagacatgtggtacccatcacatgtcgtactacgtggtggtcgggcgatggtgcacaaaaaaattaacacatccacaatgcgcgcataaacccaccatcctctggtgaccacctacaactgagctcacgtactaccacgtaaatcatatcctgctttctctcaacaccaggttcacatcaatccttccgagctaccccaacatcaaagttataccaacattacacaactcaagctattacaccttagcagaacagggcagatgcagaaaactctgtccaaaacaccaaccaaaatcacagcttttcacatacacttacgccagagacatttccttcttcccaattagataaccgttggatcgactccaa

SEQ ID NO: 8815 - DNA, 229 bp, Glycine max
accttaatccccgtgctgcagctttaacgtggccgcattaggattctccctacttcgaattgtgggaaaaaagctctttacctatacttttcagactaacctaatacccctgacgggtacaattgtagggcactgaatgctatggaaatttattatatgccccggagccgtcatagggcgcacaagcctgcggatctgatctgagaattaagggaggcatctggattaa

SEQ ID NO: 8816 - DNA, 265 bp, Glycine max
tctatcatacataaatgaaattgttgtttcttattttatgcaaatttcataataccttattcttaatctcttcatcaacagcatctctctcgtctgatctttgcactcaattgcttctcatcttcataaattttatttttaaaaaaataaaaaataaaaactttaaagcaactaaacaacaataaactaagccgaaacaagtagatgcaccgaaagtggaaatgtgaacaagacaaaacggtaccgttttgtttaagtggaaatg

SEQ ID NO: 8817 - DNA, 374 bp, Glycine max
agctattgcacgctggtatcatttatcctattttatacagccaatgggcgaggcccgtccaggtaggcccggagaaaaccggcctcaccgtgataaaaaaacaaagggatgagctaattcctactggggtgcggaacagtgggatagtctataggaggatgcctttgggcctgtgcaataccccataaacctttcagcggtgcatgatcagtgatttaagtgatgcttacaaaattgcctataggtgttgatggatgatttcactggatatggatcctcttttgacgtacgttgggataggctggaaaagattctgaataaatgcgcatgagataaccttgttctaaattgtgaacaatgtcaatttatggatg

SEQ ID NO: 8818 - DNA, 303 bp, Glycine max
ctcaagctggagtccatgcgtcacgttttggaccttttgatttacatgttacaagctgttaatcccggtgatcatgcagtaagttaaactgtactgcttggctttcttgaatcctccgtgctactaagtaaaataattaaatgtttggtttttatgctttgtaggctgtaaaagacgaagttattattgatcttgttgaccgctgtcgcacaaaccagaaaaaattgatgcagatgctaacaactactgggttagttccactcagctattccatctggcacacacccaaatgtactgtgtgtt

SEQ ID NO: 8819 - DNA, 348 bp, Glycine max
tcttgagacgatctgtagcatgcatgcttgttaatgaataaaatggttcctctctcctctaggttgagcttgtgcatatggagaatgaaatgttttccaattgttttttcataaaataacaaaataatgtgaaagctctaggtgacaaccacactatatacttgaatgatcccttgactaaccattcaacgtgccaaatgatgtcttttacggttaatgtcgattttgaaattttaacccaaaatggcttaagtatgtttgaaccacgaacggaaaaaactgtttttgctaaaacttgtaattcttatctttaaatcttatagagtagtgtggtaaactttctatatt

SEQ ID NO: 8820 - DNA, 505 bp, Glycine max
cccacctccgtatcgcaaaataaaaagtattttacattgtatatatttactaagcacgaagcacactgttttgaactttgaagccctgaactagattgaactctgatccggaacttaaataccagcttgttatgaaatttcatatactcctgcacattattggccaccatgggtataagaccattcagaaccttctttgaatctgcctgaatgaaacactttgagagacagacatttccatataaactaaccatagccccaatgacacgctcttgaatcaattttgttgtcctgaggctttaaaaaaaattactagaatatcctctatcttgagctgccatcaaatggttattatcaacatcaaactttttctcaaagaccatgagtgtataagcaagaacgccacatattccaccactcgggcattcaggccgaggagaacttgaaattttcccaaatatatttaaagcgaactgcccccccaatattgttcaagatccattgc

SEQ ID NO: 8821 - DNA, 432 bp, Glycine max
  unsure (1)..(432): unsure at all n locations
ttgaaacattgancccttggaannccggttgaaacttcgaanncacgagcactactgatactcaagcttgtgtccgggttttactgcagaggacggcgtatcttccgcagaacggcgctaaaatggtcatttgcctcactgcgttgaaaaccattagaaacatatagtagttgcttacataacaagtttgcacgtatggcattaaaggaggttgcagactgcataataaatatatccagttgatcagtgtgccaaacaactttgtaccaggctgcgtcagcctacttcatacaaatattgtattgaagtggaattctttgaattcccggattctattcatagtcttacaaagagtgccgacgaaagtaactacattaaagcgtctggttttattgtcatcaaactagggagcctaatataggtcgcaaaagg

SEQ ID NO: 8822 - DNA, 336 bp, Glycine max
  unsure (1)..(336): unsure at all n locations
agcttcctcggngccatttcctgtgtaagcaaacatttggaaagttagttttaccagtgggatactattcttaaaacaaaaatgacatacaacctcctcccataaatacaaacatcaatgtaaatttagagcaagcttatgcgcatatttccttacaaacgttctcttgcacaagacattctattaaccgaaaaaaatgcacccatatacaatcaaggcagcttcgttacctacattattcacacgtacttccaacgtgtatttgttactaacattacaccactcctacgtaaaggccacctatatatattctcatcacgatatgaacgtctatac

SEQ ID NO: 8823 - DNA, 401 bp, Glycine max
tattctgcagactgatgtggaacctgcgttttttattgtgaataatgcaggtcttgatgatgctaagagatattctaagagaacttcatcgtcaaattctctttcaacaactctagggcaaatacttgcaaatctattgagagttcatccaagaacttcaaagtgtattatccactctaaaggagagaaatctttatgttctttaaagaaagtcaattataatcaagagactgattgtctcttgaattgagagtttcctgagcacaagggaacaagattccttgagtgttcagaagttgaacaaaggcattttacaaagatagtggcagatctcaagtgagttgcttgaggatcggacatatgcacgggaaatggccaaaccactataaattgagtttgca

SEQ ID NO: 8824 - DNA, 395 bp, Glycine max
agcttgccaccacggagttttccgactatgctcttgtgtggtggaacaagctacaaaaggagagagcaagaaatgaagagccaatggttgatacatggacggagatgaaaaagatcatgaggaagcggtatgtgccggctagttactcaagggacttgaaattcaagctccaaaaactaacccaaggcaacaagggggttgaggagtatttcaaggaaatggatgtgctcatgattcaagcaaatattgaagaagatgaggaggtaactatggctcgatttcttaatggtttgactaatgatatccgtgatattgttgagctgcaggagtttgttgaaatggatgatttgcttacaaagcaatccaagtggagcaacaattaagaaggaagggag

SEQ ID NO: 8825 - DNA, 300 bp, Glycine max
  unsure (1)..(300): unsure at all n locations
tatgctgcaaatatttacaatagacctcctcaacctcagcagttaaatcaaccatcgcagagcaattatgacctttccagcaatagatacaaccctggatggtggaatcaccctaacctcagatggtccagccctcagcaacaacaacagcagcctgctccttccttccgaaatgctgctggcccaagcagaccatacattcctccaccaatccaacaacagcaacaaccccagagacaaccaacagttgaggcccctccacaaccttccctcanagaacttgtgaggcaaatgactatg

SEQ ID NO: 8826 - DNA, 396 bp, Glycine max
agctttgtattgtacaaaaagaagtaatattactcaatatggataatttgtgttattccaagccattgaactcaaacatgtgtagattaaaaaaggagaggacctgatatcatgagacttcacatgtgttatccaggatcagacccatctgacatgataaatcaataatgttcattacagagacacatacgaccttttttccctatttctcctgtcatgcttaagttgaaaatcaaaactgtcaaagtctaagagaagttatcaattgtagggtcccttggaacaaacaaatctctctgtcaaagtctcagagtacatctatttgggtcatttgttaagaactctcccctcattttatcataaaacaacttttgaacaggcatgctcttctaggaa

SEQ ID NO: 8827 - DNA, 410 bp, Glycine max
  unsure (1)..(410): unsure at all n locations
ntgagccaaaatcctgactcaccataaaccttgtcccagggtgagaatgccaatccttaccctcggaagcaaaaaaaaaaagaaaggaaaaatgagaaggaaaatttccaatcaaaggagaaaggaaaggaaattcccaatcaaagagtgggagaaagcaaaaagaaaagaaagaaaattcccaatcaaagaatgggagaaagaaaaaaagagagaagtaaaaaagaagaaagctcctggtcagagaaaccagaagaaatgtgccgagaggtccttggaccagacaatatctgaacaatacagaattgtcaccaaatgaataaaaaagaaggaaaggaaaccacgacctaaaatggtttcccctttattgccaaccaaatttgtgcgcctgcactaaacaaaacgaaaag

SEQ ID NO: 8828 - DNA, 396 bp, Glycine max
agctttaaaagctggggtcacttataatttaactcattgatttgtcgagaaaactaatggaaaaacgagagtgtgtaatgattttcgtttttcgtcttgtatgaacatccttcagtaaaatgaacatttctctctatatgattaactttgaattttgagtcatacctcattcaaatctagacatacatgactttttatactggtaaagtttataaattttttttatacgataagtataagttatgcaatagttttataaattctctatagaacaaaaaaatgtgaacttgagttttaatataaatttttaatcagataaatatatttatgtataaatttggtttgagttggattagattgaatttcaaaatgacatccaaaatctgattttatcct

SEQ ID NO: 8829 - DNA, 438 bp, Glycine max
gcttttggaccttaaatctcagcttctatataagctgaaccattttatcaataaacacaagttgagttttattcagaaaattagagtttatctcttttatcttagtgagagtgattctcctaaattcttgagtgattcaagaacaccctggctgtatcaaaggactttcacaacctttgtgtgttgccctcgctggaaagagtgattctttccttcctatcatctccacccttgttctttcaaaccacaattccagaaaatccacctctgcccaaaattatctcgtgaccataactcccatttcacacactcaaattaagtgattcttgagcctaaattgaatttcaaaacgagacctttcacctcgttttggaatcacctcatttggagccctgtagcttccgttattgccatttctatatttctgtccagccacca

SEQ ID NO: 8830 - DNA, 380 bp, Glycine max
agcttcttgagctcatcaagggcttttttctgcgcctcggggaggacgccaaccacgttggtctccttcttgaacgaaaccgactgggaaatcttgtctcctacaccactctgggccttctctgctttgatgtcttcagctcccgctgcacatgaggctgtctccataagaacagcacactccttattctacggaggctggttttcgcggctcatcagtcatggctgattggatagcagatacaatcccggatgggacaatcaccctattatcggagggtgtatccctcaacaacagcaacaacagactgcttcttcctttcaaaatgatgctgtgctaaacgagccatacatttctccaccaatccaacatcagccaca

SEQ ID NO: 8831 - DNA, 397 bp, Glycine max
tctgaacaatttttcaggcaactgcagggattttcaatacacctcttatgtcagaaactttgatcacttaaaaggaaaaaacttagataaaaagagcatgttttaaaaacaagaacattgatagtcatctcaccggatgccatgattcatcattttcagcatgaccatgatgttggtgatgagtcctatgactgattctcctgtataaaatatcagtttcaaacatgaattcaaaactaaaaaaaagagtaaaatgtgtttttatccctacaaatatctcaaaatttgattttagtctttacaaaaaataatatatttttagtctctacatttatcaaaattaatgtggttttagtcattcatcaagactaaaaaatcttattgttaaaatgtagag

SEQ ID NO: 8832 - DNA, 377 bp, Glycine max
cttgcaagctcttatggttctgtatccgcatagatgaaagaatatcgatctgagtacgtgcctaacaagagcttacacttctacctatttgtctggcttttgtattatcttctgttaaggtaaatatgtttgcatgtatcatattaacaaggcaaccttactttaatacagattccgctacaaagaatttgctggagtgagaaaaacagttgagcatcattggaggcattgctcaataactcctataccttcccaagtattcgagactaaaagtgatacatcaagacctaaacgcaagcaatatatagcttgatcacgagatgaatgttaaatatctgactttggcatggctttgaatatttggagtaagagtatta

SEQ ID NO: 8833 - DNA, 363 bp, Glycine max
tggaggaagctgccagaagagaaacatgggaagttactggtattgaagtgggagaagttgtttaccacagttctcagccatggcctggtataacttatgctacattacctaatgttgatttaattctatgcttttataattttattatttctctgttgtttgcatgagaagcatctacggttttgagtttataactgcgtgatttaaaattttattggcaatttgtgctatttgaatttatttttacttgtaaacaaattaagtcaagttaagaattagaagctcaagcttcgcttgtcaaaaaccaactatctcaaaagtttaaggctacgtttggataaaagttggaaatatgtttttggg

SEQ ID NO: 8834 - DNA, 358 bp, Glycine max
gcagcttgccaccacggacttctcttagtatgctttttcgtgtcgttagacgctcctcatcgacatagcatcaactgactattctatggttgatccatggactgacattaaaatgcatcatgatgaagcggtatgtgccaggtacttactcaggggacttgatattctacctccataaactaaccctaagcaacaagggggttgaggagcctattcaaggaaatggatgtgctcatgattcaatcccttattgaagaagatgatgacgtatctatggctcgcattcttaatggtacgactaatgatctcctcgatattgtacagctgcctgagtttgtcgaaacggatgatttgcttc

SEQ ID NO: 8835 - DNA, 400 bp, Glycine max
gcctattctatgtgatttaccaagcacaccatgatcttttaattcaagttcatctagtttatcaccacctaacagaatttgtatctcaagtgctgggagcctttttcactaacatgaactaatctcaaatgccagagttttgctttatcaatcaacgtactactagctaccgatgcatgtccaataatagtggaaccttcaagaataaacaagccattacttttattcttgttacccttagctatgagtaaagatacatttgaaatcttaagaacaccatttggaattctagttgcatatcctagatcatcaaacatgtctatggaaataagattcctcttgagctttggaatgtaccttacatttttcagtagatactctctgttatcacacatcttca

SEQ ID NO: 8836 - DNA, 290 bp, Glycine max
ttgacccccggatccttaagtcactcagctgcaccttgaatgtgcgcacattatatactatgagtctaaagctatgcaccacgaactggacatgacatagtattcatgtgggagcagatccctcgatacattgcacgtgtcctctcataatcagacccattggacttgataacatacctctgcccatatcagacacacatgcactcttattccgctattgctcctgtcatgccttaaattcaaaatcgacatactgtcatacgtctaattagattaactcctctgtagag

SEQ ID NO: 8837 - DNA, 323 bp, Glycine max
taaacattctctttcgagcctccgtattattattggactcaatctaacatccgtgaaaaaagttactgtcgttagaatttgctcacaggttcaacattcaatttcgagcgtctcgatatattactggagtcaatcagatatccgagtaaaacgttattgtcgtttgaattggctcacaagttcaacattcaatttcgagcgtctcgatatgttatgggactcaatcagacatcccagtacaaagctattggcgcttgaatttggtcagagattcaacattcaatttcgaacgtctcgatatcttacgggactcaatcacacat

SEQ ID NO: 8838 - DNA, 283 bp, Glycine max
  unsure (1)..(283): unsure at all n locations
tatgggacacttatatttatctcaatgatttgtacgagaaaacgaatggaaaaacgacagtgtgtaatganttttgatcttcgtatagcacgaacatcctccaataaaacgaacatttctctctatgagataaactttcaatcttgagtcatacctcatccaaatctagacgtacatgactctttattctgggaaagtttataaatatttttgtccatcagactcgttatgcattcgcttaaacaattatggatgcactaaaaaaacggccgctagaccttta

SEQ ID NO: 8839 - DNA, 405 bp, Glycine max
tgttcatcgagtaattgatttcggggacgaaatttctaaaagggtgggagtattgtaacatcctggaaatttctacccggagtttacggaaacgatgtattgtgaatgaatatatatatatataagtattggtccgtgtatatgtatagatatgttcttggcagaaataagaatagtgggggcaagatatgcgggttggactaattaagggagagaaattcataactgggaggctatgggctaattcctaattaattagttaaaaatcatcgctctgcgtgcgacttagaatttaacgaaaccaacctgtgaaccacgttcggcgttttattctgagcggtaagatatatatattgcttgctttcgaaaactggacccggcggactcatataaacgcgagacact

SEQ ID NO: 8840 - DNA, 353 bp, Glycine max
agctattgccacttgtttcgagatcttgtgcagacgttgacgccatcttaaaggggaccacgctaaaatacttgcacaccagatagtggaaaaactcacctttgcatgagtaaaccggccacgaataatacccttacctcatgcggttgatgctacaactaatactcagggttaggcgaaacagaatgagacaaaccatagaccgaccactcagcagcaaatattcttgctgtgacaagcatatgaacgaattgttaaagcatactgagacgatgaacagatccttcctttgccataatatatactccatcgattttactataattgctttcggaagagattgtttattaaca

SEQ ID NO: 8841 - DNA, 385 bp, Glycine max
  unsure (1)..(385): unsure at all n locations
tttcttaagttccccacctggttagggtgacgaagttgacaactgtatactgataaagcatgggtaatgctgccaccagactttccgtaaacccacgcggtccttgcacaaataggctgatctccacaaagtcccataaaaaactcaaaacggtgtgggctgttcttctcaatctcaactaaggctgcaatatctgtgtcaccagcctgtaccaatacatctcagtaagataatacgaccattgtagaaatcacatctagtcgaacatatggttactaacctgaatgattntagtttgccaaagctctgtaatgcgaaaacctcgacgctcaaacaatcgtttgcaaacaccttgacctgcgcggccccccatgttaaagatcat

SEQ ID NO: 8842 - DNA, 372 bp, Glycine max
agcttgttggactttacaatcatgccaaagggcacaagtcatcattagactatacatcaagctctgcaattgctgcaagaaggcttccaagctaggtgcagcttaaagaggcaaaggatgagagttgcaagaaaggtagcaaaggcggatgattgtttaattattattattattcgtacaaattgttattgtgttgacatttgtttagttgatggtgttttttatttacttatttttgtgttcctcgattgtttaaacaacatgcgcctagtagtagcaacaactcttcagttgatttataaaacaaactttcggataaccaacaactaaataaacaatgataatataaactttttttgaaataaaataaca

SEQ ID NO: 8843 - DNA, 206 bp, Glycine max
tgcggggcgacctctcctgctatttccatgaacaatggggttcttgagagagggggagtttgggtaacataactcccaccactcctatcatgacctaatctcaatgccacacttatctttgacacatgatgcattactacctacactgacatgtatattcatagaggaacctaccttaataaacaacccattactgccatcctcgt

SEQ ID NO: 8844 - DNA, 391 bp, Glycine max
actctgaacgcatgcaagctacatctatcattctaaactgttgttacaaaatatgatttcaggcttaaatacgcggtcttgattgagcttgtgcgctcatgcccaatttgaaccgattaacgcacattactgaattttgggttagagcgtgcctttctttctaaacggatggaatgaaacgctgtgcctattgagaataatagatgggcttaacgaacctgaatagcgtatcattgtccatattcttccttccgctaacccaaagaatgctgtgcttattgggcgcttgctcagaccacaaatagtgcttactacgatgtgaaaagaatcaccttaaatttacctacattaccagtagatgaaaaaattgatattgccacacaaataaaat

SEQ ID NO: 8845 - DNA, 215 bp, Glycine max
tgtggtggaagggccactggttatagtgtcaggagaagaagatatactattgagttgtccatcctctacaccctatgtggaagctgcgaaaaagtcattggaaacatcttttcaagcgctcgaaattgtgaacaatgcttatgtggaggctcctccggtgcaaccgcgtctatctggtggctccttgatggtggcctgagttatgttgagggatg

SEQ ID NO: 8846 - DNA, 252 bp, Glycine max
ttattatttataaaaaacattaatggatttaataataaaacacatattataaatcataaattatacctaatttattttgtttaaataaatatatataatgaggataatccctcgaaaaacatatttgtagaatgaccactctctaaattaagtctaccaccatgttggggctgtcagatatgtttatccgcgttgaaatggtctatgaccctttgagatctatccatgtatcattgatgaccttttgggtca

SEQ ID NO: 8847 - DNA, 106 bp, Glycine max
gcgcccgagtgctagcaacgtgcaacatcagaccacctccaggtgctggaccatcttaacatggactggagggggccagtcattttgaaagcctgggaggaaggag

SEQ ID NO: 8848 - DNA, 178 bp, Glycine max
  unsure (1)..(178): unsure at all n locations
cctttcattctaatccttagaacttccctgtcaaaattgncatagataaaacaatgttgatgttcagaggacactttaaatccctttttaatcaactgacctacacttagcaagctttggtcaatgctatgtatataaagagcatttgatattaatttcggactctgacacgttgaaa

SEQ ID NO: 8849 - DNA, 276 bp, Glycine max
  unsure (1)..(276): unsure at all n locations
tgtcacatgttcatgcaacaattgttatccgtggctatacgagacatcttgctttacaaattcggttatccataactcgcttgtgctnnttcttccatgccatatgtagcaaagtcgttgatcctgtgaaagttgatgagctggaaaatgatgccgcaattatactgtgctagttggagatgtatttccccttgctttctttgacatcatgattcacttgattgtgcatctggttagagaaatcaaatgttgttggcctgttatttgcggtggatg

SEQ ID NO: 8850 - DNA, 133 bp, Glycine max
  unsure (1)..(133): unsure at all n locations
agctagacaactatggactgaacatattctctaatgatangatgatcaatgtcaatgtgctcagttcgttcatgatgagcaagatttgaagcaagacntatagtagatttataatcccaaaataccatcacag

SEQ ID NO: 8851 - DNA, 317 bp, Glycine max
  unsure (1)..(317): unsure at all n locations
gccagaatcagacatgcgagtgtatatgttatgaccattngaatttctcaggagctttcgttgttcaatttcgaatttctcgatatatgatgcgcttcactcagacatccaagtgacaagttatgaccatttgaatttcacgacaggttatgttgttcaatttcgagcgtctcgatatatcatggggcttagttatacacccgagtcaaatgttatggctgcttgaattgcctagagctaccgtattcaagttgagcgtctaatatattatgccctaaatcggtattcgattgaaggtatgacctttgaatcctcga

SEQ ID NO: 8852 - DNA, 454 bp, Glycine max
  unsure (1)..(454): unsure at all n locations
atcaacactttcaagctacctttagccattggctaaggttatgggatgatgaaacttttgggaggatagagaggtaaataaagaggaattacgagaaatatgatcaaaaaaacctaaatcaattacccatggaccttgactatccacatattgagaaatagaagcaactgaaacactatgtgttgaagatgactgggtctggatattggacttcaaccagacatattcttgatactcaacttcagataacaaatgttacgacattcttcacttggaaacatttgttgttttctaagggaagccatgcaaggagtagcaagaaacttgcgtatggcctatcctcttaccatangaacaccgagaacgaccacttcttccactacttacatgagtttcaaaacaagggagaatagtgccaatgatagtcttatctgaagaaaacaaagaccaaact

SEQ ID NO: 8853 - DNA, 503 bp, Glycine max
  unsure (1)..(503): unsure at all n locations
acggacaccacaatgtgttttgaancccttganannnnnccnncnnnnnnngcgcgcttttganacctgttgnannancngacancccagaanacncaagcccgggaannnnggcccgctaagcancannaaccggcnggacnagtttttttaatacngcttataaataacgcaatagtaacataaattaatgacaaaaattgcgtcttcgtcactaatatcggcttaacaaaaattacagtgactatatttaaaaacatctgtaaactgttactcattaaagtaatattttactattatgcaacgttccaaattgttgaggagatcgtaatccagttatgtttcactcttttcggtactaatctatatttttgtgtcatatacgggcctaaggggatgagtccttatgtcatggacagtgtccacagtgatgcactgttaatataattcttatcttcggcgggataaaatgtgtgtcttgtatcccaaccttttatccttcg

SEQ ID NO: 8854 - DNA, 197 bp, Glycine max
catgctagcctttgatattccaggatacagaaaggctaccgatgttactctcctattcacaatcattactatatctctgcagatgtaactctcagacagtgaagagacaccatactgaccatcccgacattgcacgacaggataatgtcgctcaaattccagcgccacgatatatcatggggcataatcatacaccc

SEQ ID NO: 8855 - DNA, 304 bp, Glycine max
atagatgcttatagtaataccattatctatttggtatattgaaactcaagtaaattattcaatgttgtcgtttttagtgactaaaatttaatgataaaagtaaaatttgtcactaataatatattatctatcactaaattctattttgtggctaatattatctataacaatggcgataagacaagttgtcactattttgtcacaattgtatctcaaccctaatatcttacgagaaatagtctaagttatttagagattaaattccactatatcggcatatcaatccatatgatcaacattgctt

SEQ ID NO: 8856 - DNA, 181 bp, Glycine max
agaaactcagcttagcacaactcacaattattagatatttcttgtgttgcctttatgtcatctgctgatatcgccttatgctggccaatttccacttcacatgtctttcaatgggagatggagtgccgtcaatcattggtgtcctctcagttgtattgcctcctgctgccctcttctcctt

SEQ ID NO: 8857 - DNA, 486 bp, Glycine max
  unsure (1)..(486): unsure at all n locations
tgcactgagaccccgggatcctntagagtcacctcgctgcatgcacccgtgatatacggatcctaatcggagatccatggtttctaaacggtatctccccatggccttttccctctgaaagtgnacttttacggtgcgttcggcttgcacgacaaaatatatgacgaaagacgaaaatgttgctcacgagtttggttcgtgggggcccgaggttaattcctatctttgagtacgtggcaactctaccgttaagtctaatatctatgccctattaacttttcgccttactccttattcttagctctatacttgcacttatctcgtgcccattctgaacgaatacttcttactgcgctgacctcataatccttccttaccgtacttattgtacgatatctatctcatcacactccctcctttctccgtctttcccctcatcaatgatcctacgcatctcctctccatctctgtacttttccccctgca

SEQ ID NO: 8858 - DNA, 129 bp, Glycine max
tcttgcgtgagcagctcatatgcgtgtagaactaattcgtacattttttagaggaagtatatcaatgggttgagttactcaagaagtttttcaacgtattgctgccacacgcatgacgactgaacaagc

SEQ ID NO: 8859 - DNA, 454 bp, Glycine max
  unsure (1)..(454): unsure at all n locations
ctcatagtnctatgtaagctatatctctagacaatgtgagactaatcttcaccgttgaggcttcacttaaggcatctcctcanagagttatattagagaattagaaagatacaatacaaacaactccatccttgttaacgttaaatactgtcgatttcatgtacatcnttattcaattccttgaataagaagaagtttctttacaaaccttgtggaaatccaaaactcctctaagaacaagtcttttatttggacttcaatactttaaataaagaattaatggaaatgccatgttgcagtgtaggctgcataactacttttaccctgatatgtgtgtaatgtgttgagcttgctagattactctgttctcacctggtcttaaagcctgacagtgaagagagtcaacaagcctcacatgtttttaaagctgtgcatgcactgcttaaatttctac

SEQ ID NO: 8860 - DNA, 143 bp, Glycine max
  unsure (1)..(143): unsure at all n locations
agctngtatgagtacgggatataattcaagaaattgtgtgcaagctgtcctcaccaccagatntctgagcaactccttcttcaatatttctatgagggacttagcaacatggagaggagtatgattgatgctggcagtggtgg

SEQ ID NO: 8861 - DNA, 473 bp, Glycine max
cactatagaaacatgagctccatggaggccggatctttaagcttcaatgaggtccttcaatggttattttcaaccatggagatgcagcagattataaaggagaaaaggtgagaggaggcgccatccactagggattaagccatagaaggaggagcttcaccaccgagagagtgccttggataagaagcttagagaggaaacttcaatggacgaaaagaatgagagagagagagagagaggggggaacgaaattgaaggagaaaaagagggagagaagttgaaacttgaagtgtgtctcacaagactctcattcatcaaagttttaacaagtgttacacatgcttctatctatagcctaggtagcttctctaagaagcttccttgagaagcttccttgagaaacttccttgagaagcattcttgagatacttccgtgagaagctagagcttaaatacacacacttccttaatag

SEQ ID NO: 8862 - DNA, 320 bp, Glycine max
gcaacaattgttagccgtggctattctatacatgtagccaatttatgtcaggataacgataactcgcctgtgctctttctcccgtgctatatggagcatagacattgatccagtcatgtttgatgagttggaaaatgaggccacaattatactgtgccagttggagatgtattttccccctgctctctttgacatcatgtatcacttgattgtgcatctgggcagagatatcaaatgttgtgcgcctgtttatctacgatggatgtacccggttgagcgatacatgaagatcttaaaaggggatacaaagaatctatatc

SEQ ID NO: 8863 - DNA, 471 bp, Glycine max
  unsure (1)..(471): unsure at all n locations
ccaacaaggtttcacagttatacaatatgttcatcttctggctagccaaatcaattattctaacaaatacacaccaaacaaacaaaaaaataaacccatcttgcagaaattcacattactaactaaacccttaaattntaagaaattaaaagaagctaattcagtaaaaataaagataatattgttacctctacagttcttcaaaaaattatatgctttctcggtcaccaaattaaccttcccaacaatgtagctataacactaaaagactggaagctcacaatgcaagtcttctgctttatgccacatgcaaattaaccccgtcaaatttggaagagtggaagctcataattatatgggggaaaagaagcaattaccgtacgtcaaagaatcaaaatggcgcgtcaatgcgcacgagaggcgacagcggcgatgtcatggcaacactgcggcaaggcatgggagtgtgac

SEQ ID NO: 8864 - DNA, 255 bp, Glycine max
gcagtttttgtgagaaacgcattttactattaacttaaatacttttatcccaagatgaacgtgcagaagcctatgtgctttacaagctgcagaatagactaaacaaatatcaagaaccatataacatccctagcgagaataaatagttactgacaaaactgatcaccctaagctatcaaataggggaataaatagctaggcatttggaaactctcgaaaggagaattttggtgccttagaatggtgacaggaaga

SEQ ID NO: 8865 - DNA, 362 bp, Glycine max
  unsure (1)..(362): unsure at all n locations
agcttgttatgaggaagtgttgaagggtgaaacttttctgctttattgttgaccttatagtggtacctggagatatgtcgcggnggtcaggagaccttggggacgtcaggtggggtgctattgcccaaaccaagcttgaccaatccgacccacccggcatagtcggtcagtgagaacctgtgatgtacctaagcaggcgagctcctggcagtcaacagataaaaggaaaacaagaccacaaagcaaggaggcttgtggtggctggccaactgtgaattttgtgtaatatgtggattgtggcctctggtaatcgattaccaagggtgggtaatcgattacatggttataaatgaagacaggag

SEQ ID NO: 8866 - DNA, 293 bp, Glycine max
tacatcaaatttttgaaattagtatagattcaaaaattttttaatgaaaacattttgtgttaattacccctgtcaaaacataaagggcttatgtggtgtttctgattctactaaaacgagatgtcatattaaaatttcgatcacgcctatgtgacctgtgtttattgaatgcaacaaatataaaatctattttataaaaaggtaacatttacaactgctcattctcaaagattctttataataagtgtataaaatcctatttcagtacccaaatcactagagacacttagata

SEQ ID NO: 8867 - DNA, 238 bp, Glycine max
  unsure (1)..(238): unsure at all n locations
catgcaagctggatcaaaacaataatctaattattccaattttctcatatcatacaantgctcattcaaatcattctcaaacactcattgcatacaaaacaatccactgcatatcattttcaaccagttcactattcaaacaggcttttggtccaagcaatcaactctaagtcctgaaatttaaaaacctaaacttaaaaacggaaattaatgacggaactaaatcataaatacctga

SEQ ID NO: 8868 - DNA, 503 bp, Glycine max
  unsure (1)..(503): unsure at all n locations
aggatctcctgtttttgggccttgaaannncnncnnnnngctctttganaccttgcannactgacaccnatganacnccagctnngagccaaaancctgtctcaccataaaccgtgacccagggngatattgtcaatcctcaccctcggaagcaacaaaagaatagaggggaaattccaattcaagaagaagagaacgaaaattgccaatgacagcacaaatcgaaaagatcgaacattccccaatcaatgagtgggagaaagctaactaagaaaagaagggcaactctcaatctcagagcgggagaaaccaatagtacacaaaggatactcccaatcaagttggtgaaaatgtaccaccgacaaatgcaagaacgaaactccgatcaggaccacagaaacacgaaaatgtgagaaggggtctggaccggcatacttgacaaacgataacgtctcgcaacgacaaaaatgatgcacggagctcgaccataatatatacccccc

SEQ ID NO: 8869 - DNA, 158 bp, Glycine max
  unsure (1)..(158): unsure at all n locations
agctctgtgatcatgatttctatacaaaagttagtctgataaagcgactaacataaatctaagagaaagatctatatntttcatgaagactaagccttgtaacttgaaagagcttaaagaagtnttatctttntacatgcccaactctttgagtggca

SEQ ID NO: 8870 - DNA, 427 bp, Glycine max
  unsure (1)..(427): unsure at all n locations
ctcaagcttgttcctcctgagctcgtntatcattgagactgatccagtcgctcttgatgaaccagcagctcaggagcctatttctctagttcctatctctccagcacccattactaatgattcccagccatctgcaccagcatcggagccagagcagcctgttcttcaagaccctccagctgcacaggtgttggacctcaacgaccatgcagagcgatgattgacacgatctttattntcttacatttnggaatagtttattattattccgtctntagtacatgttatggttatattttagtccttaatctccagttcagtttttaaattcagcttatagttatattttgtttggtagcttgtataaaagcatgtatgaacagtgcattgattatattcaatggtttgatgtctgatttgaaattca

SEQ ID NO: 8871 - DNA, 104 bp, Glycine max
taaattttattcatgggaggatatgttttgtagatcgacagattaaagtcttgcggaaggaagagatgaggttaagaggggcgtggcctgctgtaagaagaaaa

SEQ ID NO: 8872 - DNA, 277 bp, Glycine max
  unsure (1)..(277): unsure at all n locations
aagcganacattgaaagcaaagaagaccttctagnaggccccgacaacgacacaaggacatngaagagattggtggctggcttcttcatgagcggaagcatactatacaagagaaaccatgacatggttctgctatgctgcgtgaatgctaatgaagcaaaaaacatgctcggagagggccatgacggctctttaggtacgcacgctaatgggcacgccatggctagaaagatcttaaaggcatgttacttattggctcaccatggagagcgattgc

SEQ ID NO: 8873 - DNA, 349 bp, Glycine max
  unsure (1)..(349): unsure at all n locations
ggatcaanacaattatctaatcattcctatccactcaaatcatatatattctcatncaaatcattctcaaacactcattttacacataacaatccactacatatcatgttcaatgaaatcactggtcaaacacgctttttggtacaagctaacaactcagagtgctgaaatttaaataactaaaatttaaagaactgaaacatataacatactaaaaagcaagctaaatactgattaactaaaatattcatgctttgcagaaattaaactaaacaacaattaaacattctgctcatcctatggctaatcttcattaagatccagtgctggagctgctgatgaatcctgg

SEQ ID NO: 8874 - DNA, 400 bp, Glycine max
  unsure (1)..(400): unsure at all n locations
atgatttccttgtaggcaaccttaggctgctcaattgctccaggttgctgcatgtattggcaaaggtntgtatggnggtctttataggagcacaaaccacanacccttgcaacaggtacagatttctgattcaaggccagctgggttaccaagttgaccaacgcatccagttttccttcaagcttcttagtttcagatgatgcagatgggtttgtagctacctcatgcactcctctaatgactatggcatcatttctggggctaaactgctgtggagtggaggccatcttctcaattaaatttctggcttcaacaggagtcatgtctnncagggctccaccactggcagcatctatcatacttctcttcatattactgagtccttcataaaaatattgga

SEQ ID NO: 8875 - DNA, 454 bp, Glycine max
  unsure (1)..(454): unsure at all n locations
acccattacatgtggtactaggtggcggtctttcgatggtgcataacgattctccactattacaaatcacgtataacccaccatcccctgttgcccacctccaactgagctcacatactcccacgtagcccttatcctcgttcctctcaacgtcgggtccccatcaatcctcccaagcttcaaaaatatccaagtaattcaacattcaatcatcacatactaacacagccaagaaaacagggcaaaggcagaaaactctgcccaaaacacaacccaacatcacagctttccacattcaattacccagtaacattctctttgttcaagtagttaacccgtggatcgactcgaaaattgactggaagtctctagtcataattctacattntgaccgctgggatctgctacataatgtcagaacccatatgtctactctttacaaccagcatacaca

SEQ ID NO: 8876 - DNA, 370 bp, Glycine max
  unsure (1)..(370): unsure at all n locations
cttggccatgctggactcgtttgttattgatttccttggcaatttgatgcttagagacatcaatatctatctctccatcagtaggtctgcccagatatttgttgatcacagcaggngagaatctaacacactttcctctgacaaacacttttggaaaatcatcacttttcctgttggatatgccaaagggatggtggacaatgaattccctgactaggccttcataacagcctcccaactgggggactgtcttcagtagtccagcagccttagaagagtgtccatggtctctttgcaatccaaggcatctcttcacagttctctttcacccgcaagtctgcggtgatacacatatttccacttctcaaca

SEQ ID NO: 8877 - DNA, 441 bp, Glycine max
  unsure (1)..(441): unsure at all n locations
ncgatccaattcatacgancaataactttgaatcggatgtccgattgtgtcccatangatatcgagacgctcgttattgaaaacggaagctctaacaaaagtcaaacgacaataacttntaacttggatgtccgattgcgccctgtaatatatcgagacgctcgaaattgaaaactgaagctctaagaaaagtcaaacgacaatatactttaactcggatgtccgattgagtcctgtaatatatcgagacgctcgtaattgaaaactgaatctctgagcaaatacaaacgacaataacttttgactcggatgtccgattgtgtcctgtaggatatcgagacgctcgtaattgaaaaccgaagctcggagaaaaatctaacgacagtaactttaactcggatgcctattgagccctgaatatatcagacgctctaaatgaaa

SEQ ID NO: 8878 - DNA, 141 bp, Glycine max
  unsure (1)..(141): unsure at all n locations
agtctgactatggaactaatcngtagttcagagtttaatcacacctaaagtttattattcatctctaagaatgtatctcacaaggatcaaactatgtctctccccacaaactagacatgagttgtcaagaaagctacactc

SEQ ID NO: 8879 - DNA, 433 bp, Glycine max
  unsure (1)..(433): unsure at all n locations
aaacgtntacatataggataagatctttaaaaccagtgcaagaccagacaatttatttcatgttaatattattgccaaaaaaagttattgtttatttgaaaagtatattgtatgtgaattaaaagaatcttgattgttggagaaagcaactttagattgaggagaaattttatcaagctacagacatatactccaaatataacaaattagaataatgataagcaaagtaaactaagtaaaaaaaaaacaccttcttttccttcgcaatctttgagagctcttcaattatgtaaccttttgctcgagcatcttcacagagagaattgaagtccatggatataccattntcttgggcccaatgttcaagtgcttgcttaactgggttaacaacagccacaaggataggcctcaaactgtttcataaacccatatc

SEQ ID NO: 8880 - DNA, 335 bp, Glycine max
  unsure (1)..(335): unsure at all n locations
gagctcgcgntagttgattgagatcgttggaacatatattgtttgcattcaatgcacatatgataagcgccatatttaagttattgttgggactaaattgttagcactcatcctttaattgtaatagttgtcttataaactacccttaagactagttgtaactatatattgtacatttactaatattattgctcaaatatgaaagattcatccattattttgtaggttttgacggttgtttgttagatctagaaacaaagctcaaaggaaggtgaaaatggtcatttcacgaagatttttgatcctatatccacccaggctatcatctacatcac

SEQ ID NO: 8881 - DNA, 381 bp, Glycine max
  unsure (1)..(381): unsure at all n locations
ctgactcaccatanacctttttctagggtgagaatgtcaatccttaccctcggaagcaaaaaaagaatagaggggaaatttccaatctaagataaagagaaggaaaatttccaatgaaagcaaaataagataagaaggaaaattccccaatcaaagagtgggagatagcaaaaagacaagaaaggataattcccaatcaaagaatgggagatgtaaaaaaggaagaagaaaaggaaaaaagctctgataaggatcaaagaaacagaaaaagtgcagagaggttttgaccggcaatatctgtcaatacagaattgcaccnatgaacaaaaaagaagaagggaccacacctaaatagtttctccttgatacaaccaaatccgt

SEQ ID NO: 8882 - DNA, 534 bp, Glycine max
  unsure (1)..(534): unsure at all n locations
cgctactactttcctattgnannnnccnncnnnngatnnnnattganacctcttgannanctgacncanagaatactcaagcttttgcggattggtcttttccagtgaaaggatcgatgtgggtccgtatatatgcaaatntgatcatcctactacgacgactgagaaaactggggcaaatgaagatggtgagaaagagggagaaacccatgctgtgactgtcattcctattcggccaagtattccaccaacccaacaatgttattactcagccaataacaaaccttctccttacccaccacccagttatccacaaatggccatccctatatcaaccacaaagtcttgcttccgcacttccaatgacgaagaccacctttagcacaaatccaaacaaaaaacaccaacaaaaaggatattttgctgcaaaagcctatatggttcaccccaaattccggtgcatttgctaaacttgatcccatattcactccgtattcaatgtgagcataaccctaccaaggttcttacctcctn

SEQ ID NO: 8883 - DNA, 88 bp, Glycine max
  unsure (1)..(88): unsure at all n locations
agcttctacgaagggcatggttatttccagtttcatgataatatctaaaaatctatctcagatgatgatctttnntcttcttggaagg

SEQ ID NO: 8884 - DNA, 406 bp, Glycine max
  unsure (1)..(406): unsure at all n locations
cttctatctttttagcatatctnttcaaatattnttcaatatttttgcatntttaagttgtgttgtgacattatntctttaatatgatttgaacatctaaatttttttatcatcatcatatcggtgtaaagtattcactgactctatatataattaatctccactaaaaaccaacctaataacactaattgattcaaatntacactatattcaaattaagaaatgctgcagagttattttaaaattatttaattatatataatagtggtagtgaaaagtacacaattattaagaagaatttccttacaaaaattgaataaaaaatacatttaaaatataatctcttttgcataataagagtatatatatatatatatatatatatatatataattatatatatatc

SEQ ID NO: 8885 - DNA, 253 bp, Glycine max
  unsure (1)..(253): unsure at all n locations
tattcgttgnannncgngatccttagagtcacctgcagcatgcaagctatactttcttgttagagccaagatgactttattatttattnggacaagtttaaatatgatgttgaagacagtgaatgtgagccttttaccnctttgaaaggcttgtatcttaaaatgttttaaaaatactcttatntaatatttgacatcttattcctctgctagtatatatgtgaggggtagagggtgtcacattcatatttat

SEQ ID NO: 8886 - DNA, 213 bp, Glycine max
  unsure (1)..(213): unsure at all n locations
gaaactcagcttctcaggaagtttcttcagatagctataaaggaagctacctattctataaatagaagcatgtgtaacacttattgttactntgatgaatgagactcttgggagacacaactcaaaggtcaacttctctccctgtttctcctttcatgtcatgctccgcccctctctttctctccctcttcttttccctcaatgaagcatcct

SEQ ID NO: 8887 - DNA, 318 bp, Glycine max
  unsure (1)..(318): unsure at all n locations
agctctctatatgaatntaatgtaaatttcacttctattccaggtaaaaaggagaaanacttgaaggtgcataagttgttgtctcgctaagcctggactgtgcgcttagcgagactcaaccactatgcgagacatcatccgcctaacgagtgagatgaatattgtaacagaatctgccatgccatcacgcgcttagagtgtcatcagctagtccgcgagaagattgctcttctgcgctaacggagaatggcgctaaccaaatttacttatcgcgctagcgcgcttcacggacaaaacccttttaagcctgattgcaga

SEQ ID NO: 8888 - DNA, 136 bp, Glycine max
  unsure (1)..(136): unsure at all n locations
gcaacgatncttatcataacaggagtgttatctttgtagatcttacaaagcttattttttggctattctgttggtggtcctgatcattcttctactttgattcgcatagtagtccggacaacactaaagctttcat

SEQ ID NO: 8889 - DNA, 288 bp, Glycine max
  unsure (1)..(288): unsure at all n locations
cagatcagactcgccatcctagagccatcaataatctaatgttatgtcattgataaacccattcctctaacaatgacatcatttgaaggtaggcatgacaatgaaacctatacccgtgggtatgcacccaaactcgtcccgatattgatggggaatacctaagttgaccaggtgcgggttcgggttcaaggattacctgactntnttaatcaaggtcggcgtcggggatggggatgtcactacccgtcccatactcattctcgtacttgcccgatgatgacattatta

SEQ ID NO: 8890 - DNA, 495 bp, Glycine max
  unsure (1)..(495): unsure at all n locations
ctgcatgtaganncgngatcctntagagttgggcccaggcatgcaagcaattagaccttgaggacccggatcncacatttttctgtagcatgcctactacaccgacttatatgactgcaaggcactttcttctctcacgcgtcgctgagtgcacaagcactattgctgggtgcacgtatcacctccctaacagcgatttcttaaatgggcatacttttttttacacattattcttccgcacacatggaatatactaaatactatcacaacattaaaaagttttaagtacattgacacatggcataactcaactgctaactattattaagtgagaaacttcattgatggtacacacttagcacataccacaatattctcggcctttcaacccgattacataaaaagaccctgctttcatagtggcaaaccacggatgtcaaaccatcactatagcattgaatatgtctttatattccgatatacactacaaacaag

SEQ ID NO: 8891 - DNA, 92 bp, Glycine max
ggatctaagctactgggctcagcttctgatatttttcctattaattttaacagaaccgtcgctgactttttttgttaccctgcaccttatga

SEQ ID NO: 8892 - DNA, 272 bp, Glycine max
aaaactcgaatcaacaataagctttttattgttatgcttatttaattcagccaccgccttcatttatgtgattatcaatgtttactcctactgcactcactttcagaccttctggtttgtgattcttgacatcaagaaatattaaattgctgatcacaatcacaacccctataatttaagtgtgaaataactactatcttccattcattttcataaattattcacaaataaaatcaaaagattaatccactagaaattacccttaactttcg

SEQ ID NO: 8893 - DNA, 294 bp, Glycine max
  unsure (1)..(294): unsure at all n locations
ttgtcgcatgcaagcttatagaaatgaaatggcataacttctaactctgatgtccgatgcagacacacaacatatcgagacgctcagaagtgaacaacagaagctctctagaaattccaatagtcataactgctcacacagatgcccgatgctgggacataatatatcgagacgctcgaaatagaacattgaaagctctcgagaaatccaaacaggcctaactnttcgctcggacgtccgactcaggagcataacatctggagacactcaaaattgaacagcggaagctcataa

SEQ ID NO: 8894 - DNA, 431 bp, Glycine max
  unsure (1)..(431): unsure at all n locations
cactatagaaacttgaacccgtttgagaaccgcgaaagccccactccatcattaggattagtatttgacatctcanacaaacaaatcaaacgttacaagacaattatagttgctgttcgaatacctcacccactcaagtgtatcacacaattatggcttttctctaatgaaacactcttgccttttaccactctaattccccttgagttcttaggcaattcaagagattatggccacaacaaagaacaattcaccaatatgtgtaaggtaaggctagacaaggaaaaggttaaccaagataaaggctaacaatgtctttaggcacaaatgaaggaaataaaattcagtaattaggaattcaagtaacaatccttcatgcaaccaatttattaccttaaagaggttttttttaagttcttcaagcctgaacc

SEQ ID NO: 8895 - DNA, 95 bp, Glycine max
  unsure (1)..(95): unsure at all n locations
tatgcatagacagcgcgagatntactcaagtgattgtcaagctatcttatctactattccttagtaaactgtttccaatgttgaactacattaga

SEQ ID NO: 8896 - DNA, 384 bp, Glycine max
ctgtctccacaaccacaactaccgtatttcaaccattaccgtacaacaaccttgacctcaatgatccaagttttcatacaacaaccttaacccatgatgcctttgacatttatacttcatgcacacaactattattctaaaatgattcttcttatgatgcccaataaatctcctttaccaaccaaacaatcaaccatcacaatattttacaacattcacctcatcacaacaaccacaaacacaaacatcaaatccaaatgaacatcccatcactgatgaagatcccatcatacgatttcatgaagaatacatggatgggtttagtgagtgtcgcactgaagaacacagaacaataaacaacatagggactgatcatggtcgcga

SEQ ID NO: 8897 - DNA, 157 bp, Glycine max
  unsure (1)..(157): unsure at all n locations
taccccatgcatgcaagcttatgacacctatcttgcagtggtatccncanattctatatagcatctctactacaatacttgttatgaaaacaatgcacgacttctaacatgcaacacttagtagaagggtctatttgcagagcgcacacatgtcttc

SEQ ID NO: 8898 - DNA, 426 bp, Glycine max
  unsure (1)..(426): unsure at all n locations
agcttccncaacatcaaagtaatacaacattcaatttgcacanactatcacagccaatataacagagcanaggcagaatactctgccaaaacaccaaccaaaatcacagcttttctcacttaaagaccccagtaacaattccttcgttccaattcgttaaccgttggatcgactccaaatttttactggaagtctctagtacataagcctacattntgaccgttgggatctactagcaaaaatccagaactcattctgcactgctctttccacaaccagcaaatgcctagtatttttctgcacttgtgcaaaatcctgctgcacaatttcacagcataaatctgcacaaaatgcagatttcganaccacacttcccttatccatcgtgccaaatcaaatctacagtccaaacatgttcatcatgtt

SEQ ID NO: 8899 - DNA, 369 bp, Glycine max
  unsure (1)..(369): unsure at all n locations
gacaccnataatactcaagctcgggatnngcattgtgcatctantttgactgtcctatgctatctctatatacataaaacagtcccaccatcccaattttgcaaaatcatattcatatatcattggggcatttcaccgagcacttgatgggcgcatgtttggacataaattgcaagagaatgggggcaatgtggcatgctccattgcttcagaatacaacataggcctaaagccttctcattcaaatctctaactctaaaaaatcaatcataataacaacccaaaactgtcccacaaatataagcacattctcacaatttggagcaccacaagatgaagaaaatattcccatgggaagctaaaaacatc

SEQ ID NO: 8900 - DNA, 144 bp, Glycine max
  unsure (1)..(144): unsure at all n locations
atatataagagctagctagctgttattggtccatccataggaccagcaaagagagctacactgcaaatgctctttgtctcactaaccctccacctncaagagagggaactgctttcatgctttgggcctgctaaaccaccacca

SEQ ID NO: 8901 - DNA, 332 bp, Glycine max
  unsure (1)..(332): unsure at all n locations
gcttttctcaccgacccggccgacgatgaacaaattgtcctcangnattgctcattcactcgattcaagacctccgtctggccatcactcttagggtgatacgccgagctaagccgcaattgtgtgccactggcgcgagacatggcctgccaaaaatggctaacaaatagtgagtctctgtcggagacaaagttgcgtaacaaattcagttatcttattgcacaactgtcctggtgtctaattcacaattcccttaatcttgagttgtgacagttatntatataagacttttgcatttagatgtgcatgtataatgtattgataatgatggc

SEQ ID NO: 8902 - DNA, 304 bp, Glycine max
agcttcctaacaataattttcatgcaggtgaaccttcttctagtaattctgacttacagtagcctcctatccctcttccattcccacctagagcaattccaaacaaaaagatggaagaagcgaaaaaggagatcttggagaccttcagaaaagtagaggtgaacatacctctgctggatgccatcgagcagattccaagatatgcctagtttcttaaggaagtttgcacccacaataggaagctcaaaggcaatgaaaggattagcatgggtagaaatgtgtcaccactgataggtaaatctgt

SEQ ID NO: 8903 - DNA, 473 bp, Glycine max
  unsure (1)..(473): unsure at all n locations
tgttttttgannnccatgganttcgatgcttcnagtannagcccgacacananaanactcaagcttctccttccttntcctatatataggggatggagtggaagaacaattatgttcaaccctcttggtatctgagattcacttaatattagtgagaaaaatcgtcttctttgagaaaattcaagccgaagatgcttcgtaacgcttccctgacgtatccgtgggtgatttatgcgaatattttcaaccggtctttgtacgtcttcgttcgatcctcgtcgtcctttgtgctctaaccggtaggtcccaaatcaaactcttcagtcatgctatgtaccttattggtcctatttgatttgcatgctttaattttatatattttctttcgtcccccctttgacggctttttcacttattaaatcttttctcgctatcaagataaataactgccccgatcttcgtttttatctctt

SEQ ID NO: 8904 - DNA, 257 bp, Glycine max
  unsure (1)..(257): unsure at all n locations
aatctagaagccatattctttttcttaggtgacaacaccattgaggcattncaccgaccacttggggggcgcactgtctgcgtaccaacaacaagaggaatgcggcgcattgcggctttgccccatcatttcagaacacaccctatgcctaaggcattccctacaacccgccaatacaatgaatcaaagcataatattgccccaaattgtctcacggaattggcacattatgtacaatcaaagcataagggcataat

SEQ ID NO: 8905 - DNA, 354 bp, Glycine max
tcttccttcaccttcttgtctcatctttgagctttgactaccattcttcctctctgcatgctctcttatatctgcctgagtgggcttatagcctaacccatacttcccacgatttcctttggcatttatcaggctagttatgctgccgttgtctttgcctaaacctattccgggttcgtaaccggtccccaacataactcgggccatcattactgctgtatctgacaggcaagcttgcccagagaaggagtccacggaggatatgcttaccacctctaaagactagaaagcggtttctaatgacgcctctgcagcttccacataatgcatagaggatgggcagctcacaagatg

SEQ ID NO: 8906 - DNA, 583 bp, Glycine max
  unsure (1)..(583): unsure at all n locations
agtctcacctggctcgttaactttagatttgaanangacacataatgttcttttacntattcgcgtgannncangtanaggagcgtttttgcttgagnancngngannnnnnagagnnnanctgctctgnanagcgngatcttagagcgacctgngtcatgcaagcttattcgancttcattgtgganccactctttatctttgagcgagctagcnccagcacaaatattgaggctagcccatgggcgatgatcatggaagtctaaacacttaatcaatccatggatctacttcaagtaaggctgaatttgagatttgggtctagatatgaatctttgggagtgtgcaaccttgcattaatactattttcattgttcaagattatgacatggcctaagctggatttatttcgtaattttgataagtaaggccatattgttggatgatatattacacgaacttcttattctatctgttgatgattggatcgttggaccatgtatttctctatgtaagattatcgctataactttgtgctaacagtcaatccattgtcctgcgttttattcctcattacgattgt

SEQ ID NO: 8907 - DNA, 398 bp, Glycine max
  unsure (1)..(398): unsure at all n locations
cctctaaatgagctacaggtgtataagttnctntgtagtctatnccttcttgttgtgagtattctttagcaactaaccttgctttgtttttcacaacctttcaaatttcattcagtttggtttgaaagactcattactctccaatagctttctttctttttggaaattcgactgactttcaaacatcattcctctgaaactgatcaagctacttttgcattgctgtaacccaattgtcatcctgcattacatcatcaatgtcgttgggtctcatttcagaaatcaatgcaatatgctcttatgttctgagtgatgatcctgtataacatgatcaactagatcaccaataattgactttttggatgattctttatgatgcattcaggggtcctcttacc

SEQ ID NO: 8908 - DNA, 310 bp, Glycine max
  unsure (1)..(310): unsure at all n locations
gcatcttagtccatatcatatcctttgtgcatgaggcatcatcatgaataagtgagaaatattttttcgaaatatagaaaagtaccctcagaaggcaaaactctctatttgaagggattacagtcttatcgtgatcgattacacaattattgtntagacaatgactgagttacttatgagtctctactgtaactaattaccatgtgatataatcaatcactcctctttctttaagtgcttcagaagtgaacaagaatacttctttcgattactttgagtactaatcaattacagtggtcttgagcaattc

SEQ ID NO: 8909 - DNA, 280 bp, Glycine max
  unsure (1)..(280): unsure at all n locations
catgcaagcttgtatgttcgtatcccaccattcttcatagtttatcatccggcagtgagnctactatcatngtgancatctctttctccttcattggaggtgccacttgagctgccaggtctctacacctttgggcgtattatatgaaatatctgtgccctcttttgcacatgttcttatcagaattgtactgatatgcctaatgaaggaaaccattatgtccttccaacatggacttaggatggttcaagaatagtgtaccatgtgatggccgccccaa

SEQ ID NO: 8910 - DNA, 227 bp, Glycine max
  unsure (1)..(227): unsure at all n locations
agaagccaattaaataaagaaaaaagtgtatactggtttagtngctaacactngcttgactatgttaattatttgatcactttagacagtaattgatgttcaatagtttattagacctgaccttctgagtattgtgatggatttgaagtttgtaagctcattataagttaagtcgggttctaattaaagggcatggtggtccttaaacataaattgttactataaat

SEQ ID NO: 8911 - DNA, 432 bp, Glycine max
  unsure (1)..(432): unsure at all n locations
agcttattgtatatgagtgcatgtccaatggatgtttcttatgatgacctatactctagtgataagaaaaaggaaccactaacatggaaacagaggctaaagatctgcacaaaagcagcacatgaccacactactntgacacatgtgtcattaggccgatgttaaaactgctttttgtagtagtgttggatatatgatctctaagaaaatgatgtcttatctctatatgtttgggtctagaatgcatgataggaattttagatagattgataacacttgtgttgtcacatttcaagggaatatgatcaaggactaatatcttgcacacaagcaaacactaagcataatatttggtcaactgtagttaagtaaagaagtgaccaattatacctctataccttgactcataaaatgatttacatttctcatcta

SEQ ID NO: 8912 - DNA, 328 bp, Glycine max
  unsure (1)..(328): unsure at all n locations
acacctataatactcaagctntagctctaatcctcgttttnttcaatggatttgcattttttcatttcggttntgaacaatgaatggagaataatgtcctccaacatctcctgcctcaattntcacttgatcattatggcagcgtgagagaccgtgtgaatttgaatccctaatntatagttcaaatgtttgttacactctatttatgcttgatgtcataccatgcttttcaaattcatgatttgcattgatgcaacgagattttgggcttgctttttcttgaataagaattgggttttggtgggttttgatttctagagagaaagtg

SEQ ID NO: 8913 - DNA, 536 bp, Glycine max
  unsure (1)..(536): unsure at all n locations
ngtgtttttgaaaccatttgaannnncccccnccnnnnngntgnctttatnttttttttgtannancncacacanangaanacncaagcgcnggcatccnagaatattannaatnnnncggagcccagccncactttatgacaataaaagtccttatgattcaatctgtgcatatctaactttatggcaggagatgaagtacatatattggacctcttgttagttggtattgcttaatcgcttatacacaagtgcttgagtggaaacatggccgggagactttgggtaagcatttttttcatgcaaattggctcttggctagctccaattagatgtgctggatgcttacatgttcttttctctgaaaaatcgcatgccttgcgaaacgcattcgataaagacatctccgttcacattattatcatgcgacttaatttctatgaaccatacaccttgtgtcataatcactgcatgcttctttcacttggggaccaatgagctcgtcctgtatttgcttgaggcataccataactgcg

SEQ ID NO: 8914 - DNA, 144 bp, Glycine max
  unsure (1)..(144): unsure at all n locations
tgagctctgtgcataataacttttgcttgtaagtaatgaaatgcttctaanagagtgtaataacaaatttgggatttacaactggcaaaatctggatacttttaatttaaatagtaatgacacatgtacctatagacatgaatt

SEQ ID NO: 8915 - DNA, 233 bp, Glycine max
  unsure (1)..(233): unsure at all n locations
aacaaaanacttttgaggaagcttcgctaagtgtccccattgaaaaacctttattcaaacctgtcaaagtcagtgataaggctaaacgagaaatcagggaacttagaaaaactaaatccataattgaaagcgtatgtgacaatcataccgaattactaaacaagattggctgtttggttaaagtcaatccagacaactcccaagcctcggaaaatacttctaaatggtacaag

SEQ ID NO: 8916 - DNA, 367 bp, Glycine max
  unsure (1)..(367): unsure at all n locations
agctggcatgtccaagtctcttgtgccatacccagtgatttcctttgattgatagtagacatgctacantttgattagatagttcactaagattaatcttataaagattacctttcctattagtagtgaaaagntgggtcttatttttgggttggacgacacatccatctttgctaaaggaaacatcaagtcgattgcacataattgaattatactaagtagatagtgtgtaagccctttaacaaataatacattatcaatgggaggataaggataaatacttatttttccacccctattatcttccccttctgatttgaatgtacatttatcacttatcacaaanataaacatgtaaaaagaataa

SEQ ID NO: 8917 - DNA, 446 bp, Glycine max
  unsure (1)..(446): unsure at all n locations
actcacgctctatgatgatgaatctaggagtnttgatgatgacaaaaagcccatatgaatgatttcaagattcaagagaagaaatcaagaagcaacaagtcaagacttcacaagggaagcattgaaaaggatatttcaaaaaccaaacatagcacagttttgttttacaaaagggttttcctcaaatntttctaagttaccagagtatttactctctggtaatcgattacaggaaggtaatcgattaccagtgataaaatttgatttcaaaaagtttttaactgaatttgcaacattccaaatgatntttaaatggtgtaatcgattacaatatattggttatcgattaacagtgtatctgaacgttgaaattcaaattcaattgtgaagagtcaccatctttcataaaatgcattgtgtaatcgattacatgaattattgtaatc

SEQ ID NO: 8918 - DNA, 93 bp, Glycine max
ctcagagttacctgaggcatgcaagctagaccgtgcttatttagcatgagcctgctctcctatgcagggaaggcttcctttacacaggggtgt

SEQ ID NO: 8919 - DNA, 458 bp, Glycine max
  unsure (1)..(458): unsure at all n locations
agtcgagttatttggccctgaaancccnnnnnnnttganccgtgaattatactctganacgaccaagaaccagcncaagcacnntacctctgatnctaaactttacaaagatgcccggagggagtggacgatgtacaggggcaccatgctatttaggaaaacttcataggcacctcactaccccacctatgataaagagctctaagcctcataaagagtcatgcaaacttgggaacaataccaatgttccaaggaatgtgccattcatagtgatcatcaaccacctgaagacattagagggaaaagcaagttaaacaagacgcatgcacaatgggtagagtaccgagagcaacttccatctgtcatcaaatacaaacagggaaatacaaatgtggcatgtcatgcccctcctaagcgacacacaatgatattcgccgtaagaactcaagtactcgacc

SEQ ID NO: 8920 - DNA, 78 bp, Glycine max
gaaaccacctaaaggtcccctctcttccctttaatcctaaattcggcccccccttttctttttttttcttctttaagg

SEQ ID NO: 8921 - DNA, 361 bp, Glycine max
cacaacagggagtgaagattgctgaaaaccctagccttgcaacaagtcctatggaagtagacacggagatggacaagataatccgcagtattgtgagtagcattttaaaagacgcctctgttcctgaagctgatgaagatgttccaacatcttccaccccgaatggttctgtgcctgatgttgagaaagatgttccaacatcttccggcccaaatgctgaagtactctcttcccccagcaaagagagatcaacagaggaagatgatcaagcgacaaaggagacccctgcaccaaaggcaccagaacctgctccaggtgacctcattgacctggaagaagtagaatctgatgaggaacccat

SEQ ID NO: 8922 - DNA, 495 bp, Glycine max
  unsure (1)..(495): unsure at all n locations
tgtcatgaaantcannnannnntatagtgaacccattgatgcaccgtgaggatatgtggtacccgtcatatgtggttcttgtggcgatcgggcgacagggtttataactctcccacatcctcaaattaaacatgaacccaccatactcagttgcctaccttcaactgaactcacgtacccccacgtagcccttaatcctcgttcctctcagcaaccgtgtctccaatcaatccctccaagtcttcacaatattcaataaattcatgattaaatatagtgatcccccctagaccaagataacagggcagacgcataatacactggccgaatcacattgtaatactacagttctccctaccctaataccccggagctttgcttgtgatggacgcgcgctcgatgttcaactgactgtttatatgaatcatccactagaatgatggttgattggctcttttacggctacagatagtcttcctactcatctgctatccg

SEQ ID NO: 8923 - DNA, 472 bp, Glycine max
  unsure (1)..(472): unsure at all n locations
tatagcctcggcagcttcatcctcagatccctcttgttggactaggcttatattaaacaacattataatcacaacttatttaaaaactaaaaatcttgcaatctatccctagcaatgcaattatctagccttgctctatcaagttctaaggaaacagtacacttcccagttcctaacagtacacaccaatgggtgatcagaccataagcatgcaacagtaaagcatcgatagaagcaatgaaaacatgaaacacactngctagtgtttagctctactgagctttaaaagattggctaagattttggtaaaacataagcacttatacaatgaaggaaagctggagttgctgcacatgatgtccaacgttatgtcaaggaataagatctggctgacaacgtacaaagcaagataaaatggcanatgaagaatcgaagttgcaggatccacgatgtcggatacaatgtcctgaca

SEQ ID NO: 8924 - DNA, 412 bp, Glycine max
  unsure (1)..(412): unsure at all n locations
tctcgctcctgagagctcggacttcttcgtcctcttccggtgcttcaaaactctctttgctgtcgacttttaactnggcgagccaatccaaacctcttgctgaatccttgaccacagttgcaattctgctcaaagaggggagacacccggatgaaagatatnggtttctttccccgagaggacatcctagaatctcctcaaattcttcaatggttggtactaattggaagtctccgaatgtgaagcatctcanaggctggtcgtagtattgggtgagtgatgcaatggcttctatggatacctctgctaaggtcaattctaagatctttccgtaagtcttgcggaaagccttgcatttgagagggtccatcaaccgccctaattccttgatgctggtggtatctaagctttt

SEQ ID NO: 8925 - DNA, 397 bp, Glycine max
tcttcatggacagcgagcctgtagagtcgacatagagagcaccacatgatcatgggcctttgctctttcttatcttgtctttgtcaagcagatccttgatttctttttgacagtattggaggagttcttcattcatttgaattggcctagctttcataggaatttgttttcccctgaagtctttctcataaggaagatcaacaatatgttttttcctattccaaaatgcatgtggcaaatcagaacagatagttgattcaatatgatgcaataaagattgaatcttttcttttatctgagggtcttcgaattatatttggatgttattaaaagatacttcttctcttaagaagtacattggttaattctgattttataagatttgatttctagatat

SEQ ID NO: 8926 - DNA, 227 bp, Glycine max
agctttttgtctcttggctaaacatgcacaatgcttatgatcattctcatgcatgaaattgacatcaatctacaagagaatcagtaaaagtctactgtgagtgaaataaaagtgcctcacaatatatatttgtatcattataatgatcactcactccatcggtaggtctacaagatgctttatatgctttcaatttttcatgcctaactcattacacatctcgatca

SEQ ID NO: 8927 - DNA, 526 bp, Glycine max
  unsure (1)..(526): unsure at all n locations
aggcccatgtgatttaattnctatgnannanncnnccnnnngtgngctttgatancntttgannancnacacanagaaacnaagcccgacncnggatttttcttgttgctaaaaggacgaatgaatatgttgttgtaatgcttcgatcctcgtcgatcagcatagtcaccaagtcgtctcctctggcatctatttccttctcctnctcttccaactatactattaattacaagtggcttttttggtgaaggagaatcaatagaagatccactttgcggcttagtgggcacttgtttcttttccgtcctgttctttctttcagtcttggtaatatctggatcaaattacaatctatctaccagaaacttacctcgcattaaggaaataaaaacacactacatcaacctgtgagcacccaggttagtgtaaatatcacaagacagaatttctacaaaatctaaatacatgaactaataccaaagtagcganattggctatcttactgaaaattatattccaaagaacn

SEQ ID NO: 8928 - DNA, 555 bp, Glycine max
  unsure (1)..(555): unsure at all n locations
agggactgttatgttttatganncctttgnaaanagcncaccangagtngctttgggaccttttgananctgacancnttgggacncacgcnngnanggggaaaagattatacatanangcanacatnagaacactctcttgtctgctccctgctatttattcatgncaaacataatctagttccaatttcatttcctgaaacttctttccctgatgtttcaatgtttagatagcgacatcttctgttacatggcttggtatattttgacattgttttatggtttgactctagaacattcacgtgtgtctgactaatggtacgctcantgcagactgaacagtcttggagatgagataggcttttgcagatctagctactggctttttgcttccttttgaatggtgtgggaccttaactagagaaattggtttacacattgtttattgtagaacacagtctcaagttctgttcgaatgccagttgacatatatagttgggctttcgctcctctgattcttggttactggagaatgtgcatgatcttgacctattt

SEQ ID NO: 8929 - DNA, 123 bp, Glycine max
  unsure (1)..(123): unsure at all n locations
agcttgtagaggatgcttcaatggaggaaaagatatagggagagaaagagagaggtgggagcacganattgaaggaagataaagggagagatagtgaacttttgagtgtgtctcacaagactc

SEQ ID NO: 8930 - DNA, 368 bp, Glycine max
  unsure (1)..(368): unsure at all n locations
agtactcaattagtgaaacactgtaactntatgtgtatcaatgtccgaagataggtgctatggtggagtacaagtcaaaggttccttatgccaacgtagaaggttgcttgatagtatgtgatggcgtgcactacaccacagtatggcgcatgctataagccaaggttgcaagattatgtatgacccaagaaagcaacacatcgagaagcagagaagtggatcttgaggtacctaaagggtacaacaagtcatggtattatgtttggcaatcaacatggtgatccttcaggtgtgggatatgtggattctaactatgttggtgatctagatgacacgaggtctaaaacaaggcgagtctttactctttg

SEQ ID NO: 8931 - DNA, 177 bp, Glycine max
  unsure (1)..(177): unsure at all n locations
tagaaactcaagctngacaatcttggaaaccgctagagactccgctatcactatcgttctacacatgtgagtccgcttagaggcaatggatgagtttatcacatatgtggttagaatgaacatgtgtagagatcattcgaggatcaaattggagttaattttgagatatttattata

SEQ ID NO: 8932 - DNA, 424 bp, Glycine max
ccttaactgctgatgagttaaagttggtggccagccatttaaggccctggaccagtatacaggtcaacacaaccttcgctttaactcccaccagtgaaggactgggcctgcatgcttaatccaaccagcctgccgtcgcttattccaaagggaaaactatggagcttaatcagagggacaaccctgaggagtaagaatgaactcgggcaattgccagtgtcagtcgaccagcctggagccccttcttgcctccaatcagctgaactgccttgtggtgtacatcgttaccgcatctctcattccatttgtttctgatacacacatcccaggagctgattccattttgagatactccttactaccctgtatacaatttcgtatcaatcttctgttccatcaaacacacacttctatcaatttttcc

SEQ ID NO: 8933 - DNA, 445 bp, Glycine max
ctcatgacacatgtcctcttgtcttcctcctttgtgagttattgttttaatggcatgtcggcatggcatccctacatcaaagttgtaaaatcagcacacatgtaggctaggaatgaaaacaaaactataaaaaacacaacctgttagttgccatactccacaagtgcatgtccattcacctaaattgacctcaaccttattcccccacatgtggacctcatatctcaggcccatgttatcaccacaccaaatgggagtccattgattagcacaatggaattctttttctagtcttttatactgcacaggacataatggtccaggttctccagaaagttcaaccttgcgggcagccaaggctctcatgatatacactctaatttcttcaagcattgtgataataggcttgcatctatactgcacaattctggaatagaatacctca

SEQ ID NO: 8934 - DNA, 411 bp, Glycine max
  unsure (1)..(411): unsure at all n locations
atgtcgtatagcaagctagccacccagctcgaccagacgagcatggttgtttcctccagaagcaacagccttctggttgaatcttctggagggccctagtgggcctggttgctatttgcacccccatttttactaagtacacccccctgcctttattggtgattctttttttcgtaaagttacggaaacttacgaatttcgtaacgatacttgttttctttccgtattgttacggaaccttgtggattacataatcatcccctttttgacttacggaatgttacggaaccttactaattgtgcaacgatgctttcatttgatttccggtgtgtcacggaaccttacggattgtgcatcaatatnttctttgttatccgcacatcccggaatttacaaattgcctaatgatg

SEQ ID NO: 8935 - DNA, 417 bp, Glycine max
  unsure (1)..(417): unsure at all n locations
acccaccatcgacatagggcttaagctcatctatacattgtcctgtngttccatcattattttgcataggtacaagagccacgattatgcacttgaataaatatttgatggatgttgattgattgcaccattctatgttgaggtaatcttgatatttcaataataagtttggattgtatggcactacatatctattgtctagggctatgtgatttttctcaatatattttccatcattacgcctttcataaactcaatatccatcttggtcaacaacagtttcaggttgccaattttttgaaaaaaaatctagaacacttgccatctttcatgcatggcaactttctgttagcattaccacatatgccatgcatcatatgtgatgtagctccatgtggagcttgtaggccttggatc

SEQ ID NO: 8936 - DNA, 328 bp, Glycine max
  unsure (1)..(328): unsure at all n locations
agctatagcatccaataccctgatgatgatgtcctatatgttcttaagactggactgattcatttgcttccaaagtttcatggccttgcaggtgaagacccgcacaaacatttgaaagaatttcacattgtctgctctaccatgaaacccccagatgtccaagaggatcacatatttctgaaagcttttcctcattcattagagggagtggcaaaggactggctgtattaccttgctccaaggtccatcacgagctgngatgaccttaagagagtattcttagaaaatatttccctgcttccaggaccacagtcatcaggaatgatat

SEQ ID NO: 8937 - DNA, 467 bp, Glycine max
cctcaatcatttccaaatatgcatgtgaattatgaagcatcaacaagaatcaagccaaggctattgtgcaagcaatcaatggggcaaaacacaccaaatgattatgatgatggatggcttaaattctcacaaaggtaaactcatcactttcaaattgagctttcaaaactatcatgacatgtagagaagaatcaaggatttcaagtcacaaaatgtcaagaacttttattttcaaaacaattacccatttcttgaacatatcctataactcaaagaaaaacatgcaaagtcgtacatgcacacaaaattgacccaaaatattaaactaacaatctgacgaaactaacaacattaacaaattaacaaaaccaacaaaactagcaaaaccaaagaacactccccccccccccccatacttaaacaacacattgtcctcaatgtagcgcaattaaaagattaaaaacaat

SEQ ID NO: 8938 - DNA, 532 bp, Glycine max
  unsure (1)..(532): unsure at all n locations
atgttctttgagacccggngatcctctagagatgacctcantgcatgcaagcgtatgctgacagtcacctgaggcatgcaagcttttatacgcatgtcagtctttggcnacacacttttcattcacattgatacttagtatacacactcaccctctctgatgatgacattccctgacagcaagaccaaccatctgcaagatgataacacgttcactcaaccgattactcgccctgacttttgtcctggcatgcctaactttactcaatgataaacttctagttgatgtataacccaatgtcttctcctcctttgctgcatgaaaatgactaaccaacgcaatcgcattcaagtagagccatacattacgccataataaacccatacattgacataaccagcaaagcatagtccagaattataataatattgcaagagtacgagaactagtgcaacaaatagccatatacacgacgataacacaaggtctatcatacttaattactacaacacctactaatcataatatcacg

SEQ ID NO: 8939 - DNA, 482 bp, Glycine max
  unsure (1)..(482): unsure at all n locations
atggcttatgatactcctgtatnaccngaccatagagaactcaagctctgagtgaaacgatgtgactcttcatanttgaatacgaatttcttctttgcaaagcactggtcaccgattaccaaaacattgtggagcatatcaactgctagaaattagctggaacgttgtatatcaatttgtaaacttgtccaatccggttttctactggtaatcgattacgacaatctggtaatcgtctaccagacagtaataactcctaggtggacatgttttgagaaaaatcatgttgatctacaattctggacgaaaaacctcttcatacttacatggattatgcattctatcgtacttgaacccagagtctcgcataatgatcacggaatctcgagatctgcaacctacaattcgaataccgaactctaacatctttttgagtctagaatccttttgatcttacgttgaacactcgaatagtgcttgag

SEQ ID NO: 8940 - DNA, 106 bp, Glycine max
  unsure (1)..(106): unsure at all n locations
gctttgaaccaatggataaggcccttagtgttcaggttgcagctatgcgttgtatngatgggcatatcttgcgcctctataaaccagcataaataaggaactgcag

SEQ ID NO: 8941 - DNA, 300 bp, Glycine max
agcttagtagcggttatagaagtcaatattggtgtcaataactatcatcatttctatctgacctgatctgaatcatggactcggtttgtgtgtctagatagacaccacactcctaaatgcacaatatatttcattgcaagcctaacaacatgtccaaaacccaattttattcgaaaccaagcgtcatgatttctatattaccacattttgggagttgttaatgctgaatcatagttgtgctgtctcatgtgccctatgactgatctctctaccttaccactcagtcaaaaccttcattag

SEQ ID NO: 8942 - DNA, 391 bp, Glycine max
  unsure (1)..(391): unsure at all n locations
tctcctctggctgcctccagagctcctatctcaaaattagcactgttgtgtacttgctctggaattcttgtactgcttgctaaanattttgtaccctaattctgcataagacagactntaaataggctctgaatccgngatgttgcacttagcgccaccctcgcgcttagcacaagttagcggatttgagcttagcgccagtcatgcattgggcttggctaaaggcaaccatcgtgcttagtaagcagatctcgtgcttagcacgcggccttgatatttatgctctgccagattcttccatcgcgctaagtgcgctgaaactgcgcttagcgtttgatgcgcgctgagcccacatggtgagttgagcgcaacaaatcttatcatggaatgc

SEQ ID NO: 8943 - DNA, 354 bp, Glycine max
  unsure (1)..(354): unsure at all n locations
ctcacattcactttctactacatcatattcgaactagtccaaacaaataatagaggcatctcgactcacagaaagtcatatangtgtcatactattaatatagagcctatatgctaatgtcacatnctatcagagcgtggtgttcatgtgactctagcatgaagtcttcataggcatctacctattcatctgctccccgaacactagttcaagatcatcacaggatccaaactagacaacacacagggagtgagttatcacattcctagctaatagagaaacaagacagttagatatacatactatataagtgagataccactgtgctaaacatagctcacgtacgtcaccact

SEQ ID NO: 8944 - DNA, 132 bp, Glycine max
gacgaggaggacagagattgggggaacaggttttaagggaggagaaagagaaaagatgcaagaaagggggaaagaagaatatgagaagcaaatatagaagaaatgcgagagagaggaaagaaaaggaaaagg

SEQ ID NO: 8945 - DNA, 352 bp, Glycine max
  unsure (1)..(352): unsure at all n locations
agctatgctganacattataatagacctcctcagtatcaaaaccaacaacagtagaataattatgaccttccaagcaacagatacaatccaggttggaggaatcatccanatctgagatggacaagtcctccacaacaacatcagtctgtcctttctttccagaatggtgctggtccaagcaagccttatgttcctcctccaatgcagcaacaacaaagacaacaagcagttgaggccccttttcaaccttccttagaggagttagtcaggcaaataaccatccagaatatgcaatttcagcaagagacaagagcctccattcagagtctgacatattagatggtgcagatg

SEQ ID NO: 8946 - DNA, 316 bp, Glycine max
  unsure (1)..(316): unsure at all n locations
acatgatgctgatgagtntgtagctacctcttgcactcctctaatgactatagcatcatttctgtcgctaaactgctgggagttggaagccatcttctcaattaaatntctggcttcagcangngtcatgtctccaagggctccaccactggcagcatctatcatacttctctccatgttactgagtccttcataaaaatatnggagaagaagctgctccgaaatctgatggtgagggcaactggcacatagattnttaaatctctcctaagattcatataggctctctccactgagttgtctaatacctgaaata

SEQ ID NO: 8947 - DNA, 342 bp, Glycine max
gatcctctgagtcactggccgcttgcagctagatagttactatagtcatgctcgaaactttcaaccttcggaaggaacatcgagaatgttgacaagaagtacctccaaattaattaatgttattaatgaaaatagtgaccaaaactcagaaaacgctgtagaagcaaagcttcatgatgaatcaagaatgattcagagatgtcttgatgataacaaaggtgatgacaataagctcataggtcaatcaaagaatgagttcaggatagattgaatcaagaaagaatgagttcaagatgttcaagatagaatcaagaacacttcaagattcatggatcaagcatc

SEQ ID NO: 8948 - DNA, 442 bp, Glycine max
cactatagaaacatgatctcactgcagctacatagctccaggttgctgcatggaagggcaaaggtctgtatggtggtcagcagaggagcacaatctacaaacccttgcatcaggtacagatttctgattcaaggccagctgggttaccaagttaaccaatgcatccagtttgccttcaagcttcttagtctcagatgatgcagatgggtttgtagctacctcatgcactcctctaatgactatggcatcatttctggcgctaaactgttgggagttgaaagccatcttctcaattaaatttctggcttcagcaggagtcatgtcttcaagggctccaccactggcaccatctatcatacttctctccatattactgagtccttcataaaaatattggagaagaagatgttctgaaatctgatggtgtgggcaactggcacat

SEQ ID NO: 8949 - DNA, 324 bp, Glycine max
agcgttatctacataaggcttatgatcacgtggccagaccttatcttagaagttgtttggaggattctggttccccccccccataagatggtcaccttagttatgcattgagtaacttcttcattatcccttcttacagcagacaaatcaactggatctcggaaggagtgtgtaacataatcgacagaattgcaagatatttcttatggaaggatagtagaaataaaaatgagttaatcttgtggctcgggagaatatagcacttcctaagagcataggggcattgtgcactatataggcaagggacatgaatgtggcaattct

SEQ ID NO: 8950 - DNA, 436 bp, Glycine max
  unsure (1)..(436): unsure at all n locations
agcttattcctcggctncttcttttaaaccaaagattcaagctctgtccatatctcatacacattgatataagttgatacatgctcgaactttcttcgatcattatacttacaaatcatagttatagcattccaattaaggagctctcattcattgtccttcttcccctccagcttattctcgtgggtgattgactcatgcaaattcctgcagtacaaatgggtttccatcatcgacttctatataggaataatttatgcgcttagcttgaacatatctctatcatgaatcgcacaagataatagctccncccaaaccaggcgagctatgataccactgttgggaaacaatntccctctccataaactcaaaataggaactttagcggaaacggaaaaaatacaagaatagagagtngaanaatgacactaagaag

SEQ ID NO: 8951 - DNA, 379 bp, Glycine max
  unsure (1)..(379): unsure at all n locations
catgcaagcttgtgtgccacgaataaatagcagagaatattgttctatntgtgccattgaataaagagaatggaaatgtttaatttgcaatgggcacaaatgtcctttgatcttttaaccccgatcgggttatgtatttgtggttattttcttaataaaataaaagcacgccgtttaaatctaatgctaattctcgtttcttgcccagacatatgtatacccactttcatatgacgtacctaccccttggtggtaattgttacactactatatattttaattntaataaaatatttaatacttaaacaaattataataataagatttcgaaattagctaaaataaaaacctaacactgcaatttcttataaatatattt

SEQ ID NO: 8952 - DNA, 283 bp, Glycine max
  unsure (1)..(283): unsure at all n locations
cgaaggagtnntggggtaaatggcttactaaagaaggcaatcngatggcccttctgagataacacggcgcccatgccggcaccagatgcgtcagtctacaatgtaaaagtgagggtgaaatccaataaatgtagaacaggagcagtggtcagcgcctttcttaataccttgaaagcaagtctggcgcggaggttcattcaaatgtgtcttgaatgaccagtcttcgtaaatagggctgcaatggaagcatagtcgcgaataaaccgacgataaaactcggtga

SEQ ID NO: 8953 - DNA, 535 bp, Glycine max
  unsure (1)..(535): unsure at all n locations
cgcncccccnctgtggtttgannccatttgaaanngcgacactatatgaaacttgagcaccacttgacgactgacancncttgaacnnacgcncgngcgaagcgagtttanancgcnaagcccaaagcaannnagnttttcgaggancagnacattcgctaagcgagcaagtctagctaagcgcaattacttctttattctagaattaggcttagtgagcttgatcgctaagcctatcatgttccagcggacaagttcggctaaatcgcttgctggcgctaagcctgagtagtgtgtcctgctaaacaagtgagtctcgctaagcgcaattagctctatgtgagaaataacgcttagcgagccatgctcgctcaagccattgtggagattatctaagcgagtacggctgatctatccagagctctagtttgggagatgcgcgcctagctcaccttgacactgatcttgagctgtagtttatatggacggtaactagtagtctggctccagccatctgttgactgcatttgatctt

SEQ ID NO: 8954 - DNA, 128 bp, Glycine max
gagacgggatcttaatcacgagcgcagctgagccttttgggcatttggttcgagaatgcttatatctcccttaggaaacacaattgacaccccaatctcttgtcagaatgggttgaaactatggcttt

SEQ ID NO: 8955 - DNA, 375 bp, Glycine max
  unsure (1)..(375): unsure at all n locations
ncacatggagctatatcaaagaagaagttcatatcaccacatgattcataaagagacctcatatgtaagttactcatttataccaatttaatgatgatcatgaggaccaaaacatttcattcacaagattagtaggctactcaaaagtaggttattgaagtgtgtttaaatgactcgtgttcacaagaaaaatatcagtagggaagaccttagattaccatacacattgagaaggggaacaacttgtagaaaacattatctgacaagagattcatacaaatttggatcagtaaagaataaccctatcacctatcatatacccctttgtcacaatcaactcattacccttctatagatagcaagatcatgagaaat

SEQ ID NO: 8956 - DNA, 119 bp, Glycine max
  unsure (1)..(119): unsure at all n locations
tgtgccggtngannccatgancccctgaacgccngngacctctgagttatctgcagcatgcaagctttgaccatttcctatccaccataacctttgaccagatgagaatgtcattcctc

SEQ ID NO: 8957 - DNA, 235 bp, Glycine max
agcttgtgatatcggctacaaagttataaaaacaagtaactatggctaatagagtaactaaagcttttgacaataccaataactatggctaacactaactatttacttttaaacaaaacaagccatatatcctggtcaagaaaacatatactaggagtaattttctttataaatgattatgaaaatgaattatccgcatctccatgttcccctcctatccatcaaaaggaataag

SEQ ID NO: 8958 - DNA, 358 bp, Glycine max
  unsure (1)..(358): unsure at all n locations
tngttttggctagtagtgcgtcttgttactgttagatcaaaaagacttttctttgtaagcatataatctcaatcacaaaggatggcatggttattggttgtcatgttttcaattaactccatagctttatcaagtgtcttcaatttgatcttcccaccaacggaggcattaagcagctgctcggaatgggattgcgtgacattaatgaatatattttgctgaaccggctcgctgaacccatgggtggaagtcttctagagtaaaccttggaagtagtctagaacttcactcaatgattcaccagggaattgctagaataaagagatgtccaccttcccctcagtggtcttggactctg

SEQ ID NO: 8959 - DNA, 238 bp, Glycine max
agcttgttttttaacaaaatttttgcttacaggtagtggaaatgagtaaggaggttctggaagtaggaatcaaaatgtcatttcgcccattgaggtaaaagcgtcaagctaatgacgttaaagaagcgctttttgggaggcaacccagttttaatttctgttatctgtgtttttcttttgcattacatcatgtggaactttctttttaattagtacattggagtatatcagcttgtcc

SEQ ID NO: 8960 - DNA, 330 bp, Glycine max
tgagggaaaacttgatgccttggttattctagtaactcagcttgccataaatcataactcagcttgccataaatcagaaattctgctgatcaccatacagatctctgtccttctttgcagctatctggagtcaatgagcaacttgaagcccatgctgcaaacatttataatagactccctcagcaacaaaaccaacaacaacagaataattatgatctttcaaacaatagatacaatccaggttggaggaatcatccaaatctgagatgggaaaatcctccacaacaacaacagcagcaacaacaacagtctgtccctcccttccagaat

SEQ ID NO: 8961 - DNA, 238 bp, Glycine max
agcttttatttaaggttcgttcctaatttatctacaattgcatcacctctcaatgagctggtgaagaagaatgtggcatttaccttcggtgaaaaacaagagcaagcctttgctttgctcaaggaaaagcttactaaggcacctgttctagctctttctgacttttctaaaacttttgagctagaatgtgatgcctctggagtgggagttggagctgtattgttacaaggtgggcacc

SEQ ID NO: 8962 - DNA, 343 bp, Glycine max
tgcacttgaggccaacaagggagattgaccattctttttgcctgaaagaaccaacgacaatgcttacaaagtcgagctgcccggcgagtataatggtaattccaccttcaatggccctgatccatccctcttttgatgcacatggagaatccgaatcgaggacaaaccccttctcaagaaggagagaatgatgaggacatgttcaagagcaagggccaggatccactcgaaggaattggaggacccatgacaagggctacagcacggaaagccaaggaaagcctccaacaagtggctgccatactatttgaatacaagcccacagctcaaggagaaaagccca

SEQ ID NO: 8963 - DNA, 238 bp, Glycine max
agcttatggtttaacattatcttaatgcccatataattggaacttgttttaatcatagatataaccaacatccaatataatgtaatgaaacaagcgtccaaacatattgtgaaaaccagtaccaaagtattgtatgtttttgtgcgtctacaaggaaaataactaactttcataaaagccttatattatgttagttaacattcatatgattgtcttgtacgtggaagcatctcgagat

SEQ ID NO: 8964 - DNA, 341 bp, Glycine max
tttaaaacacaaactatgttcaaacctataaggagtatacttgaaataagtttatttgagtcttacctatatagttgatttattttaaaactcgaacttgactatatataaattataacattatatatttatatttagaagctcctaaaaaatcttactaaatataatctataaggtgtgataccaatcttttaatatcaaacctataaggtttgaacatatttcaagtatacatttaaacttatttaattattaaaacaaaaacttgaacaaatatttattgatttgaacttaataattatgaatgactcagttcatttccactttttgacaccatcatc

SEQ ID NO: 8965 - DNA, 238 bp, Glycine max
agcttttattttcaagagacacctttcttctcccactcagttgacagatttgaaattcctttcctctcccttacagtacacgacacttttatattctttctctttatttttgtttttgatatgaagagggcaatttcacatcaaatctcagggttgccaactagtggtgtagctgtctaggaacatgtctttgttggaacaattggacatcaagttgttgccggttttggtgttgtta

SEQ ID NO: 8966 - DNA, 352 bp, Glycine max
tgtatagttccccaatttatgggtattttggattaaattttttaaataaacttgttttatggttaaagctgtctctagaacatttccattggatttaatgatgaaatctgtgcattttcaggtgaaaaagaggccaagttttgaaatgcaaaaagtagcagttgggctaagcgcatatccaccgctaagtgcagcttcagcgtgcttagcgcaaaggagaatctggtagagcatcagcatcaaagccgcgcgctaagcgcgagatgagtgcgctaagagcagcaagtgccttcagccaggctcagcacaagactggcgctaagcccaattccacttactggcgctaagcgcg

SEQ ID NO: 8967 - DNA, 236 bp, Glycine max
attttttgcgcatatttccttacgaacgttcacttgcacaagacatcctatcaactaagaaaaatgcacccatatacaatcaaggtagcttcattacctagattatttacatgtacttccaaggtgtatttgttatttacatcacacacgcctccttggctgaatttacatacatgcatactcaaagcattttggggtaccaaaaactgcacatgcgctcatcttggtatttctaa

SEQ ID NO: 8968 - DNA, 302 bp, Glycine max
atgatgcgctactgtttattgtccctctaatggacatatcatttagctctggcagaactatggtataataccaagtgtcatacaaccacccatatgacaccttttgaggccttatatgggtatgtgcctacaagtcctaatttgatagacaagggaaaaactctaattgacgcagtcgattacactgacaacaagatagctgattggaagaatgttgcaagacaatctcagttgagctgaatagagaatatatatgtttgcagacaagaagacgatagacacagagtttaattctggagatc

SEQ ID NO: 8969 - DNA, 235 bp, Glycine max
agcttttagacgtatgtgaaaactttggcatcatcaaaacattcagcttgatactttgtctacaagcaccacttttaacatttatgatttaattccttttgcaggtggagctgatattaaggagaaggaactaatagattttaggtcaaatcctcttcaagggggaggggatgatgcaatcctccctaggaagggaccaatcactagagccatgagcaagaggctccaagaggat

SEQ ID NO: 8970 - DNA, 350 bp, Glycine max
tccaaggatggccctttgcattcagaataaaacccctaccagggatgcagagacggacaacaaaatcttgaggatcaatcctcatcctcgtaaatctggaatagctaggcagtgtctcaccctcttccaaaaccactggggtcactaagaaggtattcaggctgtcagcatcaatcctgattaagtgtcctctcaccctcacttgcttcgagctctggtcttccgggctgtataaattggcatagaattctttaaccatcgccacatctatgcttccctcctgaaggttggtgaggtgtttgtgtaggttacgcctctccaattccaccttaaactcatcgaattcagta

SEQ ID NO: 8971 - DNA, 235 bp, Glycine max
agctttttggttcaattacgagcgtctctatatattatgtgcctgaaacggacatccgaatgaaaagttatgagcatttgaatttctagagaacttccatttttcaattttgagcgtctcgatatatcatcggcctcgttcgtacatccatgtcacaagatatggccgtcttaattggacaagagcttccgtgttgaatttcgagcgtctcgataaattatgtgcctgaatcgga

SEQ ID NO: 8972 - DNA, 332 bp, Glycine max
ttgagccctattcctgacacctttatataccttgacccaaggtgagaatgtcaatccttaccctctgtagctaaaaaggaatagaggggaaacttcccatctatataaaaagagaacgaaaatttcccatgaaagcaaacaacaaaagaaggaaaattccccaatcaaagagtgggagaaagccaaacttgaaatgaaggaaaattccccaatcaaacattgggagcaagcacaaagaaaagaaaggaaaattcccaatcaaagactgggagaaagttaaataggaataagaataaagaaagctcctgatccaggatctaaagaaaacataa

SEQ ID NO: 8973 - DNA, 235 bp, Glycine max
agctttttgaatgtatatattttaatttgcacacgcaattatgaatcagtgaatacaaggaagagaatcaagcatacatactgatgaaatttgatgtcctccaagtcaattgattttcccttggtcgttctaccttgtgcctctaataatactctatcatttaacccaagtttacactcaggcataccactgcattgtacaaaccatggattgaataatactctagcacagaatt

SEQ ID NO: 8974 - DNA, 289 bp, Glycine max
aaccaccgtttcatagatcgagagtccctgagatttcaactggccgactatatgtgctgatggttcctggcttacgtcatcagggagcggctaacattctcattttgggttattaatcattttcttgatttagttctaagattttttaaaaatattattctaataatatattttattttaagaacttaaacaattttttttatagattccaccagaaattattttctaatatttatttatcaattattttaaaatagataaaaaaataattaattatatattttctagt

SEQ ID NO: 8975 - DNA, 234 bp, Glycine max
atctttttcacgttgcgttcgagtcgtatcctcggagaaatggaggttgaggaaccttggttggggttatggctaccattgaattatcgagtggatataggagcaagtcatcataggacaccggaattagggtggattctataggctttttcgttgcaaaattcatttcttggttggtgttttggtttgtgatgaaggtggtgttcatcattggaagtgcggtagacaggcttt

SEQ ID NO: 8976 - DNA, 355 bp, Glycine max
gtgttgagaaaactaccttgtgaagcttgtgtgagaaaacttcgttgacaagctcgagcttagctacgcacacccctgtgataactaagtgcacctccttgagaaacttccttgagaggattgctaaagaagctagagctgagctatacacacctctctggtagctaagctcagcctcatgacgaaatacataaaatacggaaaagagtctctactacaaagactactcgaaatgccatgaaatacaatgttaaaaccctatactactagaatggccgacatacaaggaccgaaagaagaagaaagacctattctaatatttacaaagaagagtggacccaaccttggcccatgg

SEQ ID NO: 8977 - DNA, 236 bp, Glycine max
tttgttagctttgtctccccagtgatgatggcctttgggggcccagctgagtcatcaagtgaagatctcaacatgtttcagtccaacactggaggagcacagttaatatcagtgcatcagcatgcaccactactctcttccagcaagaagaggttcaggactaagttctctcagcaccagaaggatatgatgatggagtttgctgacaagattgattggaagatccacaaacacaa

SEQ ID NO: 8978 - DNA, 307 bp, Glycine max
tttatcccactcgcatttacttttttgagaaaaaaacagaccttggctgtcaagcatgttaccgctcctctgagtagaataagatccaagcttcctgaagtacgtaaagtataagaattcatgaagtatatgaagctttatcaaacttcaaagcattgtcatgacgtgagagtgtacattgacaatgaccaactataccaaaaggcaaaaacataaactgcaaggtgaactcatcacatgatgtttggttgtatatgtcgatgaataattatcaacaaacctaacacgggtacataaatgctcataa

SEQ ID NO: 8979 - DNA, 235 bp, Glycine max
ttgttagcttttcccccaattttctataaatagggggagaagtgaagtgaaaaagggttcagccccttaggcacttctctctctttcgaatttgcttggaaaaattgtttccgtgaagaaaatccaagccgaggcgcttccgaaatgtttccgtaacgtttccgtgaggaatttcgcgaaggtttcgaccgttcttcgacgttcttcattcgttcttcatcgttcttcaatcttc

SEQ ID NO: 8980 - DNA, 259 bp, Glycine max
ggcagatcccaccgtatgacgactatcccgggcgagacgatgaggaaggagatacccatctcgggcccctgctgcagcttaaagagctggacccgcatgaactaccccaaccaaacatagtcggccatatccggacttaacccacactcgtaaaagaatctgttcccttcgtggaagataaaggaaagattgatgtgcttgaagagaggttgagagcaatctagggcctcagcaattacccattctcggatctagcgga

SEQ ID NO: 8981 - DNA, 238 bp, Glycine max
  unsure (1)..(238): unsure at all n locations
agcttttcgttcattttaatncctagttttaatttctgagttcatatgaactcgctaagccggcatgcagcgctaagtgagttagtttagtaaggtctgagtctttaaggcttttggtattctatttgcggctaagcgattcatgcttgctaagccaccatggctctaaaagtctgaataagcctgggctaagcgagtcagtctcgctaagcctaaggcaatttagttgttatgaaat

SEQ ID NO: 8982 - DNA, 366 bp, Glycine max
acacttaaaactaagcttagcaacccttttctataaaaatatgctttgtccactctagcaatcacaaataagtttaaacctaactatctgaaatgatgaatagaaaataatgattaagaaaataaagaaaaagttaggttgcctcccagtaagcgctactttaacgtcactagcttgacgcatgttacctcaaggatctaaagcaatcttggctctagccatcagaagcatttcattctcaacctcatccatcttagaacaaacatttcggttaagtgagtgtgtctcttcatcaaacaagtcaaatgtgatcttctgatcatctattcccatttccatattaccttaccccatatccaccacaca

SEQ ID NO: 8983 - DNA, 242 bp, Glycine max
atgcaagcaattctttatctgaaaaaaactccattatttattgtactaccaagacacttgtgcctctaaacaaatcaaaaggtttgttgatgatgatttgctcactaactagtgttagcatcgtacaaatgaatatacaaattaaacacttagtttttttctctcaagatatacaaagtgttaagtattttacaattcaagaaatttcatagcgataaatcaaagaagatggaaagatagat

SEQ ID NO: 8984 - DNA, 440 bp, Glycine max
  unsure (1)..(440): unsure at all n locations
aggggaagcnnnnccccaatgaaactganactttgcagcgctacacgagacactatagaagactcaagccacggtacgattgacgcgggacttttgngattattttanacgangcgacgcgcggccgagagaaaaaggtcaaccaccgacggacgaagggcaacaaaggagacggcgctaanaatagcacgcattggaggatgtgcggaaatatttatgtgcaggcatataaccgatcaggcggctattatcaacatgatgtatgtacgcacaaatccttcattacttggatgagcgagcgacgtaaacagatatatattgaggtccatgtataccgcactaagtactctgccacactggtcagtgatcatggccaccatcaagactgagaggtggtgtcttattcccaaaaacagaggagacatatcatgctctatgan

SEQ ID NO: 8985 - DNA, 238 bp, Glycine max
agctttttgtatgatctgggacctaaccatgacagaggtctccacggaggccattgcctccctcgcccaatattatgaccagactttgaggtgcttcacctttggggacttccagttaacacccacagtggaagattttgaagagatcctgtgatgcccttttggaagaaggaaaccatatttcttctcgggattctatccctccttagctagaatttctaaaatagtcaaaatctcg

SEQ ID NO: 8986 - DNA, 341 bp, Glycine max
  unsure (1)..(341): unsure at all n locations
tagtgcgcacttacacgctaagccttattgtttctcaatgntngnatttttgtgttgggctaagcgccagttgcacgctaagcctaataagcttactgttcttttttgttgtcaattgggctacattttggttaacttttatagttaacacattttgaggcatgttttggttgaattgattgcatgaccgagacattgtgtactggttattaatgttgtgaaatttctgatttttgagtgagcacgcgttgttgttgggtgatggttttgtgaattaaatgcgtgtgagtgagttggttagcttgcatgacaggaaattgtggatgaaaaactaaatgctt

SEQ ID NO: 8987 - DNA, 238 bp, Glycine max
agcttttatttaacatttggagaggttaatgaaacaacgagatgatgcgctccatgagaggttggatcaaatggagaatagagatcataatgaagaagaaaggaggagaagagggaatgatggtgttcctagacaaaaccgaattgatggtattaaactcaacattcctccatttaaaggaaagaatgatccggaggcctacttggagtgggagatgaaaatagaccatgttttctca

SEQ ID NO: 8988 - DNA, 343 bp, Glycine max
tgggatgaaacaagtgtgattcatcataaattttatctctgctgagaagaaatttcttttcggatagtgaccagatcctatagcctttcaccccatcaccataacccatgaacagaccctttcttgatctaggtatcagttttccttcattgacatgataataagcattgcagccaaatactcctaggtttgagtagtttgctgtttttccattccagatttcaataggagttttaagtcctatagcagtagagggtgttctattgattagaaaacaagttgtattgatagcttctccctaaaaacttctgttgagaccaacattggatagcaagcatcttgt

SEQ ID NO: 8989 - DNA, 239 bp, Glycine max
agcttgttattgcgtttgggcatctattttgactttcctatgccgcctctacatacataaaacagccccaccatcccaattttgcaaaaatcatattcatatatcattggggcatttcaccgagcacttggtgggcgcacgtttggacacaaattgcaagagaatggggacaatgtggcatgccctattgcttcagaatacagcataggcctaaggccttctcattcaaatcctcaact

SEQ ID NO: 8990 - DNA, 360 bp, Glycine max
taaggcctgtttccatgttcaaatcaaatcattgttttgaaagttgttctttatcaagtccatgaaaaacatttgaattcattaagtaaaaggtaaagccattcattgtttttcattctcaatgtttccaaaaatcactctattgtgttctaatccaaatcacaagcaagtttcaaaatcaccggctgctgattctttccaaaacatgttatgtccaagaattttttttggtttaactcccaaaacaagttatatatatatatatatatatatatatatatatatatatatatattctgcaactacgctaagagaacaaaattatccagtaatgtgttctaccaaaatgagggaaacctt

SEQ ID NO: 8991 - DNA, 235 bp, Glycine max
agtttttttatgcccgagtcattcatccctatgagatgttgttgaagtattggcgatcagaatttccattccttggattacggggttgaaccaagctcaagcttttacaaaaaggttcatcaagtcaagttgaaatatggaagtaaccatcctgcaaaattggggcaaaagatgaatcgagtcacatcactgcttcgtctactgccaaacatatttaggattattgatgtccttg

SEQ ID NO: 8992 - DNA, 350 bp, Glycine max
tctatataagctgaaccattttatcatttttacacaagttgagttttatttagaaaattagagtttttctcttttatcttagtgagagtgattctcctaaattcttgagtgattcaagaacaccctggctgtatcaaaggactttcacaacctttgtgtgttgccctcgctggaaagagtgagtctttccttcctttcatcttcacccttgttctttcaaaccacaattccagaaaatccacctctacccagaattatctcgtggccgtaactcccattttacgcactcaaattaagtgattcttgagcctaaattgactttcaaaacgagacctttcacctcgttttgg

SEQ ID NO: 8993 - DNA, 234 bp, Glycine max
attttttttgattaagtgtagaagggtgagacttcctgcttttattcgttgaccacagagtggtacctggagatatgtcgcgggggtcaggagaccttggggacgtcaggtggggtacctgtgatgtacctgtcgcaacctacccttcagcggaagggcgacgcgtgactcgcgggatgcgtgttccacgaaaggaatacgcgcggagtcgccaccaacgtttatttgaggaaa

SEQ ID NO: 8994 - DNA, 350 bp, Glycine max
  unsure (1)..(350): unsure at all n locations
tgggaggatggatggggactttgtgttgnatataaacgaggatatgggctacgtggaagtacgtgagctcagatggaggtgggcaacaggggatggtgggtttatgcgcgctttgtggatgtggaaaatttgttgtgcaccatcgcctgaccgccacctagtaccacatgtgatgggtaccccataatcctacaagcttgagatgaggaagtgttgaagggtgaaacttcttgcttttattgttgaccacagagtggtacctggagatatgtcgcgggggtcaggagaccttggggacgtcaggtggggtgctattgcccaaaaccaagcttgaccaatcccgacccaac

SEQ ID NO: 8995 - DNA, 232 bp, Glycine max
agtttgtattatttctttcagaactacaacatttactcgttcaatatataatattaaaataacaattaattgtattgtcatattaaaaagtaaaaccggtcaggcaaattagtagtgatacattaattctttgaattgaatatatactattaaatgcatttatacttcaaaagcgcataaatacaatgcaagacaaaaaattcattaatttttaaggtggtaaaattttggt

SEQ ID NO: 8996 - DNA, 339 bp, Glycine max
tggcctctaggttgagctcttattaattattagataactcctcaattggtggaagaaggatatgtcttggatttcccctgcagttacattttggtccactttttctttatacaaatatgttcaagggaaatctggtttgccggaaagcgcaccggatcgtcaagtatttaaatttaaaacggatgaatccgagtatcgaactcaaggaactagtattagatagggttaaattcagaaataaggcattattgaaagaaacattgataattgatgatttagaacataattaaactaagtctaggctaaaaatagtaaaaatgcaagtaagtaagattgaca

SEQ ID NO: 8997 - DNA, 235 bp, Glycine max
agcttgatcaagtttacaaaagtgagaagtgatctgttttgcttattcaattggcccccagctagtattaagtaaggaaccttaattcttgaacctaattaagtgagcgttatgagtcaaatataccaaagtgagaaagattgcgttgaaggaagaggcttagacccgagggtaggaaaatcatgtattctcgatagccatttgtggaccaggattgatagagtgtgagaatcat

SEQ ID NO: 8998 - DNA, 340 bp, Glycine max
ttactataggagactcagctgctccatcttcttaacttcaattcaataggtcaagggtcccagaactagtctttcatgactcaaccacttgatgggctccctacctctttgttgcagagcggacaagaaggattcttcacttttagtgcttgtgtaaataaccaaagggtttgcttgatatttcactgcaccagttattgaagccaaagacagtcatatactagaattcataactagtaagagaattcatcttaaagccgataggggtatacgatgcacaataatgaaaacttgcattgaaagagaaaatatctatgctcttagtttgaagtttcaactg

SEQ ID NO: 8999 - DNA, 234 bp, Glycine max
agtgttattcaaaaaatcactaatagtgaatagaaataatgttataccactgcatgttgaggcatctctacattaacatctacaagtcaagcagttttggcatagttgttgccttgatgggatgctaaggaggatctagtacaataaatgcatcatcatgcaccatgggtggatgtctaggaggctccccaggctatatcgaactcatgaaggagtgagatatcctatagaacc

SEQ ID NO: 9000 - DNA, 341 bp, Glycine max
tttgatgttgatgatataatcctaattttacaatcgtcccttgtgaatgttatgaaattaagtattgtgacttgagtttgagtctgaaattgcaacccaacctcaaactttacatcttcatcatttttaggcaccttaaaatgaggaagtctaacttttgggggaccttcatcttcacttccaggtggagtatccaactcatcagaatattcagcttcataagcaaaatcaaaatttcttaactttaaaagtagcctcagtactttgactaaatgttgcagactccaaccatgctgtccaatcagagttttcttcaaaaatcactatctgaaacttcacta

SEQ ID NO: 9001 - DNA, 236 bp, Glycine max
tttgcttgctatgatcttgccataaaacttcagaacataaaaataggattttggcatgatgagaattttttggcattggacagagagaatgaataaggcataattttttataagtgattaaaatgagttagaacactttgatcgagtgaccggaagagttagtaaaatatttggttaaaaaaggattcttaagtgttacaatgactaaaaaaaattatacttatattttctgtatt

SEQ ID NO: 9002 - DNA, 349 bp, Glycine max
tattgagtgaaaacttgttcgttcttgttgctctaactaaggtcatttgcattatgggcaaaaaacttatttagttaaagatgtatcattaattaaccataaagatatgaaatagaagcgttgtaattaataatgaattttgcaatataattgaagatgaatattgaaaaagatgatcacatgtatgcatggacggattcaaggggatcgagcgtatacacagaccagtaaaaaaaaaaggcgtatacacacacgtatactttttattttgtttacatagacccccatatactatgttactaccacgtagtaatattgttgtattataatataacaatcatatacacgt

SEQ ID NO: 9003 - DNA, 233 bp, Glycine max
taagcttttacaacatccaagcaaaacaacattcaaacagcacaagctatcacagccaagcaaaacagagcaaaggcagaaaactctgctcaacacatcaaccaaaatcacaacttttctctcttaaggaccacagtaacaattccttcgatccaattcgttaaccgttggatcgactccaaacttttactggacgtctatagtgcataagcctacattgtgaccgttgggat

SEQ ID NO: 9004 - DNA, 330 bp, Glycine max
tttgttgttcaatttcgagcgtttcgttatattatgtccgcgaatcggatatcctatgaaaagttatgaccatttgaatttctcgagtgcttccgttgttcaatttcgagcgtctcgatattttatgtcctcgaatcagacatcggagtgaaatgttatgagcatttcaatttgtcgagagcttccgttgttcaatttcgagcgtatcgatatattatgtctccgagtcggtcttcattgtgaaaagttatgaccatttgaatttctggacagcttttgttgatcaatttcgagcgcctagatatattatgtccgcgaattagacatccg

SEQ ID NO: 9005 - DNA, 238 bp, Glycine max
agcttttagttgaagtttaactttgttaaggtcatattatgcagtatgcgctagtagcttatgcccaaatctgaatgaggactagcattacactatcaaattcatgtgtgaagtgcatagtgaaccatggatgacattttcttgtaaatgccttagagccagggcacaagtagcacaaacctaattttatattggtgactctagtgcattctattaaagctaatctttccatgtcaat

SEQ ID NO: 9006 - DNA, 352 bp, Glycine max
tgttacagatggtaaacccacctccttttaagtctttttacataaagaaatgggggtgaacttaaggattaattgagacaaattgaaattgggatgcctatgtacacacacaaaaaaaaaaagatttagtttaagaaattattagaacgaaattaaagttatagatatttatttgtaaaagaataaagtttgagcatcttttttaacaagtacacttccgtatactgctccttagacaaatcaatacataaggataataattatgagtcatttccgaaaactgtgagtattttcgtttatttatattggattaaggggattcacatggtacaaatcagatacgtagtctctt

SEQ ID NO: 9007 - DNA, 237 bp, Glycine max
agcttttcgttatattatgcaccttaatcggacttccgtttgaaaagttttgaccatttgaatttctcaagagctttcgttggtcaatttcgagggtcttgaaatattatgcgcctgaatcggacttccgtgtgataagttatgaccatttgaatttctcgagagcttccgttgtttaatttcaagcttctcgatatattatgcaccttaatcggacttccgtgtgataagttatga

SEQ ID NO: 9008 - DNA, 315 bp, Glycine max
  unsure (1)..(315): unsure at all n locations
tgaaattgaacaacgaaagcgcncattaatttatttggtcataacatgtcacacggaagtctgcttcaagcgcataatataccgcgacgcttgatattgaacaacggaggctctcgagaaagtcaaatggtcttaacttgtcacacggaagtcgagattcacgcgcgtaatatatacgcgaagcttgaaattgaacaacggaagctctcctaacatatgaatggtcattacatgttacagggaagtagaattctagcgcataatatagggacactctcgaaattgaacaacggaagctctcgagagatttaaatg

SEQ ID NO: 9009 - DNA, 239 bp, Glycine max
agcttttctttacatattacttggtaaaccagaacttacaagcataacattcatcatatcaagcaaggtacaattctttctttccgcaataccattagattgaggagcatacgcaggtgtcacttcatgaataataccatgcatttcacaaaaattactcatgtctaaatatgattattctccacctctatcggaatgtaaaagtataatttttctttctaattaattttgtacttctg

SEQ ID NO: 9010 - DNA, 344 bp, Glycine max
tgctactgcattcattaaaaaggaattatattgatttcatagcagacaagtaaatgtcaaacacaggatttttcccccttaagaactgtcatataatacgaaaaaattgccaagcacaaattgcaggaaaatttaaagaataacagattttcattaaaaaaatgttgaaatatcttttattggaactcatcacaataacaaaagtatatactagaacaattcaaaaatattttgatattttaaaatgatcaagacatgtacttatcatgagtttgttagctagtatttcatataataatttttagcaaattttttacccaaacatttcataattttaagacaca

SEQ ID NO: 9011 - DNA, 238 bp, Glycine max
agcttttcatttattcaaatggtcataacttttcactcggaggtccgattcaggcgcataagatatcgagaggctcgaaattgaacaacggaaggtcgcgagaaattcaaatgctcataacctttcacatggaggtccaattcaggcgcataatatatcgagacgctcaaaattgaacaatggaagctcttgagcaattcaaatggtcataaccttacactcggaggtccgattcagg

SEQ ID NO: 9012 - DNA, 341 bp, Glycine max
  unsure (1)..(341): unsure at all n locations
cttaacctattgtctctcacagnctttttattttggagccaatccaatccttgtgtccggactctcagccacttatgatagccgccgatgatcccattactgcttcccctaagctctctgtcctttcttcacgccgcatcccatgccttgcgaactccttggagtacctttgcattggggtcactgaaaccccgtgtcatgaaaggcgcgatgcttttgactaatggcgctcctctcatggggtagccaagctgtcttatggcgaggacgggattatcattaatacaaccccatgttctcatctagggaacatttggacatccttcgcatgaagatacaat

SEQ ID NO: 9013 - DNA, 237 bp, Glycine max
agctttttttttgtggcatctatgattgctaaaatttaatttgatcatatggttaaaccttataattgataaaccgttttctctaattatgttttttttcctccattgtctttgactaaacacccgaattcaatgaaagcaaaatcagtttaattgcttcttcattgacactcttaattctcatacgaacaagtcacccattggttggatatgaagagatgtaatttgaagtgccaa

SEQ ID NO: 9014 - DNA, 360 bp, Glycine max
ttacagcttttgatatccctcaggtgtttacttcttctttcactgtttcaacttgctaatgctttatatgctagcaggttttaagttttttttcctggtttatattcaagaatttttggctttaccatctttaatttttgtttatctgtattctactgattcagtaaaaaacgttgtggagatcaaggttgaggacgatggagatctagatgacataatcctgcactatctgttccatggtcacctgggttaagtttaacagtaaagctgcataggatctaattcaacaaaattgaaattataaaactgtaatgctttgtacgtctcacagagatggatcaaatctgaagcatgtagctt

SEQ ID NO: 9015 - DNA, 233 bp, Glycine max
gttttatatgagcctagatcacgtgtcgttattagttaaagaaagaagaaaagaaaagttgatgcaatcctaccccgcaagggcattggatagaagactccaagtagattgggtcagagatccaagggaaggccctagggttctcaagagccttagggtagattttgagcccatgggctaagtatgagcccgcttatctttgtaaatattagaataggtttttccttcgtttg

SEQ ID NO: 9016 - DNA, 349 bp, Glycine max
  unsure (1)..(349): unsure at all n locations
tgtaggattatggggtaccttttacatgtggtactangtggcggtcgggcgatggtgcacaacaagttttccacatccacaaatcgcgcataaacccaccatcccctattgcccacctttaactgagctcacgtactcccacgtagcccatatcctcgtttctctcaacaccgggtccccatcaatcctcccaagctcccccaacatccaggtaaaacaatattcaaacagcacaaactatcacagccaagaaaatagggcaaaggcagaaaactctgcccaaaacaccaaccaaaatcacagcttttctcacttaaagaccccagtaacaattccttcattccagttc

SEQ ID NO: 9017 - DNA, 234 bp, Glycine max
attttttttccatttggacttaccttgaattaattcctttgatagcccttttgagccttgtttccctttccttgttttgaagctcactacaagccttaagtgaaaaaccatgatattaccatatccttaaggaattttggagctttggaattgttttgggaataagtgtggggggtttttgtttcattggacaacttgttttgttggctatgcttcatgatgtattttgggcca

SEQ ID NO: 9018 - DNA, 350 bp, Glycine max
  unsure (1)..(350): unsure at all n locations
tagctacacacactcatctattaacttagcttaccttcnngacaaaatacatgaaaatacaaaaaaaaaagtccctactacaaagactacccaaaatgccctcaaatacaaggctaaaaccctatactacaagaatggccaaaatacaaggcccaaaagaaggaaaaacctattctaatatttacaaagataagcgggctcgtacttagcccatgggctcgaaatctatcctaaggctcatgagaatcctagggccttcccttggatctctagcccaatctacttggagtcttctacccaatgcccttgcggggtaggattgcatcaatcttgatacatataaagcaagc

SEQ ID NO: 9019 - DNA, 234 bp, Glycine max
  unsure (1)..(234): unsure at all n locations
nagctgatatcttaagtgtccgtgaccttagacatgccagcaaagctttattgcatggaaattgtacgtacttggttgtgaaaaaacattgtgctgaaagcattttcgaattattaatacatttaactgcagaagacgggaacttttcaggtacatccaggccatggaaatgaggagactgtactttcttccagaggattggcccagaatttgttaactaatataaacataatt

SEQ ID NO: 9020 - DNA, 349 bp, Glycine max
  unsure (1)..(349): unsure at all n locations
ctcaagcttggagataccatcattttcatattattctaaagttntttcccgaatacttccaaaaaatgcgagttgtatactcactaaataatatcaaagttttgaggaaaagaagaaaagaatataatgtcaaactaaatggaaaatgagattgtccaaaatcctaacaatgattgatctccaatatcaaatttaaggtaaagacaaatgctagcgctaattttatgtaattctcattaaataaagagtgaagtaattaaattatttaataaaaattacattttatctaataatataaaaattgtgctgttaactttttttagaaaaactaagcatttttaaatattat

SEQ ID NO: 9021 - DNA, 235 bp, Glycine max
atttttttaccatttaaagagaaaagttccctccaaaacttactgatgaatagcagatcgtgatctgaaacaatgcttcgcgtcatgccgtgaaggcgccctaccatgtccatgaacaggatagccactgtgtgagcagtatgatgagtgggtagcatgcccaaacgtaaccctttagaaaagcgatcaaccactacaaaaatgcaggtgtttccccgataagcaggcaacccta

SEQ ID NO: 9022 - DNA, 350 bp, Glycine max
tactcaagcttcaaggataatggtctcatcataatatttatttcctgaatggaattcaataaataggcctcctattttcaatggagtgggttaccattactggaaaacccgtatgcaaatttttatagaggcaatagatttaaatatttgggatgcaatagaagtagggccctatattcccactatggtggcaggaagtaaaaccatagaaaagcctagggaagaatggagtgaagaagaagagagattagtgcaatacaacttaaaagccaaaaatataattacatctgccttaggaatggatgagtactttagggtatcaaattgtaaaagtgcaaaagaaatgtggg

SEQ ID NO: 9023 - DNA, 234 bp, Glycine max
  unsure (1)..(234): unsure at all n locations
nagctaatctttgtaagtgacttttcttcattttgttctgggcttgagcttaaaccttgctagagtctttctttatttttcttccagggtcaagctcaagctccaaagcttaacccttgtaagctcattatctttatttttcttataggatcgaccttaagcaatagagcttaatcctcgtaatccaattttccatgtttttcttctaggatcgagcttaagccttgtaagccc

SEQ ID NO: 9024 - DNA, 348 bp, Glycine max
cgcatttctttaaccatctaatctctttttttgacacctttccacgagtgaatgtgcgcaaattgcaaggaaatttttcaattaggacgcaactgttacttttgagctatatgcagccaattattgacttcagaaaaatacaagatgacttggttcatcgtcaaggcaataaaatgaatgtttgttttacccgcaataaaggcaaataatattctcaattgaccactctcaatacatgtcacaggttataggattaagatggcttccgagaaatgacaacaaagacaatgcaatttggatgaacaatatattggataattacgaaccaatagtttagtaggaaaatga

SEQ ID NO: 9025 - DNA, 235 bp, Glycine max
ttgttagctttacattacaataaacgcataaaaaaagaaagcaagcataaattataataaacataataataagtataatattgattaataagcataatttgtcagttactctgaaatttctattgcgacaacattaggtagtggcaaaattaagttgaatctcattttttttaaggattaacttaatgattgtgtatttttttgtttgagtctcattttttggataagctactgt

SEQ ID NO: 9026 - DNA, 344 bp, Glycine max
tgcttccataatctccttctttttgattatgacaaacctgaaatcaagaaacgcatacaagctctatcttctaattgatcactcacttaattctccccctttgtttttgagtttaagcttcacttgaagttaagttatttaattatatgagttcttgatttaatcccaattttctctccccctttggcatcaacaaaaagccaaagtgcgtatagagacataaaatcatacacaaactcataatcatccaagcattataatccatacaacaagcaaggaggacaataattcatacataaactaagcaaggaagataataattcatccattaatcataataaaat

SEQ ID NO: 9027 - DNA, 230 bp, Glycine max
tagctttctttgttgaatatctagtgtctcgatacgcgatgcacctgaatcggacatgcgagtgaaaagttatgaccatttgaatttctcgagagcttccgttgtaaaatttctagcgtctcgatacgctatacgctgaattggacatgcgagtgaaaagttatgaccatttgaatttctcgagaacatccgttgttcaatttcgagcgtctcgatatgttatgcgcctg

SEQ ID NO: 9028 - DNA, 336 bp, Glycine max
ttcgagaaattcaaatggtcataacttttcactcgcatgtccgattcaggcgcataacttatcgagacgctcgaaattgaacaacggaagctctcgagaaattcaaatggtcataacttttcactcgcatgtccgattcgaggacatattatatctagacgctagaaattgaacaacggaagctctcaagaaattcaaatggtcataacttttaactcgcatgtccgattcaggcgcataacatatcgagacgctcgaaattgaacaacggatgttctcgagagattcaaatggtcataacttttcactcgcatgtccgattcacgcgcataacat

SEQ ID NO: 9029 - DNA, 238 bp, Glycine max
agcttttattatgtgtgaacatggatagtgaagcgcagaataccttccgcattgacaatgatgaccattcaagttaactgcccacttttgtctgccacgttgcgttatagggttgaaggtctcctctacttcaaaccttgtagagtgaatatcatacacgcgaatgatgtgcatacaagcttgttcttgatttttcctcaattctttaacaagctttgaacaatatacttgtccttca

SEQ ID NO: 9030 - DNA, 352 bp, Glycine max
tgtgaagaacaacagcagcttcaaactgttgcacaagcctagccttttgtaattaaaattaagaaaacacaaagtaattacatcccaaatccaaccagatatataagaattaggtggatgaaaaaactttggtatataacagatatatatatatatcgcatgaaacaacaaagagtttaattagtttatgcttctatttcaaaccttgagcacttgatagaacccatggctatgtcaatctctatcaagttatcttcctcattcatttcattaaactctgccaagaattccatcaggctatgttggttgaaaagggcctcatgagcacttgataactccctcttcttctgtt

SEQ ID NO: 9031 - DNA, 238 bp, Glycine max
agctttcttataaccattggacataaagcttaactataaaacttaacctcgcattaatgtaaggtctgtttggatacaagtcacaagtgcttttgagatcttttctactggaaatataaagcttctttcagtagagaagctcttaaaagagcttctagccttgtatccaaacaggctcgtagtatttaacactttccccaccataggaaggggctgaaagttgattgaaatcaatttt

SEQ ID NO: 9032 - DNA, 354 bp, Glycine max
ttgagccaaatcctgactcaccatatattttactccaggtgagaatgtcaatccttaccctcggaagcaaaaaagaatagaggggaaatttccaatcaaagaaaaagagaaggaaaatttccaatgaaagcaaaaaaagaaaagaaggaaaattccccaatcaaagagtgcgagaaagcaaaaaaagaaaagaaggaaaattccccaatcaaagagtgggagaaagcaaaaagaaaagaaaggaaaattcccaatcaaagaatgggagaaagtaaaaaaggaagaagaagaaggaaagaaagctcctgatcaaggatcgaaagaaaacagaagaaatgtgcagagaggtctttg

SEQ ID NO: 9033 - DNA, 238 bp, Glycine max
agcttgcttgacttcttttctcagatctatacatcaatttgctgcttctaatctaatttataataaacaagagcctaatgaagtccattaccctgttccttgcaatcatatatcatatccaaaggggtgttgagtgttgacaaagacaacaacaactaagaaggttgccagttgttagtatagtcagatagcaccgatctaacattgactacaagttgaattaaatgtttttaattta

SEQ ID NO: 9034 - DNA, 344 bp, Glycine max
tgtaacaccccgacgaattacaccaaattgagtaggatctggagtctgtgtatgtatgagattgtatagttaagaataacttaaaagaattaattgatactacctataccaacaaaatacatctcttttttggtagccctcacttaagaacttcatagttaagtgtgatttccttgaagtagttatgggatgagtgaccttctgagaaattttctagaatatgtgagtgatgacaaaatatgttgaaaagtctcgtgttggtttgtggagttagttatttatcttgaaagcagacatggttgaatttcaaggttttggaaagggctacctacaaaggattctga

SEQ ID NO: 9035 - DNA, 238 bp, Glycine max
agcttgtgtattgctgcattctactaatatatggagttgtccactgctttgcctgagaataacaattgcttgagcacaacaacgctggaggcggtaagggacaatgatctttcaaataaacctgttgtacatgaacaaagattatatcatgcggtgaccgtgtcaaatgaaccagcgaagtcattgcataattgttatactaactatattcaatgtacctgaacaaaatgatttccaa

SEQ ID NO: 9036 - DNA, 342 bp, Glycine max
ttggaaaggctgtccgttaggtaatctcaaatcatcaaaatatagttcacagttttataattgcagtattaaatttgtattcttgatactgagctgaacttccacttctttttcaaaatataaatctgctcattgctatttaaaattagaggatattttggaaacttattgccaaaaaggctttaaagactatcttccactgtaaatgaagaaattcaggatgtgatttttgtagtgaaaagtatcattctattatagattgaaaatgtgtagtcaaatattgaattttagtgtataagaaggtatcacctagaaggtgaaagatagaccatggtaaatatg

SEQ ID NO: 9037 - DNA, 237 bp, Glycine max
agcttttggaggaagcctcttaatgaagcttctagagaaaactacatgaagctgcctcggtaaaaacgctgtccagccttcgttaaccattggatcttctcgcaatttggtctgcaacttcacaagacacttgtccatgatctgaccgttgggatctttgagaagatgtctggagtctgctagaaatttccgttcccgagagcatctcttatttaagcatttcaacctttgctttcg

SEQ ID NO: 9038 - DNA, 234 bp, Glycine max
agtttttttctacagattggatccatggatggatgatgaataattgttgaatgtgtctgatgaataattgttgaacgtgagtgttgaataatgaatgttgtgtaagctcgtgagttttgcttatgttttcttgctaaatgtgattatttggtttcagcattggttctttttataatgaactcacccttgcaattttgtatcatgtggttgatacatgtgatgatcgcgaacctt

SEQ ID NO: 9039 - DNA, 346 bp, Glycine max
tcacataggagctacatcaattatttgttaataaaaaactaaaaaagctcaaccagtgatcggagactctctgtttctagactttggtggaatttgtgatttcaatttgctcaaatcattctctatatgctttttctttaccagcgagtctccctcatcttccactgcctttgaatgttcattttgtgcatcatccttttttgatcacaaatttgcagtcaattttttatgttctttaagcactcttttttgttgattaagagtttctttgcacgctcatgaatgctattctatcctccatccttggagaggtcgtgtcttccatcacaagtgaagaatgcattac

SEQ ID NO: 9040 - DNA, 231 bp, Glycine max
  unsure (1)..(231): unsure at all n locations
agctcaattctttatnntgagcgtctcgatatattacccgattcaatcggacatccgagtaaaaagttattgtcttttgaatttcctacaagcttccgttttcaatttgcaacgtctcgatatattacaggactcaatcggacatccgtgtataaagttattgtcaattcaattttctcagaacttcggatctaaattttcagcgtctcgatatattacgggactcaatca

SEQ ID NO: 9041 - DNA, 225 bp, Glycine max
aaaccatgatattaccctatccttaacgaattttggaactttggaatagttctgggactaaaagtgaagggttgctgtttcattggacaactagttttgctggctatacatcatgatgtattttgggccatacttggtgtacattgtatattggataaatgttggacatgctggatgaaatgtagtgtctcaaaggctctagagtcgatcaaaaaaaacagaaaa

SEQ ID NO: 9042 - DNA, 236 bp, Glycine max
agctttttcttaagcttttgctacaacctttttctccccctttggcaacatcaaaaagccaaagatctcggaaatcaacacaattataacaatggagtagcaagatataagtatcagagtattaaagacaataagccaaactcataatcaagaaataatcaaaccagaattcaaataacataaaatgttaacaaccacaaaatatccaagactgaaatttaaaaacacaagataaa

SEQ ID NO: 9043 - DNA, 340 bp, Glycine max
ttttaaaaagcctttttagattataattccaagctcaaactataaaaaaagcttgttaagcttgataagccggcttgtttaactaacaataataataataataataataactttattttatcaaatcttatcttatccagattttattccatctagattttatttcatctaatcttatcttatcttgtccaagttttattttatttcgtttatgggcttggacttaaaatagatttgtgagctttggggctgaggacctatataacaacaccaaggttttagtttatggagttttttttcggagaggagaataattctaggattttagaattccaatttt

SEQ ID NO: 9044 - DNA, 236 bp, Glycine max
agcttttcaaggatgttttctcaagaaaacttctcaaggaagctacctagtctataaatagaagcatgtgtaacacttgtggtaactttgatgaatgagagtcttgtgagacacaactcaaagttcaacttctctccctttttttcttccttcaatttcgtgctcccccctctctctttctctccctctttcttttcctccattgaagcatccttccaagcttcttatccaaggct

SEQ ID NO: 9045 - DNA, 339 bp, Glycine max
tcttagtttcagatgatgcagtatgggtttgtagctacctcatgcactcctctaatgactatggcatctgtcataccctaatttcgtccggggacctttgcttgatgacatgcgaccattctttggtccttgtgaggtgcttggcacccatcattaggcaatttatgaagttccaggacatgccgaaaaccaaaaaaaaatgttgatgcacaatccgtaagtttccgtgacacatcggaaatcaaatggaagcatcgttgcataattaagtgaggttccgtaacattccgtaagtcaaaaaggggatgattatgtaatccgcaaggttccgtaacatta

SEQ ID NO: 9046 - DNA, 236 bp, Glycine max
agcttgtaccaatttctcatttcatgcaaaacatacaagttcatattttaatttaatgtttagcaacaagactaagcttcgtaataagataaaagataaatttttattaaatacttattagtatatattgaaaataaaactgttgaaatttattattgattatttttgcaacatataagaaggacattatgtgtgtttatttcagtgatacggtattatgagtttcaatagactaa

SEQ ID NO: 9047 - DNA, 351 bp, Glycine max
tcagaattggttaagcatggcttatttggtgatcgatcatctttgtaatgagtttgagggcacgtacaggttcaccgattgggacaccattcttttctccacttttcttgtatgaaccctctgttctggagatcccgggtcctggtttacaagcggagtacatgcaatcttggacataaaaagccgtgtagtaattgacgccaatgaaatccaatcctctcttgagtttctctttttcgtagctggaaaatttgggcaagaggcttccaagaacgttctccatctctgtagggtactttccgaatatgattgggtccaagaacctgcattataataaagtgttactctggg

SEQ ID NO: 9048 - DNA, 228 bp, Glycine max
ttagctttgacctttgagcaccgacgactgtttcagcaccctagtagcaactctgtatctagggttttcttcgacccaggacaatgtgggttctatggggttcgagcgatgacaatatgggttttccggcagcgtagggggttctgtgggttccagcgaggacaatgtgggttttccggcagtgtagggggttctgtgggttcgaccaacgacaatgtgggtgtcgac

SEQ ID NO: 9049 - DNA, 344 bp, Glycine max
ttgatggtgtcgagaataaatttttttttgtcatcatcaaaaaaggggagaatgtgagtgtatgtatacatgattttgatgatgtcaaaagaagaatcaaacaaagttgcttcaaaggataagcatggcttcaagattaatacaagattgattcaacaaacaaagccttgcttcaagattaactcaaagatcaagccttgccttaaaacaaatagctttcaagacatgcaaggctctagtaatcgattaccaggcattgtaatcgattaccaggcagtgtaatcgattactagcagacagggttgaaaaatagctgttgaaaagagttttaaatttgaattttc

SEQ ID NO: 9050 - DNA, 230 bp, Glycine max
agcttgtcacccagctcgcccaggcgagcagggttgcttcctccagaagcaacagccttctggaggaatcttctggagggcccaagtgggcctggtttctatttgcacccctatttttactaaatacacccccctgccttttttttggtgattcttttttcgtaaagttacggaaacttacgaatttcataacgatacttattttctttccgtaatgttacggaaccttg

SEQ ID NO: 9051 - DNA, 334 bp, Glycine max
tgtaatcgaataccttaatgataactttctatcctgttttagagttcttaaaacataaccaagatcaatttaacatataacaacacctcataatccattataacatgttatcaaatacaattttaagcataaaaattcaactttgttcatacaactataagtacacaaagattacaaaaatattaatgttatgtcctattctattacttttattaataaaaattaattactttaaaatcatataaataataagatctaattaattgataatataatttttagtcactaataaatacatacgaaactcactctttttcttcttctcaaaatcact

SEQ ID NO: 9052 - DNA, 238 bp, Glycine max
agcttttattttttatacaagaatgaagctctgataccacttgttggacaagtggcctcagatatcttaagaagggggggttgaattaagatatcacaaattatttccccaattaaaaattctatttaactttctattcaagttataaattcccttaataatgaatttcttaaatattgattcaaatagaacaatttgaatatgaatataaaacaataataaataaaggagtttaagg

SEQ ID NO: 9053 - DNA, 350 bp, Glycine max
tctctcaaggttccagttgaaccaaattctgatatatcaagggtgattccttgtggtgtcaccgtgacttatcttccatctctggaagtggcgtccctctccgtcaacaatcctgtatcaaacgttttgccctgtaagattcacgtcagtcactgttgttttattcaccatcccaattagcttcaatcttgcacctatcacatccacaagtgaacctataatcctccatcaagatccttttgcttgtacaatagtccctaccaatacttaaatagctgatgcaaacctctttcccctcatctacatcttaatcaacctaataacaatgccagtactgttgtgtccataat

SEQ ID NO: 9054 - DNA, 237 bp, Glycine max
agcttttttttagtgcgtcacgtttaaaaccgagctcgatggtggtgcgagcctttgatggtactcggcgggaagtgatgggggaaatcgacattcccattcagataggcccccacacttgcaatgtggtgtttcaagtaatggatatgaatcccgcctatagctgcctcttgggaagaccttggattcatgccctgggagtggtcccttcaacgcttcaccagaaattgaagttcg

SEQ ID NO: 9055 - DNA, 349 bp, Glycine max
tttagcttgcaagtccaattgaaatgttccttttcttgcctagagtttatttaaaaaatgtttttggatgtaacacctataaaagaacattttcgaaaaaaaaatttatgatgagaagaagttcgtattgaagttgggattagaggctaagaggattgattgttgtgtggatggttgcatgttgtaatgatggagcgctaactaaatgcaagtttcgtaacaagcccaagtatcgtgcgaagactattggaacaatcattaaaaaaccagttccagtaaaggcaatgttctattttcttgtaataccaaggttgcagaaaatatttgcattgatgcaaattgcaagcca

SEQ ID NO: 9056 - DNA, 238 bp, Glycine max
agcttgctacaatgagacttcaactccatccctttttcttagatggagacaagatgtttcttcctcccaaccttctcatcacatccacctttatagatcatatatcattctattcgttcggaagccattagtgggggacaagaatggatctaaggagaagatgttgtcaacaactgtgaatcaaatgcttaaaagaaagagtgtttgtgggaatcatggctaagcttgtgttttgcct

SEQ ID NO: 9057 - DNA, 347 bp, Glycine max
tgtatagtggaagaatttccatattatagtattattatcgcgtgttctcattattacatttaattactaagtacctattttaactttacaaaaaggaaaagtccagttttccaacacaaagtacccattgcttctcccgagaaagtatagagcacttgataataagataaggaaaggaagagaaaacaatatctcatgaagctcacaagtaaataaacagggatggaaggagctaatagcatacagagtgtaatcatactgagatgaagagaaaaaatgccaagcgaaaccttcttgcagtatgagctcactatacacgtaaaagaaggcaccccggccaaaatgtg

SEQ ID NO: 9058 - DNA, 238 bp, Glycine max
agcttggatttgatgcttcaatggaggaaaagaaagagggagagaaagagagaggggagagcacgaaattgaaagaagaaaaagggagagaagttgaactttgagttgtgtctcacaagactctcattcatcaaagttacaacaagtgttacacatgcttctatttatagactgggtagcttccttgagaagctttcttgagaaaacttccttgagaagcttctttgagaaaacttcc

SEQ ID NO: 9059 - DNA, 346 bp, Glycine max
tcttgaacatgatcaatatattcattttcacttattaaaggataaagacatggttcatgatatcttttggggtcaccctgattcagtgaagttagtcaatgcatgtaatttgatgtttttgatagacaacacctacaaaacaaaccggtacagactcacattgctcgattttgttggggtgacatcgactgggatgacattctctgccggtttttcatatgtggagggtgaatgcattaataatttggtatgggctttacaacgcttccgaggcctttttttaaagcctgatgccctccctagagttattgtcactcacagagaccaagcattcatgaatgcagtg

SEQ ID NO: 9060 - DNA, 238 bp, Glycine max
agcttttatttttggttcattcctaatttctctacaattgcatcacctcccaatgagctggtgaagaagaatgtggcatttacctgggtgaaaaacaagagcaagcgttagttttgctcaaagaaaagcttactaaggcacctgttctagctcttcctgacttttctaaaacttttgagctagaatgtgatgcctctagagtgggagttggagctgtattgttacaaggtgggcaccc

SEQ ID NO: 9061 - DNA, 355 bp, Glycine max
ttgaaggtgcgtagcccaccattttctatagtttaatactggtaatgtgtctactatcattgtcatcgttttttcgtcattgaggtgccacttgagctgccaggttcctcacctttgggcgtattctttgaaagatccgtgccccctttttttgcacatgttttgtagttgcatcctattcgaagccattataccgacactacctaacgaaggcaaccattaggtcctcccaggaatggactcgggaaggttccaagttagtgtaccaggtaacaactaccccagtaagactttcttggaaggaatgtatcaacaattcctcatcttttgcgtatgcccccatcttctgacaata

SEQ ID NO: 9062 - DNA, 235 bp, Glycine max
atctttagattggatagtttgcaatctccatttcgatctagaaatcataaacaataaacttcagaagaagaggaggaggagtatttagatgcaagaagtcatggaagaaggtgaagaggtgaaccaaaaagagataatcatatggggagcattaagatgacaatccctatgtttcaaggtaaaaatgatcttgaattgtatttggagtgggagagaaaggttgaatatgtgtttg

SEQ ID NO: 9063 - DNA, 345 bp, Glycine max
tcaacttaaagagagtagttcatgctttgcgcaacaagcgcgctaagcacacttccaagcatttcaaaaacaataaagaattggcacttagcgcatcctgccgctaagcccatctcgtgaaagttcaattccagaatggatctgtggcttagctcaggacagcgcgcttagtgctgctacaataaatttttccagagaagaagttgcgcttagcgcatcatctccactaagcccactgcttgaagtttacttctagtgaagatgttaggcttagcgcagtgatgtgcgcttagttgaactattcagtcaactagtcaggggtctaagcgcttagcgcaagaaagc

SEQ ID NO: 9064 - DNA, 235 bp, Glycine max
agttttttggaataagattgtttccaaatatggcctttaaggaaatagataggtgtctaaaacttatgagattaaacacttgtggactactgtatacttgtgcgaaaagttctttgctcgtataaggatgatgtctcaatgtgaagcaactgtttcaataatgaaggttataaagaatagaagtaccataagtgagtttatacaagattttgattgagtagtatgtgaatataga

SEQ ID NO: 9065 - DNA, 343 bp, Glycine max
tagatgaaatgtaccttcagaggttatatcttttaggaagagagcgcgagcaaaaaaatggtatgtcacacgggaggttacacagagaagaagagagtgtgagcaaactaggtcgcatatgacataatttaaaatataagtccaacatcggtttccaatacaaaactgattttaacaaaatgatgttaacgttaacatcggtttttccaagaaactgatgttaactagtcataacttaacatcggttaacatcgattttcttcaaacccgatgttaacgaataaacattaacatcggtttttccaaaaccgatgttaacaaatttacattaacatcggtttta

SEQ ID NO: 9066 - DNA, 235 bp, Glycine max
agtttttgctgataagaataagtgattatttcattaaaataagttaaattaaatttgcacttaatatctaactagaagaaactggtcatctccactgcacggaagagcttttgagtacatccgtctaatctttagttggttttctttttaattgatatttattcagtattctagtgatgcaaaatgatcgtgtcttctgatttaacatctttctaatattacgttacaatcaaga

SEQ ID NO: 9067 - DNA, 342 bp, Glycine max
tgaagaccataagcatactgttcaatttttgtacggtccaagcagtcaatgcagttggtacggagaactccactctgaaaatgtggtgcatcactaccaaaattatcttttttattctgatggttcatgtcagtctctttgtcttgattaaccacagaatttagcatttcattactgttcccaatcctcacaagatccccagaactagctctcagatctctcactgaagtatccctataaaaatacacaatgagttgaaaataaaaatagaacttcctttctctaaatcttgcacttttacaattataaaatagaactgcaataatattaagcaaaaaaaag

SEQ ID NO: 9068 - DNA, 235 bp, Glycine max
agctttatgaaattttgcaacatcgttttggatatttaacaagaacattctatttcttgacattggtaccttggtaattagattatttctcccatctctgatggaaagactagaatctttcatgtgaatatcatagccttttttgagtaattgtcccaaactcaaaatattgttcttcatatttgggacgtagtagacatttgatatgaattcatgtcttgcatccttcaaatgg

SEQ ID NO: 9069 - DNA, 339 bp, Glycine max
tgtttagtgtgtcgtgctaagcacagtctactcgcttagcgcaattatctctgtttgagaataaggcttagcgagcccaactcacttagccaatgtggtttgtcaggctaagcgagggtgtctctcttagccagagttatgtttctgtgttgacgcgctaagcgcgcccctgtcatgctaagcctgcatctatcatgctaagcacataagttaatcttcataaggcacgccaagcaattagtctcgctaagcgccttgtctgtttttcagttttatttttctgctttcaattcaaataaatacctatctaacttattttatgtggttcttttgatgcag

SEQ ID NO: 9070 - DNA, 237 bp, Glycine max
agtatttataaatctgggaaacatgcagaactctggggtgcacctaaacccaacaacaacaacaataatcataatcataataaccacaaccaccttgccgaccagcttaagaacatgcaaattaacaaccatcccaaaagtggtggtggtggtggaaaccacaacaacaaaggtcataatcagaaccaacccaaaggtggtggaggtggtggaaatagccaatccaagggtggtggt

SEQ ID NO: 9071 - DNA, 357 bp, Glycine max
tactctggcatattccttgatttcgttatgcatctcttcatggcatcatgatgggcatatcactcctgcatcatattcatgcattgcatttgcataaatcaccgcattatcatacccctttcatttaacatgcttttgttctacaaactacatacattttattttcatcagtcgcactcatgcatgatccttgcattttcctctgcaaaaaaaaaaataaaaaaaaccataaagggaacaaaaagaaagtcacaccacattcttagttatatgtgttgggtaccatgataatggctataaaccaaccatgttgggattatacatctatttctctaaaaaaataattgaaaatcatgt

SEQ ID NO: 9072 - DNA, 229 bp, Glycine max
agctttctagcggtttctaattatatgggtcattaaatctatcatatgctgacaatagccgagaagtccgtggatctcctcgggggcggagtaggtgtcccccattgctttggccttggctagcaatcggggaagttcttgactcccgttcaaggtaagagcaaattggtccatccacaaggttgcctcttggtgtaatgagtcgatcacccttcctctagcctccttt

SEQ ID NO: 9073 - DNA, 339 bp, Glycine max
tgagatgaggaagtatagaagggtgtttcttcctgcttttattcgttgaccacagagtggtacctagagatatgtcgcgggggtcaggagaccttggggacgtcaggtggggtgctattgcccaaaaccaagcttgaccaatcccgacccaacccgggcatagtcggtcagtgagaacctgtgatgtacctaaacaggcgagctcctggcagtcaacagataaaaggaataaagaccacaaagcaaggaggcttgtggtggctggccagctgtgaaaactctagagtatggtattactgtcaaacccttttgagttaactcataatgacttaagaaact

SEQ ID NO: 9074 - DNA, 236 bp, Glycine max
tttgcaagctttctcataagtcctaaatgacatttcaagctagtattaactcactttaacctccatttaccacagaattcagacttagccttcccactctcaaagcctcactctttttccactcataacaccacattctcactttctaaccctaagttagttctacccttcgtctctaacagatttccatcagcaatttcagcatataaacatcacaaacatcatcacgaaaaccc

SEQ ID NO: 9075 - DNA, 336 bp, Glycine max
ttgactcggatatccgattgatgccattatatatcatcgccctcgaatatagaaatggactgaccacgcaaattcggacagccataacgtttgactcggattcccgattgaagctcataatatatggagatggtcttaggaaaaaaatgaagcccatcgcaaatacaaacgaccataacttttccaccggatctccgaataaggcaagtaacctatcgcgacgctcaaaatttatcatggaagactcgggtgaattccgacgggcaaaactttttactcggatgtccaattgaggcccataatatatcatcgccctcgaatgtagaaatggactga

SEQ ID NO: 9076 - DNA, 238 bp, Glycine max
agcttgttttttgatacattgatcattcgtttgtgttgaagctgctcgacctttttgactcagaagaccaaagagagagggattacctgaagactatcctccaccgtatttatggaaagttcatggtgcatcggccattcattagaaaagccatcaacaatatcttttacaggttcatatttgagacagagaaacacagtgggattgcagagttgcttgaaatattgggcagcataat

SEQ ID NO: 9077 - DNA, 348 bp, Glycine max
tgacaaatcaaagtaaaaaaatgaaagtcatgttctttataaatgaaagtaaaaaaaagagttctttattgcagagataaaacagagtcttattacagataaaataataaaacatacatggtaaaaatgacatagataaggaaaatactttgtaaatgataacattgaactaaacttcaactggaaaatcatattcataattggtagtttgcaaatgataccattattagttgcaagagagtatgccgtatcttataatttaaatgaggcagttgcagtgggtaaacaattgaaatgctgaatctgtttgtttgacactttttatttgattggtaatctacattacta

SEQ ID NO: 9078 - DNA, 236 bp, Glycine max
agcttatagtgttaagtctcatatcggtttaatcgattacagtagtaaggattcttgatgcatagtggaaatataaatcaggttgtagattagataactgcattagcttctctagaaatagacagtgaaccggtataaaagattgtgtttttatctcttgattcatgtatttcactcattcaaggtttaatcaactcattcaattcaccccccctcttggtttaatgagtcccaaa

SEQ ID NO: 9079 - DNA, 349 bp, Glycine max
tatgctgcaaacatctacaatagaccttctcatcctcagcagcaaaatcagccacaacagaacaattatgacctctccagcaataggtacaatcccgggtggaggaatcatcccaaccttagatggttgaatccttcacaatagcagcaacaattttagaatgttgctggcctaagcagaccatacgttcctccaccaatccagcaacaacaacaacaacaacaactaccccagaaacaacaaacaattgaggcccctccgcaaccttcccttgaagaacttgtgaggcaaatgactatgcaaaacatgcagtttcaacaagagacgaaagaaaagaatccagtaattg

SEQ ID NO: 9080 - DNA, 239 bp, Glycine max
agctttttataacaaatttgccttaatcatttccaaatatgcatgtgaattaggatgcatcaacaagaatcaagccaaggctattgtgcaagcaatcaatggggcaaaacacaccaaatgattataatgatggatggctcaaattctcacaaaggtaaaatcatcactttcaaattgagctttcaaaactatcatgacatgtagagaagaatcaaggatttcaagtcacaaaatgtcaa

SEQ ID NO: 9081 - DNA, 347 bp, Glycine max
tgtaggattcaccccaaatttcgacgtcatattctttcttgctcccatatctacttgataatgcaatggtagccataacccctgccagggttccttaacctccatttttccaaggatacggctcgaacgcaacatgtgcatatcatggaggagttctgggacattcaattgagcattgtatgacctcgaagcgtaaggtgcaaagtctaattgatgcaggctggctgaaatttgaggagaatcgcttgttgaatcctaacattgacaagcgacaccacacatggggcaattttgaaagctgttgttagatgtctctaatgactcatcaggattttcaagtttatgcc

SEQ ID NO: 9082 - DNA, 238 bp, Glycine max
agcttgtactctcatcgttcgcgtgtatgatatccactccacaaggtttgaagtagaggagagcttcaaccctataacgcaacgtggcggacaaaagtgggcagtaaacttgaatgatcgtcattgtcaatgcggaaggtattttgcgcttcactatccatgttcacacattattgcagcttgtggttacgtgagcatgaactactactaatatatagatgttgtttatacaaacgag

SEQ ID NO: 9083 - DNA, 344 bp, Glycine max
tcaagttcaggaggagagcgaagaagtgtgttttaccagcaagttagaggaactagatctctctctgatatttatcaaagatgtaatgttgctgtaatggagcctgtagactacaatgaagctgcaactgattcgaagtgggtaagtgcaatgaaggaggagcttgatatgattgaaaaacatcaaacatgggagctcacggagaaacctaaagataaaaatgtcattggagtgaaatgggtttatagaaccaagcttaatgttgatggttctgtaaacaaacataaggcgaggcttgttgtgaagggatatgcgcagatgttcggggtagacttctcagaaac

SEQ ID NO: 9084 - DNA, 238 bp, Glycine max
agcttttttttcaagtgatcatccattggcatcatcaaaatattcagcttgatcctttgtctacaatctccccctttttgatgatgacaatccctgaaatcaagacaagctatatacaagatgatagcacgttcacacaacccttactcctcctatcttttggcatgtatgcctaactttacttaatgattaaatttctaattgatttctaacccaagttctctccccctttggcaac

SEQ ID NO: 9085 - DNA, 341 bp, Glycine max
tgttacgcgtcactaacacctaaacatcgactactttgcaagtagcccgctcgttgatggcttttttctttatctataaaaaaggagtaaaattttaagttatttccctaggggtatatcttaaagaatgatacaaacggaggaaaacctttcttatatctagtttacgactttaaaagctatcaacccgatttccttttattaacgctgaagttaatttttttaaaaaatatatatataatctttttatgttttctttctttttaattttttttttaaaaattatttaaatgtataacaaataacctcacactgggggatttatcattatatttttttat

SEQ ID NO: 9086 - DNA, 235 bp, Glycine max
atttttttttaagttagcctaaacctaccagggctgtctacattaagcctactcgaacaagagggatctgaggacaaagcttggattgattcagcctaactagggattgagggttagtaatttaggctacaacatagaatacaaaagcatgattgattatagaaacatctttatatacatcagcttgtttgttagaaagacccaatatttttacctactgttgtcaatcttattt

SEQ ID NO: 9087 - DNA, 333 bp, Glycine max
tgtacgaatgtaagaaacattttctctgatctttgtgattcttgactccatctgattgaagcgcatgtccacttgtcactccaaagtatcaaacctttcaccaacaaaggtttgaagaccatcgaacctatccaaaatcttttgaagaagcgaggaatcttctccaccatgtaaatgtccttcttcatcaacatgtcgagcaccctttttcacccaagagccatcatgctctttttgataaccaaaggatgcagtgacaacaacgcctattagaaaggatctcttgattggaacataaggttcacaaacaacaggtatgttaaagtgttgaag

SEQ ID NO: 9088 - DNA, 234 bp, Glycine max
atttgttacttgtttggcaaggggaggttctttcgcctgcgggccaccacctcgaacctggacccttggtcatcctggccaggaaactggatgtcagggctgcccgaatggggggaagacctaaaccgtacataccacgagcaccatgtgtattgagcggtcaagctttgccacagtggaggttgactaaacccactccgagcacaaaaccggttatcaaaaaaccccccgcca

SEQ ID NO: 9089 - DNA, 394 bp, Glycine max
  unsure (1)..(394): unsure at all n locations
nttgaaactgatctttgcaggacanacgngagactatagaacactcaagctggcggcaaagtggtcccagattgacatgtttttcacaggaaccaacaccgagccgtaataggagagcccccgccacacgagcgcggagcaccttcatagacttgaagccagaatgcgatgtgtctttggactcgaaacaatgcgtgtaactctaggaatacgagggtactgataaaaataggtgacatggcacttgctgtagtccgcattggctaatcacttggctgagactgctcttctctatgcacttccggatgttgccaatgtaaggcaaccagagaagggcgtgactgagacgatatccgagagaacgggctgacctatctcaattgttgccgacctg

SEQ ID NO: 9090 - DNA, 234 bp, Glycine max
atttttctgtaaattcgaatggccataacttttctcacggatgtctgattttgggacataatatatcgagaagctcaaaattgaacaacggaaactctcgagaaattcaaatggtcatgactttttattcggaagtccgattcagggacataactcatctagacgctcaaaattaaccaacaaaagctctcgagaaattccaatggttatcactttttactcgattcggggaca

SEQ ID NO: 9091 - DNA, 336 bp, Glycine max
tgccgccacggagttttccgactatgttcttgtgtggtggaagtgattatgcaagttgaagtggacgtttccattgggaaatacaatgataaggtactttgtgatgttgttcctatggaggccagtcacttacttttggggagaccatggcaatttgataaaagagccaatcatgacggttacaccaacaagatctctttcattacttttggtgttgcataaaaaatgtacaatgtaggtcggctaggtttttttgtgcgagctcaaccgacattttgtttcggccgaaactggcatgttcccatttattttggccaggaaaacattaacccacct

SEQ ID NO: 9092 - DNA, 235 bp, Glycine max
agctttttatcctttgcacattcttggtggtgaagctccttcttccatggcttattccctagtggatggtgcctcccctctcctcttctcctttgccttccactgcatctccatggtggaaaatcaccattgaaggacctcattgaagctcaaagatccggcctccatagaagctccacaagaaagcttccatcacttgccaatcgtctaacaaatcctcaagtgtctttgaggt

SEQ ID NO: 9093 - DNA, 345 bp, Glycine max
ttaggcctagttagttacctttggtgtgcttaaatggataatctggtgggaagtgaatggtcaccaggaatacaccaccagcataaggactgtcagttggacccataattgtagcttgccaatgaaacatgtcatcaccaacagggcctactcaagaatggaatacataagattcatgataagcttcccatagatacataactacaaggtaatattcaatattacatattgttttccatttttatatgtaactaaacaaaccctacttagttgttgggcctacatgaaccgtttatcaaaacatcataacctatctacatatagcttctgctactctcaaccaag

SEQ ID NO: 9094 - DNA, 235 bp, Glycine max
atttttttccttaggttgttccatgttgctcatgttgttgctctccttatctctaattgatagaactctcaaacctagggggttgttccacatagacttcttccttaataattccattaaggaatgcactttttatgtccatttgatacaacatcatgtcataatagcattaaagaatagtaaaatgcgtagccttcctgttgtgaataacctttggccataagcctagccttgt

SEQ ID NO: 9095 - DNA, 358 bp, Glycine max
  unsure (1)..(358): unsure at all n locations
ngacaaacacacagaagcaatttatatgtcttcaaaanngcattagcaaacatttctatctgtttaacttctgcaatctcaacaattttgtgccctaaaccttctagtttcttagttaattaccattgaacctgtaatgcatttgttggaaaattaacatagaatttgaacatctttaaaaggcctttaatcacaataccattcaattgtagggtttcaaaaggtcatccatcttcaaacgactgctatttagataacaaaaaattattaggcatcttgagcaaagagctataaaaatgagcgaaagaaagaaactttattatgttttttccaatattatatgttagaaaaataaaat

SEQ ID NO: 9096 - DNA, 231 bp, Glycine max
ttgcttttcctaaatgacactccttgtaccaccaagtttctaactcaatcacttttaaagtcctactgactgagtacaaagtgacttacaacaatttgatgagtaactaagcattcatttgtatgtcaaattttaaaatcatatacatatctaatacgaatttcatgttaatttcaagatgtgtaaagtaccatgtactcatttataaaagctgcaagaacttgaaagata

SEQ ID NO: 9097 - DNA, 338 bp, Glycine max
tgaaatcattgagttccaacatttactatctttttcgaacattcctctgaagaattcgtaagcaatatccagtcttccacattttgcatacatatatgtgatggcagatcccacatcaactttgctctccaatcctttctttagaatatcacaatgcaacacctttagaaatacaaggttgacctggcagttggaaaagagtgaaaggagaagggaagaaagagaggtcacggttttgaatcctccaactgacatttctaataaaaactaacaaattaacatttgttgataaaaaataacaaaaaacaatgcaactccttccctaatttcagagcagc

SEQ ID NO: 9098 - DNA, 236 bp, Glycine max
tttgcaagctttatgtatgcccgagtcattcatccctatgagatgttgttgaagtattggcgatcagaattgccattccttggattatagggttgaaccaagctcatgcttttacaaaaaggttcatcaagtcaagttgaaatatggaagtaaccgtcttgcaaaattggggcaaaagatgaatcgagtcacatcactgcttcgtctactgccaaacatatttaggattattgatg

SEQ ID NO: 9099 - DNA, 342 bp, Glycine max
tgtcaaaaagggaagcaagttataaactcttttcaaagcaagaactttgtttctacctcgaaaccccttgagctacttcacattgatttatttggtccctctacaacttttagttttggtggtaattactatggcttagtaatagtggatgattactcaaggttcacatggaatttttttttgaaaaccaaaaatcaagcttttgattcttttcgcaaacttgccaaggtgattcaaaatgaaaaggtctcaacatcgtttcacttagaagtgaacatggaggtgaatttaaaaatgagtcttttgaaaatttttgtgaagaaaatggaattcaccacaaga

SEQ ID NO: 9100 - DNA, 238 bp, Glycine max
agcttgtgatttaggaattgttgaagggtgaaacttcctgcttttattgttgaccacagagtggtacctggagatatgtcgcgggggtcaggagaccttggggacgtcaggtggggtgctattgcccaaaaccaagcttgaccaatcccgacccaacccgggcatagtcggtcagtgagaacctatgatgtacctaagcaggcgagctcctggcagtcaacagataaaaggaacaaag

SEQ ID NO: 9101 - DNA, 347 bp, Glycine max
tttctcatagatggcgatggatgtactgtttttgcaaacgtaaaaaatgaaacaaaaacaaaaagaaaagagaaagaaagacttcgaaggtcggcaagttatgatcataggaagcataaatcattcatagatagcaaacatatcttttggaaacaagggactgacgctaagagtttattttccggaataaccgagataagaatggatggattcattgaactgatgaaagaacataatttggaaatattgggtctacttgtgtaaatcccaagcattagtatcacaattccataaactggatgcttgagtatgcacctagctgtagccatgactaattttgcacgtgg

SEQ ID NO: 9102 - DNA, 237 bp, Glycine max
  unsure (1)..(237): unsure at all n locations
agctagttggtatatggggnacccctcaacacccaatttaccctagaaatggctcttgctttcacctttgccactcatttttttctcatttgctctgatccaagctttctcacaatgttctaaaccacattctaaactaacattctctcactttacccatatactaccacttatcaacaccggatccccatcaatcctcccaagctttcccaacatccaattaatacaacatttttc

SEQ ID NO: 9103 - DNA, 345 bp, Glycine max
tgtccttattgtgattgattgattattttatgtttgattttgagttttataaaacataatcttctgaatggttctcaggctggcctgctttccaccaatcaactgtgcattctagtcctcttctatatgacattgacaaagatggagtgagagaaatagctttggcaacctacaatggtgaagtgctgtttttcaggtgacttttttttcttttccatattttcaaaattttgcttccatgaacaattacccattacttgaggtgcttttatcaaggttgtaataagttaccaattttagggtttcgggctatatgatgtcagataagcttgaagttccgcgtag

SEQ ID NO: 9104 - DNA, 239 bp, Glycine max
agcttttgttagtggattctttgcatgaggaaagaatatgcatttaatgcaagcattaaatgcccccaacgattgtgaatcatgcaggttttgatgatgtcaaaaagaatttgcttgataatgattgtcatcatcaaaaaggtggagaatgtgaatgtatgaatacatgattttgatgatgccaaaagaataatcaaacaaggttgctttcaagattacttcaacaaacattcaaaagt

SEQ ID NO: 9105 - DNA, 348 bp, Glycine max
ttatccccttcaatgaatttgtacaaataatattatattaaatccagatcgattatcgatactggtggaatttcatgtgaagaagcatcgatggcagaatatcttaatcttgttatatatgtttacgtatttttaaaagtacattttagttaaaaaaatatatttaataaactataatagctatataagaaatttcaaaattaaatagttttaatagtttttagaagctaaaagaaactttaaaaaattcttaaaacaatataatttaaaatattttgagttaaactttataaagatttgatgttcattttaaatataactttcccagaaacttatataaatatttgg

SEQ ID NO: 9106 - DNA, 239 bp, Glycine max
agcttttattatatcatataagataaatgcattcaggcaatctgcagatatatcctcccaaacgtcaaattctccgcctatatattcaacctttccatctctggcacgtggagtgaatcttcctccatggtgcaatattaaagttatattgtcattcattctacacaatcagaaaccacaaacattgtcatatattaggaaataaaaaacctaactcaaactcaaacataggcacatca

SEQ ID NO: 9107 - DNA, 349 bp, Glycine max
tgtaaaatcctttacaagcaaagatctcctgtatgcactcttcctagttctctttgaacaaccaagtggatgtacgctccacttgaactgatccacaagagatgtaccctttcttgttctcagtatcacaacccaagtagatgtacgctctacttgtaccacaaaggatgtacgctccaatgtgttaagacaaagaattcttaggcggttagtcccttgaatctttgtaagggtaaaaaaaagatatctcaggaggttagtcttttgaaatcttttgtttaaagggaaagggaagaatcaaaagaattctcaggcggttagtcctttgaatcttttgtcaagagggaga

SEQ ID NO: 9108 - DNA, 236 bp, Glycine max
agctttttttgggacatcttgacttgctttccaatctgacattcaccacagattctgccttcttctattttcagattgggaatgcctctaacagcacctttgtcaatgattttcttcatgcctcttaagtgcagatgtccaaatttttgatgccatatttttacttcatcttctttggaggatagacatgtggaggagtaactggtttcttgaggtgtccataggtaacagttgtc

SEQ ID NO: 9109 - DNA, 361 bp, Glycine max
ttataagcgcgggtctgggagacaattgtcattcgttcgcgatatgcgatatcaagcgatatgtcgtaagcaaagaatacccgccagagattgccgacaacgataaaaggacattgaggaggttggcagccggtttcttcatgagcggaagcatactgtataaaagaaatcacgacatgacactcctgcggtgtgtggatgccaaagaggcaaatcacatgatcgaagaagtccatgagggctcgtttggaatgcacgccaacggacatgctatggccaggaagatcctaagagcaggttattactggcttaccatggaaagtgattgttgtgtccatgtgaggaaatgccacaaatgtca

SEQ ID NO: 9110 - DNA, 236 bp, Glycine max
agcttttatgattatggggtacccatcacatgtggtactaggtggcggtcgggcgatggtgcacaacaagtgttccacatccacaaagcgcgcataaacccaccatcccctgttgcccacctccaactgagctcacgtactcccacgtagcccatatcctcgtttctctcaacaccgggtccccatcaatcctcccaagctttcccaacatccaagtaatacaacattcaaacagc

SEQ ID NO: 9111 - DNA, 343 bp, Glycine max
ttatgatgaaaaagtaaagtatataatttggatacaaaaggagttatgtcttttgctcaaactcaactagaaaaagttgagaacttatcaaaagacttagctttctctgtaaatggaacaaaaaacgttgacaaattgattggagatcaaaaaagtttttacacacacacacacacacacacacacacatatatatatatatatatatataattggagaacaaaaaacgttgacaaaaagattttcaaaagcctattaagaaaaataaggctaaaagaaaatgctccaactataacaaatggggacatttaacctctgaatgttatagaaagagaaatactcc

SEQ ID NO: 9112 - DNA, 235 bp, Glycine max
agcttgtttgtggagcttctatggaggctggatctttgagcttcaatggggtcctttaatggtgattttccaccatggagatgcagcggaagacaaaggaaaataggtgagaggaggcgccatccattaaggaataagccatggaagaaggagcttcaccaccaagatgagccttggataagaagcttggagaagatgcttcaatggaggaaaagaaagagggagagaaagagag

SEQ ID NO: 9113 - DNA, 339 bp, Glycine max
tgagaggattgatggggaccttgtgttttttagaaacgaggatatgggctacgtgggagtacgtgagctcagttggaggtgggcaacaggggatggtgggtttatgcgcgcattgtggatgaggaaagcttgttgtgcaccatcgcccgaccgccacctagtaccacatgtgatgggtaccccataatcctacaagcttgagatgaggaagtgttgaagggtgaaacttcctgcttttattgttgaccacagagtggtacctggagatatgtcgcgggggtcaggagaccttggggacgtcaggtggggtgctattgcccaaaaccaagcttgaccaat

SEQ ID NO: 9114 - DNA, 231 bp, Glycine max
  unsure (1)..(231): unsure at all n locations
agttttaataccatgnccataaacagggaagcaaccttaaaggctgcctagcgggaaggaagggcgccgaaatgagcctttttggagaaacgatccaccactgcaagtgtcacagcgtacccctaggagggcagaagtctgatgatgaaatccaaagacaaatcctcccaaatggctgaaggaataagtaatggtggaaggagggtgacaagtcgcttactctcatgcgta

SEQ ID NO: 9115 - DNA, 346 bp, Glycine max
  unsure (1)..(346): unsure at all n locations
tcagagtcctattcgactgctcttgtgctttacctttnggtttatgatattatatatctatttgtgtctttgtgtgcgacacgtcatgaaaagctttaggatttatgctgtaacatcgaggaagatatgatagttcttttttttttttttgtttcagctaaaaaaaatgcagtaagtactatattatcttttatgaaaaatctctgtctctatgcttgtggggctgttaaattgttcatgtccttaagattacttgctagtgttctgacttcaattcccttattctcctttccttattagatgtttttaagtaatttttgtcaagagttctttttttttttttttg

SEQ ID NO: 9116 - DNA, 235 bp, Glycine max
agttgtcataaactaacatggcatattattaattttgagttttggttgcaatgtgtcatacccttatggaggagtcagtgctatgaaacccagttcggtctgatcgactagatcggttcaatagagacttaatggcctaaccgagtcggtttcactattggatcgatcatgcaatcgactggggatgacctaaccaaaccaggtcgattaggtcatcggattctgattagactag

SEQ ID NO: 9117 - DNA, 349 bp, Glycine max
tccgttcccgagagcatttctcattttatcatttcagcctttgctttcgtgtagcataggaaaaacactatttcttctcctttcttccttccaaaaccatttctaatgtcccaaacactttctccatcacccacagccaccattagccaccacaaactgccgttgttctccattgcaaccccacactgagaggaacccttcaaccaaagcggaatcttccaacttggctcgcggtttcggtagaggacgaaaccctagtctaacctttcattttccttcgaggtaaccatggttctacacttgtttcttgttagtttcaacttgtctttgcatcttttctgactttggg

SEQ ID NO: 9118 - DNA, 238 bp, Glycine max
ttttgttaagctatatactaaaggatgcaactagtacagagtcctgcatcgtacaacccctattccaacaccaaaatcctcacattcaatttcaaaagctttatcaaaattacgcaaacaaagcaaaggtgcattggttagcttatctttcaataaattaaaagctttcttatgcacattagtccacttgaacaccacattctttttgacaagttcatttaaaggtgcaacaagtgaa

SEQ ID NO: 9119 - DNA, 358 bp, Glycine max
taaggcctgtttccatgttcacatcattatattgtttttaaagcagctctttatcaagtccatgaaaaacatttgaattcattaagtaaaaggtaaagccattcatagtttttcattctcaatgtttccaaaaatcaactctattgtgctctaatccaaatcacaagcaagtttcaaaatcaccggctgctgattctttccaaaacatgttatgtccacgaattttttttggtttaactcccaaaacaagttgtatatatatatatatatatatatatatatatatatatatatattctgcacctacgctaagagaacaaaattatccacttatgtgttctaccaaaatgagggaaac

SEQ ID NO: 9120 - DNA, 231 bp, Glycine max
ttttcttttgtaaatgacctttattttcaactctaagcttgatttgcacttcattttctttctctattttttgcactcttgaaggttggaaacttgaatctaaactcgctcattcttctttcttaattttgtggagcatcaccaaggtagggggaatctctccatctctcgaaccctattcttgttgttaaacttccttgaatatgttgttgccttgaaatttttgtattg

SEQ ID NO: 9121 - DNA, 337 bp, Glycine max
tttgcaagttggaatcatttattctatctccggcagccaatgggtgagtcccgtctaggtagtcccgaagaagaccggcctcacaatgataaaaaatgagaaggaggaactgattcctactcgggtgcagaaccgttggagagtctgcattgactataggaggctgaaccaggttaccaaaaaggaccattttcccctgccattcattgatcagatgcttgaacgcctggcaggtaaatctcactactgtttccttgatggtttttctggttatatgcaaattactattgctcttgaggatcaggaaaagaccacattcacctgccccttcgacact

SEQ ID NO: 9122 - DNA, 196 bp, Glycine max
cgcaacccaccgcccgcagaaccacgagaggacgaaggcacgaacaaaggggaacaacacctccaacaaaatgcgaccgccacaaaaaaggagacggggggaaacgaaacgactcaacaaagaccaacccacaggagcacagagaaccacgccagaggcgacaggaaaaccaggccggacgggacacagcgagaaa

SEQ ID NO: 9123 - DNA, 102 bp, Glycine max
ggggctaggaaaaacactatacctttcactgtcattcgtccataaccattactaatggcccgaacactttctacatgacccacaggcagcattagccaccac

SEQ ID NO: 9124 - DNA, 239 bp, Glycine max
agctttcctttctaacttgaaattgagagaaaatgattattaaacacacaaaatagaattactaagtatttattacctatctttaactaaaagaacttataacactacaaaataaccataatttggaggagtttgatacaatttacacaagttttatacacaaaagttagtcgtatccaccgactaacccctacgcgagttgcctttgtcacaaatgccttgttttgctataaatagtg

SEQ ID NO: 9125 - DNA, 343 bp, Glycine max
tctcaaggaagttttcttaagaaagcttctcttgtttctacctagtctataaatagaagcatgtgtaacacttgttgtaactttgatgaaagtcttgtgagacatactacaaagttccacttctctccctattttattccttcaatttcgtgctcccccctctctctttctcttcctctttcttttcctccattgaagcatccttccaagcttcttatccaaggctcatcttggtggtgaagctccttcttccatggcttattccctagtggatggagcctcctctcacctcttctcctttgtcttccgctgcatctccatggtggaaaatcaccattaaagg

SEQ ID NO: 9126 - DNA, 239 bp, Glycine max
agcttatgatttaagtgtaccgagcatggctaggactgtagtaacaaatcagaaacacattaatttcaaacattatgcacaactaacaaatgcaaaatttacaccaacaataggatgagctggcttcacacgtaaagctggtgaggttaatataattccttccaccattacttcaatatgaggatgggaagctgcctacacaaaatttgtaaaaaataaatttcaaaattgaacagaga

SEQ ID NO: 9127 - DNA, 343 bp, Glycine max
ttaaggataggtatgtgtatatggattttggttctagaagctatggctccagcattggaagttggtttaggaagcagtacccgaaacagaacaagacctttcatgtgtatgcaattgaggctgataaaacgtttcatcaggagtatggaacgaaaaagggtgttacattgctgccttatgcagcatgggtgaggaatgagagtttggtgtttgagattaaccgcgacccgggggagaagaaggttcaggggaagggcaggggaatggggaggattcagccattgaagtcttcaggtggttttgatggtggtgagcttgagaagatttcggggtttgatttcgc

SEQ ID NO: 9128 - DNA, 239 bp, Glycine max
agcttgtgttacaattcactgtgacagtcaaagtgccattcacttagcaaatcaccaaatgtaccatgagaggacaaagcacatatatgtgaaactacacttcattagatatgtgattgaatctgagaaggtgaaggtggagaaggtttcaacagaagaaaactcagctgatatgttcacaaagtccctctctagtgtcaagttcaagcactgtctggacttgataaattttgaagatg

SEQ ID NO: 9129 - DNA, 352 bp, Glycine max
ttcatatatacctaaccatttgccaaaagcatattctccgtcaataacaaaagtataattctagtttggtgtaacgtgatatcaatttcattttctcttaaacttttcttcaatccttcccatgtatcacatgtttcttaacatgatatcatagtgatggcatccactataaaaggaaaatttagttttgctttgaagagctccatgagctcatatccttaattttctttcgtttttttctttttgaaatacacaatctctaactttctcatcaacctcaatttgaatgtttcaagaaaatgatggaatcaaagttgtaattcatgaagttaagtgattacttcacagcacc

SEQ ID NO: 9130 - DNA, 236 bp, Glycine max
  unsure (1)..(236): unsure at all n locations
agcatttcttttatggncccgacgaacgngcacttgcacaagacatcctattaactaagaaaaatgcacccatatacaataaaggtaagcttcattacctagattattaacatgtgcttccaaggtgtatttgttatttacatcacacacgcctccttggctaaattgacatacatgcttactcaaagcatcctgggggaccaaaaactgcacatgtgcacatcttggtattacta

SEQ ID NO: 9131 - DNA, 202 bp, Glycine max
gagagggccctgttagactctcttatatggcggcgtggtccttatcactctgacttatgctacacccactttagaatcttggccaaactctattagaattctatataatattttcaggtgggtattggatcatacaagaaccttaaactttgtttataatgaacgccatgagaacggtacggggggctaggattactctgat

SEQ ID NO: 9132 - DNA, 236 bp, Glycine max
tttttttgcttttattcccagcttcccactacatgtggtgtttaccgaaacaagttgaagattttgtcggtgaatacctttctaattatgtaacaaggcttttaatagtctctttgggatagattaatttcatccatttcaactatttttagaagaaaaaaaagttttttataaaaaaaatctctttatataattaattatgttatatacatggtgatgcatttcagcctcaaaat

SEQ ID NO: 9133 - DNA, 235 bp, Glycine max
  unsure (1)..(235): unsure at all n locations
atttttaacattcaattncgagggtctcgatatattacgggactcaatcggacatccgagaaaaaagttattgtcatttgtatttgctcagagcatcaacattcaatttcgagcgtgtcgatatattacgggactcaatcggacatccgagtaaaaagttattgtcgtttgaatttgctcagagcttccgtattcaatttcaagcgtctcgatatattacaggactcaatcagac

SEQ ID NO: 9134 - DNA, 339 bp, Glycine max
ttgaggattttcaaacgacattaactttgtactcggatgtctgattaagtcccgtaatatatcgagacgctctaaattgaatgttgaagctctgaccaaattcaaacgacgataaatttttactcggatgtctgattgagtcctgtaatatatcgagactctcgaaattaaatgttgaagatctaagcaaattcaaacgacaataactttttactcggatgtctgattgagtcccgtaatatatcgagacgctctaaattgaatgttgaagctctgaccaaattcaaacgacgataactttttactcggatgtctgattgagtcccgtaatacatcgag

SEQ ID NO: 9135 - DNA, 233 bp, Glycine max
atttttttttcattacaacgaggaggacggacgtacattaatcacttgaggacacgcatcacactaggtgcgcatgaccagaagcgtacaaccataaatagttctaaataaaataattggttaacataaataacactaaattttttgaatattttattatgataaatattaaatattttttatatttataaactattaaataaagttttcatttattattttctttataaaag

SEQ ID NO: 9136 - DNA, 338 bp, Glycine max
tttgaactagtctactacattttccctttttattcaaaatgctacaacacctaaagctttccttagcttctcaaatctttcaatctttgctgccttagtcatcacatctattactcgtgattcagtaggacaatagacaactttgatcacacttttgttcacttgttcctttagaaagtgaaattttgtctcaatatgcttgctcctttcatgggagactggattcttggccaagtcaattgcaaatttattatctacaaacaattttataggcttcttcaacttgatcctcaattctgttagtaatgaatcaagccaaatagcctgacaagcaacaa

SEQ ID NO: 9137 - DNA, 235 bp, Glycine max
  unsure (1)..(235): unsure at all n locations
atttatatagggtatgctngaatttttaatggaataatttttaaaatatgtttgagatcatattttgttgccttaaaaaatacatgtttaaaaataaaattttgtgaaagtaaaatatgaaacactattataaatttagtttgtaaatttaagtttaaccaaaacttaagtttacaaattttaatccatacataacttttgtccaacaaaattaatttacgtgaaaaatatgaat

SEQ ID NO: 9138 - DNA, 350 bp, Glycine max
tttccccaaacgcatactgctttaattatattacctatcgagtctctttcccggttcaggctcgtgcatttgaatcatttgccatgcagtgtagagagtgcaaatccatgaaactatcaatattgtaacaccccaacacctaccaaatgcaacaaagaaagtgattactgattttttttttatccacaaatataagaatattagctttattataaatgttagtcacggaattcgaacctgctaccttccttttccctcctttctcccttctagatcaactttatccaaaaagtgattaagtgattactgatgatgtaacatgcatgatccaacataatttcttattaaaa

SEQ ID NO: 9139 - DNA, 235 bp, Glycine max
agctttttgaaaataaagtttttgccctaataagagatctcatactacacgcacaaaagtaagatttgactcttataaagcttaaccaatctatttccatccgtatataatgctttgaatatatagttgtcattttaatcttcatataatttatatttgttttgtataaagactttttttttattgacctattagttaattaacctttttgtttattaccagtcagttaacttat

SEQ ID NO: 9140 - DNA, 349 bp, Glycine max
taatgacaatagactaaaggttcaattttggacatgggagtgaagagttggatgtgctttggaagcagatattccagcagtgttctatatcagcttggggtcttagcccagttgggttcctgtaaggagtgcccaatgtggtcctcaagttcatctccctagttgttcacaaacttggttatgcgacgcttgcagccaatggcttgagcaatcatctcagtagtcaactttactaatatccctagaacttttccaacaaagtggcctccattgtcttcgttgctatacaccttggggtcttcacggaagtgaaggatgacacacaacatgaggtgggctttgatgatgt

SEQ ID NO: 9141 - DNA, 233 bp, Glycine max
ttttttgctttagatgaggaagtgttgaagggtgaaacttcctgcttttattgttgaccacagagtggtacttggagatatgtcgcggggctcaggagaccttggggacgtcaggtggggtgctattgcccaaaaccaagcttgaccaatcccgacccaacccgggcatagtcggtcagtgagaacctgtgatgtacctaaacaggcgagctcctggcagtcaacagataaaa

SEQ ID NO: 9142 - DNA, 336 bp, Glycine max
tgaaggaaatagtgtttttttatttaaagctagaaactaagtgcggatgattaaggttgattcatggtgatctagattccatagaattagaaaacgggtaattaattcataggatttaaaaatggagagcattttcgtaaatgactatatcactagtttaaaaatagaattttagtttaactagttgttgactaattaaagtgtctaattatatgatgtacaatagttaaaataagttagacttgtaacaccctgaaatattacaactctgactgacagaagaaactctgtgttgggtcatttgtgcatgtatgaatttaatttaagtagatatat

SEQ ID NO: 9143 - DNA, 231 bp, Glycine max
agctttgagccaaaatcccaactcaccataaaccttgacacgagatgagaatttctatcgtcacccttggaagaaaacaaaaaaagaaaaataaagttcccaatcaaagatcggaagaaaacaaaaaagaaaaaagttctcgatcaaagatcggaaggaaacaaaagaaaaaaaaagttcccagtcaaagatcggaagaaaacaaaggaaaaaagaaaatccccgatcaaa

SEQ ID NO: 9144 - DNA, 333 bp, Glycine max
tcaaccaaggggagatggaccatttttgtgcttgaaagaatcaatgacaatgcttacaaagttgagctgcccggtgagtataatgttagttccaccttcaatgtctctgatttatctcttttttgatgcagatggagaatccgatttgaggacaaatccttctcaagagggagagaatgatgaggacatgttcaagagcaagggcaaggatccacttgaaggacttggaggacctatgacaagggctagagcatggaaagccaaggaagctcttcaacaagtgctgtccatactatttgaatacaagcccaagtttcaaggagaaaagtccaa

SEQ ID NO: 9145 - DNA, 347 bp, Glycine max
gcttgaatagttccccaatttatggagagtttggattgtttttgggaaataaacttgttttatggttaaagctgtctctataacatttccattggatttaatgatgaaatctgtgcattttcaggtgaaaaaaaggccaacttttgaaatgcaaaaagtaacagttgggctaagcgcatatccaccgctaagagcagcttcagcgtgcttatcgcacaagagaatctggtagagcattaacatcaaagccgcgcgctaagcgcgagatgagtgcgctaagagcagcaagtgccttcagccaggctcagcacaagactggcgctaagcccaactccacttactggcgc

SEQ ID NO: 9146 - DNA, 393 bp, Glycine max
agcttctatagaaggttcgttcctaatttctctacaattgcctcacctctcaatgagcgggtgaagaagaatgtggcattttcctgggttgaaaaactagagcaagcctttgctttactcaaagaaaaccttactatggcaactgttctagctcttcctgacttttctaaaacttttcagctaaaatgtgatgcctctggagtgcgagttggagctgtattgttacaaggtggacaccctattgcttattttagtgaaaaacttcatggtgtcaccctcaactaccccacctatgataaagagctttatgccttaataagagccctctaaacttgggagcattaccttatttccaaggaatttgtcattcatagtgatcatcaatcacttatg

SEQ ID NO: 9147 - DNA, 285 bp, Glycine max
  unsure (1)..(285): unsure at all n locations
tgtgcaaatcaaatcactcctacatctcatctctagcatgcattttctttctttacccactcctcacgtttggttttttaggaaaaaaacaccataactaaacgcgccgcaagggatccctatcgcaccagatccaaatctagaacgatgggtgatcaagaggagacgcaggaacagatgaaagccgacatgtcggctctgaaagaacaaatggcctccatgatggaggccatgttangtatgaagcagctcatggagaggaacgcggccactgccgccgctgtc

SEQ ID NO: 9148 - DNA, 390 bp, Glycine max
  unsure (1)..(390): unsure at all n locations
agctntgactaagccatctctctcctgaagctttgcgatgctacgccgacgcaattcatttgtgaactgtctttgtcaaaggtgtttatggaggtaagaacccctgttcgtgaagtgtttgttttccttccatgtgggtactatggttgaatctgttgccctttagactgggatgtttgtggctaggacaacaatgcttaattattgttttgagctctatgaacttaggattaattgttagtactaaaccactatgagagacacattgacccattctaagcatttgccaactttgcctattctcttatagctagaaaggactagcaccaaagcttaaggtagacactacattgttagcatctcccctagtcaaattctatgtgataatta

SEQ ID NO: 9149 - DNA, 389 bp, Glycine max
agcttcttcctcaccacccacagtcaccagtagccaccacgaaccaccatagttctccattgaaaacccacaccgaaaggaacctttccatcagagcggaatcttccaacttggctcgcggttttggttgagaatgaagccccgatttgaccttcgtggttttccttgaggtaaccatgattctatgattgttccttgttagttttagtttgtcgttgcatcttttttgactttggaaccaccattgtatgttttacgcttcctatgaaaaaccctagagaaagagactttgtaaacattatcttttcatgaaatggatgttatttttgtgaccttcactaaaccccagtcacattggcgtgatcagaatttcaaaatgatgttccttt

SEQ ID NO: 9150 - DNA, 414 bp, Glycine max
  unsure (1)..(414): unsure at all n locations
ngcagactataccttcgaccgaacacggctgtgtttctgtctatgcccggattcaaagcgggctgcggcatcggctccgcttccctaactgtactggaggcggttgccgtggctttatcctctatggttntctggagttttaacatgacctccgagatggaagccatttgatcttttaaggccgatagattggccttcatctgttcctgcacgccctcttcattatccatttttctggatcgagtattataggggtgccttggtgttttcttagttatgatgaaattcctaaagaaataaacaatggtgagtatgccaccaaaacatgagtatgcaaatggatgatcggagcacttggatccaccccanggtttctagataaacgtatgagtccagaacttctattttataaaa

SEQ ID NO: 9151 - DNA, 395 bp, Glycine max
  unsure (1)..(395): unsure at all n locations
agcttgaagcctactactaagattttgttttttataaatttctctacaaacattgaagaagaaaataaaaaaatagataaatttagctagttatataaactaaaattaacttatatacttgcaaggtgtcgcaatctacccttcagcgggaagacgacgcgagacccacgggtgtgacttcctaggaaagaaaacgctcggagtcgtcaccaacgtttatttgagaaaaaacattagaaaaatcgaacagggatctacgaatttgaagtataaaaggttcggcagtagtttacgtgcagggaaggtattagcaccgcacccgttcgcctcaagggacagtaacctttaatcaaatgtgcaaaatcatgacnttcatttttgattattttcccctt

SEQ ID NO: 9152 - DNA, 378 bp, Glycine max
  unsure (1)..(378): unsure at all n locations
tgtgcctcttcacgtctggaatatgaatgtagcatatagattcaaagacctttaggtgctttgctgatggcttcttgccgttccaagcttcaattggagtcttgtcttttatagacttagttggacatctgttgagtatgtaaacagcagtgtagactgcttcagcccagaatgtgttaggtagtcccttttccttgagcatcgatctagccatctccataattgtgcggatctttctctcggacactccattttgttgaggagaatatgcgactgtaagttgtctctcaatgccttcatcctcacaaaatctttcaaactcgcgagaggtgtactctntgtcgcgatcacttcttagtacttttatcccgtttccac

SEQ ID NO: 9153 - DNA, 392 bp, Glycine max
  unsure (1)..(392): unsure at all n locations
agctnttgaacaatctctggattgtttatccccctacttctgactctcacattgaaagccacagctgcacctctttcatatttgatttttggaccatagatttggacaagacttgctttttcacacccatcagaagcacgcaacttcagttgcagtaatgaggtaacaagccaatttatcaaaaaccgaagtctaagtgcagttttattgagaccaagcatattgacatgatcgatatgtcgacatattatctctggttccttcctgccccagtcctgtccatcaccatattctccatcacttgtcacctcttcatcatcaaagctagttgcagacatgtcccctggctctagggtctggcttaggtactctttatgattatcttccatgct

SEQ ID NO: 9154 - DNA, 336 bp, Glycine max
tctaagcacaccacaaagaaaagagatgattggtattacctacaccaataagatgcatctacttattagtagttcatcacttgagaactccttaggtagacgtagatggcttggagtaggtatgggatggatgatattctaagaagttttccatacagcatggaagtgaggataaagcttgctaaaaagtcttgagttggcttgtggggtcagtcattgatcttggaagcaaaccgagctgattccaaggttctaaactatactacctatggagagttccgatcaatggagagttctaaccaacaaggatgtagagtgaaatgtcaccgcgtgaag

SEQ ID NO: 9155 - DNA, 183 bp, Glycine max
ttttcagtctatggactacaaattctgaatcttgtggtcttgaattttcgtctacttgtgtctcatgaatgaatctctccctagtccctactttacttcatttggatagataggctctttctgtcaatctgagtatgctatagtttttacgatcttcctggacctggatactaatgagggcat

SEQ ID NO: 9156 - DNA, 343 bp, Glycine max
  unsure (1)..(343): unsure at all n locations
tcagtataccaaaggaagattctgaagtcatagtatttattggattgcggctactggttagataaagaagtctgctaactntaaactagcatgtttgctttatttgtttacttagacctagtgaccaacacccaaaataaaacctttgaagaaggtttctaagatgcaaagagggtcatagaatataataatactcaagtcttttctactaatgaggcctaccatatctttctttgtcggaacactatccctcaaatgaagcatgaattatgtgttcctttggtaagaagttacacnggtcccgtccaacatgntaaaactcaaaagcatanacgttaatatg

SEQ ID NO: 9157 - DNA, 389 bp, Glycine max
agcttgtattaagagatagacagattaagacttagaatttttttgcaattgtctatccgctaagcgcacaccttgcgctaagtgctcagtcttcacgcgctaagccgagcttgctcgcgctaagcgtagagacccctgattggttggctgaatagttcagctaagcgcgcatcactgcgctaagcccaagatcttcactgtaattaaaccttatgcagtgggcttagcatcgatgatgcactaagcactacttcttctcgggaaaaattttatggtagaagcgttaagcgcgctgtcctgcgctaagccctagatccattctgtaacttgagcttttaagctgggcttagcggggcaagaagcactaagctccaatctcttacggtttt

SEQ ID NO: 9158 - DNA, 170 bp, Glycine max
tgtgatctgcgtaacctaagaaaagcctagttgcttgaagcaacactgccgagcaagctcccttttcactatcgagcgcaaccaggaagatttctgggacaaagactgagacttgcgtgtaccagaaaagaagacttggaaagtgtctctcccgtgctgtgacttaccag

SEQ ID NO: 9159 - DNA, 380 bp, Glycine max
agcttcttatccaaggctcatctttttggtgaagctccttcttccatggcttattccctagtggatggcgcctcctctcacctcttttcctttgtctttcgttgcatctccatggtggaaaatcaccattaaaggacctcattgaagctcaaagatccagcccccattgaagccccacaagcaagtttccatcacatatctcctatcatctaatgattgacacatgacaatgaatctattaaaagttactacaagttctgagaaataaactaacagtggcaaataggattgatgggaaaaggatggatggtactgtcagtggggggaaagaaaatttgttgggtggttgtcacaattgtccatcttattattagaaagtg

SEQ ID NO: 9160 - DNA, 373 bp, Glycine max
  unsure (1)..(373): unsure at all n locations
tattgaaggccaagatcgtcttgtattgcccaattagagttgagtagattccggggcggtgttacccaagtaggaaaaaatcattcattctttttaatataattgtggacggcatcagcctgattttcttgttgcaggttgtgttgtaaattactaaattataaggaaattataaagaaatgagttgaaatttctattcattaaatatccaatggaacggttgagagaaattctccacaaagggatccctttcagtgacttaattcttcaatgttatcttctgatatcttgtacaattcagtatatcacggtgcgtgtaccanatggctttgttaaatttgggaagaaattatcgtcattttcttagcatata

SEQ ID NO: 9161 - DNA, 379 bp, Glycine max
agcttctatggatgatgctctcctacaacctaagacaaggtagcaggagatgacactatataggttcaggattcaatcaatcaataattcattcagctcaaactaggtgcaagggataaatcattcaagcatgtggtcagctttttggctaagtggctatcgcattcaaacatggccttcatcatcctcaatttcatgcattcattccatacttcagatattcatgcaaaaatcagtactaaatgatagtcgtttctctcaaaatttaaggatcacactctcatcgagatacgatcaatgcattccttcacaatcaatctgacaaactgactaacattttcagtcaaagttctaaccacatccccattctcttctaatg

SEQ ID NO: 9162 - DNA, 366 bp, Glycine max
  unsure (1)..(366): unsure at all n locations
tctagccaaatggacttaccttgaattaattcctttgatagcccttttgagccttgtttccctttccttgttttgaagctcactacaagccttaaatgaaaaaaccatgatatcaccatatccttaaagaattttggagctttggaattgttttgggaataagtgtgggggttttttgtttcattggataacttgttttgttggctatgcttcatgatgtattttgggccatacttgatgtacattgtatattggttaaatgttggacatgctgaatgaaatgttgtttctcaaaggctatagagcaaaaaaaaaaaatattcgaaaaaagaaaaagaaaagcaatanagttgagtgaataagatt

SEQ ID NO: 9163 - DNA, 375 bp, Glycine max
agcttgaggatagagactttcctatctatttatcttctctctcaaagaggctctttctcactctaagaagtggatccactcttttgtcttggatgataggaatgaaggctcctacccttatttatactactccacctccacattgaatggtggagattacttgtatcctacggtggagattaattctctataatgctccacacattctatgagtctctacactctgctactcccttccatactctttcataaggttctagaaggttccacacatctccagaatattttagaggtttttacattctttcacaagctcctagagagttctacactactctatagttcttttcgacgctctagaaaattctacacttt

SEQ ID NO: 9164 - DNA, 412 bp, Glycine max
aggatgattattcgatgtagatccattctatgtttcttctgatagaggcccgaagcctattgaagaactcatcaagctgtagcttggacccaaacccaagcaatgtacacaacttagcaagaaccttactagccatgagcacaaacacatagttgatggaaccctgatttatggatccaatttttagcatcaccaaattggggaaccaatttggggctctatgaaattgggaaaaataaaagaaaaaagtgaaattaaagaaagagatggaaagaacaacgccacaatcttaggagattgataagttgaggatgattcaccataaagaatagaattctttgataagaacctaaggtttcaaacaggaaccaagagagacactctcttaactgtgtctaatatgaaatttcat

SEQ ID NO: 9165 - DNA, 379 bp, Glycine max
  unsure (1)..(379): unsure at all n locations
gcttttacaaatagttcataagtctggttgaaatatggaagtaaccatcctgcaaacttggggcaaaagatgaatcgagtcacatcactgcttcgtctactgccaaacatatttaggattattgatgtccttgttacttccagtttcaccttgacaaagatgtcatggaccatgttgaaaatctaaattgattcaaccccatatcctgcgtaaaaattcgcaatacttcgactgtacatcattcgcatgcatccatgcttttcattggttgcattgctcattgcattctttccttgaaaaataaaataaaataaaatgaacttatcaaaaagaaaaggaaacgctntacggcgcccttaccgaactcgtgctagagcta

SEQ ID NO: 9166 - DNA, 362 bp, Glycine max
  unsure (1)..(362): unsure at all n locations
gacacttaaaactcagcttgtaaacgcaagtcagcccttggtgagccccttttttgctatgtttcatctctataggcacttaaggtatgcatgatttacccattgacaatattttatattcctaatttttatcggtgcagaaatacaagtctacaggaacatcaaaaacctaaggtccgcccttggtacaaaaagccaaggtctacctttgttattgaaacccaaggtccaaccttggtacaaaatcccaaggtccaccctgngtacggactcctacaaaacccatggtttcccctatgttagctcacttcttaagaaccacgatgaccgcagtcaaaggtccaggttgcacatgatgaact

SEQ ID NO: 9167 - DNA, 394 bp, Glycine max
agcttttgacgatggtcctagaattaatcttcttaaaatgatttacctctttaaagaactgtcttagaattctcaatatattttaaaaaaatgttaaaacctattaaattagttacctctaaatagttattactaaactgataaccaacaaaaaaatttaatgaaaaaagtaagcaatttatcatacgcttaatttaaaaacataagaggcgaatgttacatagaaaaaaacaccaatacatttaatgtataaattctagaagcaaaagatttgtcattactatgtggcagtcaaatatttagcatacaccaaaaacatggataaaggtggacactactgcaaaaacgcgattctaagacggtggatagcatgatacaacgacggtggacgacc

SEQ ID NO: 9168 - DNA, 203 bp, Glycine max
tgatagatatatgtggtgccccactttgcatatcttatctccttttctgcacttagtggggcttttttcacgatctgaaacctgaatgggagtgaaccaatctgtaaatgaatggcgaagtggtacttatataccaatatggtgttctctgggtgtgccaacatattatgttactctctgaaacaaactattattttatgctg

SEQ ID NO: 9169 - DNA, 396 bp, Glycine max
  unsure (1)..(396): unsure at all n locations
agcttctcaagtggctcattgagatgaatgtttatgggtttntctgatatttatatagggtctaaatttttcatttttatttcatatatgacttttactcacacttatactttaaaagtttaagcggtaacgacattgccattctgccgaggatgcggaagaggacctcctcggtggcttcttgcggcacgaaggagaaccgatgacggctacagtcgtgtcatcggtgaagagatattcaacggcttcgttgccactgtaaagtttggttaagtttattccttttttgtagatatgattctgggtttggttntttgatgttttaggggtataggtattttatgaaagagatggtgatcaacaacgaggggttgttggggaaaagaagatacaatg

SEQ ID NO: 9170 - DNA, 371 bp, Glycine max
  unsure (1)..(371): unsure at all n locations
agctntaatgtgtcctcccttgtttaactactaactacagtaacagttgtagcctaactatccgttagtgatgacaatagaatcaatgccttcacctcatcctcaaatttaatatgcactgactccaactgggcaagaataggattaaattcattaatatgatcaattacagagataccttctcccatcttgaagttgaacaaccgacgcatcaagtatacattgatggctgctgacggcttctcgtacatatctgataatgccttcattaagcatgcagtagtcttctcatttacgatggtgaacgcgacattcttggctaatgtcaatctgatcacaccaagagtctgtcaatctagcaagtaccattc

SEQ ID NO: 9171 - DNA, 387 bp, Glycine max
  unsure (1)..(387): unsure at all n locations
ntcaaacctactaattaatgattacctgccagccttgagctttaaattataattaaaggatttacaatatggtatgaggagaacaatgaagtcataaatcagtccaaaacgaataaaaaaacacaatatcattcaaacaaaatgtacaaagactcatataacattatataaataaaacattaaaaagaacaaatgagtataaatcttttctgcatagccaaagaaaatcttaaagtacatttggggatttaaccaaacacgtagctttcaacccacaaagtagtacaaaataaaatcaaataaatatttatctatttctccataacccatcaataaagccacaccaaaatcaatggaacancananactaataatatcatatgaatg

SEQ ID NO: 9172 - DNA, 387 bp, Glycine max
  unsure (1)..(387): unsure at all n locations
agctngtaaaattaggactttctctcagttttcacactccctctgttcataattctcaatgaagatgcagagtgataaaatataatgcaaaaggctaataaaggttggaccggataataaggattaggtttatatgacatacaacaaccttgctaacggacgatcaataaatatctccataatgacattctttgagtcctaagacatatcgtgtaatgccctacaaaaagacctaagcttgcacctaatgagaaccgctgaacttaagtctatcctaggtcggcctattaatttcagcccaaaatgaaggatgacgaatggataagtgagctttcctaagttgtagagtgataaaatataatgcataaggctaataaaagttggacc

SEQ ID NO: 9173 - DNA, 453 bp, Glycine max
  unsure (1)..(453): unsure at all n locations
nattacncctgannacttcgacnantcagcgaatcnagagaatactccagcaggccgagccccgggatatancggatgtactcaatgttgcaangaaagacacaatcacactgatgattgatacaatgacttgttctcttaggacgcactaacgcatacaactacttataataagtagaagatttcagggttcgagcccttaacttttcactgagaacaacaactggatggtcgatttgcatcgacacatcctcaattccaacattcgaagcatcgacactcaaatgcaggagaaacacatagtttgcaacccaagtatgggtgcattagttagcttttccttaagaacattgaagctaattcttgttccggtcgccattagaaaccaccctttactaaaccacttgtggaaagtgctgcaatgggcaaattccaaacaattggctattatcg

SEQ ID NO: 9174 - DNA, 394 bp, Glycine max
agcttcaacatcagaccacttcctctgtgctggatctacttcacatggacttgatggggcctatgcaagttgaaagccttggaggaaagaggtatgcctatgttgttgtggatgatttctccagatttacctgggtcaactttatcagagaaaaatcagacacctttgaagtattcaaggagctgagtctaagacttcaaagagaaaaagactgtgtcatcaagagaatcaggagtgaccatggcagagagtttgaaaacaacaagtttactgaattctgcacatctgaaggcatcactcatgagttctctgcagctattacaccacaacaaaatggcatagttgaaaggaaaaacaggactttgcaagaggctgctagggtcatgcttcatgc

SEQ ID NO: 9175 - DNA, 437 bp, Glycine max
ctaagcttacaaataccaacactattactaatgaacaagttatactttcacaactttgacagataagattcacaatgttcaccaggcctctgaagtataaaaatattaccattggaagcagtgaaatttaaagtttaaaaaatgaaaaagttactttgtgtacctgtggacagtatttttagcatgtcaattttccaagtcctgacaaaatttgttgagtacctatggagccaccaacaactgataacaatagaaatagatactcacttatttcaattccgacaaaaagatttcaaacatggaaaaggaaatctatttatctgcattaattgcttagcattgtctttagatttggcatcatatgaaaaaagagttacctgtcttatagcacacatttcaacatgttgcctacacatgacaacatttgaaccaaacaa

SEQ ID NO: 9176 - DNA, 386 bp, Glycine max
gctttctacttctcagtttattattcaacctgcaccttaccacttttgctgtacacgtgtcccaaccttaagtcatggcctctgggacccacaactatttttgtaactttttaaattacacttaaacttttgagattgcatatgattctcagttttataatgtttacagtaattctcttgtaaaaatattcggtataataaatgttttaagtaacaggaaatgtcattacattgtaatgtgaagagtattaatgtaatatttttaaaataattaaaggagtgtaatataagagtaactagtgtaatataagagtaactaagtaaaaaaaatagcatttttattcaattacaaattaatataatagtaaatatataaaaaaatgata

SEQ ID NO: 9177 - DNA, 392 bp, Glycine max
tgttactcttagtgatctaaatagtaagcttctattgacagtgatatccaattatccacaacttctgttgtttctattatgttctattcccctactaactgcaagcataacccggttctcactattaagggagtgaatgcatgttttcatgtctatacggcctatgcaattattatccccacctcctacccccaaactatgcagaaatatatcagaacggatcaatatctctacagttaagaaaatacctgctaaggatctaaagccataaataagctttattttataacaaaaattaaaataaaatatgaaacttgagatataatataatctgttggatttgaactgcatgatggtgcagttacttttgaactttagagaatcataatccc

SEQ ID NO: 9178 - DNA, 386 bp, Glycine max
agcttggttttgggcaatatcatttacctgacgtccccaaggtctcctaacccccgcgacatatctccaggtaccactctatggtcaacaaacaaaagtaggaagactgactcttccacgctttctcacatcaagcttagtggattatggggcacccatcatatgtggtactaggtggagatcgggcgatggcgcaaatcaactctcccacttccacaagtcaaacataaacacaccatccccagttgtccacctttcaactgagctcacgcactcctacgtagcccttatcctcgttcctctcagcaccgggtccccatcaacccctccaagcttccacaatatccaagcaattcaattccaaatatcatgaaactaccctaagc

SEQ ID NO: 9179 - DNA, 453 bp, Glycine max
  unsure (1)..(453): unsure at all n locations
nttgacccctganccttcgcgcctccggngacactatagactactctagctagagcgtggttaacctcgtaaccatgaattttattcttatctccgatactccaacttcatcctataaggaagaatgactggggcgtactatacctctcatgcatggcaaacgcaattatgacattgagatgccctgggaaacaccatttgactattaaccatgcattgcgtaccatgtgcaattagaatgattctaagtgaagagtgtctatgatcccaacatggncggcttatggngcctaacacatgcaacttagaagtatgtgtgaagtatacgctacccccttgttcgttttgttattagaggccgctcatgctgtgcaacattaaacacatgcatgcaatttgagatcacaagtttgtgaatcatatggtgagaagacatacatatgcagatgtgcg

SEQ ID NO: 9180 - DNA, 386 bp, Glycine max
agcttccatcaagtggtaatcatttcacaagagcttcaagtaggtgctccttaaacctccattatttttttttgctttaccttctcttccattgttgtttcttcatttttctccttgtatctcctcacatgtcttgtgctaaattttgttaacatgattctttagaatttccaccgattgatcttgctatagaagctagatttcattttctatggttcaaatttcttgttcatgttcttgaaccatgagttgtgttgagtttaggttcctttgagttttgtcttgctattttttgtggctgaaccctaaaccataaaattcttacaaaataaagtagaataaaacctcaaaaatctagagtgacttgttcacctattgtagttttg

SEQ ID NO: 9181 - DNA, 404 bp, Glycine max
  unsure (1)..(404): unsure at all n locations
taaagaattgagtctcatatcggnttaatcgatttcagtagtactttaatcgattacactattgtttgagacaatgactgattcttttaagagtctctactttaatcgattaccagatgtattaatggattacttctctcttgtttaagttgtttagaggtgaacaataacactttaattgattaattaggtcatctaatcgattacattgttcttgagttgttttccagatgttggatgaacactttaatctattacttagtataatcaattacttcattgaaataattgattaccttataggtttaatcagttacaggcggntataattgttntctctataaataaccagcttgtgttaatatatatagatcatgagatcattagagaaatactcatacatc

SEQ ID NO: 9182 - DNA, 387 bp, Glycine max
agctttctagcttttcattggtgttttttgatctccttttggtgctctaaattgtgggaatgtgctcaaatatatggggcaattttggtttgttttcttgcttgattaggttgaattaggggtttgtatgggatggccctaggcctataatgcattttggaacaatgggacattgtccccgttctcttgctattgacgcctaaacgcgcgcccactaagtgttcggtgaaatgcctcaatgacattagcgcgtgacttttgtaaggaaacaacccatggggcattttggtttgtacatattttctatttttggaatatgtattcattcccgaaaaaggctagagtaattgccccacatatatcctaggcctaggaattaaaatttta

SEQ ID NO: 9183 - DNA, 409 bp, Glycine max
  unsure (1)..(409): unsure at all n locations
tgccttgccccttgatatattagaaggactcattttcactatgaatgacaaattccttgggataaaggtagtgttgccatgttttcaaagcccgtactaaggcatacaactccttatcataagttgaatagttaagggtaggaccacttaacttttcactaaaataagcaattggatggccttcttgcatcaacacagccccaatcccaacatttgaagcatcacactcaatttcaaaagatttttgaaagtttggcaacgcaagtatgggtgcattagatagcttttccttaagaacattgaaagcttcttcttgtttctctccccatttgaaaccagcatttttcttgagcacttcattgagaggtgctgccaatgtgctaaaatccttcacanaaagtctataaaa

SEQ ID NO: 9184 - DNA, 389 bp, Glycine max
agcttttcgattgattctatgtatttgtggtggtccacattgcatttcgtgtattcttattctcgtttcatttactttttatacccccttttgacgtgcttatgccattatatttaagacatttctcgcttaaactaaagataaaataaatttccaccgatcgtttgaattgtattatccgtgaagtttggttaaaatgaattccgaccgttcggtcgtgccgtacaccacgttggaaatataacaagaggtaaacactaatatcatacataggagagagtccttttagtaaaatatagcggagaatcaagacgacgttttctctatgggatttctcagtcataatcgaagtgactaattactaaagtgaaactaacgctataatcaac

SEQ ID NO: 9185 - DNA, 366 bp, Glycine max
  unsure (1)..(366): unsure at all n locations
ttacagccgattntaagaaagaccctcttatcctatatattaaataactgaatgccagtaacctagggaattaaaacaaactaaatgaccgagtgtaactgaaattggtggcaaccaaaagtcacccccaacagccaacaagtcagccaccatttggactcccaaaaggctgaagcctatggagccaatttggcccttattactacatgaactaaagccctcttagccgatgaacccaaaacatatttctggtcaatcaactatacaaggattgagccattatttagacaaactatacactctataactgaaataaagtggcgtcatttacgcctccatttgggccatgatacaactcacaacctt

SEQ ID NO: 9186 - DNA, 367 bp, Glycine max
  unsure (1)..(367): unsure at all n locations
agctcgcctagattcgaattcattcttctctctctctcactcactctctgcgtgtatatatacgaatgaaatatatatgaatgggcttgacagtggtggcggtcgatttgggggagaaagttgaaggtgggaattaagatttgatttggggatgaaagaaagataacagggaagagtgagggcttccaagacacgaataattgaatgagagtgtgcgagtgagtgtgataggttcttgtagcgtttatcaaaaggtagtctcgtctcacggctcagatttgtatgactccattncttataacaggtgttgccagtgagaattctatttatttaataatcaagatcataatacacttctcatcctttc

SEQ ID NO: 9187 - DNA, 403 bp, Glycine max
  unsure (1)..(403): unsure at all n locations
gagattctaagagagcattcatccatttattatttttcactgtttcattcattcacatcccatacttgccttttagttagacacacaacttaatttcactattttgcagcatacacacttattaatttcatttgtacttacagttttttttacacaatatatacaaagatattatgtgtatgtacaaaaatagagtgagtatgctgtatactttgaccatttgcattcttacccagtgcctaccccaaatttggaacaaatttaccttgataattactcccccaaatgtgggataaatntgctttgaatcgcgcttgagcaaaacaattctctaaccattccaatgcattcaaatcatacaattgctcattcagatcattctcaaacacttatgttacacaaa

SEQ ID NO: 9188 - DNA, 383 bp, Glycine max
agcttaatacatatcttgtatcttatcacaaaacatgaagttagaatcttgttttttttttttatttgcttttgcttaccaaaaatgaacatggaagccatgaatccccctttgcttcttctccattgggggaggggcctttgttcttcttttgcatcatgggcaacctgtatgacaagaatttgaaaatcataactatacacacgctcatagaagatctaaagagagatagagaaggagggctgaacacttgaaccgaatgaatgaatgactcactactattcactagtcactaggcttagtggcttaccattctagctctagagataaatattgagagaagtgtgttttatacaggaatggggtgttcaagggaaatggtt

SEQ ID NO: 9189 - DNA, 404 bp, Glycine max
  unsure (1)..(404): unsure at all n locations
tctagccatggcttaactgttgctagaacttgtttctttcagagatggaggttatagagcccttcaagtttctcctggttcctacgacgagaaagtattcaaggtacgtactgcatcttcaattaataatattctttttaatacaatcatgtcaaagttttttttttcttaaatataaactcaatatggttattgagataagttataaactaacgatactctgtaccaatgttacatgataaaaaaaaccctccatggttactgtttttctagaaaaattattacataattaaatattatatatcatgatgttattaaatctctacatgatacataattgaatttattaatttttaatatacattacaaaaattattatgtatcacgtanagatcagtcataat

SEQ ID NO: 9190 - DNA, 396 bp, Glycine max
agcttcaacatcgcttcctataatatcaatgttgctggtaataaaacaacatcggttcttacgaaaaatcgatgtctgttatcagaaaacaacgatgttgttttattaccaataacatcggtttaccaaaaaccgatgttaatacgaagatatatgactttttttttataattcttactatataacatcggttatttaaataattagtgttgtaattttatgttaacatcgatttgagaaaatcaatgctaacgatattactttcaacgtcaatactttcaacatcgattaaataactgatgttcaaaccctattttctagtaatgatagcaacatctttttatttagagtgatgatattagtttatgccaccacatttcatgcatatttaaataa

SEQ ID NO: 9191 - DNA, 406 bp, Glycine max
  unsure (1)..(406): unsure at all n locations
agcttgtgtgagaaggaaacagatatgaaaatacactacaagaatatttaagtctaaattacatacatcactcacttgtgaggtttgcacttattacatccaacatccctctattttttatccctactaaaaatccgttaatttttcatcaataattacacctggccccctaccatgttaatgccatttaaatgtgtgacaaaaatgaatcatgtgcattgcacataatatttaatgatttttctctcctagaatacccttttttcttactccttanaataagggaatgtttaaaaacaaaatggttgttgagataaaaagatcaagactaagagaaaggatatatgttaaaggttatgcactccatgtctccatgcattagcaacaccatagtaatctcactcaa

SEQ ID NO: 9192 - DNA, 390 bp, Glycine max
  unsure (1)..(390): unsure at all n locations
agctntctcccaagtcctaaatgacatttcaagctagtattaactcactttaacctccatttatcacagaattcatacttaaccttccaactctcaaagcctcactctttttccactcataacatcacattcccactttctaaccctaggttagttctacccttcatctctaacagttttccatcagcaatttcagtatataaacatcataaacatcatcacaaaaaccctaaaacagaatgggtatgtttaactcatccaaacatggcaatttcaacaagctttcaacaagagtcttcacaaataaccatcatgaagcagaaaactaacaaaactacccatcatatctcccaaaaccccatacccacgaaaatcaaaggagaaagaagt

SEQ ID NO: 9193 - DNA, 395 bp, Glycine max
agcttcctcggggccatttcctgcgtaagcttacatttggaaagttagttttaccaaggaatgctactcttaagacaaaaatggcatacaacctccttcaataaacacaaacatcaatgtaaatttagagcaaactcatgcacatatttccttacgaacattcactcgcacaagatattcttctaactaagaaaaatgcacccatgcacaatcaaggcaccttcgttacctagattatttgtatgtacttccaaggtgtatttgctacctacatctcatgcacttccttggctaaatttacatacatgcgtactcaaagcatttggtgtaccaaaaattgcacatgtgcacattccggtatttctaatacttatgcatatacaaactttgtgatg

SEQ ID NO: 9194 - DNA, 415 bp, Glycine max
  unsure (1)..(415): unsure at all n locations
tccatcaagtggtaatcagagcacaagagcttcttgtaagtgctccttttacctccattaattttttgctttaccttctcttccattgttgtttcttcatttttttctccatgtatctcctaacatgtcttgtgctaaatgttgttaactttattctttagagtttccaccgattaaacttgctatagaagctagatttgattttctatggttcaaatttcttgttcttgttcttgaaccatgaattttgttgagtttaggttcctttgagtttgtcttgtttttttttgtggctgaaacctaaaccataaaattcttacaaaaatattaaagtagaagaaaacctcaaaaatctagagtgacttgttcacctattgtagttntgtcatagaagtcacgcctagtcatgaaactt

SEQ ID NO: 9195 - DNA, 391 bp, Glycine max
agcttgccttgccccttgatatatttgatgtactcatggtcactatgaatgacaaattccttgggataaaggtagtgttgccatgttttcaaagcccgtactaaggcatacaactccttatcataagttgaatagttaagggtaggaccacttaacttttcactaaaataagcaattggatggccttcttgcatcaacacagccccaatcccaacatttgaagcatcacactcaatttcaaaagatttttgaaagtttggcaacgcaagtatggggacattaattagcttttgcttaagaacattgaaagcttcttcttgtttctctccccatttgaaaccaacatttttcttgagcacttcattgagaggtgctgccaatgtgctaaaat

SEQ ID NO: 9196 - DNA, 336 bp, Glycine max
  unsure (1)..(336): unsure at all n locations
tgccttgccccttgatatatttgagggactcatgttcactattaatgacaaattccttgggataaaggtagtgttgccatgttttcaaagcccgtactaaggcatacaactccttatcataagttgaatagttaagggtaggaccacttaacttttcactaaaataagcaattggatggccttcttgcatcaacacagccccaatcccaacatttgaagcatcacactcaatttcaaaagatttttgaaagtttggcaacgcaagtatgggggcattagttagcttttgcttaagaacattganagcttcttcttgtttctctccccatttgaaac

SEQ ID NO: 9197 - DNA, 396 bp, Glycine max
agcttacccttatggcttgcctctttacttcactccccgtgccgctccggaagagttgagccaagcccctaccttcgaggggcaacttcccccttatgtcgactaccccctgtaagaagatgatgaaggagatgcccatctaggccctctgcttcccctcaaggatccgcccccccatgaattaccccaaccaaacatagtccaccatgtcccgtcttcacccgcacccgtaaaagaatttgttcccttcgcaaaagataagggaaagattgattcacttgaagagaggctaagagcggtagagggcctcggcaattacccgttctcggatttagcggacctatgtctggtacctgacatcgtcatccctcccaagttcaaagcaccgtattttga

SEQ ID NO: 9198 - DNA, 432 bp, Glycine max
  unsure (1)..(432): unsure at all n locations
ntgagaaagagacagtttgattattttcatcgttagttggacatctgtatgctccaacttgaggggatggtaagggggataataggatattttaggaaattaagaaactatatttcaggattaggagattattttgtattagatattactgtagatacataattagttgtatttatgtaaattaggtacctgtaatcccgtatatatttgcatatttgataatcaatagacacataaatattttttgattctgcattactttctattacacactcgaagtaccaatctaacgcaaactgatttcgggtattcaacagaatgagcaaaattaatatagttatgaagcacaattcatacgactttgacgctgaanattagccttgataaccaaatgatacaaacacctncatggatcacaaattcagtatctca

SEQ ID NO: 9199 - DNA, 356 bp, Glycine max
agcttaaggttttatgttgtgattatcttaaaattccttacctggaacggaggtcgagggttgtcattgtgtgagttctacccatggggagacctaacttaaaaatccattctaacacatctttaccatcaaatcgtggaaactcaagcttaaaattccttatctggaacggaggttgggggttgtcattgtgtgagttctacccatggggagacctaacagaaaaatgggtggttgacaacagttactcaatcgcagcttcaattctatcaatcctggagccatgattccccaccatctgctcaatgtgaaggtccacagaccgcaacagttttgcctatttccatgactttcat

SEQ ID NO: 9200 - DNA, 413 bp, Glycine max
  unsure (1)..(413): unsure at all n locations
tattaagccggaaatgcttcacatatcaaatatcaatactaaggtttaattntgccaggactctgggatatactctntgaagttgtggcagctttgtaccatgcggagggaagtgtaaaaaaacagtggcttattgatgctgttgaaattagctgtgtatccagttttccttccacggtattagttcagtactgatacataaattacaacttatttatagtaactttcatgcatataatggaaaactttaaaaactaaattcagcaagaattggtttgtgatcagggttgataatttcttttttggaaaagcaggtaatacattgattntcagacattntgaaaaccaaaattatgttggtttgttgtgaaattttaaggaaatcattatcgttaccatcatcattattattt

SEQ ID NO: 9201 - DNA, 388 bp, Glycine max
agcttgctcaaactggatttacactctaaaattctaccgaatcaaaatttgactcttcaacacccaaatttgccctagaaatggctctttgttcactttggtcatttgtttttccctctagcatagcctaacctttctcataagtcctaaatggcatttcaagctaagattaactcacttaaacctctaaataccaccaattccagatttggccttccagccctcataaattcactctttttccactcataacaccacattctcactttccaaccctaggttaactttaccattcatctctaacagttttccataagcaatttcagcatacaaacatcacaaacatcatcacaaaaacccaaaaacagaatgggtatgtctaactcat

SEQ ID NO: 9202 - DNA, 228 bp, Glycine max
  unsure (1)..(228): unsure at all n locations
ctggagctgaatcatcaaccgctcggactacttcagactggagacatcgatgctatggacctagacctgatataacgactttgtcagcgatagcgcctgactctgtgccatgtattactaaagagaaacaaaaggcagagtgcacanagactcctacatctatcctggctggcctggaggcacgcatgatcaactgcctatgacacgaaagcattctatcactactgg

SEQ ID NO: 9203 - DNA, 387 bp, Glycine max
  unsure (1)..(387): unsure at all n locations
agcnttggagaaattctaatggctacattttttcactcgaatgtccaattcatgtgcatcatatattcagatccttgaaattgaccacggaagctctcggcaaattcaaacggccataacgtttgactcgaatgtatgatcgatgcccatgatatatcgagacgctcaaaattgaacaaaagaagctctcgagaaattcaaatggctataacttttctctcggatgtctgattcacgtgcatcatatatcgagacccttgaaattgaccattgaagctctcgacaaattcaaacggccataactttttactcgaatgtatgatcgacgcccatgatatatcgagaccctcaaaattgaacaacgaaagctctcaaaaaattctaatg

SEQ ID NO: 9204 - DNA, 403 bp, Glycine max
  unsure (1)..(403): unsure at all n locations
tcatgagagagtcaaagatcaaattgttaggattattaaaagctatgctaaacaagccaacaaagggagaaagatagttgtcttcgaacccggagattgagtttgggtgcacatgagaaaagaaaggtttccggaacaaaggaaatcaaagcttcaaccaaggggagatggaccatttcaagtgcttgaaagaatcaatgacaatgcttacaaagttgagctgcccggtgagtataatgttagttccaccttcaatgtctctgatttatctctttttgatgcagatggagaatccgatttgaggacaaatccttctcaagagggagagaatgatgaggacatgaccaagagcaagggcaaggatccacttgaaggacttggaggacctatngatgangacatg

SEQ ID NO: 9205 - DNA, 388 bp, Glycine max
agcttgacaataacagcctaatgttttatatgatataaaatacatgcatcacaacattgtctactattagaatttccattgccttacatgcaattatactcattcatcctatagttatcacatgaaaaggaaagctgaagagcacttcttggaagagcaatttgctaacatatactttgagatgagtctagtttattcgattccatattattggcatcaaaatcaacgtaagggtccacctggaaagcaagcaatacaaaattcagacacttgataaaagacaaataaaaatcacttcaataacttattgatttataatcagcatgtaaatgcatattcttctaagcaacaaaactttttacaaagacaattctcacatatataaaat

SEQ ID NO: 9206 - DNA, 397 bp, Glycine max
  unsure (1)..(397): unsure at all n locations
ttataaaatctaactaacaaaggatcttaatgtttcatagttaataggacaaggatggagtttgtgaatgtccacctcacctacgaagcagaaaatctttcacgaatgacaacacttgattgagttctccaataaaattcgaaaccaaattctcttgctgctactagaaaagccctttcgtcagttagctgattcaaccagttaccattcctaagggaaaaaccaaatccctttagagcaggctttcgaactaataaaagatatcaatataaggacagtacatgatataatccatctttnctttctattgtgcttctttttgaaggagatctggtagaaattctgcatgactttgctgtcatgtccagtgaaaatgaccactccatagacatgatca

SEQ ID NO: 9207 - DNA, 391 bp, Glycine max
agcttgacctctgggttgtctctctcattttattctacatgaaccaagctggttgcaattttcaatccttttgtagttttatccttaatcgggcaatgagagctactctttaatttgtgcagttgtatatatatactgcgctaaaggttcatgatgctgttatttttaacatgaaacacttaatttttctagcatttgttttacaagtactttgaaggaacttaataggaaggaaacagaaataaaataatagaggaggtttattgatattttataacctctctgattctttaataaattctaatttttgccccagatttacctgctgtattgttcttctttccaggaaagtaatggaagatattagttattcaccagaaggaatttaccc

SEQ ID NO: 9208 - DNA, 373 bp, Glycine max
  unsure (1)..(373): unsure at all n locations
gagacactatacaactctcaagcttttacgtgattggaaaacctacaattttactgtttcttaaaatggctttccccctctcctatttttgagtgtttaaatggatgtttccgattggttaattcaaattctttcagatttatcatctaaatatttatgagctttacacactatgctcggctgactatggatccttactgggggcaagagatcgactgggagatgtaagtattctttcttaagttgaggctgaccaacaataaatccttttgataatttgtagtgcattattaatatcttttacctatcgctagtgttgtcctgtacatttcanaatgtaaaaactgntggtataactattgtctggtcatat

SEQ ID NO: 9209 - DNA, 511 bp, Glycine max
  unsure (1)..(511): unsure at all n locations
acccgcctccaacactcaanaatgatgtaggatgaacagctgttgatacaacctactcaccagcatacgcactagagaannattgaatcgtgtcgaggctggcaagcccggaactgaagagccgcggcaccgagctacaagtgtgctttgattttgacacggggnaacaccaaacattgtagtcaccctaccgagccccaaacatgctattacaaggactgcggcacactgggagcgcaaaacattccactatgctagtgtacccagaagccgggataggcgacaaaattatgaccgacaacatatagagtcagtggaaaaacataaccacagccagtgaggtgagcttaagcgattcaccgcacatcacatctgaccaaggagtgggccaccaaacgtgaaaaggccaataaacaaaaactagacgcgcatacaacgggcacaagcaagaattagaacataatattatactagcccttcatcagactgggcacaaacccaccttccaccn

SEQ ID NO: 9210 - DNA, 450 bp, Glycine max
  unsure (1)..(450): unsure at all n locations
atganccttggacttgaggcttcggaaacaggacacttaaatctaagctgggaagatactcgagcttataaaatgtatttgtttattgcgagctcttgtattagagatgaaataactatgaatagaagttagcgagatggaaccaggttatctttactttattaggtttgaaaattcggagtaataagtcatttgaatccaaatttgatccgtgcattacccagtagtgggattagattggtgcactcgacttattaatgtcatatatcttaataatgcagaagaacatgatgagtctacaacttaacatatatgttgcgtgcataatgaacatatttatatcacgagtatgtgtacgaaagctgctatttaatgttgtattatgaaacatcaagagacttacatatgttaacttgcctactgctcttggttaataagtcacttattaag

SEQ ID NO: 9211 - DNA, 339 bp, Glycine max
gaaacatcaccaaataacaagctatgttgcacgaaatcatggaaatgctttgttctcctcctattagctcttttggtatactctcatcacctgaaatatatttcatatatagaaatagttaacatgccatgaatgggtgatacttaaattcatatccttaaaatttagaaagaaaacataaagacaaataacttgtaagcaagggacaactatatcgacaagctttatattactatactatgtattttcctagtgcgtaaattccttgagtagaatgaggtcatattcatagaattcgaggtggagaagatatatatttcaggcttgcacgtaccttat

SEQ ID NO: 9212 - DNA, 239 bp, Glycine max
tgccatttaaaaaggcattgttaatatcaatttgtttaagatcccaatgagaggaagtgactgaagtcagaatagttctgattcttataggtttcacaactagggaaaatgtttctttgatatcaaaaccaggttgttgatggaagccttctgctacaagacgtgccttgtacttactgacagacccatctgaattatgcttgactctaaaatcccgcttgcaaccaattggttgccta

SEQ ID NO: 9213 - DNA, 394 bp, Glycine max
  unsure (1)..(394): unsure at all n locations
agcttttaactgaatttgcaacattccaattgtttttcaaatggtgtaatcgattacaatatattggtaatcgattaccaatgtatctgaacattgaaattcaaattcaattgtgaagagtcacatcttttcataaaatgctttgtgtaatcgattacatggttttggtaatcgattatcagtgacaagttttgaataaaaatcaagagatgtaactcttccaatggttttctcaagattttctcaaggttataactcttccaatggttttcttgaccaaacatgaagagtctataaaagcaagaccttgacttgcatttcaacaattcttacaatctttntgaacatctttttgaacttcttcttcttcttcctttgccaaaagctttctaag

SEQ ID NO: 9214 - DNA, 396 bp, Glycine max
  unsure (1)..(396): unsure at all n locations
atggacctgagtgttgcccagctacattatatcttctgtaatacttatcacctctatcatatctaataattttcacatttatgtctaattgccattttacttcattgtagtaaatctttaaggcatccattgcctaagaaatctcgggcagtaagtagacataaccataacgtgaataatcatcaataatggtgataaagtatctttccttttcgaagagctaacatcaaaaggtccacaaatatcagtatgcacaatttcaagaagcagagtgcttcttgtagctcctttctttgtatgntttgattattgtcccttaatacaacccacacaaatatttagatccgtaaagtctagataagagagactttcattctttattaatctttccatcct

SEQ ID NO: 9215 - DNA, 393 bp, Glycine max
agcttccatctgatgacagggaagtgttcttattcaataaaacaaggcttcagaacaactcgcctgttccaccgccggagcaagttgatattcccagtcatttggagcctccactgccagcctcctcccatgatcctcacccccttgatgatgcttcggatcctgctttgaaggctttaccttcttacgagcggcaattcaggtaccattatcatcagggtcatgtgatttatactggtaccatgatgaaatatgagcattgtgagaggcttttgagggaacagatggtccaagaaagagcggtggaggttgcaaggggtaatttggatcagtactatcgaatgattaaccaaaactatgtggacttcatgaaacgttatatgcaacaacaca

SEQ ID NO: 9216 - DNA, 390 bp, Glycine max
agcttgagcttggttcaaccccgttatccaaggaatggaaattctgattgccaatacttcaacaacatctcatagggatgaatgactcgggcatactttaagcttatgcacggaaaatgtaattatgaaattgagatgcccgaagaaacaccatttcctagttaaccatgcattaggtaccatgttcaattattttgttttgttgttgtgtgttttttttttagaaatgggtttatgatcccaacatggttggctcatggtgcctaacacatgcaactaagaatgtagtgtgaagtttcacgcttccccttttttgtttttgttttgtagaggaaaacgcatggatgagcaaacatgaaaacaaatggtatgcaattttgcagatcaaaa

SEQ ID NO: 9217 - DNA, 410 bp, Glycine max
gatcttaagcaccgcggctgcagcttgagagtttattacagctttgtactgaatgtacaaaatagattagtggaatcaatgctttagaattaaccgaagtgtttggtacacatctcatctcatatatatatatagaatccttcactcccccttaagtttttctttttgtcaacaattccccccttaattaagctgatgtatgaagatttacaatacccaacttataaaaaaaaaatgaattcaagtctactacccacatttgagtggacacactatttataactccttcatgatgcgttggccttaataatgctgacttttggcattgttgatgctatacaaagtaagtctcaagcaccaaagtttgaaagaattgacactatttagactacactaagcctaaaccacaa

SEQ ID NO: 9218 - DNA, 411 bp, Glycine max
  unsure (1)..(411): unsure at all n locations
nttaagacggatttgcgagaggccaaattgtcttgaaactttttaagctggtatccaaccaggcctaaatagttcgattgaatacctgtacgacaagacaggatctgtggattcaaataaaatgaccatatttcgttcacttcttcttcattgtccggatcgacagcaggaaaatagtcagtgaaccaagccgggccaacctctcgactaatgaatggagcatgttggggaagaaacttgtcaaagctcagaaaaatcctcatgtactttaagaacagcttttccgagttttgatctaaggtattgggtgttaatcgaagtgctctctggccttcgatcgagcgatgtgcaacttcttcagcataatcttgtgggattattaatcccatttcttgttcgaaagtggaatta

SEQ ID NO: 9219 - DNA, 397 bp, Glycine max
agcttgtagcacggctggacatgatatatgtcagggtttggtttagttaaaggataaaaggggatgtcccacattatttccatgacacaaatgcaacaatgatgatttggaaattttatgcaaaactagtcatgcatgcacctatgtggacactcaagtgtcgaaaaactttttggtcatgtgatgctagggctcataattcatttttctattttagtcaaccctgtgtttccaaaatatgttcttttatcaatttgtgcattcatccaagtttattttgggtgtttgaaaaactttgacagcatttacccttcaggcatacacatttttttcaaaaactggttatgatcagtgaattttttcaaagaaaagttggaagttatctcttttcacaagc

SEQ ID NO: 9220 - DNA, 362 bp, Glycine max
  unsure (1)..(362): unsure at all n locations
cagctntgaatccattcttgcnttgtatagtttgatcttcatatcgtctaattttggtattctttttcttcattttaagtgagtttcgaccgatcgtttaagccgcaacctcacttaatcaatgctaaaatgaattccgaccgatcgtttgcattgtaatctcatttaatcgcctttaaaataaaattcaaccaatcgtttaagctttaacctcggttaatcataaaaaaggtaagtttcaaccagacatttactttgaaagttctctctaaatgagttgagaaataaccatgtgaaactaaggctaaaatctactcacaaatcaagattttgcccacagaaaggtcatgtgatacagtttc

SEQ ID NO: 9221 - DNA, 365 bp, Glycine max
agcttcagaattcaatttctatcgtctcgatatattacaggtctcaatcagacatctgaggaaaaaagttattgtcgtttgaatttgctgagagcttcaacattcaattttgagcgtctcgatgtattacaggacttaatcagacatccgagttaaaagttattggaggttgaatttgctgagagcttcaacattcaatttcgagcgtctcgatattttacgggactcaatcagacatccgagtaaaaagttattgttgtttgaatttgctgagagcttcaacattcaatttcgagcgtctcgatattttacgggactcaatcagacatccgagcaaaaagttatcgtcgtttgaattagctgag

SEQ ID NO: 9222 - DNA, 429 bp, Glycine max
  unsure (1)..(429): unsure at all n locations
gacctataaaactcagctgngtacaattctctcatcctatcctccaactcttatgtagaatcaccctcatcggttccccactgcaccttcaccaacgcgatctcctttcctctcaacgacttcatccttcggtcagtgatcttctgaggttgtgctctataggtgaggttatccttcacctgtacctcgtccactgcaagtatatgtgatggatctgggttgtaccgtctcagttgagagacatgaaacacaggatgcaaattcgataaactcggaggtaaggcgatatgataagctacaggcccaatcttcttcanaatctgatatggacctagatactngggtgtcaacttcctagccttaagagctcttccgactccagttacgggagaaaccttcaaaaacacatgttctccttnctgaaaatct

SEQ ID NO: 9223 - DNA, 382 bp, Glycine max
agcttacaaatctgttttaagtccttgcccataaataaaataaaatctagataagataaaatctagatgaaataatatctagatgaaataaaatctaaataagataagataagatctagataaaataatatttagatgagataaaatctagatatgataagataaaagaacctttgatactttgtgaatggggatacaaaagaattctcaggcggttagttctttgaatacttttgtataagggaatgggaagaatcaaaagaattctcagactgtgtcgttttgaattctttgacaagggagaagagagacacaaaagaattcatgcggttagtcctttgttcttttggaaaagggagaagagagacacaaaaagaattca

SEQ ID NO: 9224 - DNA, 319 bp, Glycine max
ggactcacaccaaacatgacaagtttaacatgctttcatcaaatctcttcagaaataactatcataaagcataaacctagtaaaactacccatcatatctcccaaaacccaatacccacgaaaatttatgtgagaagaagtctacccaaaccttgaaatttgaagtcccacacgtagagatgcgcttcacgactccgaaaatggcttccattcgcaatttggagcagaaatggtgaccaaaggttggagctttgttggagcttcaatggtggaggaagaagaaaggaatagcaacgtgagagagagggagaaaagcttc

SEQ ID NO: 9225 - DNA, 380 bp, Glycine max
agcttgaataccaagtgtatgttgtgctagtgaacgacaaaggaaatagttatagccggtacgatttaccatcattttgactagcttccctacattgagctgtggaatagctaatgtgctccatggtggatttctcatcttcgcctaagaaggttgcaaattttgagatttcctcttggaaaatggattaccttgtcaatccattaaaggtaagcttttatgtacaccgggctgtcaactggcttcaactgcacctcaaaattcttacaaattgcatttgctatcatattagcatctatggtttgagggacagtcgttctcacctcagtccaagtaggtatggggttctctgtcatagtggagtgttgtttaccatccat

SEQ ID NO: 9226 - DNA, 329 bp, Glycine max
tgttgttgcgatgaatcaaaaaaccacaaaatgttttaaatgatgcacatgcaacatcaaaacccaacaaaccctgaccaaaatggtacataacaacaaaccactcaagaaaaatcgaaaagctttgtatacaaaacaacaaactcatgataaaatgcaaaaagggtcgaacctttggcttgaaataccatcatacctgcaaaccaaaccgaaaacgaacaacaaacaacgtttatgaacaaaaaggtcgaaccttgtggcttgaaataccatcatacctgcaaaccaagccgaagacgaacaacaaacaacgttttttatgaacaaaa

SEQ ID NO: 9227 - DNA, 382 bp, Glycine max
  unsure (1)..(382): unsure at all n locations
agcctgctagctacgttctcaagtcacataatattnctgccctcatagatcagatgattttctttacttgttaatcatggtttactgtctagtgaaccgcaatntgttttcctatgaaagatagaagtcatttcactgttctgtaatctgtatttcactgtttctagactctagactgcccttagattgggtgataaggacttatcttgttcttaaccctgattttgggctttcatgagttgtttgcagcccacatgtgttcaaatcatgcccttctactaaggtagtaccacaatttgtcttggaaaagaaaaaaaataacccctgcctgttccgaaacttttgggtggtcatcatcaggtttggcccatttcatctcagt

SEQ ID NO: 9228 - DNA, 394 bp, Glycine max
agcttgactgacaactggagtcactatattgtacaaagcaacaatgatgttaaaacattgaggaactctgtttcacctaggaatgaccttacctcatatttagtaagaaaattatgtgcaaaaaattcatgcattatttaaggctcttaacaatccccaacccaccatgtttgagatattattatttgacagttattgactgtgcttgtacaaatttcaaagccacacaacagattttacaacatggctagttttggttctgaaccaccacccatcacgtagtctagcaattgacatataagacaactttggtagaatgtgcaaaagttacagcaataagcataataattaaaaatgttaatagacaacaatttaccgaaacaccagcaggagg

SEQ ID NO: 9229 - DNA, 345 bp, Glycine max
aaagaaataaaattcgacaaaaatataagagttcgagataaaatttgtcaaataaataatattatgatcttattaaaatgtttaatggtgcttaattttaaaaattttctaaggtttctaccataagagctctttttttcaccccatccatgttgtcacatgtgggtgaaaagaggaaagagagggatgggatttctcttgctttaagcataacgggccaaagtgggaggcccacacgaagggttattagctcagtagtaaagtgtgtccttgataattgtgtcggcttggagtggagtgagacatgtcatcgaatatcaaagagatatccacttcgttatgaaa

SEQ ID NO: 9230 - DNA, 392 bp, Glycine max
atgcaagcttagaaagacaatactctatttataacgtggagcaaactagaagagtggtccacaatattcaagaaaggcatatatgaataattaacaaaaaataaagcccaataccaagagttggggcgtaccactagtcgtatatcattaaaggaattaagttgaaaacacataatcataaacaaccaagagcaggtgaatataatcatcatgttcagtcatactaagcaagtattaaaagagatgctaagtattcaaatttcataaaaacatagccaaatacaaggcttagaaacaaaatataattataatctaaatctattatcagagaatcaaaacttaattctaagtaacaaaaagtagttatgaacacatacatggtaactcattac

SEQ ID NO: 9231 - DNA, 283 bp, Glycine max
  unsure (1)..(283): unsure at all n locations
ngagaaagngcttcggattctgatgatacatttctgactctatggcatgagatgaaattcaaagattggacctcttgcttgctgttattaatgaatagcttaaacacttgtgcttgagtgaaacagtaacagtgagactgtggtttaagctactttacttgatatctgtcttatgcctaactccatctatatgatcatgttacattttattcttctctttagataactgcataccttgtgaaagacaagtgatgagggcattttactccattatcttattatg

SEQ ID NO: 9232 - DNA, 369 bp, Glycine max
  unsure (1)..(369): unsure at all n locations
agcttcaggttgttcattgactccagattgctggaaagtatgacaaagatctgcagaagaacatagaccacatagtcttgcaacaagtgtagaattctaattcatggcaagctgagttactaggttgaccaaggcatcaagttttccttcaagctttttattttcagtagatgaagatgaatccgtggccacctcatggnctcctctaagaacaataacaacatttcttgcactaaattgttgggagttggaatccatcttctcaatcaaattcctagcttcagcaggggtcatatcaccaagggctccaccactggcagcattaatcatactcctctccatgttgctaagtccctcatagaaatattg

SEQ ID NO: 9233 - DNA, 229 bp, Glycine max
  unsure (1)..(229): unsure at all n locations
ggtgctattgcccaaaaccaagcttgaccaatcccgacccaacccgggcatagtctgtcagtgagaacctgtgatgtacctaagcaggcgagctcctggctgtccacagattaaaggaaaacaagaccacaaagcaaggaggcttgtggtggctggccagctgngaattttgtgtaatatgtgagatatggcctctggntatcgattactaaaggtgggtaatcgaata

SEQ ID NO: 9234 - DNA, 370 bp, Glycine max
agcttccttttagtgcgtcacatttaaagccgagctcgatggtggtgcaagcctttgatggtactcggcgggaggtgatgggggaaatcgacattcccattcagataggcccccacacttgcaatgtggtgtttcaagtaatggatataaaccccgcctatagctgcctcttgggaagaccgtggattcatgccttgggagtggtcccctcaacgcttcaccaaaaattgaagttcgcagtaggtgggcttttagtaatagtgtcgggtgaagaggacatgttagtgagctgcccttcctccgcaccatacgtagaagcagcggaagaatcgttggaaacggcttttcaatcctttgaggttgtgagctg

SEQ ID NO: 9235 - DNA, 388 bp, Glycine max
tctcctatttttatctaatctttcgttgattttatgaaattatacagtaatatatttttcatattggtgttttcaggattcctagtgaggatgcagagtctcaactcttaaaaggcagaaaaaagtgcagtggaagcttttgagacagcccaggttatgggtgttattatgtttgacttgccaaattgccctaagaaacattgtcaactagagacatccactgttaatggagaaggatcatctacccatactgttactgcatcttttgaaactaccttgaggtgggcagagaagtagttgttgcagtcaaaactgcatttataaggcttgcaaattgtccttcttttagtaacggtgaattcaaggaactactaagaaaaaatagtga

SEQ ID NO: 9236 - DNA, 394 bp, Glycine max
agcttacaaatctattttaagtctcttcccttaaacgaaataaaataaaatctggacaagataagatttgataaaataaaattgtatgctctcttcaagtccaagcccaattccggattcaagcccaattgcttataattctcctgaaattaaattaaaaacacaaaattagtcaagtaggcccaaatgataaacttgcataattaatttgacaattaaggctaatcagtaattaaaatggtgataaaaagggttaagaaataggagaaaataatgacacatcaaatcctcccacacttagccttttgtactcctgggcaaaattaaaaaaaagaagaagcaaggaacaaatctagagacattaaagagaaacaaacacaaaaacaattacata

SEQ ID NO: 9237 - DNA, 527 bp, Glycine max
  unsure (1)..(527): unsure at all n locations
cgcccgccctcaaatctaacgttagtgggncggtgcagtacaatatgaccaaccgcgnccnnnaggnacggggttgacctgaaactcgaacccanggaaatcaaaactcacgagccacgcaggaacacaaagaatctgcatttatcctgctacgactctgacgaacacgaggactgcagggagatgatcaagactcagacaaagacctccaaaccataccagagacaatacaacatccccaacatcgtaacccaccaaatatgctaaccccacagagaatgtcatccccgagggtgtcacaccaagcaaggcaaggaggggaaacccgtacctatatggcctatacgtgtaggcattgaaaaacaccatttaacatgcacagcagaacttcactgcataagggtgacagcaaaacaccacataaacaccaaagtcaaacttgaagcaatccccacgaaaaaaacgaccaaggccagcacgcatcatgtattatgcaagtgtcacattcatgacaggaagagcagaag

SEQ ID NO: 9238 - DNA, 388 bp, Glycine max
  unsure (1)..(388): unsure at all n locations
agcttgtagaatggctagacatgtttcatgtcagggtttggnttggttcaaagataaaggggatgccccacattatttccatgacacaaatgcaaagatgatgaattggaaacttcatgcaaaactggtcatgcatgcacctatgtggacactcaagtgtcaaacttttatggtcatgtgatgctagggctcaggatttaaatcaacccaatgtttccaaaatatgttcttttatccatttgtgcattcatccgagtccatttcgggcgtccggggaaatttcacagtgttcacccttcaggtgtagacacattttttttcaaaaactagttatgatcaatgaattnttttcaaagaaaagttggaagtcatctcttttaaaagcatg

SEQ ID NO: 9239 - DNA, 394 bp, Glycine max
  unsure (1)..(394): unsure at all n locations
ntgacatattgaatctacagctttttttcttcaatggtgcatatgaatgtgtgacggattctgtggagagtctgggtttcagaagtgtggatgagagttttggagatacaactcactggttcgtttctcattcccaaaccccacctcatgcacaaatcaacactccttcttgttggacgccaatccaagttgagaggaggattgagttcaatgagcattggaaagtaagatttgactaaaataaacacactaaccaattttgcttctcaatagatataattttccttgttgtacaatgaaccttgagatggtcaatgctgtgtgcttacaattgcgtttgggatttgcaacttgaaacataatatttacttgatgcatcgatcatgacaatcac

SEQ ID NO: 9240 - DNA, 394 bp, Glycine max
agcttgcttctacaatccaatcattcagagatggaaactaaacaacatccttcaccacaaaacccactagttgttgccaacatgcataatgaaagactgcaaccacctcctcaatcatctgaattcacgccacaacaacaacatcatcaagattatggcaacaatccgttgttcttcagtgctagtagagaagactttatgagcaacctcatagatatagatcttcaaacaccgaagtctgcttatgtgtacatgcaaagtatgctcgtacattcatttggatcctttcaccaaactattattagtaattcttcaaccaatcaaccaaattttagtgaaagagaaacttgttgttactaatgaacaacttcaatccaaagaacatggacaagtt

SEQ ID NO: 9241 - DNA, 366 bp, Glycine max
  unsure (1)..(366): unsure at all n locations
agtgattgatgagaatcctcatgtaagtgctccataaggttctcttccttcaccagagagtagttcgggttccggttcgggttcgtggtctacgaaaggtgaatctcctccagctgataagcataatcctaatccatctggagattctagtcctaatccaaagtctagtagttcttttgagtcgaataagtcttccattgggaaaaaattggttccaattgtggctcctatcgcaagtgttgcagctgtggcttttgtgctcattccgctttatgtgtattggttcaagaagaaaaagggtgtctctgagggtccagggtcattggtgattcaccctanggatgcttctgatctggacaatgtgct

SEQ ID NO: 9242 - DNA, 398 bp, Glycine max
agcttgcaagttataagtgtagtgttattaaattttgaaattaaatgtcgattgtgactgtcgttagtggttgtcatggacatggtgggtgaccgacaaattcggcgcatctcagtatatggaagaaaaggaagtttccactttcctccactccatcattaagaatttcagatacaattgctgtaagtaaatgttactaaaaattactttatataattcaaaatccaatcaaaatatgaaaaaattattctgatctctataattacacaactttagtttttagtcactatatttaaaaatcattcattttaatgtctataccagtaacacctttaaattccttttagtctttatcataacacaaacatattttagttcttgtaacaggaaggatcaaa

SEQ ID NO: 9243 - DNA, 415 bp, Glycine max
tccacttgtatactacaaccataatagaagctttctgtttttccctcccgtggatgtagccttactcaaggtgaaccacgtaaatctgtttgtgtgttctttctctctcttttctctccttttcaattctgctgcaaaactctgtgtgtatgatatttctgttctgctgcatctactgctgttgttcttgcttgttcttcatcacttccataacaaactggtatcaagagctcaagttgcgatcaagggaattcaagattctcatctgaatacaaagatcaagctgcgggagtcttgcttctggttctttcgctgcttctttgtgatcaagaaaattcaagatatcatgtcacacacagtcaggattgagaaattcaatggaaagaacaacttcaatctgtggtgcatcaagatg

SEQ ID NO: 9244 - DNA, 390 bp, Glycine max
agcttgccacccagctcttccattcgagctcagctcgcccaagcgagcaaggttgcttcctccagaagcaacaaccttatggaggaatcttttgaagggcccaagtgggcctggttgctatttgcacccccatttttactaaatacacccccttgccttttttggtgattcttttttcgtaaagttacggaaacttacgaatttcgtaacgatacttgttttctttccgtaatgttacggaaccttgcggattacataatcatcccctttttgacttacggaatgttacggaacctcactaattgtgcaacgatgcctccttttgatttccggtatgtcacggaaccttacggattgtgcatcaatattttcttttgatttccggcatgt

SEQ ID NO: 9245 - DNA, 404 bp, Glycine max
tcgaatggtcatcgcttcattcttgtgtgcatatattacttcaccaaatgggtcgaagcgggttcttatgctaatgtcacgagatgcgtgagtcttagcactcatcaagacggagctgatttgtcgatacggactccctacgaagatcattattgacgatggcactaatctgaacaacaaaatgatgcaagaaatgtgcgaggatttcacgatctatcatcatagctccagcccttaccggccaaaaatgaatggggctgtagaggctgccaataaaaatattaagcaaattgttcagaagatgacagtgtcatacaaagattggcatgagatgctgcctttcgccctgcacagatatagaacctccgtacgaacttctactggggcaacgccgcattccttag

SEQ ID NO: 9246 - DNA, 389 bp, Glycine max
  unsure (1)..(389): unsure at all n locations
agcttcacatggagctatatcaatgaggagcctccagcagcagcaacagcagaggatgaggatgagctcactcctcctgagcctcttgattttgatgcaggtacacatacggctcaggaggaggaggctattccagagcagattccagagccatctccagcccctgcgtatgcacctgatgatgccacaccagtggttgagccgaagcagactattcaagattctttagtagctctagcactggatcttaatgaagaccaaccacaagaggagcaggacgtttaaattatttgcattatgaacactntagtttaatttcagttattttatgatttatgtcatttaaatttcagcttttatgttttagtcttttaaattcagtagcatag

SEQ ID NO: 9247 - DNA, 293 bp, Glycine max
gtgtccactcagggaacacagagaacactgcgtttatcaatgctgagactctgacgaacgcaagaactgcgaggagatgatcgtgtcttaaaaatatacctctaaaccattccaaagaccatagcacattattaacatgttcaccctcctaatatgcaaactcagtagagaatgtcattcccggcggtgttaccccaagcttgtctaggaggggaagcctgtacctatatggcttgtacgtattgggtagtgaaaacaccaaataacatgcattgcagtaacttgttgcatat

SEQ ID NO: 9248 - DNA, 381 bp, Glycine max
agcttgaatcggacatctgtgtgtttagttatgaccatttgaatttcacaagagcttccgttgttcaatttctagcctctcgacatattatgcgcacgaatcggacatccgtgtgaaaagttatgaccatttgaatttctcgagagtttccgttgcttaatatcgtgcgtatcgatatattataagcccggatcggaactcactgtgaacagctatgaccatttgaatttcacgagagcttccgttgtctatttacgagcgtctctatatgtgatacgccagaatcggacctctgggtgaaaggttatgaccattcgaatttctcgagagcttccgaagttcattttccagcgtttcgacatgtgattctcctgaatcgga

SEQ ID NO: 9249 - DNA, 407 bp, Glycine max
  unsure (1)..(407): unsure at all n locations
ntctcccacgtcctaaatgacatttcaagctagtattaactcactttaacctccatttaccacagaattcagacttaaccttccaactctcaaagcctcactttttttttccactcataacatcacattctcactttctaaccctaggttagttctacccttcatctctaacagttttccatcagcaatttcagcatataaacatcacaaacatcatcacaaaaaccctaaaacagaatgggtatgtttaactcatccaaacatggcaatttcaacaagctttcaacacgtttcttcacaaataattaccatgaagcagaaaactaacaaaactacctatcatatgctccaaaaccccatacccacgataatcaaaggagaaagaagtccacccaaacctgaaattt

SEQ ID NO: 9250 - DNA, 361 bp, Glycine max
tatataagaatccctcaggttgtttcatgtaaacctcttcttctagatcaccattcaggaacgccgttttcacatccatttgatgcaccttaagatcaaaatgagctactaatgccaaaattactcgaagatagtctttcttagatataggggaaaatgtctctctgtaattgattccttctctttgagtgaatcctttagcaacaagtcttgccttatgtctctcaatgttgccttctgagtctttctttgttttgaagacccatctacatccgatggcttttacaccagtaggcaactcaacgagatctcaaacttggttagatgccatagaattcatctcatccctcatagcattata

SEQ ID NO: 9251 - DNA, 489 bp, Glycine max
  unsure (1)..(489): unsure at all n locations
ccccccaccatcatagcgaagggggttggcctatatcatataancctagggcngagncggcgttgacctgaactgaccctcggaacttgaatatcagcntcaaaatgcagcagggaacattcaacatctgaactttccaaaccaagaaatagggcagaggcagaaaagtctgcccaagacacattccaataccacagctgtgcttactaaataccccaatacattcacttcggtccgaatcaataaccgttggatccactcgagaattttactgaaggtccctaaaacataaatctacattttgaccgttgggatctacgagaaaacttccataacccaaaaagtacaaccctttgcaaaccagcgatgcataagcagtggctgacaagcacaaattctgctgcacatttcaacacgaaactctgataatagtgcagattttcaaaacactcttgcctcatcaaatgagccaaatggacctacagtgcg

SEQ ID NO: 9252 - DNA, 388 bp, Glycine max
agcttgtcaaataatgttttattgtttataaaaaatgattggcactcaaacacttccacagtcttacattttatcttttaagcataaaagtgtcaaagataagatccttagcatgtataacttatctttgtggacctttgggataagtcctcaagatgtccagctataatgggtcctagtaaaattggcaagatgaaatttgagtcacaaagaggcttatagctacactaatgagatggaggccacttgggacatgttatttcaaatgttggggttttgttctatttttggtcagaaatgtgaggaaagaaagttccaggctggtggggaggcctactttgacttactatctgttgtgtcttttaaagaacagcgatggaaaaagtta

SEQ ID NO: 9253 - DNA, 429 bp, Glycine max
  unsure (1)..(429): unsure at all n locations
ntattgagataactgcctcgagaatcttctttgtaaaaacttccttgggaagctagagcttagctacacacacccctttcataactaagctcacatccttgagaagattactaaagaagctagagcttagctacacacacctttctaatagctaagctcacctccttgagatgagaagctagagcttagctacacaccccctataatagctaagctcacccccatgacaaaatacatgaaactacaaaaaaaatccctactacaaagactactcaaaatgcctcgaaatacaaggctaaatccctatactactagaatggccaaaatacaaggcccaaacgaagganaaacctattctaatatttacaaagataagcgggctcatacttagcccatgggctcaaaatctactctaaggctcatgagaat

SEQ ID NO: 9254 - DNA, 383 bp, Glycine max
  unsure (1)..(383): unsure at all n locations
agcttgcaatcataaacaatatattattgaccaatatgactttttagttntttggaattttaatgtagttttcttggctccttttgtaggacctggttgctcctctattggagttagaagtttcactgatcatgattctttgtcactaatgataacttgtttcctgtatatgatttagaagttatgttttaattatatttagttagctgacaattatggcacaaatttttgttgttggtttagataactttttaattatatttaaataaagataaaataatttcaactttatattttattttcaatatattaaaaataatggttaaattttttaattagaaatgttttatttttaaataatcaatttatatataataaacctc

SEQ ID NO: 9255 - DNA, 95 bp, Glycine max
taagctttcatataccccgcgcctgaatcagatcttcttgtgattttttgtgaccagtagacatcctccagatctctatgtgtatactttcgagc

SEQ ID NO: 9256 - DNA, 388 bp, Glycine max
agcttaagcatttcttttgatctatcaatagacctaatcttgtcaggaatcctcgccataaaattacatagacttgccaattctaaaagaaaaatgtaataaatccaaaaccatgcaaatgctatttaaagaatgattgtcaatttagaatagaaaataatgctaacaaaaaatagaatagcaacacagactcaaatgagacatgcaataacatttcaatgaatgacaaaataccataaaaactatgatactattcattgaactactaagtcaatacatgcaacaacctgaaccaaaaaagaaaagccaaatcagcaaatagaagataagcagaaacaaaaattatatctctgaacaaataatattgcaaccatcaacaaacaaatag

SEQ ID NO: 9257 - DNA, 376 bp, Glycine max
  unsure (1)..(376): unsure at all n locations
taaggtgagaggtagtttctttaaaatcagagcttaattgttaatttcctagcctctcactcttttttcctcatgtattgntggcaaagatgtgattcatattttactaaaatcaattcccaagattcataatatggtcagaggtgactttggctccttgcatggttntgatttccaggataagaaatcccgctaggatatagatcaacggagaaattttcaaaggtttaccaatcctttgccttacaagaactcttccttggatttgaatgcatactntattgnggaagcatttgcttataataacactaaaaatcatagaaagggtactaagcatggttttgatgggatgagatatgactctgcttctaactct

SEQ ID NO: 9258 - DNA, 395 bp, Glycine max
agcttgtctcagcatttatgcgatacggttttcatcatgctagctatcatcgccaagtaccaagaagagttaggtctagccatggcccacaagcatagaatcgcggatgagtatgctcaagtatatgcggaaaaagaggctagaggaagggtgatcgactctttacaccaagaggcaaccatgtggatggaccggtttgctcttactttgaacgggagtcaagaacttccccgcttgttagccaaggccaaggcaatggcagacacctactccacccccgaagagattcatgggcttctcggctattgtcagcatatgatagacttaatggcccacataattagaaatcgttatgaaacttgtatggtctctcagaccttgactagatacgactt

SEQ ID NO: 9259 - DNA, 212 bp, Glycine max
gcgcctgaatctgatcgtcttgtgattttttgtgaccattcgaatccctagagagctaccgttgttcaatttagagcgtctacatatatcatgcgcctgacttgggcgtacgagcgaaaagtcatgaccaactcaatttctcgagagctaccgttgttctatttctaaggactagatatgttatgcgccgaagtcggacatgcgtactaaaa

SEQ ID NO: 9260 - DNA, 393 bp, Glycine max
agcttttaaatagagttggtcgtactacttttgtaaaatttggtttatcatctatacctacttatgttatgcaagattatttgattcctactgatatttgtgagatagataaaatggtgaggggatttatttgggtaatatctacttcgcattgaaaaaaaatgaggaattaggtattcattctgccaaatgcggtcttttttatcttttaaggacgattctaaattaatattagtagtaaactctaacaacaaaattgtatgaaaagaattatattgagattcttttaaaaatgattagatctaattgaacttttaattaaatgtgaaatgaaattgaacaaaataaataaatagtgggacaaaaaatgtaatcataccaaattgttaacat

SEQ ID NO: 9261 - DNA, 271 bp, Glycine max
accactctccatcactagtgtggtgaacactactatatgaagccacttcgttatatgactgaacaggtctgtgtaaaaaaacccttctttcgaaggcgaatgaggaattctagaacttagcttcatttattcgccataggattcaaaaaatccaaggagaatgtgtccgcaaaatagaattcaaacacatggcataaaatgatctttaatttgcatcaaagcataaatataacttgctattcatctgaaacataagacatcgacttcacaa

SEQ ID NO: 9262 - DNA, 418 bp, Glycine max
agaccttagaaactcagcttcttcacatagtctgcctttgcttgaccttctttatgcttttttacagaaacattaagcataggcaaaagatcaagaggagttagtgggttaaaaccatataccacttgacaaggagaacaattactggtgctatgaacagctctattgtaagcaaattcaacatggggttaacaagctcccccagtttttaagttcttcctcaaaactgtcctaagcaaagctcccaaagtcctattaacaacttacgattgcccatcggcttgtgggcgacaagtggttgaaaataacaatttattgcccaacttgctccacaaagtcctccataaatggcttacgaacttagagtccctatcactaagaatgctgcttggccaccatggagtctcacaatctcctt

SEQ ID NO: 9263 - DNA, 396 bp, Glycine max
  unsure (1)..(396): unsure at all n locations
agctttgtgcaaggaattttctagttctatttaggaagaattngagatgtctataatgggagaactaactttctttcttgaacttcaagttaaggaaatgaagcatggaacatttcttttccaaacaaagtactgtgcggaattgattaagaaattcaatatgaaaaagtgcaaagaagcattgacacctatgacaacatccacttattttgacttggatgaaaaaggtaaattagtagatgagtcaaagtacaaaggtatgattggttctgtcctttattagactacaagccgacgacccactattatgcttagtgtttggttatgtgcaatatatcatgcaaatcccaaggaatcccatttaactactgtaaaaaggattatcaagtatcttag

SEQ ID NO: 9264 - DNA, 405 bp, Glycine max
tgacagattcccgatgtctctgaaatggctagacttatggttctcaactacccaaatcactcttcctagtaatttttcggaccactgtccagtcatgcttaggttctcatctatagattgtggcccgaaaccattcagaattctagattgttgtttgtcagatgcctcgttgaattcagtcatgctgctatctgtggatggtctttggccacacccgaatctctcattcgtgtccctgattgagttgaaatctcccaagatacaccacagcccccccaggtgctgcttcttttagctgcctcacagaatcccatagaattcttttattatggatatcgcaaggtgaatagatggtgactatattgacttgctgctcttctctggtccacttccccaccagtagta

SEQ ID NO: 9265 - DNA, 392 bp, Glycine max
agcttggagccaatacaaacgactttttactttttactcggatgtttgattgaggctcgtaatatatcgagacgctcgaaattgaatgttgaagctctgagccaatataaacgacaatgaccttttactcggatgtttgattgagtcccgtaacatatcgagacactcgaaattgaatgttgaacctctgtgcatattcaaacgacaataaatttttactcagatgtctgattgagtcccgtaacttatcgagacgctcgaaattgaacgttgaagctctgagccaatacaaacgaccataactttttactcggatgtctgattgaggctcgtaatatatcgagacgctcgaaattgaatgttgaacctctgagccaattcaaacgacaata

SEQ ID NO: 9266 - DNA, 397 bp, Glycine max
actcagcttaacattcaatttcgagcgtctcgatatattactagactctatcagacatcagagaaaaacgttattgtcgtttgaatttgctcagagcttcaacattcaatttcgagcatctcgatatgttacgggactcaatccgacatccgagaaaaaagttattgtcgtttgaattagctcagaagttcaacattcaatttcgagcgtctcgatatgttacgggactcaatcatacattcgagaaaaaagttattgtcgtttgaatttgctcagaggttcaacattcaatttcgagcgtctcgatatgttacggtactcaatcagacatgcgagtaaacaatgatcgtccgatgaattagctcaaagattcaacattcaatttcgagcgtctcga

SEQ ID NO: 9267 - DNA, 389 bp, Glycine max
agctttttggagtagaaacatggtttcaactcattttatttcaaaaagaaagtcgtatctagtcaaggtctgagagaccatacaagtttcctagcgatttctaattatgtgggccattaagtctatcatatgctggcactagccgagaagcccatgaatttcttcaggggcggagtaagtgtccgccatcgccttggccttggctaacaagcggggaagttcttgactcccgttcaaggtaagagcaaaccgatccatccacatggttgcctcttggtttaaagagtcgatcacccttcctctagcctctttttccgcgtatacttgggcatactcgtccgtgatcctatgctcgtgagccgtggctagacctaactcttcttggtact

SEQ ID NO: 9268 - DNA, 340 bp, Glycine max
  unsure (1)..(340): unsure at all n locations
tgcctcanagaggtccaggaaggacaaggcagtttattgaactagttccgctccggagtatgacagtcaccgctttatgagcgttgtacaccagcagcgcttcgaggccatcaagggatggtcgtttctccgggagcgacgcgtccagctcagggacgacgagtatactgatttccaggaggaaatagggcgccgacggtgggcatcactggttactcccatggccaagtttgatccagaaatagtccttgagttttatgccaatgcttggccaacagaggagggcgtgcgtgacatgagatcctangtaaggggtcagtggatcccgtttgatgccgac

SEQ ID NO: 9269 - DNA, 390 bp, Glycine max
agcttcacatttctctccggaatgatatttctgccgagaatgttgttattgtatctatcccaggcttccaaagattggaattgcctggtatcatactgagctacaggcctagaagtaatgctcttcctcttcttggatgccatctacaataaaaagaacccatcagtttattaaaccggaagttatcaaaattgaaacagaaaataaaaactgaaattggcaacgtgcgcttagcgagatgtagctagcttagcgcgccttagcaaaaacaacacatttatgcagattacgcctctccaactccaccttgaactcgtcgaactcagtatgataaagcttcacatttctctccggaaggatatttcggccgagaatgttgttagtgtatct

SEQ ID NO: 9270 - DNA, 232 bp, Glycine max
ccgcttgacttgaggcatcggagatatctattgtgcctgactgaggtgcatagtcgtcggtcatcttcgaatcatctatctttcagtcgtcttgcaccatcaccactcagacatgacatcaagcagactatgaatacctctctgaagactgctctgacccataactcttcttgtttctcagagtccttgatcaatacattctctatcaagataagtgcagcgttcaaaaact

SEQ ID NO: 9271 - DNA, 386 bp, Glycine max
agcttgcctctgaagaaaatggttgttgcgacattaaataaatgcattacatgcacatacttcttcatgttgagaaaccactctccatcactagtgtgttaaacactactatatgaagccacttccttttatgtctgagcaggtctgtgtagaagagctcttcttttgatggtgattgaggaattttagaacttagcttcatttattcttcataggattcaaaaattcctaggagaatgtgtctgcaaaatagatttcaaacacatggtattaaatgatctttaatttgtatcaaatcataattttatcttgctatcatctgaaacatcagacatcgacttcacaaatcatgttccgatagtgcatgagacataactcttaatctt

SEQ ID NO: 9272 - DNA, 409 bp, Glycine max
  unsure (1)..(409): unsure at all n locations
tacaaaacctaagtatctctgcaaaagctgcttctcttgcttactccagagctcttttctcaaaataagcactgtggtgtctgtggaattctatgccctgagccttgttaccgtaattcttcacaaaataggctntaaattggctctgaatttgcaacattgctcttagcgccaccctcgcgcttagcatgggtaagtggatttgggcttagcgccagtcatgcgctgagcctagatgaagacacctgctgtgcttagcgcactgatctcgcgcttagcgtgcgaccttgatgctgatgccctgcaatattcttctatcgtgctaagcacactgaagctgcgcttggcggtggatgcgcgcttagcccacttatgagctaagctcaactgtcacttttggcacttcatg

SEQ ID NO: 9273 - DNA, 390 bp, Glycine max
agcttctcgatatattatgcactttatatcggacttccgtttgaaaagttatgaccatttgaaattctcgagagcgtccgttgttcaatttcgatcgtctccatatattatgcgcctgaatcggacttccgtgtgaatagttatgaccatttgaatttctcggtagctttcgttgttcaacttcgaccgtctccatatattatgcgcctggatcggacttccgtgtgacaagtgatgaccatttgaatttctcgagagcttccgttgttcaatttcaagcttctcgatatattatgcccctgaatcggacttccatgtgaaaagttatgaccatttgaatttctcaagaccattcgttggtcaatttccagcgtgtcggtatattatgcg

SEQ ID NO: 9274 - DNA, 381 bp, Glycine max
agcttgtaaatattcatttttattatttgcctgtgccattaggctcttaatgtctttagaggttacttcctcgttgacatcttttgtcttgaatggaattgccatgaaaggtttattgtttctgtctttgatgtttggtagttgatattgtgtcgcgggaggtaattctgattggattaactcaccatccttcacttgccaatttgttatgacatttgttgttggatcacctatgatgtcttgtttccaagggtaatctatatcctttctgatggcataagcatgaaaccaatcaaagaaaaggacattaattttgactctttctacaaattcgtagaacttgtcttggatctgttttctgtttgtacccttgtaatgtcg

SEQ ID NO: 9275 - DNA, 422 bp, Glycine max
  unsure (1)..(422): unsure at all n locations
gcttatagaatatataatagaagaacaatgtcaattgtttgattctatacatgtttcctttgatgagtctaatgccattcttccaagagactatgaagaaacatatgctccagttgcaagattagaagccattagaatgctcttagcatatgcatccataatgaattttaagctctatcaaatgaatgttaaaagtgcttttctaaatggtttaattcaagaagaactatatgttgaacaacccccaggttttgaaatcccggataaatcaaatgatgtttataaattgcaaaaggctctntatgggttgaaacaagcccctagggcgtggtatgaacgtttaagtaattttctcctacaaaaagaatgtctagaggaaagtggatccacattgtcatacagagaagctaatgatattttgt

SEQ ID NO: 9276 - DNA, 384 bp, Glycine max
agcttgaagctcaaggaacaaggtttagtttgaagaagctttagaatatgttttggcttttacatgcctaactcatttgagtggcatttgtattggttgttaactttgattgttgcatcttagcacatttgatatttgtttcgcattgtgcatcatcatagtgtgtgtgaaggaaattttctaagttagaaaactttcttcaaaggcaaaaactctttgtattaatcgattatagagttgtcgtaatcaattacaacaggctgtctgaagcttgtagagttaagtctcgtactggtttaatctattacggtagtcaattaatcgattacattgttggttgagacaatgattgattgtttcaagagtctctactttaattgatta

SEQ ID NO: 9277 - DNA, 338 bp, Glycine max
tgaagtgaggaagtgtggaagggtgagactttcttttttattcgttgaccatagagtggtacctggagatatgtcgcgggggtcaggagaccttggggacgtcaggtggggtgctattgcccaaaaccaagcttgaccaatcctgacccaacccgggcatagtcagtcagtgagaacctgtgatgtacctaaacaggcgagctcctggcagtcaaccgataaaagaacaaagaccacaaagcaaggaggtttgtgtggtggctggccagctatggatcttgagtgatatttgggatatggcctctggtaatcgaataccaagggtgggtaatcaatta

SEQ ID NO: 9278 - DNA, 387 bp, Glycine max
agctttgatgatttagttttcacttacgaaaggatcaaagtgggtctaaaaagaggcaaatttaatcatcttgtttgaatgaatgagaaaaaactggggcaaatgaagagggtgagaatgaaggagaaacccatgctgcaattgtcattcctacatggctaaacttcccaccaaaccaacaatgtcattactcaaccaataacaaaccttctccttacccaccacccaattatccacaaaggccatccctaaatcaaccacaaagcctgtctaccgcacttccaatgacgaacaccacctttagcacaaaccaaaacaccaaccaagaaatgaattttgcagcgaaaaaacctgtagaattcaccccaattctggtgtcctatgctg

SEQ ID NO: 9279 - DNA, 307 bp, Glycine max
  unsure (1)..(307): unsure at all n locations
attggtctttgccagtgaaatgatctatgtgggtctgaaaaaaggcaaatttagtcatcctgcttggacgaatgagaaaactggggcaaatgaagagggtgagaaagaaggagaaacccatgctgtgactgccattcctatacgaccaagtttcccaccaacccaacaatgtcattactcagccaataacaaacctccaccttacccaccgcccaggtatccacaaaggccatccctaaatcaaccacaaagcctgtctaccgcacttncaatgacgaagaccacctttagcacaaaccaaaaaaca

SEQ ID NO: 9280 - DNA, 386 bp, Glycine max
agcttaataaatcaatctatggcttgaagcaagcctcctgccaatggtatttgaagtttcatgatgtcgtcacttcatttggctttgaaaagaacatcatggatcaatgtatataccaaaaggtcagtgggagtaagatttttttcttgtgttatacgtggatgacattttgcttgcaactaatgataagggtttgctatatgaggtgaaataatttctctcaaagaactttgatatgaaggatatgggaaatgcattttatgtcattggcattaagatccatagggaaagatctcgaggaattttgggtttgtctcaagagacttatattaacaaatttttagagagatttaacatgaaagattgttcaccaagtgtagctccca

SEQ ID NO: 9281 - DNA, 426 bp, Glycine max
  unsure (1)..(426): unsure at all n locations
tcaagcttagtgctacttcttagcatcataatcatagnggagctctattctgcattttgctcctctcctaatgaaggtggaggagaactaacagagaaacactcccctgagtgtatcattaagttccaggacaactgaaatcacgcacttgaatgtaaggaagaatctggcaaaatattgttgttacttgtcaacgggggacatcaacataagagtatgtttaataagcagccgattatgaatgaaaatacttacggtgtttgggttgattgtttttttattcatttttacttagattaaaacatagtgataaaaatgtgtctggtttgaatctttaaaaatattgtttattcaaaattctaatcttttaaagataacaacctttcaacatatgaaatatatcacgtgaaaacacaaaatataaat

SEQ ID NO: 9282 - DNA, 392 bp, Glycine max
  unsure (1)..(392): unsure at all n locations
gcttgtactccagtcatccataatcctatttttgacatcaatattgntaaccctttatatcgtcaagaatattcattatgaggtaataaaaaaaaccttgtaattcaatttactcacacaatccacagttgtagtatacatatgttcaaacacttgtcacctgatattatttcagttagatctgcatgtgtcatgaaaaaggatgcttgtacattaggaattccaaatttcatcccatcccacgacaattgaactggcttctagtaaacatcatacaagaatcttatcaattctcccaatggatcgtctccagcaactgtattgcacctttcaacaggtccaactggtttcaacacattattgtgtgaatcctatatagttaatgaaaataa

SEQ ID NO: 9283 - DNA, 525 bp, Glycine max
  unsure (1)..(525): unsure at all n locations
ccacgcacaactgcacacttgcagtgactngttaagangtgtaagacaaccgaattgcaccggatatctgattatctccacatacttcnaactacagngngagtgagantttgagttcgagttcgtngaacatggcacgngcancnnnaacagcnnaatgcgagcgcgcgaacgcgagcatccaagaaacagtttttgtttgacaaaggaacaacgcgggacaccaagaggctcccttaacacttggcagactgaccgagaaccaaccgaggcgaacgatggtgatgacatcgaacgaaaaaccaacgctggggtggccctaaccaacaggttagacactacagctgggcaacaaaaggccccacaaacaaaaataccacctctcactacgacacggccaactcaacaagacgcaccgctgaaaaccaaacccgccgacgaccggagggagaccctgccaccccaacaaccgccaccaatatgcattgcaaaagacacggaaggccccccctaagaggatccccc

SEQ ID NO: 9284 - DNA, 416 bp, Glycine max
tgtatcaattgccaatgttattgagatcgaaactcttctttctttcataaaatggctcgcattaagcatgcaacaaagcaaatgtctaccctccgaaatggtaatgacatccttgatctacaacaagatctaaagcagcttgttttggattttttccacaatatttatgcttttgaaaatatttgcactcccaatgatttgaatgccaaaactatcccaagacgggttgctaatgatcataatgcttttcttactagccttccctgtaaggaggcactactaaaaaaaggactttttacgacggctaataattacatttaacaacggttaataaccgtcatcgtttaaaatgtcgttaaaataaaattggtttttacgacgggtattataacaaccatctttgaatgtaagaacct

SEQ ID NO: 9285 - DNA, 503 bp, Glycine max
  unsure (1)..(503): unsure at all n locations
cgccacctcccactctacacgaggacttatgtaacccgnataaaagattacaatatacataaacaaggcagaannaagcgagattgattcgagcctcgcaagccacgggaccntaagcgaccgcagcaagcaagctgaccaagaaaaatacgttgttgctganaacgaaaaccgccacaacacgaagcggagacgacggaacacactgcgaaccaacagcgaaccaacatcttggtgcggttgccatggaaaatcacagcgcttggaccgaagtgtgcacctaacgatagctgtgaaggaatggcagggacgacaatgacccaaaaaataaagttgaccgacgaacgaagagggacagaacacgcaccggaccagaccgctcggagcacaaaacacaccccagaaatgacgagagatggctcggcgccacaaacatgaaccggtcaaaaaatctaacaaccaaaacgaatccccactggacctcccccggaaaggataccgag

SEQ ID NO: 9286 - DNA, 102 bp, Glycine max
  unsure (1)..(102): unsure at all n locations
ttgccgactntgctttcgccgacatacggattgtattggttttgatactaggcagctttgaagaccctattttggtagaacaaaaagagttccactgctgga

SEQ ID NO: 9287 - DNA, 398 bp, Glycine max
  unsure (1)..(398): unsure at all n locations
agcttgatgttacgctaagcctctctctcatgctaagcgcatattgcagaaaaaaatttttgttgcagaaagagctaagcatagtctactgcgctaagccccagatgctcactagaccttacaacttcaagttgggcttagtgcgaggctaggctaagcactagtgttttaaaatcaaacgtcacgttggcacgctaagcgcagctgcgcgttaagcaaaccatacaaatttcactttttaaaaatcaaaggcagaggcacttgggttgctaccttttaacccaaacctttgcaccctctcatctgtgagcaaattcttttactttctgctatgtgtgtactacttctctgcattatctntgcttcatttcaagaacaatccaagtaagttagcacat

SEQ ID NO: 9288 - DNA, 435 bp, Glycine max
  unsure (1)..(435): unsure at all n locations
gctcttatccaggctcatcttggtggtaaagctctttcttctatggcttattccttagaggatggcgcctcctctcacctcttctcctttgtcttccgctgcttctccatggtggaaaatcaccattaaaagacctcattgaagctcaaagatccagcctccatagaagccctacaagcaagcttcgatcagatcggttagtttttcttaaggattggatgcaatttttgtacccttatgtatcccttttgatattatatatgtgtgaatcttttctactcattattggcgatttcattctacttgtaatgctagcttctatttgatcactagtgtcatggaattggattttgagtgaggctagaaagtaatcttagaagttgaatggaatgactntactctttacattatgtngctaggaataaagcataacat

SEQ ID NO: 9289 - DNA, 387 bp, Glycine max
agctttcagggtccatatatctattatatttgcaacaaaattgagaaaggagttgaatcattcagccaattaagaaacctgccatactcaatctgcaatgaacaaaagaaaggttacattgataaccctcgcactgaaaattttagtaatgtcacaatgtcacctccagttcagcagatttcatgtttaaaataatatcgtgattcaacatagagcttggctgcatgatttcactgaaacgctctctgggaaattagaagtccttttatgccaagcttctttattgcagaagattaatgtccctaaacacataatagaatgcaaacattaactctagaagtagctaccgcccacatgcttccctctcacaacaaataagtgaataac

SEQ ID NO: 9290 - DNA, 279 bp, Glycine max
  unsure (1)..(279): unsure at all n locations
tggatcctttaagcaaggtctccggatcgagtcttgtggataagaaaaacatggttggaaggggagactccaccaaagattctaatcctaatgataaaaatcatctttgtcgaatggccatcatcatgatctgtttttatgtcagccttggtagaatcagatgagaataaagaggagtatgaggaagttcanagagctctggcagcttctatggagagcatganagaatcaactgctatggctggaagagacaataaagatgcagatgttgcagtcaat

SEQ ID NO: 9291 - DNA, 388 bp, Glycine max
agcttggtgtccctttcatttgtgacattggctttcactaggttaattactatataccctgcattcattgggtctgaaataccaaaaataccaactcaatgttcagcaatgccttctttatgtcatcaaataccaatggaagtaatggaagaggcttaaaactacatcacttttatatgattcaatgttttccaagcttatgacaattaactaacctacacttatgtataatgagaggttctattataatgtgtatttaatataagcttctggaacagtatatgaaaattggatatgtcaaaatctccgacttaagggcaacaaagaaaaaggaaatatattaactggtagtaaatacaagcctagtgcaaaatgagctactgtaatt

SEQ ID NO: 9292 - DNA, 456 bp, Glycine max
  unsure (1)..(456): unsure at all n locations
ntganccttgacacgtcgtgacctcgagaactatagactcgtaaccgtgaggattgcctattaaggtacatttgtgctattatagtgagagcgtgtcaaggtgtgcgggagatgagggagacacggctgcattatgggaaatacgacatctatatataggatatctgaggactgaatccaaactctccatcggggagtgaataagcgatgtgagcatgcatgatgaagcaaagcttcttataaaaacctgtggtggcatgagaccacactattgatttatgagagcccgatgcatgcgaacgtgggttatttacgcatatgccttcgggccagagtaaccacaaggttgttgatgaaaccaagttcatagaggcgtggttaaaagcttgatattgaccaaggaggcaatcgccgcagagattggctatcatgcatagacgcaaattatgcatatct

SEQ ID NO: 9293 - DNA, 392 bp, Glycine max
agcttgtccatccaaataacaaatgttgctgttatttttctgtcctcacaacaccaagtgtctccccttatacactttgcatcctcactttgaaccaacatatttgtactcttgtgatgtcttctcccctatctcgaacctttgtgtgctcctaaccatagctctgatactattgttgggtaattaatgccctcacaaataaaattacccacactcacaaggattgtgagaacacaacaaagactagaccgtaggaaaaataataacaaacacaagaatttaacgtgatttgacatctcttgcctacatccatagaaccgtctcaaaaaatatttcattatcacaaaaatgattacaagattgtaacccaccctaaataatgtatcactcta

SEQ ID NO: 9294 - DNA, 404 bp, Glycine max
  unsure (1)..(404): unsure at all n locations
tctccaagtgttgaattccagagggttctgcttttagttgggagaggttttctaaaagaatttcttccacagaacacagtgctcctctgtcgataaagatgcacttcaattgatgaaaatatccgaggtgcagtcgctttagtttctgaaaccctccacattgaaaatgcaaagtttcaccttcataagcattgccacttaaattgaggaacaacaaccttgacatattttttagtgatttcaatgcatcattagtcaaactggagccgtccaaacgcagttgcacaagatttgggaactgtgaaatccaatttggcaaccttgtaaacgtcccacatatgacaagcttcctaagtgtagacatangtgacgtaatgtacaagtcaattacttcactcctatca

SEQ ID NO: 9295 - DNA, 390 bp, Glycine max
  unsure (1)..(390): unsure at all n locations
agcttgaccaggaattatttgtatgggttggatgttgaattctggttgttcctggtgcggagatgatggtacagagggtgaaccaggagctgaagtttcttttggtgcggtagccatggaaaagcagagcgtttggaatgatttcgtaaatttctgagagctgttagggaatgcagaaaacgagattaacacgaaaatataagtttgaatgaggaatgtagagggacgtgtgaagcaacggtcgaatttgctttggttcagtagtgaacgtgctattaatgttaagtgattcgtttgggcacgttcagatatcagtagttgctacaattcctctagcagacaaatgcccagcttgcccctcagttnttcaaactgttttgcatccaatgc

SEQ ID NO: 9296 - DNA, 376 bp, Glycine max
  unsure (1)..(376): unsure at all n locations
nttcctaaatgggcattccttgtaccaccaagttcccaactcagccacttttaaagtcctactcactgagtacaaagtgacttgtagcatttaagtgagtaattaagcactcctctctgtatgtcacattttgatatcatgtagttatctaatatgaatttctttcgcatttcaagatgtgccgagtatcatgtactcatttatgaaagctgcaagtttcactcatctgaacttagaaaggatgaagtgtagaatagtttataatcatcataggaaggccacaaaaattagaaatggatggaggactttcgcataaacacaaaatttgcttcctacaactcaacatcggttngagttctcagatgcaacttctaac

SEQ ID NO: 9297 - DNA, 387 bp, Glycine max
  unsure (1)..(387): unsure at all n locations
agcttgaccaatcccgactccatctttggcatagncggncagtgagaacctgtgatgtacctaagcaggcgagctcctggcagtcaacagataaaaggaaaacaagaccacaaagcaaggaggcttgtggtggctggccagctgtgaattttgtgtaatatgtggattgtggcctctggtaatcgattaccaaaggtgagtaatcgattacaaggcttaaaattgaggacaggaggctaagatggtctctggtaatcgattaccaaggggtgtaatcgattaccaggcttgaaaacgaagtcaggaaacttagggagcctctggtaatcgattaccagcctgcgtaatcgattacacagaggaatgggtcactggtaatcgattacc

SEQ ID NO: 9298 - DNA, 415 bp, Glycine max
  unsure (1)..(415): unsure at all n locations
tgagccaaaatcctgactcaccataaacctttttccaggtgagaatgtcaattcttaccctcggaagcaaaaaaaaaggggagagggaaaatttccaatcaaagaggaagcaaaaaaggagagaaggaaaatttccaatcaaaggaaaaaaagagaggaaagggaattcccaatcaaagagtgggagaaagcaaaaagaaaagaaagaaaattcccaatcaaagaatgggagaaagaaaaaagagaagaagatagggaagatagttcccgatcaaaaaaaaataatatgcagaaaggtctttggaccggacaatatctgaacaatacagaattgtcaccaaatgaataaaaagaagganagggaaccatgacctaaaatggtcttccccctttagttgccaggcaaaatcttgtg

SEQ ID NO: 9299 - DNA, 373 bp, Glycine max
agcttgagagtgttccctcatactctgctcctaaaaagtatttatatgtaatatcatatatatctatatctatatatatatgtgtgtgtgtgtgcgggggggggggccttcctaccacaacttaacacgaggtagaagtcatcataccccaccatactaatatctatacgcaaaaacaatggttttcagtgcgttattagggaccattctatcaacaacttcgataaatttgctaaccaactttgcttttcacacgctcaaatggtgatacatgtatatcgtaccttagcctttaaaattacgtatatatttttttttatataacaacggaaacaacttctcctaaaacttctcttcagttaggctaattact

SEQ ID NO: 9300 - DNA, 334 bp, Glycine max
  unsure (1)..(334): unsure at all n locations
tgtaaaagagggaagcatatatgatctttnatctaagacaaaacgcgatttctacttcaaaagaccttgaactacttcacattgattaatatggtacctctatatctatgagtttcggaggtaattactatggctgagttatagtggatgattacttaatgttcacatggactttgcttttgaataccaaaaatgatgaaggtcttatcattgtttctcttagaattgatcatggaggtgaatttcaaaatgagtcttttgaaatcttttgtgaagaacatggaatacaccacaatgtttgtcgctcaagaacacctcaacgtaatggtgttat

SEQ ID NO: 9301 - DNA, 386 bp, Glycine max
agcttcgcgatatcacctaagagttaatagaccaagcaatattcaaacttactagctttctcttctcgttttgtagccgcttctgccctttgttggcatataagagttaaacgttctacatgcaaggaaatagaacttgcttgttctatttttccttgctcttccaacctcatacaatgctcatgagctctctgtttctcaagatcctttctgaaaatagatggaaattttaaagatattagaaaaacctgttaatgtagaagtttcatcttcaatataatgtcaatttataattgaagaaataagatgaaaaagaatacatggaaatcctttaactataagcaacactctctttaggtgtgtgattatcacagtaaacaatacac

SEQ ID NO: 9302 - DNA, 294 bp, Glycine max
tatgtcgatcccatgtggctggagcattctcacttaacactgtgaccctgactggtctccctctgatattacctagtgagagtgacttgacttgcgagtgcgcgggttttcttgtcatgtactcctaggcgctcgacaaggtttttcactgacatggtactacattgcatataggactgagtcttagtgtatctgctgcataacgcttgtgtattgttctatattgattgatatgatgacattgtgtattgattatagagtatgtgaatgtggcgaaaatgaatgagacgtgtg

SEQ ID NO: 9303 - DNA, 394 bp, Glycine max
agcttattgtcttagatggcatttttgtggatttgataaaattaatgcataagaagaaaagaaacttggtgtacttatcctaatagggtggataagtttagtagcactgttcttagccttcctaccacaacttagcagtaggtagaagtcatcataccccaccatactaatatctatacgcaaaaacaatggttttcagtgcgttattagggtccattctatcaacaacttcgattaatttgctaaccaactttgcttttcacacgctcaaatggttattcatgtatatcgtccctttgcctttataattaggtttagatttttttttatataacaacggaaacaacttctcctaaaacttctcttcaagttaggctaattactgccaaacatt

SEQ ID NO: 9304 - DNA, 339 bp, Glycine max
tacagcagtccacttaagatgtaaaggaaatatctgaagtatgaaaagtaatattagatacaccatacatttctttgattggtcagaaatgctagcaacacactattttggacacattctctctaattagttaaaatttattagaaatcacaaaattgtaagtctcatatcttattaagcaaacctttccataattttgtagttttcaataaattttacttaagtgtgtataacaatatgttacaaacactcttcttctttgattcctaccatcaatgcttcctatttcctttttccagaagctcaaggacaggaaaagaaaataacccttcatttttt

SEQ ID NO: 9305 - DNA, 391 bp, Glycine max
agcttatacaacataggtgcttattagttttatatggaaaatcacattcgttgtacattccaatgatcgaaagtctctatatgttaaataagatccttctagatcttaagaaaaggattaagaagtacttggtccttaagtaccatgccttagtgttattgaaacactaatgtatcttactatgcgtaaacgatttgatatatcatttcccgctaattcattagcaaaatctaattcttcaccaatatgaagaaatttaaatatttacttcattattttagaggttatatattagatcctcataaaatgatattacatgaggtgatacaacaatttcatgacaatatgtgaaataagccaaaataggcacatcagctaatcatgtagaaat

SEQ ID NO: 9306 - DNA, 406 bp, Glycine max
  unsure (1)..(406): unsure at all n locations
ggntggagtacagacttcggaggnactcatgggattctcataaggccggggacagcagtcaaggcgctgttagaccgtgctagggtcctgacgatctctgatgtcaggaacaaacatttgtcttgctgaccaacccagaaagcccatgaaactcgaagcgggcggagtaggtgtttgacaacaccttggccatggctatcagctaagggaagctctggacaaccgttctgagctatacgaccggatcatccctggtggacgaatggcgctaagagtagatggcccttcccctaggnnnattttcagcagattgatgggcactttcatgctgtagcttacccacgcggaccgtggatcgatccacctatcatcggcagttggcaaccgctgatcagacgacagtggg

SEQ ID NO: 9307 - DNA, 383 bp, Glycine max
  unsure (1)..(383): unsure at all n locations
agcttgtgcattcaatatcctgatgagggtgttccatatgttctcaagactggactaatacatttgctgcccaagtttcatggtcttgcaagtgaagatcctcttaagcatcttaaggagttccatattgtttgttccaccatgaagccccctgatgtccaggaagatcatatctttctaaaggcttttcctcattctctggagggagtggcaaaagattggctatactactttactcccaagtccatttttagctgggatgaccttaagagggtgttcttggagaaattcttccctgcatctaggaccactgccatcagaaaagacatttcaggcatcatgcaacttagtggagaaagctcgtataagtactgngaaagatt

SEQ ID NO: 9308 - DNA, 341 bp, Glycine max
tgactaggcgagatgacttagccttagcccatcttagttattattcaatgcggttaagaatgagaaatgccatagagaaaatgtccgggtgattgtccgctttattttactaaaaggtatatttttgctattatagtatcattttatctcttttagagtcccaacgtggttactgcatgaccgaacggtcagaatttattttaaccaaagtttacggatcatacaattcagacgttcggtggaaatttattttatttttaagctaagcgacaaatgacttatgtaaaatggcttaagcacgttaacaagaggtataaaaagtaaatgatatgagaataaaa

SEQ ID NO: 9309 - DNA, 389 bp, Glycine max
  unsure (1)..(389): unsure at all n locations
agcttgcctgtcctatgcagcagttatgatggcccgagttatgttggggaacggttacgaacccgggatgggtttaggcaaagacaacggcggcataactagcctgataaatgccaaaggaaatcgtgggaagtatggtttatgctataagcccactcaggcagatatgaagagaagcatcgcgggaaggaagagcggtggtcaaagctcgcgttggagacaagaaggtggaggaagcccgccctgccacataagtagaagctttataagcgcgggtctgggagacgaaggtcaagtggtcgcgatatacgaagatgatgttccgagtacattggatttggtacgaccatgcnctcctgatttccagctgggaaaatggcgagtggagg

SEQ ID NO: 9310 - DNA, 354 bp, Glycine max
tccatcaagctgagctcactaaaggtctctatgtcttaaagcttacaaatatgatttttgggcccaataaggtctggtggcccaattacaaaaatacagcccaaaaacaaaaataaaattgtcagctctcttcaagtccaagtcagttctgccgaatttcggatccaagcccaattgcttataattctcctgaaattcaatttaaacaaaaaattagtcaagtaggcccaaatgataaaactgcataattaatttgacagttaaggctaatcggtaattaaaatggtgattgaaaggggtgagaaatacgagaaaataatgacacatcacttatgttaaattagtctaaaccta

SEQ ID NO: 9311 - DNA, 363 bp, Glycine max
agcttagggatggaatacttacttgttggtgatgaacaaaagcgcaaaacggaatcaaaaaatgcgaaaaaggatgaccctagggctgcaaattcgtcaatcccgtgggtatggcttttgaaaggggggaaaagaagtttttgaatgtaaaaacgccccccctttcgtcatttttataatttggtgcaggggtggctcgcccaggcgagctaacctgcactcaatttctatttatttgccaaccttctttttttttgaggggaacattaaccatttccccttccttctcatggattatcattttgcctaacttgaacttacttatgttacaactaggcccacattacctaattcattactact

SEQ ID NO: 9312 - DNA, 410 bp, Glycine max
  unsure (1)..(410): unsure at all n locations
tgaagganaactggatgcattggttaacttggtttcccagctggccttgaatcagaaatctgtacctatcgcaagggtttgtggtttgtcctcctctgctgaccaccatacagacctttgcccttccatgcagcaacctggagcaattgagcagcctgaagcttatgctgcaaatatttacaatagacctcctcaacctcagcagcaaaatcaaccacaacagaacaattatgacctctccagcaacagatacaaccctggatggaggaatcaccctaatcttagatggtccagccctcagcaacaacaacaacagtctgctccttccttccaaaatgttgctagcccaagcagaccatacattcctccaccaatccaacaacagcaacaaccccagaaacagccaacag

SEQ ID NO: 9313 - DNA, 392 bp, Glycine max
agcttgccttattaacctgaaattgagagaaaatgattattaaacacataaactggaagtactaagtatttattacctatactaaatagaaaatacttataacactacaaaataaccataaattggaagagtttgatacaatttacacaagttttatacataaaagttagtcgtattcaccgattaacaactcccccgaatttacagttttgcttgtcctcaagcaaaaagagaacaattcacttgtcctcaagtgacaaaaacatgcagtgactatgtacaaaggtgtatacaacaaaagttactgattgcatgataagagaatggagtaaaatgccttcatcacttgtctctcacaaggtatgcagttatccaaagagaagaataaaatg

SEQ ID NO: 9314 - DNA, 399 bp, Glycine max
ttttggagtagagacatgggaccaactcatttatttaaaaaggaagtcgtatctagtcaaggtgtgagagaccatacaagtttcctaacgatatctaattatgtgggccattaagtttatcatatgctgaccataaccgagaagcccatgagtctcttcaggggcggagtaggtgattgccatcgccttggccttggataacaatcggggaagttcttgactaccgttcaaggtaagagcataccgatccatccacatggttgcctattggtgtaaagagtcgatcacccttcctatagcctattttttcgcatatacttgggcatactcatgcgcgattctatgctcgtgggccgtggctagacccaactcttcttggtacttggcgatgatagctaa

SEQ ID NO: 9315 - DNA, 391 bp, Glycine max
agctttattacaagtcatagagtttgtagataaatctatattctattctataactttttttacttgcagttcaggagttagtccttgccttgtttagtttagaaaaaagaatacataaatcgaataagaaattgaaagaattcactatcaattcaaatgaagaaaaaaaaattgtttcaaaaggatatcaattgttaagattcaaagaaaaattattactttttatcaatacaccaaggaacacttcaggttaggaatataataatcggattttgaaatcaaataacgcctcaactataaaaaattgaaatattttgaaaaaaaaattattttttttttcaaaatatttcaaaaggtacacaaaacaaataggacaattctaaagcttttt

SEQ ID NO: 9316 - DNA, 416 bp, Glycine max
tcttatccaaagctcatcttgatggtgaagctccttcctccatggcttattacataatggatggcgcctcctctcacctcttttcctttgtcttccactgcatctccatggtggaaaatcaccattaaaggatcccattgaagctcaaagatccagcctccatagaagccccacaagcaagcttccatcaagtggtaatcagagcataaaagcttcaagtaggtgctccttaaacctccattaatttttttttctttaccttctcttccattgttgtttcttcatttttctccatgtatctcctcacatgtcttgctctaaatgttgttaacatgattctttagagtttccaccgattaaacttgctatagaagttagatttgattttctatggttcaaatttcttgttcttgttc

SEQ ID NO: 9317 - DNA, 389 bp, Glycine max
agcttgcaatgaggataagagcctacctatggattaatttttttttatcggctctagagacaatatattattttcactttatttctctttatcataaactcggaagcatccactacataatttgcaatgaagctaaatatacataaaatagttgcattaatggtgtgtttggttgtgaggaaagaaagggagggaatggaatatagaggaaatatttgaattgaagttgtttggtaggtaagaaatataaggcatggaacccacattgaaattcaaaaatttccacacaatttcacacaaccaaaaacatatgcaccctccatttccacacaattctcttcctttcttctcttttccatggtatccaaacaaggggtaaagggagcact

SEQ ID NO: 9318 - DNA, 390 bp, Glycine max
  unsure (1)..(390): unsure at all n locations
ctaaaaggttnttgtgcaaagcggagtcttagatgtgtaatataaaactatttatttgtctaaaccttaacagcttaagcttttggaattgttagttagtaactagttctgataaaagatttagttatttggagtagaacgtcatgttggaggccataccttgggttttagggttataactgtttccttgcttctttattgagtcgtttgcttatatggtgtacttggagcactgtctgcttccaagagttaacgcttattcaaggtctgcagtacatatctagtgacagattttttatttacttatgtttgtcagattctgcatcttggtttagtatttaaactcttataattccatcagatatttgcaagattgtcaatggtcttctg

SEQ ID NO: 9319 - DNA, 388 bp, Glycine max
  unsure (1)..(388): unsure at all n locations
agnncttggcctttatattaattttctatgnctgtgccaataccttttgattcctaaagacaactgatcacagggatcaaaacacgttaactaaaactttttacatataggatcaaaatggagacaagtacactggtcaaaataatatttaatctaaagaaaactgagcctatctatatataagaataggagaaatgttgtttgtactaagagagagaaaagagaaaatgttaagatgcaataaataatgtgctgaagaatgatagatacaaaaaatgatgttatataaattattggatgtgtatcaccatcgcatctctaagaatatttattcttctcactctctgtcctctttgaagataacaataaaagtgtgatgatgagtgtt

SEQ ID NO: 9320 - DNA, 392 bp, Glycine max
ttggaagacccttgacagctgatctcttctttattctgtttgcgccgacttgaggggctggtaaaggggatactgcgacagtctaagcaagcaagcatcaacatattgggagaaggacaatattgtgcattacacatcactgtaaatacatcctttatcgcctttaagtaaaaagccctgaaagccaggctctatatgcctatgtgatcttcaaccgacacatcattcttgcatgatggtgcatgacttggtattacgcactcgcgaaccctggctagcgcgacccgatatatggtattcctcacacagagcaaaaacaatatcgcttcgaagcgcgattcatacgactttgacgctgacaactcacccgtgctaccacatgatcaaacacc

SEQ ID NO: 9321 - DNA, 383 bp, Glycine max
agcttatgaagaattcctatcaagcctaggtttcaagcatctcgtaacttctatcaaacacccctagaccaatggtcagttggaggcaacaaacagggttatccttaaagccctacacacaagactagacaagtctaagggttagtggaaagaggaactcgctagcatattttgggcatatcattgttcaccccaaacaatgaccaacaaaactccttttcgccttatgataagtgccatatataaattattttaggattaaaatgttaggcgctcatcttttgattgtaatagttttcttataaacttcccttaaatctagtttttttatatatattgtacatttgtcataccctaatttcgtccggggacctttgctcgat

SEQ ID NO: 9322 - DNA, 262 bp, Glycine max
tctgtatgtctagagagttctatagattttatgtccgagttccaaagagtttgagggactttgatgtgttacagatctgcctagaccacagcttgataggaagctgtcttgagagcttgtgatgactttgtgcgtgattgcgatgtcttatatgtggaggagacatccgcgctactcgtatctatgaaatcggctatctatctctgctctttgttgctaatgaagcttgccagatctggacagcacaatcctctggtggatc

SEQ ID NO: 9323 - DNA, 375 bp, Glycine max
agcttgttctcatgattaactaatacaaaacactagttaaggaatctaccaagtatcaagtcaagcatattaagattgttttcagaagtatcaaattaacatgaacacaaaatataaatttgcaaagtacttgtagacaaggctagagtcctacaggagaatgcaacaaatgaagagcctcgacatgaaaaggagacatatccccaacaaaaattattgagcactgtaattttctcaatccttcagaagtatcttacccattgatggctttaaggaaccgccacacattcaaaccctgcctatcatccaatgattgtcacaagaaattaggtttggagaaatcgaacaagtcgaaagatgattttgaaagttagt

SEQ ID NO: 9324 - DNA, 366 bp, Glycine max
tcatgatgatgagtcaagtatgaatcatgtagttttgatgatgacaaaaatcccaaaagaatgatttcaagattgagtcgacaagttcaagatcaagattaatttcaagattcatgagaagacatcgagaagaatcaagatttaagagaagatgaattcgagattcaagagaagcagcaagtcaagacttcagaagggaagtattgaaaaggatttttcaaaaaccaaacatagcacaattttgttttacaaaagagttttctcatatttttctaagttaccagagtatttactctctagtaatcgattaccagtttcctgtaatcgattaccagtgatcaaatttgatttcaaaaagttttaact

SEQ ID NO: 9325 - DNA, 434 bp, Glycine max
  unsure (1)..(434): unsure at all n locations
tcatnacaatttatttaacggcatgtttgtgccacactcacccggtaatgtcgcaatacatatcatccttacacttgctacagtcaacaatgtgagaatctcagagttgtctaaatctcaacaacgaactcttcatcttgctatatatagaactaagccagcaccagtcccaatcttattaagacaaattacgacagagtatcaaaaatatgtgtataattatgaggtaaacagcataacgaacaaaaacaataatctattctgaacttcaacaagtatgatatttaagaactgccagacagagttcgggtatttacacatacttaataattacttcctcgatgcaagcgagttcaacaaaattatactgtacctaatgttatcatcatttgtcacccacatattattatgaaaattctatcgcttagataccc

SEQ ID NO: 9326 - DNA, 377 bp, Glycine max
agcttgaacccaagatttacttattacatctacttctagttctacttgtttcaactacatataggttacaaggcataacttaataaaaaatgtttcagtttttttaaaaagggaaattttgtagttctccaacaaatctgaaggttttggactttgggcactgttatttcttttaatcaatatacgtaaatgagtttccattcagtgaagtttttttttttaaaggcccatttaatgaagctatatttcttccattcctttcatatatccaaacttatttatccccagcaaataactgtttcaaaatctttagatttttcaagatatcatatatagcacctctctaaaaaaaaagaataagtcaatcactctcaatt

SEQ ID NO: 9327 - DNA, 240 bp, Glycine max
catattctaagataaaaaataaaaaagccgttgtattatcaatttatcatgaacgcaacatattatactattttttgctgcgtttggtgaaagtgaaagatgataaaaaaaataagtgaaaaaagtatataattctgttaaatctctacttttattttaagtgtaattttaaaatggtacatttatgttcttttcactttaacaaatatacacctaaacgcctggaaagaattcgatgca

SEQ ID NO: 9328 - DNA, 371 bp, Glycine max
agcttcaattttatgtataaaaattataagtgttttataaaaatagttattagttataaattaaacatttatacaaaaaggaataaaaaaaaattagccccttacaatagattttggatccgtccctagtaaggggtagaattagacacacccctacatcaagagaaagtgcagaaaattttgaattccccgtaggcctcataggaagattaatcatgccaaactgattcatgatcttcatctacttctcacttaattttttttataatgtcgtatttaacgttctctgtgttgagttttatgtacacatgttttaagaaatctttatcttcaaaaatttattttgtatgtaataatatattttgctcatt

SEQ ID NO: 9329 - DNA, 405 bp, Glycine max
  unsure (1)..(405): unsure at all n locations
ngatagacgactccaaagagcctccatcgttgtcacacgcaaagtattgaccaattgttgagagagcatagagtttctctctcacaccatcttcattggtgcgaatggagcaattgagaagaaagtaacttgccaacacaggcaatatgcgttcaagcctattagccaattgacggtgtggatttggaagcagcaaagaagcaatttccgaggctgacaaagatgaactctctgccttggctatgatatcaaacaaattcatatcaacagcagcgttcaagattgcacggaaaattcagctgaagcatagtgtcaaagctgagagagaagtgtcatccccctttgcttcctctgtgggaagaacctgattttgtttccaattgcaaatataggaattcatgattc

SEQ ID NO: 9330 - DNA, 380 bp, Glycine max
  unsure (1)..(380): unsure at all n locations
agcttgtgcatccaataccctgatgaggatgtcccatatgttcttaaaactggactgattcatttgcttccaaagtttcatggccttgcaggtgaagacccgcacaaacatttgaaagaatttcacattgtctgctccaccatgaaacccccagatgtccaagagaatcacatatttctgaaggcttttcctcattcattagagggagtggcaaaggactggctgtattaccttgctccaaggtccatcacgagctgggatgaccttaagagagtattcttagaaacatttttccctgcttccaggaccacagtcatcaggaaggatatctcangtattagacaactcagtggagagagcctgtatgagtactgggagag

SEQ ID NO: 9331 - DNA, 272 bp, Glycine max
gctttaagaagattcctaaagaagctagagcttatctacacatgcctctctaatagctaagctcacttgcttgagatgagaagctagagcctagctacacaccccctataatagctgagctcacccccatgacaaaaaacgtgaaaataacaaaaaaagtgcttattacaaagactactcaaaatgccccgaaatacaaggctaaaaccctatactactagaatggccaaaatacagggcccagacgaaggaaaaacctattgtaatattta

SEQ ID NO: 9332 - DNA, 361 bp, Glycine max
agctttagtctttatggtgttcatcatgttgttcatattgctcatctcatgttgctccccctatctctaacaagcttctatagttccttttttttatataaaaaaagtgaaagctactttaattttttttgtttggaggaggggtgggggtgtgtattagaggtgagggatacacccgactaatcaaatgccctaactttttaatgcagttctactaatgcagtttcaaatatatactataaatacatatttagtgcgagattggcttaatatatttttaaaaccattttttcgcaaattttttagattttttttgaaaaatagtatttgattttgtaaatttaaacgatacacatgaaat

SEQ ID NO: 9333 - DNA, 256 bp, Glycine max
ttggagatacatacttcctctcatacagccaagatagttagagttaagccattgctagcaaggagttagaattgcttatccaactaattactaagtgcgtgaatagcgtgcgatagtatttccgataaacttgttgcaacatgaagttcgagactacattagtctataaagaatagtgttggtgcttttacaacttccccaatggagaattaggaattgtttaaaagggaatcaaaaagatctttatatagattac

SEQ ID NO: 9334 - DNA, 368 bp, Glycine max
agcttgtgcccctctctctcatgctagctttatttaagcatatacttgtttaactttcctcatttatattcttacttgaacgtcgaagtcatttattttgcaagttcccttgtcaaaggtactaaaagccgacgtatgaagtttgggatccactgtccaccctgacatgtcacggtttcatgttttggtaaaaacattaaataaatataatactataactttatagcactaaaaactaaagcaaaagcatcatttcatcggtttttaacatttaaagttaacataaaatcaaatatatcataatatttaggtttatgatttaataagatacaacaatgtcattaacaattaacatatagagtaaaaat

SEQ ID NO: 9335 - DNA, 312 bp, Glycine max
taaactcagcttacaagctttttttatagtagagcttgaccttttatctaaaagctctaaaaaagcctgagcttaacctttatggataacaagccgagtctagcccagcctttcataggcctatccaaaggccctttacaagctgctcgactcatgttcacccctaattgacatgatgacctatttttagtttctgggcaagtaacctatgcattaaaaaattcaattggactatctatcttattcttgtagttaagtctattcgtttatctttaaaaagttcattttgataatctaacgtattattttatt

SEQ ID NO: 9336 - DNA, 201 bp, Glycine max
ctagacttttcgaaagatacctatgcacgaaatggaacttattgggatatgattccagaggatatggggattgaagtgcaggagcaattgcactgctggatgtggacaggcatgtttgatatggcaccactgtattgtgcagggaactaggctacgcgaaaacaatagtgtcttggggatagaaatgaagtagtaattggc

SEQ ID NO: 9337 - DNA, 394 bp, Glycine max
  unsure (1)..(394): unsure at all n locations
tgaaatctttgttaacaaatgagtcaaaactaattagaaagttataatttagcatatttatactatagacctaaaagccataaactcgttcctagaaggcctactaaagttgtaattaaataacaaaaatacaaaagctcacatataagcccaaacaatataaccaatattacacagattaaaaaaagaagccaaataattatttttgtctctagatatacaaaaggttgataaattcgtttttaaagatgaaaattcaaatttttgtcccaaaagtaaaaaaatacgataaatctattcatttgttaacttttatccgttacgaacgagtttatgtgacatattcaataacgattctgtcaacgttntacatatttaggatgaaaataactat

SEQ ID NO: 9338 - DNA, 363 bp, Glycine max
agctttacagcagattttagtaatgacccactaacctagaattaaaataacttaatgccattaacctagggaattaaaaaaacttaatggctgagaataactgaaattttggcaaccaaaagtcacccccaacagccaacaagtcagccaccatttggtctcccaaaaggctgatgcctaggttgccaattgggcccttattacaacttgaactaaacctaactaaagccctttaattgattaacccaaaacatatttttggtcagccaactttacaaggattgggccattatttagacaaactaaacactctaaaaattgagacaaagtggtgtcatttagtcctcctccatttggaccatg

SEQ ID NO: 9339 - DNA, 390 bp, Glycine max
tgccacccagctcgcccaggcgagcagggttgcttcctccagaagcaacagccttctggaggaatcttctggagggcccaagtgggcctggttgctatttgcacccccatttttactaagtacaccccctgccttttttttggtgattcttttttcgtaaagttacggaaacttacgaatttcgtaacaatatttgttttctttccgtaatgttacggaaccttgcggattacataatcatccctttttttgacttacggaatgttacggaacctcactaattgtgcaacgatgcttccatttgatttctggtgtgtcacggaaccttacggattgtgcatcaatattttcttttgttttctggcatgtcccggaatttcacaaattgcc

SEQ ID NO: 9340 - DNA, 370 bp, Glycine max
agcttcctagtcacgcttctttgttcatagtctaagttgcttgaaataggagacccaacagattcatatccagagaaaaagtcgaatgtactcgattctggtgtaagagaggaaggagtatgttctccttcaccagaagaagtattctctccctccatatagtcttcttctctcctactaaagtttgatcctgtcactgaagcaggacttttagcatatcttggttttttatcacttgcaattctcttggcagtttgcaaagcctcaagtgccgcaccttgcacaaatgccattttatcagattggcacttgtccatctcctcaattatcaattcaatctctgagaatatgcttctagagtccaaacttc

SEQ ID NO: 9341 - DNA, 380 bp, Glycine max
tcatattctagttgcatggctgaaagccaatttgtatcagtcaaggcccgtttcacactttgattcacagtaagttaaaagaagggaaggattgatgctgggtaagtgaataccagatttagatctaacctgcatagggtgagtgaagaacgaggggtgcttggagatgaagattctgttgtattagtatttagtgctgaagaaatggaaggagaaagtatggcagcattatcagctactggtgaagctgtttgttcagtattagaagactgaagaggaacattagcagtttctgattgacagaaatagcactatgtacagactgaagaggaacattagcaggttctgaatgttcagactgagtatgctgagtggaagaa

SEQ ID NO: 9342 - DNA, 222 bp, Glycine max
agcttccttgagaagctagagcttagctacacacacccatctaaaaactaagctcacctccttgagaagctttcttgagaagctagagcttagctacacacccctataatagctaagctcacccccatgacaaaaaaacatgaaaatacacaaaaaatcctactacaaagactactcaaaatgccctgaaatacaaggctaaaaccctatactactagaatg

SEQ ID NO: 9343 - DNA, 536 bp, Glycine max
  unsure (1)..(536): unsure at all n locations
tctcacgcgctctcagaccctcactcttacttatttacanttnatnatatataatgacgagcaataagtattgtanagttactctgtagcactcacgacagccactttgaatccctagcttggcaccgtcgatcacccanagtggacccgtcagcacgctcgcttgttattgtgggtttgaattattttctctactattctgcagaggagagctatattaatcggaatagctacactacaagtttttgaacgtatcgctgccacaaccacaaggtacttttcgttcatcaaagcatcttagcgcgtcttccatatgattaaaaatataaatttgtctcatgggtagttaacgggcggcaacaacgcgtgtcttagactattccgtagatcggccaggtcggattacatgcatgcgcgccaacgtggattgatgcttaatgattcagctatattactgccaagtcagtattatgcttactgcatggataccatggggatgatgcaacaatcttcactggcaatacagaaacgctgct

SEQ ID NO: 9344 - DNA, 236 bp, Glycine max
ccattgcctcacaagccaacttataacagcaagcttttgagactcactataaggatgcacaagtcaaagttgattatgtgaaaagattgtgtgaccaactgaaggcgcaaattgcatagaagaatgaaagttttactaagccagcctttcacatattgaacgaagtggtactttatcccggtgatgatcctggacatttgaggacaaacgtctttctagattgagggaatgatgag

SEQ ID NO: 9345 - DNA, 378 bp, Glycine max
agcttctaaagtctaacctaataaaagcatacctgccagcatcttcaggttcatctaactcaaaagcatccaactcaaatctttctggtttagtaacaggcatacacaacgtttccacacatactaagccttctttgttgatgacaaatttgttgattttgacgagaacctcattacaatcttcaagcacatattcaacctttttatagaatgttctgatagtgccaaaaagaagttagccaagcactctgtatgatacagcatcaatttcttgcaaaatcttgtctgcagaaggtaaaaatgaaatgaaaataatggcaaaacaatagcatatatcacaaatcttaaaatgatttcacagaagaataaactcttaaa

SEQ ID NO: 9346 - DNA, 410 bp, Glycine max
tcttatatgattagtcaggtacagtatatataatttagaacaaaactttgcatgcagtatacttcaagcagattttggtactaataagtgtcctaacatttgttacttttggggatgataataataggcaatgtataagtagagtattagagtatttgtatcatcctcgtatttattgaacagatttggctatattatttggggatgttttaaaaaaatgtatatatgagatgcttgtaatacttcttacaaagtaataaaattaaaaaatatatatttaatattttttcatttaataataagattattagtaatatattacaggagatttattcaaacataaatatgcaaggttattattaggaattggaatttgtgtcccctgagaatgtctcctagtgtatccaatt

SEQ ID NO: 9347 - DNA, 376 bp, Glycine max
agcttgcattacaagcatttcaaacaagatggatgcctacccttgtagtggtactttttagttagttgtgggggtgatgtcgttgtttgctaccattgatggtggtcaaagaaaaaaatttccctcaccccactgtggacgccaaatgttctttctggatttggcaagatcttctcatagtggtgttcctttataagctcctccacgaattgtggtaagtggtaccatacttgcaaagacactttgacattcaagttaaaggtgcagaggtatgcaagcatcaatatgtaggttgaaatcaaaatgaattacctgaaccacaactatcccttttatagtggtgagattggattatcttatctcaatctctcatcta

SEQ ID NO: 9348 - DNA, 412 bp, Glycine max
tgtaggattatggggtacccatcacatgtggtactaggtggtggtcgggcgatggtgcacaacaagttttccacatccacaaatcgcacataaacccaccatcccctgttgcccacctccaactgagctcacgtactcccatgtagcccatatcctcgtttctctcaacaccgggtccccaacaatcctaccaagcttgcccaacatccaagtaactcaacatgcaaacaacacaaaccatcacagccaagaaaatagggcaaaggcagaaaactctgcccaaaacaccaaccaaaatcacagcttttctcacttaatgaccccagtaacaattccttctttccaattcgttaaccgttggatcgactccaaaattttactggaggtctctagtacctaagcctacattttg

SEQ ID NO: 9349 - DNA, 372 bp, Glycine max
agcttcttattgtgggtttgaattaatttcgttacattttttcagaggaagttatatcaattggaagagttactcaagaagtttttgaacgtattgctgccacaaccacaaggtactttttgtttattaaatatactttgtgcgtttagatatgattaaaaatataaaattttcttatgggttgttattggttggtaactttgtgtatcttagatttttttgttgattggtaagttggtattaaatgcatgcgtgtcaattttgattgatgcttagtgattcagcaatattactgccaatacagtaagatgtagactgaatggttaccatggggttgattcaacaatcttactggcaatacagtaagttggg

SEQ ID NO: 9350 - DNA, 409 bp, Glycine max
tcattgcctaacaagccaacttacaacagcaagccccaagagactcagcataaggatgcacaggtcaaagttgagtatgtgaaaagattgtatgaccaagtgaaggtgcaaattgcaaagaagaatgaaagttatactaagcaagccaacaagaaaaggaaggaagtggtacttgaacccggtgatgatcctggacatttgaggacaaatgttttccaagaaggagggaatgatgagaatcatgaaacaggccaaatacagtctaaaggcccaagtggagaaggacgaaggcccaagtggagaaggacaaagcccccgagtggagaaggatgaatgcccaagtggagaatgatgaatgcccacaggcagatacactatctagactattaattgttgctgaaggcccaag

SEQ ID NO: 9351 - DNA, 371 bp, Glycine max
agcttgccgctagagctgacccatcaactgccctaactcttttagactggtgatccctaggctcttgaccttgacttgatagaacctctttttaagcgaaggcgtttgacttgatcccatgttttactaaagtgaaacaaaatctagtgcgaatcaaaactccgacatctatcatgggtggaatggattaatgcatgaagaaatgcatatgatacagatgcaatttatgaatacgggagcccgggaaattgtctccttcttagatacaacgtcttggggtagcacagtgcccgacgtatgtatttaaggtgacatggaccctccgttggtttgccaaagagaggggatcaagacagaacccgtgaacgatg

SEQ ID NO: 9352 - DNA, 352 bp, Glycine max
acctctcgactccagctttgattggtatccaatacgatccttgtgttttgactctcaggcacttatgatagccgccgatgattccattactgctttccataaactctatgtccttatttgacgccgcatcccatgccttgcgaacttcgtggagtgcccttgcgttgtggtacacatgaaaccccttgcgattaaaggcgtgatgcttactgctaatggcgcttcactcatgcagttaccaagctggcttattgctagaacgggattataattaattcaaccccttgtttccatcaagggaacatttggacatccttcgcatgaagacagaaacttgattcttccttccttc

SEQ ID NO: 9353 - DNA, 378 bp, Glycine max
agcttccttgagaagctagagcttatctacacacacccctctaatagctacgctcacccccatgccaaaatacattaaaatacaaaaaagtctctactacaaagattacacaaaatgctataaaatacaaggctaaaaccctatactactagaatggccaaaatacaaggcccaaaagaaggaaaacctattctaatatttacaaagaaaaatgggttcatacttaacccatgagaccaaaatctaccctaaggctcatgagaaccctagggccttctcttgcatctctgacccaatcttcttggagttttctatccaatgcccttggagggtagtattgcatcaatatatagaaaaagaccatggtcttcttagctg

SEQ ID NO: 9354 - DNA, 409 bp, Glycine max
ttctgaagttttctggttttccaaaccttgaaaacttgtgctattcatcttttcattctcttctccctttgccaaaaagaattcgccaaggactaaccgcctgaattctttttgtgtctctcttttcccttttccaaaagaacaaaggactaaccgcctgaattcttttgtgtctcccttctcccttgtcaaagaattcaaaatgacacagtctgagaattcttttgattcttcccattccctaatacaaaagtgttcaaaggactaaccgcctgagaattcttttgtatccccattcacaaagtatcaaaggtttaatagcctgagatctttgtctcaacacattggagggtacatcctttgtggtacaagtagaaggtacatctacttgggtttgactgagaacaag

SEQ ID NO: 9355 - DNA, 366 bp, Glycine max
agctcgtaagtggttcatgatgatccaactatatcaactgttggattcatctaatttatatggttccaatttacaccactcacactagatttattgcttccctcctagcaaccttctgatcaccatttgccgttgtcggaggcaatttctggcaacggcattttttttaatcctttcctcaccacctttgttcctttctctccccatcaatcccttgtcttcgactgcaattgtctttcacaaaatactggtacccctaaaatgtgaaattaaggccattccaagattgaaaagtgaaacgcaacataaacatcaaaagtgatgcatatgaccgaaagtgcattcaacatactaatcttcaacaca

SEQ ID NO: 9356 - DNA, 369 bp, Glycine max
aaaatagtgaagaatgttaatgaaaaatttggaatccctctttcccagagtggtcaacgaaaaatgctattcaaggacatcaatatcataaccacaaaaagttttccagcctagttatgcatggtcaaacatgtggggtaactggtgggtgataaataaagggggaatttaaaggattggtgaaggaaggacaatttgtgtgtggaaagacaactgggaagttatgatggatgatgatgatgtgataagagacaatatttctcaacttatagatgagaacaccactatgagttgtctctctaaagaggaaaaggtcttataaggtaaataagtggttcgcgtacgctactgcacaaaaaattcactcta

SEQ ID NO: 9357 - DNA, 362 bp, Glycine max
agcttttggttcagaactgctttctaagatggcgagtaagaaaacactttgtcaaaaacgggtcatgatcacttgatgatttttagtgagtccatagaaatttctaagttatgtccatccgaccagtagagttaggctcacgatcttggttgtacgtaacaaagtgcatattgttattattgtctaacagatgtcaaatatgttctagttcatccttccatcttatagcaaatgatctactgacttcatcctaaggctacatttaacaagcaaactaatacaagcgaatgtattatatcacatcatgtttatttgagaatagtcttgaaatttataacttgatccataatatgaattctatt

SEQ ID NO: 9358 - DNA, 389 bp, Glycine max
  unsure (1)..(389): unsure at all n locations
ngtagcacaacttgacatgatatatgtcacggtttggtttaattaacagattaaatgggacattccacattattttcatgacacaaatgcgacaatgatgatttgaaaaatttatgcgaaactagtcatgcatgcacctatgtggacactcaagtgtcaaacttttatggtcatgtaatgctagggctcacgattcatttgctctattttagtcaactcagtgttttcaaaatacgttcctttatcaattggtgcattcatccgagtctatttgtgggtgttcgaaaaactttcacagcatttacccttctagtgtatacacactttttcaaaaactggttatgatcagcgaaattctttctaagaaaagttggaaattatctcttttc

SEQ ID NO: 9359 - DNA, 360 bp, Glycine max
agcttttcgattcattctatacacccatggtggtccacattgtgtttcgtgcatttttattctcgttttgtttactttttataccccctcttgacgtgcttaagccattttactcaagtcatttctcgcttaacttaaaaataaaataaatttccaccgaacgtttgaattgtattatccgttaacttcggttaaaatgaattccgaccgttcggtcgtgccgtaaccacgtgggaaataaaaaaaaaggtaaaaaataatataataatcaaaaaacatcttttagtaaaataaagcggaaaatcaatcggaccgttttctctttgggatttctcattcttaatcgaatggattaataac

SEQ ID NO: 9360 - DNA, 393 bp, Glycine max
  unsure (1)..(393): unsure at all n locations
ntggctgcgcacgagctcagatttcgtgagtatttatagaagatgacgcattgtaatcgattacaggtattggtaatcgattacaggcccaataagccttctggtaatcgattacaggatgttgtaatcgattacaggctgcctgttcatgtgtaatcgattacactggatggtaatcgattaccagagcctatcctaggctagtttctaagagaatatctatatttatgctcaaatacatcctatatgtctaattttcactactaatacactaaattcaatcattcaattactatatacacaagaaatcataaattctatcataaaaacaagaattcaaacaagatcaaccaaaataatctacaatcaaaaggtaaaaagtaaatcaaccaa

SEQ ID NO: 9361 - DNA, 344 bp, Glycine max
agcttcacatggagctacatcattttctaacatattcaaagacattctcagtaattgaacttggattttagttgttttaaaaataaacataaaagtggaaccaacgaaattaataaggggcctttggtttgaacaaattacgtctgcatagcgcaatgcaatcatgtaacattatgaataaggaataatgaagacaaaatggacatttgggtctacaacacaacctgacaaaagggcaattgtaatgaaacatgagggaatacaataatattattgatgcagtcatgatgttgttttggccgaaattttgtttccatttgtttgaaaaaactatgacaattggg

SEQ ID NO: 9362 - DNA, 386 bp, Glycine max
tgcttgtggagcttctttggaggctggatctttgtgcttcaatgaggtcctttaatggtgattttccaccatggaaatgcaacggaagacaaacgagaagaggtgagaggaggcgacattcactagggaataagccatggaagaaagagcttcaccaccaagatgaaccttggataagaagcttggagaagatgcttcaatggaggaaaagaaagatggagagaaagagagaggggggagcacgaaattgaaggaagaaaaagagagagaagttgaactttgagttgtgtctcacaagactctcattcatcaaagttacaacaagtgttacacatgctactatttatagactaggtagcttccttgagaagttctcttgagaaaac

SEQ ID NO: 9363 - DNA, 369 bp, Glycine max
  unsure (1)..(369): unsure at all n locations
agctttagatgcctttaaagtttttaaggctgaagttgataaacaatgtggaaaacaaattaagatcgtgagatcagatagaggtggggagtactatggtagatacatagaggatggacaagcaccaggttcatttgcgaaatttcttcaagaacttgggattgttgcccaatacactatgcctagttctccggatcagaatggtgtggcagaacgaagaaatcgaaccttattcgacatggtgagaagcatgaggagtaatgtaaaacttcctcaatttttgtagattgatgctcttaagacggctgcgtatatattaaaccgagttccaaccaaggctgtctcaaagacancctttgagttattcaa

SEQ ID NO: 9364 - DNA, 267 bp, Glycine max
gttgaaaatgttctccatatacacactacggggctttctctggcagtaatgcttcctactgaatacgtgtcaataggaagaagataaagcctttattagattatcatatatatacgggaatcccgtatcttctttgatcattcaaataaatgctttaacacttgtattttgataacccggattgtgagtaaaacgatattaactaaataactacctatcaaaaaaattataacaagataaaactgtctataaggaatgaatttggac

SEQ ID NO: 9365 - DNA, 241 bp, Glycine max
agcttcaaacagctggttgtaatcgattacaataactctgtgatcgattaaaatagagagttttttcctctaaagaaacttttcttcacccacactgtgatgatgcataatgaaaaacatatatcaaatgtactaagatgcaacacccaagataacaaccaatacaaatgtcactcaagggagttgagcatacaaaagccaaaacttcttcaaaaaatcttcaagcttttccttaagcttc

SEQ ID NO: 9366 - DNA, 376 bp, Glycine max
  unsure (1)..(376): unsure at all n locations
tggaaaaggatgttttcaccttctcgctaagccaatctgctggcttagcgagcatccactaagcgtaacactcttgggctaagcgcgaggaagaatctagaagaagatgagctgtaatggttcgctaagcgcaccgcttcatctctttaagcacaccgctttagttcatctgctaagcgagaaaggtgcgctaagccaaaaatcactaatgtgcgctaagcagttcatacgtgcgctaagcgcacgagcacgaacaaggccacctatttaagcctgaaatcagattttttgaagagagtttggactgngattcagagctctgtatgtctagggtttctagagagagaaaggtccaagttctagagagtnttgagag

SEQ ID NO: 9367 - DNA, 345 bp, Glycine max
  unsure (1)..(345): unsure at all n locations
agcttgagcttcctagcataagcaccatangcattcactagtgcaatgtgatctttaacttggtggtgtatcaaatccattcgggtcctaagagggtcagatttcaatgccaaaaaggttctatgcacgtatgcattaccagtcgtgggaagatcctgttaaccaaaaacacctaaacaattacatggggttcattcaattactcaaatcaccaagtggcaaagtttaaaataacagttcgcaacagcgatttcagcctcaacatcaagggtttggactcatgtaagcaatttcccgcaatgtcaaggatcgcgacgaaaccgcaatttaaaatcttgccatgtg

SEQ ID NO: 9368 - DNA, 375 bp, Glycine max
  unsure (1)..(375): unsure at all n locations
ttttccgaaaagtttacggaaatacttcttccgttagaagaattattgaagggcaattttgtcacttcactgtttgctgggtgccccagcaataatgctgggtgcacgtagcaactcccatatgagcagcattattatagttntcgtacccaaaaaagacaaagtgaaaaaataactggatttacaatctccttcaaccaattctggatcattgaagttataagaaaaatattaactttaatggctaaacaatttacatatatttttttaaaatttgtcactgaaatttttgttaagccggtattagtgacgaaaacgcaatntttgtcgttaaattatgttactattgcattaatttcttaactagattaaaat

SEQ ID NO: 9369 - DNA, 375 bp, Glycine max
agcttatgaataaaagtaaaaatactttgttttatattggttcactcaacctaagctacgttcagttctcctttaccaaccagtaaatggtttgacaaatcaaacttgattacaacaagtgttctttcctgccacttcttgcttacaagtattctcatggccactcctagcacaacccttagattccccctaaatctaaaaacacccaagtattgttttgtcactaagttacttttggctttcgcaaatagaagtttgatatagaatcatagattctttacaacactcaaggagtgaatttacaataagattcttatctttcactaatactttgtattctacaaaggatggactctcttaatctcaacatgtttc

SEQ ID NO: 9370 - DNA, 388 bp, Glycine max
ccctgtatactatgttatctatgatattatcaacgatatttctattctcattattcttgaaaacttcatcatttcaatataaccacacctcgttaagagtttcagtgagtgctattttcaggagtgtatctctccaccatgtctttccagtttctcgaatagcccactagagttctacaccccaagttttaggttcatgagtaacttcaatccatgtaagaatctgctcccatatgaattttgtaattttgcagtccatacacagatgggcaatagattcctcagactccttacataaactacattgattttctttgatcattccaaatcttttcagcctatcttttgtgaccattctaccgtgagacgtgaaccataaattgactat

SEQ ID NO: 9371 - DNA, 375 bp, Glycine max
agctttttgttgtggaaaatcttcaccatctatacttgatcaatcctatttcacaatggtgagagcacatctcgttggggcaaggtcaagtttgcaactcctaatttcttgaagcataaaatattctctagtaacatcaaaatttacacaaaaacattaaaaaattgttttaatttctaaaaccattttatataatttattgacaaaaaaaactactattaacaaaaatcctaaagaaaaactaggaaaattgctcacaaaataaggtgcaaaaatcaattatcattacaataaggctttaaatagagaaactagcaagtctctgatggggtgatataaacaacaaataatggctacttaaaactaggcattatt

SEQ ID NO: 9372 - DNA, 418 bp, Glycine max
tcaagcttgtcatttcatccacctcaaactccttgtttaatttctcatcagcagcgtccagtacttttccttcgacgtacaattgccacatccaattcacaagaggcacaagaaattccccatctttgtaagtcctccttccgcatgcaatttcaggagccaaaaccccgaaactataaatgtatgattcttgctagccctacctctatggatatattctggggaaagataccgataaatccccactactcctgtcctttgagtccttaaccttggatccaccaactttgccatctcaaaatcaccaagcttagtgctaaaatctgtgtccaacaacacattagccaacttaatatccctatgaagaacactttgctctgcatcctcatgaagataacgaagtgccaaagccacgctt

SEQ ID NO: 9373 - DNA, 366 bp, Glycine max
agctttggggctgaaaaactatattacagcaccaaggttctagtttagctctctctctctcctctctctctcttctatttttcatttttagttttagtctctcttctctttctcttttattttcgttttttacaattccagttcagacttttagttttatcgatagaatttcgctctctatttgatcaatggaaggctaagtccgcagggttgttttctcttaaggatcaagcacagttctctttgaggttctattattactgttaaattctattcagtttttcctcttcactaattactctgaatttgtggctattaattcatgcatgcttagcggttgattaattgtctctgcgcttaatttac

SEQ ID NO: 9374 - DNA, 397 bp, Glycine max
  unsure (1)..(397): unsure at all n locations
ctaaatgacatttcaaactaggattaactccctttaacctccatataccactaaatccagatttggccttccaactctcaaaggctcactctttttctactcataacaccacattctcactttctaaccctagtttaactctacccttcatctctagcagttttccataagcaatttcagcacataaacatcacaagcatcatcataaaaaccctaaaacagaatgggtaagcttgactcacaccaaacatgacaagtttaacatgctttcatcaaatctcttcacaaataactatcataaagcataaacctagtaaaactacccatcatatctcccaaaacccaatacccacgaaaatntatgtgagaagaagtctacccaaacttgaaattttga

SEQ ID NO: 9375 - DNA, 374 bp, Glycine max
agctttaacttaatcaattcaaaagccttttgtgcttgttcattccacccaaacgcacccttcttcaaacattcggtcataggacttgctatagtgctaaaattctggataaagcgtcgataaaatgatgcaagaccaaggaaagatctcacctccgaaactgttgtagggctcggccaagtcttgatagcatccacttttgtttgatcaacggatactccatctttagacaccacatatccaagaaacaccaccctttcaaccaagaaatcacacttttccctcttcccatagagtttttgtgctcttagggtctcaaatatttgtttcaaatgagtgaaatgctcctctatagatttgctatacaccaatat

SEQ ID NO: 9376 - DNA, 407 bp, Glycine max
tgcatttggaattgcgaaagccccactccatcattatgattagtacctgacatctcaaacaaacaaatcaaacgtaacaagacaattatagttgttgtttgaatacctcacccactcaagtgtatcacacaattatggcttttctctaatgaaacactcttgccttttaccactctaattccccttgagttcttaggcaattcaagagattatggccacaacaaagaacaattcaccaatatgtgtaaggtaaggctagagagacaaggaaaaggttaaccaagaaaaggctaacaatgtttttaggcacaaatgaaggaaataaaattcagaatttaggaattcaagtaacaatccttcatgcaaccaatatattaccttaaagagatttttttttaaagttcttc

SEQ ID NO: 9377 - DNA, 385 bp, Glycine max
cagcttctatataagctaaaccattttatcaagaaacacaagttgagttttattcagaaaattagagtttatctcttttatcttagtgagagtgattctcctaagctcttgagtgattcaagaacatcctgactatatcaaaggactttcacaacctttgtgtgttgccctcgccggaaagagtgattctttccttcctttcaccttcaaccttttttctttcaaaccacaattccagaaaatccacttctgcccagaattatcttgtggccatgactctcgttttacgtgctcaaattaagtgattcttgagcctaaattgaatttcaaaacaagatctttcacctcgttttggaatcacctcatttggagccctgtagcttga

SEQ ID NO: 9378 - DNA, 402 bp, Glycine max
tccactggtaggtagcatgcttttatgtacaccatttgaaacagggagaggacaatggatgttttgaaggctgttgtatatgctcataaacaattatcaagctttgtagcccaatctttccttgaagtagctacggtcttttctagtatccttttgatctccctatttgaaactttaactcatccatttgtttgtggatgatagggtggtgctactttgtgtcgaatatcgtagtgttggaggacctttgaaagtcttggcactctaaacctagcaaagatgtttctctttaaggacttaatcattatttttgcatcattagttgcactagcaattgcttccagccacttgttcgcttccggcaagtgcaccagatcgcacaagtagtataaaacggtaaga

SEQ ID NO: 9379 - DNA, 364 bp, Glycine max
agcttaagctccttcaactgcacatggctcttaatgtttgaagagtatccttgtggaaccttcacccgacgaagacactgacaaaaacttatcttctcctttttggacaaggtatggcaagctaggggcaagtaaattttcttcccattagaccttggatgcaactgtgatcgtatgcccatatcagctagatcttgacaggtattgaagccatccttcatcttgccttgaatgttaaggagagtcccaatcacactatcacaaacatttttctccacatgcataacatcaatacaatgtctaacatcaagatcagatcagtacgaaagatcaaagaaaatggacctcttcttccatatgcaac

SEQ ID NO: 9380 - DNA, 390 bp, Glycine max
  unsure (1)..(390): unsure at all n locations
ntntgactntgtatatttttgttggtggtctctgtcataccctaatttcgtccggggattattacttgatgacatgcaataaatgaagtccagagacatctcagaaatctaaaggaagcaggcttgcgcaatccatgaaattccgtaatgtggcggaagtcgaaaagaggtgtttttgcgcaatccataagtttccgtgacttcttcgaaaggtaaaaaaggagtaaatacataatccgtaaggattcgtaaccttacgaaaggaaaataagtatctttacgaaattcgtaaagtttcgtaacgttacggaaaaagaattacaaaaaaatagaaaaggggggtgcatttagtaaaaaggggggtgtaaatagcaatcaggcccacttggg

SEQ ID NO: 9381 - DNA, 338 bp, Glycine max
agcttaaccactttgtatatttattccacgctctgtgatggatattggtggtgttatcccctttgttgatggggcaacatccattccctgtcatcacctaaaccatgccacgttaagattcctttctacttatagacataaaaatctgtttgtagagcaacatggtgcaaaggcgtatctcgaattactggcaacttgattccattataatctgttaattagtacaataaacccatcactccaacgtaatttgtagttgaccatccttcctaactctcacatctgtgtataagaagctaaactgctaatctttcgaaatgctaactaccctacataga

SEQ ID NO: 9382 - DNA, 322 bp, Glycine max
ctgctgggactttaatgcattagcccctttcagatgccccatatgtgggtttggttctgaaaattgtgttcgagacagggattaaccacattgtaagtcaaaacaaacttcccaaatctgagtaaataatcttatctgaatctgaataaatatttacctttcccattccaaatatgaacaattcgattatatcccagctccttcactattatattggatacccgtttaaaagacccataatggaaacaataagtgtgtcagagatgaagaaaaataccttaataatacctgcttgagaaacttcttggtatgactataactt

SEQ ID NO: 9383 - DNA, 364 bp, Glycine max
agcttacaaattttaaataagatctatgaaagataaatgtttgaattctaacggaaaagaatataaggctttttaattgtcatcattccaacattccctcactaatgacaatcaaatgagaaaaagaaaaagaacgaaaatttctaggcaaggaaaggtattcgcaagaaatagaaatatattttgctttcagattgtgatacgtaactcatccagataagtaacttttgtttgattaagtaacttttaagtgcagtaatttgttttttaaaacgttttgccttcccaattcttggcattgcgaaatttattttccaaaatgttgttacagtaaactacataactactcattggatgaaggaaa

SEQ ID NO: 9384 - DNA, 364 bp, Glycine max
  unsure (1)..(364): unsure at all n locations
ngcccagagaaggaatccacggaggaaatgcttatcacctcgaaagactggaaagcgngttctaatgactcctctgcggcctccacataaggcataaaggatgggcagttcaccaagatgtcttcctcgcctgatacgatgaccagatgcccttccactacgaatttcaaattttggtggagtgtagagggaacaactcccactgagtggatccacggacgccccaacagacaactgtaggggagttaatgtccattatttggaaagtaacttggcatgtgtgagggcctatctgtactgggaggtcgatctctcccctaacctctcggcgggtgtcgtcgaaggcacaaaccaccattgaact

SEQ ID NO: 9385 - DNA, 366 bp, Glycine max
agcttctcaagggggtgagcttagttattagagggtgtatgtagctaagctctagcttctcaaggaagttttctcaaagaagcttctcaaggaagttttctcaagaaagcttctcaaggaagctacctagtccataaatagaaccatgagcaagaggctccaagaagattgggctagagctgctgaagaaggccctaaggttctcatgcaccttagggtagatttctgagcccatgggccaaggttgggtccaattatctttgtacgtattagactaggatgtcattatatttggtccttgtatttagggctccatattgtaggtagggtaccctagaaatataggatttttcagcccttgtattt

SEQ ID NO: 9386 - DNA, 386 bp, Glycine max
taatcaaccccatatcaagatgcaaaacatgctgataactcactcaagcaatcacaaacaagttaatcctaactatgtgcaatgattaagaaaataaaaagagagagttgggttgcctcccagtaagcgctcgtttaacgtcattagcttgatgcatattacctcatggatctggagcaagcttggctctggccatcagaaccatctcattattaagttcctctacctttgaatagacattatggtctagtaagtgcttctcttcatcaaataggtcaaagctgatcttctgatcatctatgcccatttccaacttaccctttcccatatccaccatgcaactggctgttaacatgaagggacggcccataatcaagggaatttca

SEQ ID NO: 9387 - DNA, 370 bp, Glycine max
agcttgcttgtggagcttctatggaggctggatctttgagcttcaatgtggtcctttaatggtgatttttcaccatggagatgcagcggaaggcaaaggagaagaggagaaaggaggcgccatccactaaggaataagccatggaagaaggagcttcaccaccaagatgagccttggataagaagcttggagaggaggcttctatggaggaaaagaaagagggagagaaagagagaggggggagcacgaaattgaaggaagtaaaagggagagaagttgaactttgagttatgtctcacaagactctcattcatcaaagttacaacaagtgttacacatgcttctatttatagactaagtagcttccttg

SEQ ID NO: 9388 - DNA, 378 bp, Glycine max
tgaaggtgtgtatcccaccatttttccatagaatggttgtggttgtgggcgaaattgaggcccctccaaagtgttttgcaggggtataccaccaactgcttgccctttagtggcatatccgaggcaaggctcgaagtcggctagattgtggtggggaatttcatgtgtctcccccatgggttgagagacatgtacatgatgggagtgtatgccacattgggtggtgtatagttgggaggcaagccatatggcgggaaggcgtgctcgttttgaatttgcacatcatggggtcgtccgtacttcccaaatctttgcctaccatatctgaggttggatgattcatttggttgagatcagatggtggcatctggttcacct

SEQ ID NO: 9389 - DNA, 345 bp, Glycine max
agtttctctttctactcgagcatttttttcatttgaacccttcaatttctcccatgttatcactgctccctttgccgacagcacaggcagcaacagagataaggttaaagttcaagtgttatagcagccccaacatcaaacaaatcctctagtagacgttaacagacatctaagatacataagtcatcagtagggttaacaccaccaatgccatctagacaaaataaaactgctgtaatagtattttctctactgccaccaccacacccaaaatcgaacagaaccactgcgatggtagttccaccaccacaacttaagaaaaccattgcggattaatactaatgc

SEQ ID NO: 9390 - DNA, 360 bp, Glycine max
cgtatatgagctagtgcaaatgaagcatatagcttgcgcatgctgcaactagacaatcaatccgggggaaacaacccacatgcctaattcgaatagcaatagcgtggacataatcaccattgcgaacctcgactttgacaaggatgaagaattgtgtgaccatattattagtcaatattagaatattcaatagttcttgaacatatagtttggtattctaaaaaacatcaaattaaggtatagccatccaatgcaatgaaatacatgcgaagataaacgcttcaaaagtaataaaaccacttcggggctaaaaacggaatattttcaagttaatgaaatcacatagacacgaggtttggg

SEQ ID NO: 9391 - DNA, 345 bp, Glycine max
  unsure (1)..(345): unsure at all n locations
agctttctcttttcccgcagatacccaaaacttggcccaataaaactacgatttcggactcatcaaccgttgaatcatcgtgaaattatgacaccacctttagaacccattttcacaaattctcaccggtgctatttaagaaataatgttttagaagagagacattattctcgcacgttgatagtaaaatggaggctacaatctctctccattctctctaacgcttggaaaccctaacagagcatacagaggaaaagcttgagaaatgttanggaactacttgagacgtcgctatcactgccgaactacacacgtgagcctgcttagaggtaatggatgagttta

SEQ ID NO: 9392 - DNA, 182 bp, Glycine max
tgagctatgaagacttgcttattcatttagtgattattctctaccttcacagtttagtcagtttaagatctcttataactgtgagaaggagaaatgatctcttaatgagctcatttcatactgtgtgcaagaagagaaaatactgaagcaataaaggactgagagtgctcatgttatgagta

SEQ ID NO: 9393 - DNA, 371 bp, Glycine max
agcttcctattcatcaaagcaggataatcaaatttgcctcttcttagacccactttaatcctttcatcggtgaaaactaaatctgtaatgcttgaaggcgtgtaacccaccatcttctcatagtagaacactagtaacgtgtctactatcattgttattatctccctctccatcactgagggtgctacttgagctactagatccctccacctttggatgtattttttgaaagattcatgctccttcttacacatgttctataactgcattatatctagagccatatcagaattatactgatactgcctaatgaaggcaaccattaggtccttccaagaatggactcgggaaggttcctgattagtatacca

SEQ ID NO: 9394 - DNA, 401 bp, Glycine max
gttgctattgactccagattgctgcaaagaatgacagagatctgtatggtgatctgcagaagaacatagaccacatactcttgcaacaggtgtagatttctgaatcatggcaagctgagttactaggttgaccaaggcatcaagttttccttcaagctttttattttcagtagatgaagataaatttgtggccacctcatggactcctctaagaaaaatagcattatttcttgcactaaattgttgggagttggaagccatcttcttaatcaaattcctagcctcagcagaggtcatatcaccaagagctccaccactggcagcatcaatcatactcctctccatgttgctaagtccctcatagaaatattgaagaaggagttgctcagaaatctggtggt

SEQ ID NO: 9395 - DNA, 375 bp, Glycine max
agctttgagccaaaatcctgactcaccataaaccttgacccagggtgagaatgtcaattcttaccctcggaagcaaaaaaaaaggggagagggaaaatttccaatcaaagaggaagcaaaaaaggagagaaggaaaatttccaatcaaaggaaaaaaagagaggaaagggaattcccaatcaaagagtgggagaaagcaaaaagaaaagaaagaaaattcccaatcaaagaatgggagaaagaaaaaagagaagaagaaagggaagaaagttcccgatcaaaaaaaaataatatgcagaaaggtctttggaccggacaatatctgaacaatacagaattgtcaccaaatgaataaaaagaaggaaagggaaccat

SEQ ID NO: 9396 - DNA, 407 bp, Glycine max
tgagatgaggaagtgttgaagggtgaaacttcctgcttttattgttgaccacagtgtggtacctggagatatgtcgcgggggtcaggagaccttggggacgtcaggtggggtgctattgcccaaaaccaagcttgaccaatcccgacccaacccgggcatagtcggtcagtgagaacctgtgatgtacctaagcaggcgagctcctggcagtcaacagataaaaggaaaacaagaccacaaagcaaggaggcttgtggtggctggccagctgtgaattttgtgtaatatgtggattgtggcctctggtaatcgattaccaaaggtgagtaatcgattacaaggcttaaaattgaggacaggaggctaagatggtctctggtaatcgattaccaaggggtgtaatcga

SEQ ID NO: 9397 - DNA, 372 bp, Glycine max
agcttcttacaaagcatacggctttctggatgtagatgatgatatctatacagatggatcttatatatctatatatctatagatagatatatagatatagatatatagatatagatcatacaatgaagtaccgcacgagtgggtatataggaatccaaatctgccgaatcactcatgttatgatcttctacatcctaggtcttcccgttccttcatctggcttatgttcttcatgtagcattcagactgaatgactctatgaaattacgtcgctacttccacatggtacgggtaacgtaggagacatctctatttttcccggggggaatccttagaattaccacagcttagctttcaattcgcctctgacca

SEQ ID NO: 9398 - DNA, 255 bp, Glycine max
aaaccgagcagttctaataagatttgttatatgaatacccttacgctttgcagatatataaggtgacattttaggattccattttctagtaccgtggccaaaatgaactcctgcttccatcatctcttccaagattatgttccaatatctttttgtcatttatatttatccccacacttttctttcatttcaaaatcgaaattctataaattttttgaaatgaaagaaagagacccggtatactgaaatagaaat

SEQ ID NO: 9399 - DNA, 375 bp, Glycine max
agcttgttcatgtcctcatgggcttgaggcacaatacttctcaactaattgaactataaaaaaatcatatctttggcacttgggtataggccttacttgggagcagccacatttttgtttaaaatatgtttttctattttgaagccgtataatagcatgaaattgtcagaaaatgacaatttatggtggctttaaaaatcttaagagatcaattacaaatattttacaagatcaacgacacaattactatttttttagtttagagacctaaataaaaactcctaaatagttgagggaattaaattaaccttgaatgaacagaaacaaacaatttttcacatggatatgtaaataaaaacaccaaaattcctaatt

SEQ ID NO: 9400 - DNA, 417 bp, Glycine max
ctcaagcttatttagaataagagttgcaagtgcatcactttccacatcctcggcaataatcaataaaggtctttgtctctggagatatgtaggtgtcagcaaatatcaattattttaaaagtcaaatgcaaaagtgaatggcactgctcaccttcaaagccaactctaagactttaactatagcatttatactagagattttcttctcatgaattagaataaggggatcttcaagttcctatagacaacaagacatggcaagtgtaagtacgtacgaaacaaaagaagggtttgtgaacaagtgacttcatacaatccttctacatatattttaatgttgtgaagtagagagaagagataagtagataacatacacatttctggttcttatcgtttgtaatgaaataaggagatatg

SEQ ID NO: 9401 - DNA, 389 bp, Glycine max
caagctgtgactctatagagtctacctgtctgcctgcatgctgtcgcgcgaggcataaattcacccttatgaaaggattcactcttgaacaagggaatattaggaactactcactctttttcatgataagctacataacttctcctatatcaagtatgtcacactaatttatttttaagttttttatttctctctattgtttaaatttagtatatctcaatttaaatttgaattttgaattttaatatttgatacattatatcaatttgatagacatacagatcgtatgtatttattaaaataatttgttgacaatatggtcacagctaaaaaattacagagctacaaacttctaactaaatgcttaggtgtaacataaattggaaaat

SEQ ID NO: 9402 - DNA, 415 bp, Glycine max
  unsure (1)..(415): unsure at all n locations
ntttctcactctcattagcaggtgctactttttaactaatgtcaagcaaaaaaatatcacctgcctatgtcgtccaaaaaagtccaagccggcgtccaaaaatatcacctgcctatgtcgtccaaaaaagtccaaaaaataccaccataggcactacaagaaaaatgccttataccttcatacacctttatctacaaacatgaattagtgtaggtaaactttaaaaatactttattacctaccattatttaatgtaggttaaagtcaaagacttataattatagtttttagtataggtaaatcttggaaaaatatatataaaaaaattacctataacaatgtagtgtaggtaaaaccctataaaaacttatacctacagctaaattgtacgtaaaataaaaaagaattttactta

SEQ ID NO: 9403 - DNA, 354 bp, Glycine max
  unsure (1)..(354): unsure at all n locations
agctntggcaactccttgacaacatagtcatacatgcgccaattcttccatttctcttgtgtagcattgagataaaatcctgcacctgttccagaatgtatatgaaaatcagatatgctaaattgccaatatttaccaattatggagaaatattcagaaaagtaaaatatgccaatatccactaacccagcaataatgttcaagacagtccacatctgatttaggtgggaaagagaaacagaaagaaagagaaagagaggcgaaaggggaagaacagaatagcgaggatagagagaaagaggagagaaacagagggatcaaagaaactgtgaactgcacatcagtcataatata

SEQ ID NO: 9404 - DNA, 363 bp, Glycine max
aacaatacttattacttcgtataatggaacttgatgggctgtcaagaattagacatagtctcagtagtagagatgatctagtataaattcttacatgcatctaatctttatattgcttcttttaaatttgactaaggatgattttgtgcttgtctacatcaaagctttcttgtgctatcagatataatttttctctcgatgttttatcaaccttgtttttctttgtgaaaattgatagtcaatagattttatgtttcatagatctgagtctttttctttataaattacaatccaatccctccttgtgtgttttgtgccttttcacatatgtagtatcaaactaaacccttgaaatagactaga

SEQ ID NO: 9405 - DNA, 366 bp, Glycine max
agcttgtaggattatggggtacccatcacatgtggtactaggtggcggtcgggcgatggtgcacaacaagtttttcacatccacaaagcgcgcataaacccaccatcccctgttgcccacctccaactgagctcacgtactcccacgtagcccatatcctcgtttctctcaacaccgggtccccatcaatcctcccaagcttccacaacatccaagcaaaacaacattcaaacagcacaagctatcacagccaagcaaaacagagcacaggcagaaaactctgctcaacacatcaaccaaaatcacagcttttctcacttaaagaccacagtaacaattccttcgttccaattcgttaaccgttgg

SEQ ID NO: 9406 - DNA, 366 bp, Glycine max
attccttattttcagaacggaattctatctatagacctcccatctttaatggagagggttaccactactggaaaacccgaatgcacatttttatcgaggcaataaatctaaatatctgtgaagccatagaaatagggccttatatacccaccacagtcaatagagtttcaatagatggtagttcgtcaagtgaaagcataaccatagaaaaacctagagatagatggtctgaaaatgatagaaaacgagtacaatacatcctataagccaaaaacataataacatctgccctatgaatggatgaatatttcagagtttcaaattgtaagagtgctaaggaaatgtgggacactcttcgattaacac

SEQ ID NO: 9407 - DNA, 362 bp, Glycine max
agcttctagaatgagatcaacttgatgttctatgcttcttgaaggtggcagtccatgaggaatctccttggaaaagacatctttaaattcctgcaataagggttgaacactaggagaaacataaatagttaactgattagaattatcactctctctcttttgtgtatcactcttttcctcgggtgtatcactcttctttttcatattcctttgtggagcctcactattttctttctcttgttctctcttttctctcattctgatttggtcatcacatgcttctctaggggatagaggtttaagagtaaacgaggaagatttgactattcgtctgtagggctcttctttgttacggttcaaca

SEQ ID NO: 9408 - DNA, 266 bp, Glycine max
gatatggaagcggcctctgagcctcacatacttctacactcgggggctttgaccttatgcacttgggcctttatcctgtattcggcaagaccatgactctcatcacgattctaaagaaaaattgcgcaatgactagaagaaagatatcagtcggggatacttcaccaccgatgctggccattgagtgttctattcgatcccttaaagaaatatgcatgacggcggctaggaaatattctatcgagcgtatgcggtgatgcttcttt

SEQ ID NO: 9409 - DNA, 353 bp, Glycine max
agcttatagtatatcgagatgctcgaaattaaacatcggaagcgctcgagaaattcaatgggtcataatttttcacacggatgtccgattcgggcgcataacatatagaggcgctcaaaattgaacaacagaagctctcgtgaaattcaaatggtcataacttgtgactcggatgtccgattcaggcgcatcacatatagagacgtatgaaattgaataacggaagctctcgagaaattcaaatggtcatagcttttcacaccgaggtccgattcaggcttataacatattgatatgttcgaaattgaacataggaagctctcgtgaaattcagatgggcataacttttcaca

SEQ ID NO: 9410 - DNA, 369 bp, Glycine max
gtgcatcacttttcttatgctcggcattactctttttaggctttagactctggcgatacgtaggtgtgcacaaatctctgtcataacaccaactcaaaatcacagctgaatggaactgctcacccactaaccctaccctaagacctaaacgataacctttagactaaatacaaaattttcatggatgtcaatagtgcggtaaccctacattgtgaccgctgggatatactggcagacattcttcactcattacacatgactgtttccgcaaccagcgactatacacggatcttcttgctcttgtgcaaaattctgctgcacaattatacatcagaatctgtccaacgagtttatggcgaaaaccacact

SEQ ID NO: 9411 - DNA, 373 bp, Glycine max
agcttgcctgcattgtgttgttatcaaggtccagcatccagaacccaatagtaaatacaagaacaacccttgttcatgtccctttaaatgctctacaattttagacatatgaatttcattaatgtatgactaaggtcatcatatctgtgaaatttaaaagtcaaagaaataaaatgagtaagaaaagaactagaggatgagaacagaaacctgcaatgctcatgtgtatcacctaatacatatccagtgtctgtagaaaatccaattaatatcacctaaattataagacttgacatagcacatatgtaatgtagtataaaaaaacaaaatcaaagtaagcaattaatgtcacaaatgcttacagctagacata

SEQ ID NO: 9412 - DNA, 378 bp, Glycine max
agctaggatggcaatattattgcgtgtttcacgtactatgtactacagggtgtttgacgatgcaacaatgcgactcatgcatgaacaacaacagtggggttgaatgtatgtttcttgaacgattagtcaatgagaactatctgactcccatctatggagactataactttgttgaaaacggatgaaaagccaattgcatgcacataaaagaaaaaaatggagagcaattgcatcactgatgcacaaaatatgttagattcacacaagagcagtgtaccctacacaatattaacatgtggactcgaatagatccaagaatccataatacttgcaacatgatatgttgtaatgggaccacacatgtcatgtaatgtaatg

SEQ ID NO: 9413 - DNA, 300 bp, Glycine max
agcttgccacccagctcgcccattcgagcagggttgcttcctccaaaagcaacagccttctagaggaatcttctggagggcccaagtgggcctggttgctatttgcacccccatttttactaagtacaccccccttgcctttttttttgtgattcttttttcgtaaagttacggaaacttacgaatttcgtatcgatacttgttttctttccataatgttacggaaccttgcggattacataatcatcccctttttgacctacggaatgttacggaacctcactaattgtgcaatgatgc

SEQ ID NO: 9414 - DNA, 369 bp, Glycine max
tgataggctccacttgcttaacatgctccaaatgctccacttacacaagttgctcctaagggtccacaacttgagcttctacatatcacctccgttcagacattggaggtctaatgcatttgtcattgtcatcatgaccatcgaaactaactctttttgtgcatgcatctaaacattaaatttttatcattaggaattagaaattattaatccgagcagagattgggaattacagattattactcaataaaaaattgtttctaatcttctataccagtttctatcctgcatatttcttgctttctgtcaattcaaaatatttctttgtacttattgcttacaaaatatcaaacagacgttgcaaaaatt

SEQ ID NO: 9415 - DNA, 269 bp, Glycine max
  unsure (1)..(269): unsure at all n locations
agcttggattgattcagtctgacgagggatcgaggtttantaatttgggctaacacatagaacacaagagcatgattgattagagaaatatatttatatgcatcagcttgtttgtgagaaagacccaacatttctacctaccgctgtgatcgaggccgtacccgaatcaaataaacattagaatgcagtaactatgtagtgatcctaagtcatttcccaacgggcaatgactaaccaaatgttcataatatgctttgtaataacagtaa

SEQ ID NO: 9416 - DNA, 372 bp, Glycine max
  unsure (1)..(372): unsure at all n locations
ntgttgggcaacaatggtggaggaagaaaagaataagaaggctgcatgagagagagggagagcttctgaattttctattttgctgagtgaggagagagaacagcttttggttttttttttaaaaaaaggtttttctcttttcctattattttattataaactatgccacatgtctccatttgagtggagcaagaagggcccactttctcttttgattgtgactcatactcagccacaaacagtgggaaaaacctgacctttgaaacgctagaatcctgcctcggtttgcgtgccgtttctctggttctagttcctcgcatttctctgcgtccgtcgaggccagttttcaaaagtaatcaatatatatatcaa

SEQ ID NO: 9417 - DNA, 373 bp, Glycine max
agctttaggatgaaactcttttttctctttttctctcaattattcttcattctcctctctcttttcacttatgttctttctttttcttgcacaaattcgttgcaatttcattggtgatgatcatgaaagactaaacactcaatcaatccaaggatacactccaatcataatggagaaaaatagacaattaaatcttttttaaaagtaattaaacctaaaaaataatatattataaaaataataagaagaaatgtttgtaacatgttttctttttattgttttagaattttaatttaatttagttaataaattgaatgcaaattttatttcattctctatttaataaaacttactattaatttaatattaataa

SEQ ID NO: 9418 - DNA, 408 bp, Glycine max
tgttcgaagatcctcgagacgttataagaggggccaatctttcggaaaagactttcaagaagtttttgaagatttctcttgatgaaaactataacctgcatccttttgagttcaaccattcccacttttgcaccatggggtttgttacctggtgggagaaatattattcgacccgttcagttggagacactactatcatgatctccagacttgagagtggttttacacaaccaacggtcgagaatatccgctcaaaccttcaagctcgaggtattaaattacttttgactttctaaattgatatgtatttttgccttttctaatattcttattttcaggcaaaacaatcatgacgaagaaaagtgctgaaacgtctcgagctgatgtgagacccaagaaacccactgg

SEQ ID NO: 9419 - DNA, 371 bp, Glycine max
agcttcagctctcagcccaaaactcccttcacaaaatctgattttaggcttaaataggtggccttgttcgtgctcgtgcgcttagcgcaattttgaaccgcttagcgcatattagtgaatttcggcttagcgcgtgcctttctcgctcagcagatggactgaagcggtgcgctcagtgaacctgtacatctcatcttcttctagattcttcctcacgcttagccaatgagtgttgcgcttagcggatgctcgctaagccagtagattggcttagcaagaaggtgaaaaacaacacttcaaaacttgcctaattaacctgaaattgagagaaaatgattattaaacacacaaaatagaattactaagtattt

SEQ ID NO: 9420 - DNA, 398 bp, Glycine max
ttataagcgcgggtctgggggacgaaggtcaagtggtcgtgatatacgaagatgatgttccgagtacattggatttggtacgaccatgccctcctgatttccagctgggaaattggcgagtggaggaacgccctgacatttacgcaacgagcataatgtaaacctttacggttttaaaaactctatggttgggcctaggctttagagtttcttttgttaaggctttgtgtcttttgttttgaatttataatacaaggatctttcttaatctgttcctacgtctctacccattctcatccatttgcatgtttacttctttactttttaaaacggcaaatccgatgacgagtccctagaaggtactaatacctggggcccgcctatcaacttcgagcaag

SEQ ID NO: 9421 - DNA, 374 bp, Glycine max
agcttaggcccaactgtagagtttcttaaagccgtaaaaggtttacattatgcttgtcgcgtaaatgcctgggcgctcctccactcgccaatttcctagttggaaatcaggagggcatggtctaccaaatccgaaccactcggagcatcatcttcgcatattgcaacgacttggccttcgtcccctagacccgtgcttagaaagctcctacttatgtggcagggtgggcttccttcgtcttcttgtcttaatcgcgaaccttgacctccgtttttccttcccgcaatgcttttccttatatctgcctgtgtgggtttgtagcctaacccaaacttcccacgatttcctttggcacttatcaggctagttatgcc

SEQ ID NO: 9422 - DNA, 392 bp, Glycine max
tgagttgaggaagtgtacaagggtgaaacttcctgcttttattcgttgaccacatagtggtacctgaagatatgtcgcgggggtcaggagaccttggggacgtcaggtggggtgctattgcccaaaaccaagcttgaccaatcccgacccaacccgggcatagtcggtcagtgagaacctgtgatgtacctaaacaggcgagctcctggcagtcaacagataaaaggaacaaagaccacaaagcaaggaggcttgtggtggctggccagttgtgaactttcattgatatgtgggttatggcctctggtaatcgattaccaagggtgggtaatcgattacaaggcttaaaaatgaagacaagaggctaagatggtctctggtaatcgattacc

SEQ ID NO: 9423 - DNA, 362 bp, Glycine max
agcttaaacattcaatttcgagcgtctcgttatattacgggactcaatcagacatccgagtaaaaagttattgtcgtttgaattggctcacagctttaacattcaatttcgagcgtctcgatatatttcgggactcaatcagacatccgagtaaaaagttattgtcgtttgaattggctcagaggttcaacattcaatttcgagcgtcccgatatattacgtcactgaatcggacatccgagtaaaaagttattgtcgtttgaattggctcatagcttcaacattcaatttcgagcgtgtcgatatattacgggactcaatcggacatcccagtaaaaagttattgtcgttagaattggctc

SEQ ID NO: 9424 - DNA, 404 bp, Glycine max
  unsure (1)..(404): unsure at all n locations
ntaagccaattcatacgacaataactttttactcggatgtctgattgagtcccgtaatatatcgagacgcacaaagttgaatgtttaagctttaagccaattcatacgacaataactttttactcggatgtctgattgagtcccgtaatataacgaaacgctcgaaattgaatgttgaagctttgagccaattctaacgataataactttttactcggatgtccgattgagtctcgtaatatatcgacacgctcgaaattgaatgttgaagctctaagcctattcaaacaacaataacgttttactcggatgtccgattgagtgacgtaatatatcgggacgctcgaaattgaatgttgaacctctgagccaactcaaacgacaataactttntactcggatgt

SEQ ID NO: 9425 - DNA, 378 bp, Glycine max
agcttgtagaatggctagacataatacatggcggtgtttggtttggttcaaggataaaagggatgccccacattatttccatgacacaaatgcaaagatgatgatttggaaattttatgcaaaactggtcatgcctgcacctatgcggacactcaagtgtcaaatttttatggtcatgtgatgctagggctcaggattcatttcctctattttaaatcaacccaatgtttccaaaatatgttcttttatcaatttgtgcattcatccgagtccattttgggtactcgagaaaatttcacagcattcacccttcaggtgtacacacattttttttcccaaaaactagctatgatcagcgaatttttctttaaagaaaag

SEQ ID NO: 9426 - DNA, 431 bp, Glycine max
tgacttgatacaatactcaagcctttaagtgaaaggatgtgactcttcacctttgaatttgaatttcaacgttcaatggcactggtaatcgattaccaaaacattgtaatcgattacagctttttgaaaataattggaacattgtaaattcagtttgaaaactttttcaaactcattttgctactggtaatcgattaccataaaaatctttggtaaaggttttgtcaaaaactcatgtgctattcaaagttttgaaaaaactttttaatacttatcttgattgagtcttttcttgagtcttgaatcttgatcttgattcttgagatcttgaatcttgaatcttgattcttgattctaggctttcttcttgagtcttgaattcttcttgattcttgaactcttgaattgttcttgattcacttgagttgttc

SEQ ID NO: 9427 - DNA, 354 bp, Glycine max
  unsure (1)..(354): unsure at all n locations
agcctctcccccaatnttctattaatagggggagaagtgaagtgaaaaatggttcagccccttaggcacttatctctctttcgaatttgcttggaaaaattgtttctgtgaagaaaatccaagccgaggcgcttctgaaacgttttcctaacgtttccgtgaggaatttcgcgaaggtttcgaccgttcttcgacgttcttcattcgttcttcatcgttcttcgatcttcaacgggtaaatacctcgaaccaagcttttcgattcattctatgtacccgtggtggtccacattgtgtttcgtgtatttttattctcgtttcatttactttttatacccccctttgacgtgctta

SEQ ID NO: 9428 - DNA, 379 bp, Glycine max
tgccacccagctcgcccaggcgagctcagctagtccaggcgagcagggttgcttcctccagaagtaacagccttctggagggcccaagtgggcctggttgctatttgcacccccatttttactaagtacaccccattgcctttttttttgtgattcttttttcgtaaagttactgaaacttatgaatttcgtaacgatacttgttttctttccgtaatgttacggaaccttgcggattacataatcatcccctttttgacttacggaatgttacggaacctcactaatcatccccttttttgatttccggtgtgtcacggaaccttacggattgtgcatcaatattttcttttgttttccggcatgtcccggaatttca

SEQ ID NO: 9429 - DNA, 361 bp, Glycine max
agcttagaattatacaataacactttttgcccgaccatgaagttctttttaattatcatgctatcatggaacttcttggtcttttttttgtataactcggcattctcataggcttctaagcggatctcatctaactcactcagttgcaactttctttcctcaccaacttgatccatacagaagttgtaggtcttcactgcctagtatgctttgcgctcaatctccactggaagatgacatgcctttccatagacaacccgataaggagacattcctatgggtgctttgtaggcagtcctatgtgcccaaagagcatcatcaagcctggtactccaatctttcttgcttggctgcacagtct

SEQ ID NO: 9430 - DNA, 387 bp, Glycine max
  unsure (1)..(387): unsure at all n locations
ntaacttgagtcatcaaatgattataaatatgtgaccatggcacgaatttcaagagactgatttccttttatgcataacaaatttctttcattcaattctcttcatctttctaaaagtttttgttcaatactttctctttcaagaaaagttccttgaccaaaaacttgtgctattctttttctttattccttctctcttgtcaaaagattgaaaggactaaccgcctgagaattcttttgtttcttcctttctccctcttaacaaaagatttcaaatgactaaccacttgaaatatcttttgtttcttacaaaagatttcaaaggaataaccatctgagatatctcttttccttttcccttaaacaaaagatttcaaaggactaacc

SEQ ID NO: 9431 - DNA, 366 bp, Glycine max
  unsure (1)..(366): unsure at all n locations
agcttgaaaggacactcacatnttctactctcagtatctcttctaacaaaatctttcttcctacacctatactgaccactcctttctcaaccaattaatacaaatgaactccttcctctactactagtctgtgttagacctcataatgactgcaacaaatccatttttatgagcaactgatcgagcctattgcaaaacatcatcttatgtaccaaagacctacaacacaatccagacaatttaagttttctacatgacatacatgtcatcaaatcactcacaataatgaacattattacctgagaagtattaaaagcatccgaacaatcaacatgtggttcattcacaccacattcttgttcattt

SEQ ID NO: 9432 - DNA, 383 bp, Glycine max
  unsure (1)..(383): unsure at all n locations
ntaaacatctgccacccattgttataatataaatttatacccttcaatatcttttttttaatcttttctttttactatactttttatttttactttacattgtatatataatagaaatctaatgttttattttaatcaagaatatttttcttctaataatcattttaatcattaatatttactatactntttctatgtattgtattttaagtattaataaattcctaactcattattatttttgggtgttacagcctttcgctagttattcattcttcatcttagtcttcaataaactnttcttatgattgccatgngcctttttcctttatcgatgtgtcggtggttggctctgttttcatcacaacattaatattttatat

SEQ ID NO: 9433 - DNA, 367 bp, Glycine max
agcttcataagttgatagcatgctccaaagttagtttacaaccaaaatagatgtggcagccttaaaatgaactataaaaactcaaaaagggacacatcagagggtctcaagctgtcatctcttggggaagtgagtttctgtcaagctgtggaagtgattccaaaggggatgaagccatcgaggtggtttgcagggagatggaaaagcatgaaaaaatggtgccatcgaagcattggtggagattccagacatttaagctcttgatgatgcaactaagagagggcaaacaatgttccttagggctcctacaaatcccattctccctgcttgtactttccctcttaagaatttcttagatacacatcaa

SEQ ID NO: 9434 - DNA, 383 bp, Glycine max
  unsure (1)..(383): unsure at all n locations
ntcctgctcggngatcttttttggcttcacctctgactcgccatacaaggtcaccaggttgaaagactcatggttaaaccttcgtattgcatcttcttgatgctcgaagcatggtagcatcttctttgattatggccatctcttggacttcatccgttgtctcgagttctacccttatgttttcttcattttgttgtttctggaacaatattctccttgtcgacggttccccaactttgatgaggatcatggcgtctgtgccatatgtaagttggaaaggagtttcattggtggttgtctagggtgaacaatgataggcccagagtatactgtggagtttctccttccatagacccttagacatatcgagtctagtgtgcatg

SEQ ID NO: 9435 - DNA, 372 bp, Glycine max
agctttacatcttataaagtttttaatgattttcatatcccttatgggtggtgtatgatttgcaacatacacttgatgaaatcacctatatgagtaacaagtggggtcacttgcatgagatcttggcgagatctctagagcactcatgaatatcaggcatgcatatggcctagtagtgcaacacaacgataacaacaaatattgtgggggtgtctttgattggtagaccactatcacacgccaagtgtttttggttcatatagcttgctacaccaattacactgtgtgttaagtcctatcagtctaggtctggttcatatagcttactatatcaagtctgatgcattacatctcatgttaacctaggaattt

SEQ ID NO: 9436 - DNA, 355 bp, Glycine max
tcatggcatacctacctctatagtgttagatagggatcctaaattgacctctagattttggagggcattccaacaagcttttggggtccaagctaagttttaacactacttatcatcctcaaatggatggttagtcagagaggaccatatagacccttgaaaacatacttaaagcatgtgttcttgatgaaggtggaacttgggataagtttttaccctttataaagtttgtgtataacaatagttatcacactagcataggaatgacaccttacgaagccctttatgggaggaagtgtagatcccctttatgttggtgtgaggtgggtgagaagaccttgatagggccaaacat

SEQ ID NO: 9437 - DNA, 345 bp, Glycine max
  unsure (1)..(345): unsure at all n locations
agctttacagcagattttagtaatgacccactaacctagaattaaaataacttaatgccattaacctagggaattaaaacaaacttaatggctgagtgtaactgaaattgtggcaaccaaaagtcacccccaacagccaacaagtcagccaccatttggtctcccaaaaggctgatgcctaggttgccaattgggcccttattacaacttgaactaaagcccttttagttgattaacccaaaacatatttttggtcagccaactttacaaggattgggccattatttagacaaactaaacactctnaaatgaaataagtgnggtcatttaatcctctccatttgg

SEQ ID NO: 9438 - DNA, 365 bp, Glycine max
  unsure (1)..(365): unsure at all n locations
ttgagccaattcaaacgacaataagcttttactctgatgtctgattgagtcccgccatatatcgagacgctcgaaattgaatgttgaagctctgagccaattcaagcgacaatatctttttactcggatgtctgattgagtcctgtaatataacgagacgctcgaaattgaatgttgaacctctgagcaaattcaaacgacaataactttntactcggatgtctgattgagtcctgtcatatatcgagacgctcgaaattgaatgttgaagctctgagccaattcaaacgacaataactttttactcggatgtctgattgagtcctgtcatatatcgagacgctcgaaatagaatgttgaagctc

SEQ ID NO: 9439 - DNA, 343 bp, Glycine max
agcttcaacttggcatcagagccaagttcacgttcgcaccgcttgtacgcttgttgtccgcccgccgcgtttgccgtccagccgctgtcatttttctttgatgaccagagggttggggcgctctgagaagctcgacctaaccccacaagtcgcgtgggcatctgggcacccacgcgccgatgccagccgttgcttcttctcgtgcgtgagcgccatgcgctgactttctgacatcggaatctttgtcagaccggcgccgattgtctcgtcggcctcccaggagtccattccagccatcttttttatttttgacactcggaacgtgtcggccttgctctttttt

SEQ ID NO: 9440 - DNA, 285 bp, Glycine max
ttgacttaagtcatcaagagattataaatatgttatcatggcatgagtttcaataacaataatcatcaatctttacaataatctatctttcaatctttctacaacatcatctctcaacatctttcaatcaatctttcaatatctttctacaaaaatttctgaatcatttctcttcatctttctaaaagagttctatcaacactttctctttcaagaaaagatctttgttcaaaaactattgatattcatctttttcattctcttcttcctcttgccaaagaatga

SEQ ID NO: 9441 - DNA, 373 bp, Glycine max
agcttataagaacaacattgccttaatcatttccaaatatgcatgtgaattaggacgcatcaacaagaatcaagccaaggctattgtgcaagcaatcaatggggcaaaacacaccaaatgattataatgatggatggctcaaattctcacaaaggtaaaatcatcactttcaaattgagctttcaaaactatcatgacatgtagagaagaatcaaggatttcaagtcacaaaatgtcaagaacttttattttcaaaacaattacccattttttgaacatatcctataattcaaagaaaaatatgcaaagtcgtacgtgcacacgaaattgacccaaaatattaaactaaaaatccgacgaaactaacaacatt

SEQ ID NO: 9442 - DNA, 410 bp, Glycine max
gctttctttacaatcaatctgtccactgactaacatttctaattgtgagcctactttcttgttctttctcatctaacatacatgctcattcaaaactcatgatttcaacacatgcttcatccattcaagcaatcaactcacacaccaatttcaaaaaataattatgttcgcactgcatacttagagaatcaagccaaattgttaagtatgcttcaggacatgcatactaatcatccacaacaaaagtatgtaaacataagtataaacccatatcacaaaaaaacgagtgtactaaaaacatcataattataatatttatcaaaaaacaagaacaaaaatttaaaactcctgtgactggtcctgctgctgggtgtcttgatcctgaatatcctcctcatctgtaaagtgta

SEQ ID NO: 9443 - DNA, 380 bp, Glycine max
gcatgcaagcttcaatgaactcaaaaaacattttctcgtacttttcattccatgttatgcatgtaaaaatacccgaaaatcctttcaaaacactttgcagtgcaatctgccgacagtcctctaaacctagggttaccgaaggagcttccatcgaagtgtaacgcatcaatgacccaatgctctttattgctattaaatgtcaactctggagtacgctttctggaagtctctatatacagatgcaatccacaggcaatgcatatacagtttgcaaattcctccaagtgaacatgaatactcctctccttcagaaagcacctaaagagaggcaaggaatttgttttacttttcatatgtaaaactaacttttctatgaaaaa

SEQ ID NO: 9444 - DNA, 398 bp, Glycine max
atacaaatgaacaagagggataacttatgaagaggaggaagaacattttttgtcggggtgatctttagaagaaatttcccagcaatcaatgatactctacaagaacttaaacttctataacatacagtataaaaacttaggagacccaaaaacttgaaaatatgacttgtgattgtgaattatatttgaaaatataattgttctttcttcaaattatgtgtttcacataatcagagtagttttagtgtttttcttaatttataagcatattctactaggacaccttttttttcttgcacgtctatgttaatattatgttgtctggattgaatgcttttaaatagattcacgagttcttaggttcagcatttttgcccctaaattccaaatgtttttaa

SEQ ID NO: 9445 - DNA, 377 bp, Glycine max
agcttcttgtacgggatatttcgacattattatttatttataggggaattgtacaatacaagtcatgcactactaacagtaataagaactaacacttatcacgggcaattaaaagcactctaaacaaagccatcagagctccatcctagagaagaaagaatttagcatcaaaaggtatatttagctcctccaagcttttttaataaatgtatatattcattttgttctcttaaattaaatacaattaattcattcaatttcacttttccgtaacatgaatgatctgatccagcatcattctcaagacaaacaacaaatcatcgatagaatttttgaggcctgacttggaaatagtctggatatataacatgagaaat

SEQ ID NO: 9446 - DNA, 217 bp, Glycine max
gtgctttctaaggtgatacctcacatcataataacataagctgattgcaatttcaaagttctttatactcttagaaaaaaggtccatacactctcaatttctccttttctttcaaatcttatgattaagagaacacattctcaaatcaagaaaacaaaatcatatgattgaattgaatacttatcttctaatgatgtttctctgttcacaaataaaa

SEQ ID NO: 9447 - DNA, 256 bp, Glycine max
  unsure (1)..(256): unsure at all n locations
ctgcaggcacgcacgcttgcatgcaagctttacaatttatataagctttttgacangcagagaccgtataggcggagctcgatttgcctaatactctctcagaggatctctccagtaataacacattaggaggatagcttgaaatgtttgcggaactctaagcacgctttgtctcatcgctgcctgggcctaccaatcaccacgacatagacccccacacgtggggggtcattgtttgacggacattactgccgcc

SEQ ID NO: 9448 - DNA, 200 bp, Glycine max
ttctgtataacacagtttgatacatctatggagataacaaaaagcctggcgtgactgaaaagaaaggaatcggaagagctttcttacttcattagatgtcccaaaatggttctaaacgagtggacgtttattgtccgactataactagcggtgctgacattgcctggcacgttggacactagcccctgatcctcttacgc

SEQ ID NO: 9449 - DNA, 362 bp, Glycine max
  unsure (1)..(362): unsure at all n locations
agctngagtcaaaaaattatacctacaacaaaaaccaattgttaaacacggaagactaattaaggtacataaattgaaacacttttttttgcctttaattgtgtaaggccaagccaattatagtgagaaaaataaaatgaaaaagaaaacaatagaagaagcatttaattatgtatgaaaattgttcacagttactcatgaaattgtggtatgtgtttcacaataattactccctacttggaataatgttcaagaatatgaactttgaaacaaagtgtttctcccatcaattctaaattatgttntcataggtttttcactaggtcacctttgaagttacccatttcaatgatccgaaaata

SEQ ID NO: 9450 - DNA, 390 bp, Glycine max
  unsure (1)..(390): unsure at all n locations
tcgcttatgcgaggtgctgtaatccaagatcggtccatgctcagtgttgtctaatacagagcatgatgatgggaggcagaacaacaaatgttgtatataagataagaagctgcaattcgtcctttgcaatcacagctttcctaagccaaatgaacaaacaaacaacgaaatttaaaaaatggagaaaaggtttaagaataacaatgtccaagcaaatgtttggacttattggaaaagaacatggtagggaaaaatgaacatataataggggaatgaggtccatagcatcaacttcatatcagatgaaaagaagagagggacggnggaaatttaagccaaaaacgagaaagagagganatggatctaccatatttacatttcgtaatggat

SEQ ID NO: 9451 - DNA, 363 bp, Glycine max
agcttgtgactcttggcaatttctttaaaactagtcacttaaaaagttgtgacttttgaaaaaatcttcagaaacaagtcacttgaagaattgtgacttttggaaatgtatttttcgaaatcagtcactggtaatcaattaccattaagtgtaatcgattacacatcaaaagatgtgactcttcattttgaattttgaaaattaaaacgtttagaagctctggtaatcgattactatcttctggtaatcgattaccagagagtaaaactctttagtaatgattttgtgaaaacttcttgtgctactcaatattttggaaaactttttttagtacttatcttgattgagtcttctcttgattct

SEQ ID NO: 9452 - DNA, 386 bp, Glycine max
  unsure (1)..(386): unsure at all n locations
tcaagaagagctacaaaaagttgtttcttttacatgcccaactctcttgagtggcatttgtattgattgttgtattgtgtgttgcatcttagtctatatcatttcatatatgcatcatgcatcatcatacaggagttaaaagaaaagttctaaagttagaaaaaagtttctatagctaaaactctttattttaattgattacaggttgatcataatcgattaaacaaatgtttgaagcttgcagaaaagtgtctcgtattggtttaatagattacaggcttatagtaatcgattacacaattctttntgagacgatgattgatatntcaagagtctctactttaatcaattaccagttgatataatcaattacttctctcttaaaa

SEQ ID NO: 9453 - DNA, 364 bp, Glycine max
  unsure (1)..(364): unsure at all n locations
agcatcaagcttttcaattgctnctatattgttgcccataagggtatacgtcgtgatgcgctactaccaancatcataacccacacttattagcgacaagttcaaatactttattcaaagccattagagttccatcctatacaagaaagaatatagcatcacaaggatatatatacctccttcaagctattttaattaatggatacatccatctctgcctctataaactaaatacaattaattcattcaatttcactgatacgtaacatgaatgatctgatccagcatcattctcaagacaaacaacaaatcatcgatggaatcttcgaggcctgactcggaaatagtctggatttataacatg

SEQ ID NO: 9454 - DNA, 228 bp, Glycine max
gattaaaagaacacattctcaaatcatgaggacaaatatctatgattgaattgaatacttatcttctaatgatgtgtctctgttcacacataaaaccaaatggttgaacttacctaagtaataatcataacatgaaatagcagaaaaagcgcaggcatcataaaatgaattaatcatgtttacaccctaagtagtgatcataacaatcatgtctaataaagctgctaa

SEQ ID NO: 9455 - DNA, 368 bp, Glycine max
agctttaaaaaaggtaaaaggttatgataatttcccctttttatgtaagattgtgatagatttttattgaaaaatatataaagggctagaaggttttcaatattaaacgctgataattttgtattgaaacattattaatcttgtttttctttaaatgtaacttcaaaaatttaaaatcactatcatacaaaactctcttggttatacaaattattcaaaaggaagttttaaaatcatttaactggattttatatcagacaaattgcaaggaataaaaaatgggagtgaattgaattttcaaaaacatgacccaaaaagtttttctaaaccctcggaaagatttccttttaaaaaggttagcataattg

SEQ ID NO: 9456 - DNA, 383 bp, Glycine max
tgtccagcagttaagtgtagtgtacgactgaattgtctttaattgtggctaccctccccaccatatctcaccttaccacatcctttctttcttggtaacagtaatatttgtatcttcagctgccaggcgccgtttccttttactctctctcctcctttttcaaaatccagtttttactcactgtgatcaggctccactgctccttttcttgagaggtttggaggtcaagtggtggaattaagtatgagaaagatgaataaaacagtgaataacagataaaaacagtgggaagaaatggatgaaatagtggaattgtattatggtaggacaattacaatctcaacagctaaaggaataaaagataataatctgatagtgtacta

SEQ ID NO: 9457 - DNA, 375 bp, Glycine max
  unsure (1)..(375): unsure at all n locations
agcttcattgcctaacaagccaacttacaacagcaagccccaagagactcagcataaggatgcacaggtcaaagttgagtatgtgaaaacattgtatgaccaagtgaaggtgcaaattgcaaagaagaatgaaagttatactaagcaagccaacaagaaaaggaaggaagtggtacttgaacctggtgatgatcctggacatttgagggcaaatgttttccaagaaggagggaatgatgagaatcctgaaattggccaaatacaagctaaaagccctagtggagaaagacgaacgctcaatgtnnnaaggacaaagcccccgagtggagaatgattaaagcctatatgccaaaacattatcatgactattaattg

SEQ ID NO: 9458 - DNA, 395 bp, Glycine max
cggacttcctgtgttttgggaacctctccttcctcatgtgtacccaaaccctatcacttggttcaagcacgactttctttctgcttttgttggcttgccttgcatagctcgcatttttcttttcaatttgaaccttcacttgctcatgcaacttcttcatatactcagctttagcctgtgcatccttatgcttaaacatagcaatgttaggcataggcaacaaatcaagaggagtcaaaggattaaatccatacactatctcaaatggtgaacaattagttgtgctatggacagcccgattataagcaaactcaacatgaggcaaacaggcttcccaagatttaagatttttctttaaaacagtcctaagcagtgtgcctaaagtcctattgact

SEQ ID NO: 9459 - DNA, 334 bp, Glycine max
  unsure (1)..(334): unsure at all n locations
atcttgcccagagaaggaatccttcgaggaaatgcttaccacctcgaaagactggaaagcggcttctaaagacttctctgcggcctccacataaggcatataggatggggccgctcaccaagatgtcttcctcggctgatacgaagaccaaatgcccttccactaccaaattcaattttgggtgagtgtanagggaacaactcccaccgagtggatccacggacgccccaacaaacaactggaggggggttcatatccattatttggaaggtaacttgacaggtgtgagggcctatctgtactgggaggtctatctctcccctaacctctcggc

SEQ ID NO: 9460 - DNA, 351 bp, Glycine max
  unsure (1)..(351): unsure at all n locations
agctntgctgatgaaagtgcttctaaaacattaagaaagctagtagatgggcctaaaagaaatgttataacttggcaaggatacgacataaacaagtattccttttacacaaaagcacaagacgagaaaagtacaatgaaaaatagcggggtcaccctaagggctgaatctcaacacttcgcaagtgtacatgatgacaatccctgtgtagcttccatcccttactttgggttcattgatgaaatttgggagcttaactatgtcaaatttactgtatgtgttttcaaatataaatggattgatagcaacaccggtgtgtggaccgatgatgtangatttacgttgaaagac

SEQ ID NO: 9461 - DNA, 250 bp, Glycine max
tccatcaaaagttcttagaaatagtgactcaactttaaatctcttaattatgaagatctttgtggtgagtgagtggtgtcagtttcttgagttcaagaagaacacctcttcagttaagcaaagttttgcggaaaggattgatcacgttgtgcatatttgtactcttggctatagtgtatggatctactcatctttttgattgttcatgaatcactgaaggcatgctcaaataggtgtttctagtttggac

SEQ ID NO: 9462 - DNA, 374 bp, Glycine max
agcttctatattgcatgtcctagttggccctgacttctccgttttttttttaattgtggattacagaatttggatagggcaattgaccacaaggcattgcatgataccttttctacatttggaaatatcctttcgtgcaaggtagctacggattcatctgggcaatcaaaaggctatggctttgttcaatttgataatgaggaatctgcccaaaaagctatagagaagctgaatggtatgctgttgaatgataaacaagtgtacgtgggacccttccttcgcaagcaagagagagaaagtgctgctgacaaggcaaaattcaacaatgtttttgtgaagaatctatcagaatcaaccaccgatgatgagttgaa

SEQ ID NO: 9463 - DNA, 407 bp, Glycine max
tctcacattatatactttaacatttaaaaagtgtttataaaaatacttaaaaattactaactaataaaatcattatattaataacaaaaaacgaattcatatttttatataacacgaatttgttttttatcaacttattcttgattatcggcatgcacagttcacaacacgttgtcgaggtatagacccataaaatctttccatttaaaagtatagtttgcagggctttaatatatgtagaatatatattgtgtataaagtgttggaaataattaaagtctcacatcgattaaaactaatctcacattagaatatataagagagggacactcatcccttgaattagtttttaaaattgagttaactttttcacattatacatgttaagatggtatcgagccaatttt

SEQ ID NO: 9464 - DNA, 370 bp, Glycine max
agctttgactttgatctaggagctatgggcatgattagaccttgattgcgaagagatgttgacaaacaaagagctggaagccctgaatttgtgaggttagatggtgcagtacagaagaattcaagcactcaggaactaggaggggatcttcaacctactccaagagtgatagtagtttagtacagagtttggttgggttggtggacctaaccataagagaaggaatagaggggaataataaaagagagaaaattcaggcaattgcttaatgtggtcttgctcttcatttaagggtgataccttctcttccaagttaagtggaagagggaattaacaagggacaaattcaagtatgtgaaatcccaagctg

SEQ ID NO: 9465 - DNA, 429 bp, Glycine max
gtgactgtatacatactcaagcttatatatcaaagatctgataatttagaagttgtctgctactcaaactcggattttgctggttgcgttgactctcgcatgtcaacatctggatacatcttcatgatggctatcaaagcaatatcttggagaagtgcaaaacaatcattagttgctacttaccatggaggctgagtttatttcattatttgaagcgacatcacaaggtatttggttaaaaagtttcatggtcgatctacaagtgattgattatgttcctagaccattaaagatatattgtgataattcagctgctgtttttttgactaaaaaaaataaaagtggaagttgaagcaaacacgtcgacattaagtatttagtcttgaaggaacatgtcaaagcaaattaaatcatcattgaaaacatcag

SEQ ID NO: 9466 - DNA, 373 bp, Glycine max
agcttcggaagaaagtgatgaggtacaagccctaaaggcagagcttgaaagagcccgggtagtcgaagagaagttcaagtccatagccatcaaagtctgaaaagagtatgatgaactaagggacgtcaatatggccacagctgaagccttggaacgaagaggtgaaaggaatcatcacgggtcaaaggcatgatctccgaagaggtgaaaggaatcatcacgggtcaaaggcatgatcttgaaggacgagctaaaggtttgccttaggtcgaaaagaaatttgtcccaacagttaagcgagactgaagggaatatgtgggccatcatcgataagtgcaaagagaagctaaatctagcggcgactcacgagcaa

SEQ ID NO: 9467 - DNA, 406 bp, Glycine max
tgtgtaaattgtatcaaactcttccaatttatggttattttgtagtgttataagtatttttttgttaagtataggtaataaatactaagtacttccattttgtgtgtttaataatcattttctctcaatttcaagttaattaggcaagctttgaaaagtgttgtttttcaccttctcgctaagctaatctactggtttagcgagcgttcgctaagcacaacactcattggctaagcgcgaggaagactctggaagaagatgagctgtataggttctctaagtgcaccgcttcagtccatccgctaagcgagaaaggcacgcgctaagccaaaattcactaatgtgcgctaagcggtccataattgcgctaagcgcacgagcacgtacaaggccacctatttaagcc

SEQ ID NO: 9468 - DNA, 376 bp, Glycine max
agcttgtaatgtctcttggtgatggtattgagatgcccgatctttttagtgttggccagtttggagagcaagtctactctagtgttgttctcccttggtatgtggaacaactcaaagcaatcaaagtcatcaatgagggtttttgcaacatgatagtacttgaaccttggcttgatatttgtttgcaacttgcccttaaacaaggtatgagtcagtgtaacaccttatctttttggctttaacttcttttgctagctttaggcatgttataagtgcctcatatttagcttgattgtttgatgctttgaaattgagcttgagagcttgctctaaagtaacattgtcgagcccttcaaggatgatgcttgtccctact

SEQ ID NO: 9469 - DNA, 410 bp, Glycine max
tgcaggaagctccatgcctccatgtgatcaaacatattcctacagaacaagaaatctaaaatgtaccaaggcccggaaaataattgtcccccaaacgtttaatatgggacaagagaccttcgatatgcaacaccagaataacaaaagccttaacaagggagttataaggttgacttggtgattgaagagagatgggggagggagaggtcgtggattcaaatctctcccactaacaaaaattaacaaattaaccattaacattggtcttttgaaaaaaaaaacttaacaaatatggattttggccaagtttaaataaacttctccataagtacttgtagcagcagaaattaagaagttaaaacgaattgagcttcttatataagctaaaattaacttgtccacttaacttc

SEQ ID NO: 9470 - DNA, 367 bp, Glycine max
tcacaaaatatatatatatatatatatatatatatatatatatatatatatatatacatatatatatatatatatatatatatatatatgtttaggtagaaagataccttggatatgcatgtatgtagcaaaaaaaatttcacaaaatatatatatgtatgtttaggtagcaagataccttggatatgcatgtatatagcaaaaatatctcacaaaacatatatacgtatgtttaggtagcaagatacctgggacacacatgtatatagcaaaatacctcacaaaaatatacgtatgtttaggtagaaaaatacctcatgaaaaaaaagagagcgagcgagaaaagaataagaagaaaaaaataatt

SEQ ID NO: 9471 - DNA, 415 bp, Glycine max
tataagaacaaaattgcctcaatcatttccaaatatgcatgtgaattaggaagcatcaacaagaatcaagccaaggctattgtgcaagcaatcaatggggcaaaacacaccaaatgattatgatgatggatggctcaaattctcacaaaggtaaactcatcactttcaaattgagctttcaaaactatcatgacatgtagaggagaatcaaggatttcaattcacaaaatgtcaagaacttttattttcaaaacaattacccatttcttgaacatatcctataattcaaagaaaaacatgcaaagtcgtacatgcacacaaaattgacccaaaatattaaactaaaaattacaagccttaaatgaaaaaccatgatatcaccatatctttaaggaattttggagctttggaattg

SEQ ID NO: 9472 - DNA, 358 bp, Glycine max
agcttgcattcattataagaaaattaacatgtgattagaagtatgactggaaatgttagtcagtttgtcagattgattgtgaaggaatgcattgactgtatcccggtgagagtgtgatccttaaattttgagagaaacgactatcatttagtactgatttttgcatgaatctctgaagtatggactgaatgcatgtaactgaggatgatgaaggccatgtttgattgtgatagccacttagccaaaaaactgaccacgtgcttgaatgatttatcccttgcacccaatttgagctgaatgaattattgattgattgaaccttgagcctatatagtgttatctcctaataccttgtctt

SEQ ID NO: 9473 - DNA, 389 bp, Glycine max
tgtcaaacccaatgtttgcccttgttgagcctcttcattgccaaattttgcattcataaaaatctaaggtatgcaagcttcacccttgcaagttttcctattattcacttttatctatgtaggattacaagtctgcaagaacaaaaaaaactgcctttggttgagccaacccaggtttgtccttggttcagaaatccaaggtccatccttagcataaaaacccaaggtctacccttggaatgcactcctacaaacccaaggcatgcccttggtcaccatagtcaaaagtccagattctataaggcaaaacaaactaccactaaactggtcagtaaaaccttcaaccaagtggaagtcacactaactcctcacaaccatcagaggagaag

SEQ ID NO: 9474 - DNA, 345 bp, Glycine max
agcttggttaaaccaatctctcttattccctccttgaacttgcctaagcttcactacacagatcctatccttcctccaacggcatgccccctaaaatctccttacagcccttgcagtaccctaacccaaagactgtctttttccactaacatacaccacctctggaaaatttaagagtctactactacaatcatagttacagctgagttgtcatttaaaatcattcatgatatggtatgagaaggtatgttcataggaaatcaaaacttttttacacttctttatagctatagctatgccatacaattatgatcctaaaattccctttccttagaatcaaaacat

SEQ ID NO: 9475 - DNA, 378 bp, Glycine max
ttctattccatacaaagtatcgtctgagtatttttaatctcctatgaccaattcttcaattccctaagatggctctccacttttgaaacacacgaaatatgtgcatgacactttagttcaactgtttttagaggatcccactcacatttatactctgatgagtcctctgttgaagttggtagcgatagctaatcctactattatctcagaggccaagcagaaagtttatgactaaatctctctactacttggagatttggaagtgaattatgagcttaacaccaagctcaaggatcaaagcagcaaaaagttacaatggctgaacaatagaatagtcgattcataatcatgtgctttgacttctaattccttgtactt

SEQ ID NO: 9476 - DNA, 366 bp, Glycine max
agctttctagcttttcattggtgtattttgatctccttttggtgctctaaattgtgggagtgtgctcaaatatatggggcaattttgatttgttttcttgcttgattaggttgaattaggggttggtatgagatggccctaggcctataatgcattttgaaacaataggacatgccacattgtccccgttctcttgctattgatgcctaaacgcgcgcccaccaagtgttcggtgaaatgcctcaatggcattagcgtgtgacttttgtaaggagacaacccatggggtattttggtttgtgcatattttctatttttttggaatatgtattcattcccgaaaaaggctagagtaattgccccaca

SEQ ID NO: 9477 - DNA, 393 bp, Glycine max
  unsure (1)..(393): unsure at all n locations
atataccatacacattcaaaatctatgtatctataacctctcaatccattggatnttcaaggtacgagacagtgaaaatgagaatggcgttattatggagctgactctcatatgaaacatctctataacattaatctacacttgctcaaactggatatacgatgaagactacaccgaatcaaaatttgatccctcaacccccaatttaccctacaaatggctcttgctttcaccttaatcactcatttatctcctttgctcaaaccaagctttcccacaagtcctgaatgacattttaaactatgattaactcactttagcctccaattaccactaaatccagatttagcttttcaaacactcagagcctcacacttttgcactcatatcact

SEQ ID NO: 9478 - DNA, 193 bp, Glycine max
agcttgagtgagccactgtagagtgagtcaattttgaaaacacatccttgtaaccctactattcttttgtatagtggaagaatctccatattagagaattataatcacgtgctctcattactacctttaataactaagtgcctatcttaacttcacgaagcaggaaagttcactattttcccaacagatacga

SEQ ID NO: 9479 - DNA, 377 bp, Glycine max
tctagccaaatggacttaccttgaattaattcctttgatagcccttttgagccttgtttccctttccttgttttgaagctcactacaagccttaagtgaaaaaccatgatattaccatatccttaaggaattttggagctttggaattgttttgggaataagtgtggggggcttttgtttcattggacaacttgttttgttggctatgcttcatgatgtattttgggtcatacttgatgtacattgtatattggttaaatgttggacatgctgaatgaaatgttgtttctcaaaggctaaagagtaaaaaaaaaaaaatcgaaaaaaaaaaattcgaaaaaagaaaaagaaaagcaataaagttgagtgaataagat

SEQ ID NO: 9480 - DNA, 342 bp, Glycine max
agcttgcttgtggggcttctactgaggctggatctttgagcttcaatgagatcctttaatggtgattttccaccatggagatgcagcggaaaacaaaggagaagaggtgaaaagaagcgtcatcccctatggaataagccatgaaagaatgagcttcaccaccaagataagccttggataagaagcttggagaggatgcttcaatggaggaaaagaaagagggagagaaagagagaagggggagcacgaaattgaaggaagacaaagggagagaagttgaactctgagttgtgtctcacaagactctcattcatcaaaagtacaacaagtgttacacatgct

SEQ ID NO: 9481 - DNA, 374 bp, Glycine max
tctccatgcaaacttcattagagaggtcaggttttgtacttggcttgccaatgccgtcatggtcaaaaaggccaacggcaaatggcgaatgtgcaccgactacactaatctgaacagggcataccccaaagacgtgtaccctctccccagcatcaataggttggtcgatgaagcgtccgaattccaggtgctaaccttcttggatgcctacttcggatacaactagattagaatgcatcctctagatgaggagaaaatgaaattcataactaaaaatgtcaacttttgttacaaggtcataccattcggcctaaaaaatgcaagcgcgacattccaatgaccaatggaccgagtcttcaaacaacagatcggac

SEQ ID NO: 9482 - DNA, 337 bp, Glycine max
  unsure (1)..(337): unsure at all n locations
agctngtaattgattaaaccgatttgaggcatttctttacaagcttaaaaccaacttgtgtaatcgattactgtaaggttataatcgattaaaataaagttttaacaaatgaagaaattttctaactttaaaaactttctccttactcctgcatgatgatgcataatggatatatgaaatgatagagactaagatgcaacacaccacacaacaatcaatacaaatgtccttcaaaaagttaggcatgtaaaagataaaactgttcaaggttcaggctaagtcttctgttactcccctatctctaacatgatgcagccgctggtgtcgccatgacaaa

SEQ ID NO: 9483 - DNA, 374 bp, Glycine max
tcaatgcaaggaaacatgcttatggctaggaatccaaaatttgggtttaggattagaaaagcatgaaaatagggacttttttgtaaggatttgagctgccccatgattggcactttgcacttaagttacgtgggagatgcttttcaatggtgtgtagatatatgtgaatatatggcataaaaatatgttgcaaagtgtgtgaatatatggcataagaataccttgcaaagtgaatgaatagtaaataatgcatttcaaaatatgtatatttgtggataagtagcataaggagccttttaaaaaaaaatgtacccgtgccaaagatggcacaagaatgcttcccaaatgaatatatgatgtggaattgcccctca

SEQ ID NO: 9484 - DNA, 372 bp, Glycine max
agcttgacatagcataatgacatgttttctaaaatgggtggaagccggatgtcgttgtttttggttgatgatggtattgtggtcaaaattgcaaatttgattatgggatcaatatcacacagtcctgtgattttttatgctccctgcaatcttaatctacatgaaaaatgcaacttggtgtgatcaataggattgcatgattttggatgtagaatctaaggaattggacgatcctactatgcataggaaaaaatccatcccaatccaattggaaaaaccccttgaacattgtttccttgttcatttcaacttgtctaaatcttattctcttttctgcagttcagatttgcattcatcttatatggctctttt

SEQ ID NO: 9485 - DNA, 413 bp, Glycine max
attgctttgtttttgtgctgctatataacaacaaattacccaagaaaaatccattttcttcgtatacaaaacaacaaactcatcataaaatacaaaaaggtcgaaccttttggcttgaaaaatcgaaaagcttcgtatacaaaaccacaaactcatgataaaatacaaaaagatcggaccttttggcttgaaataccatcgtacaggccgagccaagccgaaaacgaaaaacaaaaatgaggaagaaagacaatgaaaaatggaaaccatggagatgaaatccaaacgagagagaattcagaggtcacaatggaaatggaaatcggaaaattgcaaaggcatgaacactgtagagccaagcccaactcgaaaagacaaaacaataactgtagcgttggtggaaacgaaaaaat

SEQ ID NO: 9486 - DNA, 371 bp, Glycine max
agcttgagtaagcctctcctagatagaagataaatttcttgggaagtctttatcctcaagtttgggtgagccaccgtagagctagttaatcccaagacaagagtgaatccacttcttatagtgagagagagtctctttgagagagaagataattagcttggaatgtctctatcctcaagcttgagtgagtcaccatatagtgaatcgattttgtgaacacattcttgtaaccctactatcactttgtatagtggatgaatcttcatattggagaattataatcgagtgctcccattactacctttaattactaagtgcctatgtcaatttcaagaatcgcgaaagtccggattctcccaacatgatgtgaa

SEQ ID NO: 9487 - DNA, 378 bp, Glycine max
agcttcaaccaagaggggatggtccatttcaagtacttgaaaagataaatgacaatgcgaacaagattggattgcctagtgagtataatgtgagtactacatctaatgtgtttgacttaactctttttgatgtagatggagaagccgatttgagaacaaatccttttgaagagggagagagtgataaggacaaggcaaggaataagggcaaggaacctttagaaggacttggaggacctatggcaagggctagaacaaagaaggccaaggaagctcttcaacaagtgttaaccatgctatttgaatttaggcccaagttacaagtggagaaacttcggattgttaattgcaccatgttccaagaagaatagaggatgc

SEQ ID NO: 9488 - DNA, 408 bp, Glycine max
tgagatgaggaagtgttgaagggtgaaacttcctgcttttattgttgaccacagagtggtacctggagatatgtcgcgggggtcaggagaccttggggacgtcaggtggggtgctattgcccaaaaccaagcttgaccaatcccgacccaacccgggcatagtcggtcagtgagaacctgtgatgtacctaaacaggcgagctcctggcagtcaacagataaaaggaaccaagaccacaaagcaaggaggcttgtggtggctggccagctgtgaaacttgattgatatgtgagatatggtctctggtaatcgattaccaagggtgggtaatcgattacgaggcttaaaaatgaagacaggaggctaagatggtctctggtaatcgattaccacggggtgtaatcgatt

SEQ ID NO: 9489 - DNA, 376 bp, Glycine max
agctttccttgtgtctcaaacggtgttagtttcattaacaaaattatgcatgtgattggtatgtgatgtttcaatgattttttgttgtcaaaatgtccccaccctttcctcgtgtaattccattttccagaaaaaatcgattgcaattgatttattgaagttgtactctagtgcttccgactatcttacttttcatatttctatttcttcaaatggcttcctaaaaatcttgatagttctgaagtcattttttctcaaacacccaaagaagctattcaaacaatgtgaaaacacatttgaggtgcaattgaaattcaaggggaacaattgttaatgacaatttgaggcaacaagaacaaaatttctaacttttggt

SEQ ID NO: 9490 - DNA, 410 bp, Glycine max
tgtgcctcttcacgtctggaatatgaatgtagcatatagatccaaagacccttaggtgctttactgatggctttttcccgttccaagcttcaattggagtcttgtcttttatagacttagttggacatctgttgagtatgtaaatagcagtgtagactgcttcagcccagaatgtgttaggtagtcccttctccttgagcatcgatctagccatttccataattgtgcgattctttctctcagacactccattttgttgaggagaatatgcgactgtaagtttacgctcaatgccttcatcctcacaaaatctttcaaactcgcgagaggtgtactctttgccgcgatcacttcttagtacttttatccattttccactttgattttcaacaagggccttgaactttttg

SEQ ID NO: 9491 - DNA, 246 bp, Glycine max
agcttgccgccacggagttttcctactatgctcttgtgtggtggaacaagctacaaaaggagagagcaagaaatgaagagccaatggttgatacatggacggagatgaaaaagatcatgaggaagcggtatgttccggctagttactcaagggacttgaaattcaagctccaaaaactaacccaaggcaacaagggggttgaggagtatttcaaggaaatggatgtgctcatgattcaagcaaata

SEQ ID NO: 9492 - DNA, 516 bp, Glycine max
  unsure (1)..(516): unsure at all n locations
aagaacagtaagtgcgactnncnnactntngganggcgaataggtaaaaggttatataanaccaaaaaggtaggaagagtgaagcatggaaaccaaaatgaagatgagaggcatgatacctgaaaaccagngtnnnanntcnacggaaagannaatttagtggggaagactttggggggcaagaagagaaggaaaagagggggaagaaaggccgagaaaaaagagatagaagaacggaagatagaggagaaaaagaaaagaggaaaatagatggtaaagaggggaaaggaggggagagaatagagggagaaaatgggaaaggaacaacagaagctaaaaacaaaaaagagaagggaggaaggaaatgacgaagaaaggaagaaatcggggaaataatagaagcgagagtggaaaaaagtagaaaaaggaaagctgagaaaaagaggaatggggataagagagaaaaaggaaggctgagaagagagaaaaagatagggagaaagaggaaatggaaag

SEQ ID NO: 9493 - DNA, 362 bp, Glycine max
agcttatagagaagaacaatgatgacattgcaggcctttaagaacaatgggttgtaggcagacattccatactttgctagaataagtgaccctaaagaagggacaaataagagcaatcacaccttccactgtaaagtctagtaatagtttcatgccaatagaaaaccaaaaagttttttcaagcattgtgtttttacaaattacaaataaattattagggatgagaggggtattctataatacctgtaaccacttaattttagacactggaagaaaaagatatcacaatcttttccagtgaaagcaaatcattcaattaatatgaacatcactatatttttatagaaaaaaatgaagaaaag

SEQ ID NO: 9494 - DNA, 389 bp, Glycine max
  unsure (1)..(389): unsure at all n locations
ntgacttgagacatcaaaagattataaatatgtgtccatggcatgaattttaagatgagatcaatcatctatctttcaatcttgtctcaaacatcattcaatatctttcaactctttctacagaaatttctaattttttttctttccatctttctaaaagtttttgttcaaaactttctcttcaaagaaaagttctttgttcaaaaacttgtgttattcatctttttcattctctgctccctttgctaaaagaacaaaggactaaccgcctgaattcttttgtgtctctcttctcccttacaaaagagtcaaaggactaaccgcctgagaattcttttggttcttccctttcccttaagcaaaagatttcaaaggactaaccgcctgag

SEQ ID NO: 9495 - DNA, 310 bp, Glycine max
  unsure (1)..(310): unsure at all n locations
atattcaattaaaaagaaactttttattattatgaaaaggcaattgatgtataaaaaatattatttaaccaatcattagggatgatacaattaaacctaaacgaaaagttggcatgcagtattaacatagctttgtcatacataaataacaataataaagaaaattattaaggattacatngattatgtcccctcaataactaaaaatttacaaagtagaatttaatatgttgttttaattatttaaaattatgatttattagaaataaactattttaataatattctgaagttataatggatatattta

SEQ ID NO: 9496 - DNA, 392 bp, Glycine max
  unsure (1)..(392): unsure at all n locations
ngctaatgcaaattcttattatttatgtgttntacgacaaaaggaaaaaaattatgattgatttgtctttttctgaaactttacggctcggtaattgagatccaggtgagtgagactcaagcgaattttctgagaatgaattcagatgaatttgtaaaaatattaaaatattcagtcagcagaaggaaaaaaaaaggtgaattctccctccttttctttctctgagttttcttttttttctttttctttatttttaaactaaattacttgacattttggagaaaaaaattataatatcatttttagtttaatgtcagtgtataattgtatcatttaattatacattatcatttaaaattatttaagattatgaatttaaattttcaatatga

SEQ ID NO: 9497 - DNA, 366 bp, Glycine max
agcttctgttgttcaatttccatcgtctcgatatattatgcgcctgaatcgaacatccgagtgaaaagttatgaccatttgaatttctcaagagcttccgttgttcaatttcaagcgtctcgatatattgtgtgcctgaaatggacatccgagtcataagttatgaccatttgaattgctcaagagcttccattgttaaattttgggcgtctcgatagattatgcgcctgaatcagacctccgagttaaaagttatgaccatttgaatttctcgagagcttccgttgttcaatttcgagcgtctcgatatattatgcgcctgaatctgacatccgagtgaaaagttatgaccatttgaatttcacg

SEQ ID NO: 9498 - DNA, 391 bp, Glycine max
ttgcagcagatgtcactctactataaacccttgttagatatgtatgcaaggaagcataaatatattcgccaagatagcatcatagtggatggaaaatgctgtgttgtgatccagaatatccttccacccaagcataaagatattgggagtgtaactattccttgttcaattggacaagtcaatgtgggaaatgctcttattgacctgtgagccagtatcaatttgatgccactcttcatgtacagaagattgagagagttggaaataatgctcactcgaatgactttacaattagttgatcgcaccattaccaggccatatggagtaattgaggatgtgttggtcatagtaaaacattttatcttcctggaagactgtgtggtaatggata

SEQ ID NO: 9499 - DNA, 370 bp, Glycine max
agcttttgttcctttttataaaaatagaagttctgaaactcatcacgttgtctaaaaaggccttgaggtggatctaagtgctctgataattcattagcatattcatgatttggtggcatgctcaccactgtttgtttctttaggaaactcaccataactaaaaaagcaaaaaggcacccctataacacccgatccaaaatcaagatggataacaaagagggagtgcatgaacagatgaaggccgacatgtcggctttaaaagatcagatggcttctattatggaagccatgctaaaaattcaaaaatcaatagaagacaatgctacgtcagccgcttccaatacagctagggaaacggaatcgatgctac

SEQ ID NO: 9500 - DNA, 386 bp, Glycine max
  unsure (1)..(386): unsure at all n locations
ntacagcagaatttagtaatgacccactaacctataattaaaataacttaatgccattaacctagggaattaaaaaaaacttaatggctgagtgtaactgaaattgtggcaaccaaaagtcacccccaacagccaacaagtcagccaccatttggtctcccaaaaggctgatgcctaggttgccaattgggcccttattacaacttgaactaaacctaactaaagcccttttagttgattaacccaaaacatatttttggtcagccaactttacaaggattgggccattatttagacaaactaaacactctaaaattgagacaaggtggtgtcatttagacctcctccatttgggccatgatacaactcacaaccttggacttttc

SEQ ID NO: 9501 - DNA, 108 bp, Glycine max
agcttgcctgtccgatgcaccattatgatggcccgagttatgttggggaacgggtacgaacccggaatgggtttatgctaagacactgacgaacatcttgcctgttta

SEQ ID NO: 9502 - DNA, 360 bp, Glycine max
tcggcttattagtgcacagctccttcaagaatttatcatatcttgggatttgctatattgcatccactagaggtatgtttacctctacttttctaaatgtttccaagatctccttctttggctcttccatttttttgttggaaattgctctcggagggaatggaagaaggatatgttgcttctctttagattcacctgcatacaaattggtaggtatcttactctctaaatttttgtcatcatctttttctggagtagagtgaagctgggcaggttcatttgcagatgacgaagatgttgcttgttgaggttcttgacactgctttctccacctcaatgcaatggcactcacatattttg

SEQ ID NO: 9503 - DNA, 349 bp, Glycine max
  unsure (1)..(349): unsure at all n locations
agtttgttaagaaaaaaaaggtttaggcaattctaaaaatttgtaaattagtgattttgggaataacacaaaaaactgcacaaagattaaaaaaagttaaccatggttttaaaaaaataggtaactacccgcgattattacacaaacaattggtaattaactgcgctggagaaaactcaattaatgttatgacttccctatgtcttctttaatcataagtagggacgaatccaaaagtgtattaaaggggggcctaaagttttttacataactatttaaatatctaacttttaataaataataaagtttacaaaaatatttattattaattntatgtgtaatattatat

SEQ ID NO: 9504 - DNA, 375 bp, Glycine max
ttagacatgcacattttaagaggaagcttgtgttgtgaataattacgagccaacaagaataaggtgaagatgatgcttagatatacagattaaattcattagagcataaaccaagtcatacggtttgtggatcaacaacaaaaacaagatgtacttgatcaaagtgcttccaagctttgccattagatggatgacataacatttaaaaacttcttctgttttggtggttccatgtcatttgtcctgcagtttgcattgatgcaaacattctgtgtagctaaggaattataggcaaatagaacattgccttaactagaacttgttttttgttacttgatccagtgttgcagtcatgatacattgacttttaacaaa

SEQ ID NO: 9505 - DNA, 259 bp, Glycine max
agcttcttatccaagggaattcttggtggtgaagctccttcttccttggcttattgcctagtggatggagcctcccctatcctcttctcctttgccttccgctgcatctccatggtgaaaaatcaccattgaaggacctcattgaagctcaaagatccagcctccgtaaaagctccacaagcaagcttccatcaagtggtaatcagagcacaagagcttcaagtaggtgctccttaaacctccattaagtttttttctt

SEQ ID NO: 9506 - DNA, 374 bp, Glycine max
tgaatcggacctgagtgtgaaaaggtatgaccatttgaatttctccaaagcgttcgttgttcaatgtcgagcatctcgacatattatgcgctcgaatcgaacatccgagtgaaaagatatgaccatttgagtttctcgagagcttccgtggttcaattccgagcatcgcgacatattatgtgcccgaatctgaccttcgtgtgaaaagttatgaccatttgaatttctcgagagcttccgatgtttaatttcgagcgtctcaatatattgtaagcctgaatcggagctccgtgtgaaaagttatgaccatttgtatttctcgaaagctttcttggttcaatttcgagcatctcgacatattatgcgcccgaatc

SEQ ID NO: 9507 - DNA, 388 bp, Glycine max
  unsure (1)..(388): unsure at all n locations
agcgctttggacttgccgcgtcttgagcactgagctgcagcttggcatgaaatgctgtgacactctgtgtgcagaaattgacaacattgagcttacgagatctcctctttaggtacctctacaaggagctaaatagtatataaaatatgaacaaaaagtgaacgtgtatggaactctctaaacagggttatgtcaattataatactaggttcactgatcattgcttgtattgatagacttgcactataaaagcaattgtatttactgtttaaaaatttcaacgtaatacctagtctatataaaatcattgcgagcatttgtgtcctcagatgtctagattttgctgcaattactaaatattctcacatataattctatacaatctatn

SEQ ID NO: 9508 - DNA, 306 bp, Glycine max
  unsure (1)..(306): unsure at all n locations
tgtgtaaagatactgattattgatcagganattatganaaatgggagcagcaagtaataaagcaatgaagatcatcgagaaagcacagttcacacttcaaacatgaaggatgagcacaaaaagtttcccagaatgcacataacataaatntattgaaatgtgaaaaaaacaataagaagttatgaacaacctcatttgaattaattatacttttgatcacacaaatattaaaagttaatttattaatttatgtaagaatcatgcaggctcacatataagattcaggtgaaattatacctatntata

SEQ ID NO: 9509 - DNA, 310 bp, Glycine max
  unsure (1)..(310): unsure at all n locations
gctagatccttatctacccacactcgtctattaactaaattaacctccttgaaaataattacggataaaataaccaccacatacaatcaaacatcaaacataattactaataatatatagatatatatcanggtgttacatcctgcacctctagaacctcacaatcactcacagactcatctcatgctttcangatggcttcctcttctcgctcagttctctgctagtcttctcacagcaaaagatctcataattctctggaacttggacctttctctctctagaaatctctacacatgcaaaagcttct

SEQ ID NO: 9510 - DNA, 573 bp, Glycine max
  unsure (1)..(573): unsure at all n locations
tggcgacnaaagtgagccgttgtagttcatatcattctaagctgtatgtctgcccaagactgcgtggccccattccacacatctcatcatgagtactcttgacgtgtacctctntatgcactccttccacttataccgttacgtccgcacgagagcatgtcaccgatatctctggctccacacattcacgatattctctagtgtgccactgtggtggcacaatcactgctcactactttctgagagaaactatggagccctcagtgccttcgtcatcaactgtatcttatcatgccgggcgctctccatctacagcatcggacttctcgacagtcggtacctcaacatggctgcagctgtatctcttctccacagttacggatctgcaacatctgtgtctccacacactcgtacctagacatactttcgaatacttgtctaacttatcatatcgtcgtatggtgcataacatcttggttccggtcctatcactgtcgtgtcttctggaagtgctttgtgagaggtgacattagacgctcttgaggctactacgatgtgagtgacttgctctcc

SEQ ID NO: 9511 - DNA, 354 bp, Glycine max
  unsure (1)..(354): unsure at all n locations
gagggaaagaagtggagctntgaagtgtattcataagactttcattcatcaaagttacaacaagtgttacacatgcttctatatatagactaggtagcttccttgagaagctttcttaagaaaacttccttgagaagcttctgtgagagaacttccttgagaagctagagtttagctacacacacccatctaanaactaagctcacctccttgagaagctagagcttagctacacacccctataatagctaagctcaccccatgacaataaagacatgaaaatacataataaatcctactacaaagactactcacaatgccctgaaatacaaggctaaacccctatactactag

SEQ ID NO: 9512 - DNA, 329 bp, Glycine max
  unsure (1)..(329): unsure at all n locations
atgcctcacattatttccatgacacanatgctgaaatgatgatttggagattctatgcggaactggtcatgcatgcacctatgcggacactcaagtgtcaaatatttatggtcatgtgatgctagggctcacgattcatatcctctatattatatcaacccaatgtttccaaaatatgttcttttatcaatttgtgcattcatccgagtccattntgtgtactcgggagaattntcacagcattcacccttcaggtgtgcacacatgttttnttcaacaactagctatgatcagccaattctttcaaagagaagatggaagtcatctct

SEQ ID NO: 9513 - DNA, 434 bp, Glycine max
  unsure (1)..(434): unsure at all n locations
acctgggctgcagctgagataggaagtgtgaaggtanacttctgctttatttgtgaccacagagtggtacctggagatatgtcacggnggtcaagagatcttgagacgtcaggtggngtgctattgcccaaaaccaagcttgaccaatcccgacccaacccgggcatagtcagccagtgagaacctgtgatgtacctaaacaggcgaggtcctgacagtcaacagataataggaacaaagaccacaaagcaaggaggcttgtgtggtggctggccagctgtggactntgattgatatatgggatatggcctctggtaatcgaataccaagggtgggtaatcgattacaaggcttaanaatgaagacaagagactaagatggtctctggtaatcgattaccaagggagtgtaattgattaccaggctttgaaact

SEQ ID NO: 9514 - DNA, 366 bp, Glycine max
  unsure (1)..(366): unsure at all n locations
gtcccatatgttcttaanactggatctaattcattgcttccaaagtttcatggccttgcaggtgaagacccgcacaaacatntgaaggaatntcatattgtctgctccaccatgaaacccccagatgtccaagaggatcacatatttctgaaggctnttcctcattcattagagggagtggcaaaggactggctgtattaccttgctccaaggtccatcacgagctgggatgaccttaagagagtattcttagagaaaattttccctgcttccaggaccacagccatcaggaaggatatctcangtattagacaactcagtggagagagcctgtatgagtactgtgagagatntaagaaactatgt

SEQ ID NO: 9515 - DNA, 348 bp, Glycine max
  unsure (1)..(348): unsure at all n locations
atgtcttagaggtgtatctccgaggcagccagatgttagaattgtagtcagctgtcttcccttttgcctacctatgaatacctataggtgccaacccaaggagggatcacatgtgggaacctattatcaataagtgtgagagagcattagctaagtggaagcaaagacagttttcattcgtggggagagcgactctaattcaatcagttntaacttctattgccatttacttcttgtctcgtttcaggattccacagaaggtggtggataagttagtacgtgtgcaaagaagattcctttgtggaggaggtccanataataacataattgcctggatcaaatgggaga

SEQ ID NO: 9516 - DNA, 358 bp, Glycine max
  unsure (1)..(358): unsure at all n locations
catgatccttaggcatcattgtctctcatggggaatgcaataggatntcctatgcanaaagagtcaaaagagagggtatttatagatntaactgataaaaccgtaataatcaattaccaaatcttgcaatcgattaaataccttttgttctgcatttctagaattgtggtaatcgattacaccaactggtaatcgattatctcgatcaacagatagcanacattactctntataagcagtcgcagtcgattatgaaatctggtaatcaattattctgacttctagagggattcctaagtgttttagacacaatgtaattgattatgaaaagtggtaatcaattatctcaatgtacata

SEQ ID NO: 9517 - DNA, 276 bp, Glycine max
gagagtcctattataaaactggacgcggggcttggatgtagttggaacactctaaggcgctcgttgcttattccttattcgcgcgccctcctgttcctcctctttttctcgagagaccttcagctttatcaagccatctgggggaagactttttcatgctatacttatggatgcgcctcatacctcttcttgcttcgggacgcagggacatacatgagacgtgactaagtccctctgactccacagctctcacttcaatctcgccggagaaaacct

SEQ ID NO: 9518 - DNA, 129 bp, Glycine max
tctatgtctcgatttgagtccttgcttggttccatgactgaaatctctgatgtctatcaatataccactcagttactctaactctttctgaatatacttatctttaaagtattatttggagcttgttca

SEQ ID NO: 9519 - DNA, 183 bp, Glycine max
cgtagaggagataattcgctcatcgagactagctcgatgagcgagatctacagattataaatatgtccattagtgcgagagaatgcgtcttcaacatctctgtagctctttctctctctctctctctccaatctctcactcaaaccctagaaacccttccttcattggtgactgccatgagct

SEQ ID NO: 9520 - DNA, 269 bp, Glycine max
  unsure (1)..(269): unsure at all n locations
cttatgtcaatactcaatagcctctttgatggatgggacccaatgagatcagtttcagcacgtaatgcttggtgaaatgctttcgatcttggagatgaggtgctacccattggattttggccgttttgggtggttggggttgtgctatttccttttccttttgcagctgctcgagcgcttgttcaatggtgagggttgaagacatagtgagataatgcttgaaggaaggattaattggtgggttggtgtntgactctttgggtgtagtt

SEQ ID NO: 9521 - DNA, 254 bp, Glycine max
acataatatatcctggctaaaggcatggttgtttacaattgaaatatggtaattcttattctggttattgcgtgggtgttcaaatttaggtatcattttgccttgcgtgcatatgtgataatctagttttacacttttgatgttgcagaccactgcactaggtgcaaatattgcttgttgctggagcagatccatatgctcaagattcacagcatgggtggacaactatgcatacagctggtatgactgatgat

SEQ ID NO: 9522 - DNA, 177 bp, Glycine max
aagattctcacttgaacttgagaggaaaactgacatgacaatataaataatgggtgtcacccatgggttgggcctcgtgccctcagagaatcaatcctgaagacgaagacatgttattctatatttgacatgaacatagaatgaatgaatgcggagaatgcacggacggagactgac

SEQ ID NO: 9523 - DNA, 248 bp, Glycine max
  unsure (1)..(248): unsure at all n locations
tcgttgaccacagagaggtacctgtagatatgtcgcgtgggtcagagacctctgggacgtcacgaggagtgctatngcccacaaccaagcttgaccaatcccgacccaacccgggcatattcggtcagtgagaacctgtgatgtacctaaataggcgagctcctggcagtgaacagataataggaacatagaccacaaagcaaggaggcttgtggtggctggccagctgtgaattttgtgagatatat

SEQ ID NO: 9524 - DNA, 301 bp, Glycine max
  unsure (1)..(301): unsure at all n locations
gcgcggtctggagacaaggtctgtggtcacgatatgcataatgatgttcgagtgcattggattggtaaaccatgtctcctgattccagctgggaaattggcgagtggaggaacgccccggcatttacgcaacgagcataatgtaaacctttacgggtttaaaagctctatagttgggcctacgctctagagattttccttttgttaaggctttgtgtcttttggttttgaatntataatacaaggatctntcttcatctgttcctacgtctctacccattctcattcatttttgcatgtta

SEQ ID NO: 9525 - DNA, 354 bp, Glycine max
  unsure (1)..(354): unsure at all n locations
tgtgagaggtgctaataccttccttaacgtaaatacaactcccgaatctggaaaattcttcatgactggtttccttcggttntttccgacgttntcaagaaataaacgttggtggcgactccgtgcatttacctcctttggaagatgcacctgtgagcctcgtttcgctcgcccgcanaagggtaggttgcaacagttggcgactccgctggggactggttntgtgagttaggcctattttangannatgtgtgttagtgcttagctttactgagctntaaaagaatggctaannatttgttaaacataaacacttanacaatggangaaagctggagttgctgacatgatgtc

SEQ ID NO: 9526 - DNA, 235 bp, Glycine max
  unsure (1)..(235): unsure at all n locations
gagcctgngtagtcaaagagaagttcaagtccataaccatcattgtctgaagagagtatgatgaactaagggacgtcaatatggccaccgatgaagccttggaatgagaaaccaagaaggcccgaaaggaagaacacgaccaannacaagtttgaggggctttatanggtagcaatagtgagctcaaactctgaagaggtgaaaggaatcatcacgggtcaaaggcatgatcttg

SEQ ID NO: 9527 - DNA, 608 bp, Glycine max
  unsure (1)..(608): unsure at all n locations
nttggcacttgtcncgcgttgcttcactctcctgcngcatgcaagcttnaggcatcttgaatggcatcatcggagggtatcatgtatggcttataattcatactcgacggtagatcggctctccaaattgaaagttatcgataagagaacttctaagctgcggaggaagatgaagaagttcgagctctaatattagatctagggaaggcgagactcgccaacgagaagttcaaatcatctgctacacacatccgggaagagtgtaccgagttacaagaggaatacgcgaccactgcaagagcttttgaacaagataccaaaagggcccgcatggatgaatatggccgagagaaattccaatgagcattgtggggtagcaacaatgagctcaagcttcgaagagaggagagagatcagtcatgggtgcatggcatgatcttanaagaaagagtagtgcttgcgcgaggtcanaanggagttggctaacacttggaagcacngagcanagcatgctactatcatanggcaatacattgaagaatngaccagtccatggccccatgacannagctagtgaggatnntgacaagtgtatgccgaaaagagcn

SEQ ID NO: 9528 - DNA, 193 bp, Glycine max
aatcttctggattgctggggcaatgctgctggtaaacattaattgcattatatcttcatgaactccatgtgtgacttttcaaatttgtacaattacttttacttccgatttattatttacttcacatctttgtaaaattatataacttcctcccgattcttacaaggaaactttttttttattttaatttttt

SEQ ID NO: 9529 - DNA, 423 bp, Glycine max
  unsure (1)..(423): unsure at all n locations
cctcaccgtatgatttctgtttacatacaccatactcgcaggaggtgctacacagcacatatatgccaattcctttgttttcttttgatccttaatttcttattnttattgttggtgaagagaagactaatcagccattacatattaacataacgtgggcatgaactntgtgacccttaatatatgaactatgaagtagctacgaccccggaaaacaagggaacccaatacactctgaataccgcactgctccattctttagggttgtttatgtattggtagtatattacatntatgtgcactgcttagtataaagatgcttattatatacttaaatggataagaatttgaactgtacgctacacacagcaccgattttaaatacaaagctataaatatagatcatgttcctgtgagttactg

SEQ ID NO: 9530 - DNA, 346 bp, Glycine max
  unsure (1)..(346): unsure at all n locations
cactgtatcttgtgctgattactatacctgnggatgatagctgattactntcaccatgcatccagaattcaccaacagtntgattggcatcctctggatttggcagcaattggtaactttgacattcaatattgctgctgacaagggcatttgtatatgcatgtgaatctgtttcatgaataattggccccaagtcacgaagaaacatctgtgcatcttggaacanatcaagttcacttaacccatcttcaaaatgctggtacttccacagaatttcaacattngacaatgtaggttcagtatcaatgagatcattaatttccaagaagccatcctcattaaagtc

SEQ ID NO: 9531 - DNA, 436 bp, Glycine max
  unsure (1)..(436): unsure at all n locations
cacgagctgatnggtctatattgcttgatagacatggttaaactaccttcacgattaaaatcaggttcatgtgattcaaaagcttaatggaagagaggttcaataaagcttccttaacacgaagaaaaatagaagacctaacagtatcccattgagataaaaaaaatacgggattcaaatcgtctggccctagagctttaagggctctgatgctgaagacaaccgatntactctcctcattaaggaggtcattgtgaatgagagcaagaatcttctttgagaagttggcgaaagctccaccatacaaccagacatagatnggatcctcatccttaaacaaacctganaagaaatcttaatgttctcttatagttgtaagcatgcactcagaccatcttcaaactgagaattgaacttgttctcttcttctctagtg

SEQ ID NO: 9532 - DNA, 450 bp, Glycine max
  unsure (1)..(450): unsure at all n locations
cccgagtgacacctaactgggagagtagtttataatcatagattgttatataattgtttngtatgtcttgaagaatagattctacacttcatattacagatgtatttattctctgtttaatattcggcctctttttgtgtgtgtttgtgttagttatttttaataatattaacaattatgagaatcaaataaaaataaaaattcaaagactaacggcatcaagtatgagtcctgcttatatatagccccatccaagaatgtttccttccagaagaaaaatcattgtanaatcacagcagatcatacatgacatatcatagaattggagaagacatatgtaattgtccacctctatttgaaactgtaaccattatactcagagtagttgctctattacataactaacaagagatatattgttgtacctactctatttataccttcttatct

SEQ ID NO: 9533 - DNA, 337 bp, Glycine max
  unsure (1)..(337): unsure at all n locations
gcgcgggtctgtgagacanaggtcaagtggtctcgatatattatagatgatgttccgagtacattagattcggtacgaccatgccctcctgattccagctgggaaattggcaagtggaggaacgccccgacatttacgcaacgagcattatgtaaacctttacggttttaaaagctctatagttgggcctaggctttagagtttttccttttgttaaggctctgtgtcttttgtggtgatntataatacaaggatctttcttcatctgttcctacgtctctacccattctcattcattngcatggttacttctttntctgaaacggcagatccgatg

SEQ ID NO: 9534 - DNA, 351 bp, Glycine max
  unsure (1)..(351): unsure at all n locations
cctcaaagagagttatgcttgatcctcaagagaaaacaacgttggagacttagccttccattaatcagttgaaaacaaaattgtagattgaagtagaaatgaaattgcagaaattggaaatttattctacgtcaatagtgtgcatgaacaataaaaactggaattctaaaattctagaattattctcctcttcgacaaactctctctaaaactaaaaccttggtgctgttatataggtcctcagccccaaagcttacaaatctggtttaagtccaagcccataaataaaataaaatctggacaagataagataagattggatgaaatanaatctagatgaaataaaatctg

SEQ ID NO: 9535 - DNA, 401 bp, Glycine max
  unsure (1)..(401): unsure at all n locations
atgtcatccaatacatccttctgtccaagcgacctctaataatttcagcaattctgataccttcgaccatgttccacatccatagcctagaagaaaccttttgggaatcttcttcatcgacaactctgggcataataggcaatctctgccatattcgagaacggnggtctagagcatgccataagaagtttatttgtccaatcctaaccaacagatatagccattcttcagttgtaccaagctcttttcttactntatataattccaaactcgntatagttgttttccacctcctagacaccagccttacatggtagtaacaaattctaggaagtctagcaataatctgaagggataactcatccgggatattangaataagtcttggacattcttcaaca

SEQ ID NO: 9536 - DNA, 301 bp, Glycine max
  unsure (1)..(301): unsure at all n locations
tttattggtgaccacagagtggtacctgtagatatgtcgtcggggtcaggagacacttgggacgtcatgtggtgtgctattgcccanaaccaagcttgaccaatcccgacccaacccgggcatagtcggtcagtgagaacctgtgatgtacctaaacaggcgagctcctggcagtcaacagataaaaggaaaacaagaccacanagcaaggaggcttgtggtggctggccagctgtngaatttgtgtaatatgtgagatatggcctctggtaatcgattaccaagggtgggtaatcgatta

SEQ ID NO: 9537 - DNA, 330 bp, Glycine max
  unsure (1)..(330): unsure at all n locations
tatgactagacacgacttctatgacanatctataatgagtgaacatgtctctctagatntttgagggtgtcttacactctagtgggttttcttttaagaattatatggtttaggattcagccactaaaatagcaagacaaaactcaaaggaacctatactcaacacaattcgtggttcaagaataagaacaagaaaattgaaccatatnaaatcaaatctagcttctatagcaagtttaatcggtggaaattctaaagaatcatgttaacaacattcaacacaagacatatgaggaaatacatggagaanaanaatgaagaaacaacaat

SEQ ID NO: 9538 - DNA, 401 bp, Glycine max
  unsure (1)..(401): unsure at all n locations
gactggactaatacattctgtgcccaagtntcatggtcttgcaaggaagatcctcataagcatcttaaggcgttccatattgtttgttccaccatgaagccccttgatgtccaagaagatcatatctttctaaaggctnttcctcattctctagagggagtggcaaaagaatggctctactaccttgctcccaggtccattntcagcanggatgaccttaagagggtgttcttggagaaattcttccctgcatctaggaccactgccattagaaaagacactctangcatcanganacttagtggagaaagcttgcatgagtattgcgaaagaatcaagaaaatgtgtgcangctatcctcaccaccataattctgagcaacttcttcttcaatatttcta

SEQ ID NO: 9539 - DNA, 244 bp, Glycine max
tacaacacatccataaagttgataatcttgtgacctattaaagagcctgtactctgaggatcaatataattgtagtttatatagtttgatagcaactatatgatgcttgggaatgttttagttgtgctcattccatgcaacttgtttccatttgaagtatatgatgaatctttgagcatgcataacatgcagctaggcatgacgaattatattgtgacatatagaaacctatattcaatctgat

SEQ ID NO: 9540 - DNA, 154 bp, Glycine max
  unsure (1)..(154): unsure at all n locations
ttatcccatgntattactgatcgaggccatacccgaacaaataaacatgaaaatgaagtaactaggaagtgatcctatgtcgtttcccaacgagcaatgataaaccaaatgttcataatatacttgcagtaacagcaacgattggagggggggg

SEQ ID NO: 9541 - DNA, 402 bp, Glycine max
  unsure (1)..(402): unsure at all n locations
agcttgatgtaacagagaagaagagagcgcgagagaatacacggagaagtaatgatcgttatcaaaatanggtgcgtcanatataatntanaatgtaatttcaacatcggttntcaataaaaaaactgatgttaacaaattgatgttaaatgatcatacgttaacatcggttttctacaaaactgatgttaacggatacacattatttacaattatgccaccgcgtgtatgttaacatcgattntgtcaaaaaccaatgttaatctgtcgatgttaaaattgctttttgtagtagtcgacggtcgcacgaagaacacaaaacaagaaaacgacgtanggaatgatcgtggttgcaattcggtagcgcctcggcttcgttccctctctttctctcttctctta

SEQ ID NO: 9542 - DNA, 477 bp, Glycine max
  unsure (1)..(477): unsure at all n locations
tttgacccctgangatgatgccgctgangtccntctcatctaagcttccaagttctgcttctaagctgaaactagcgattcatttatttctctctcctcgctaatagaatcgcaaggacaactgcctgacccttctgtgctccttctcctctccanaaaacatagactaccgctgaatttttgtgctagggacggtcattaaaagacacgtataatgcgtcacaacttctggtctgaaatgacgagatgacaacccgacctttcttcccaggcactcatatccctgccacagacaaaattgcacatatgacctgatgctatgacacagagtaaaactgcgaatttgaacgatcacctaatgacaactatctgtacgtgatggtccctcatgacaagccatgatcaggataccctcactgctctgcccgtgcaaaggagaacagtattttgcgaccgctgtgcccgtataaggggaac

SEQ ID NO: 9543 - DNA, 538 bp, Glycine max
  unsure (1)..(538): unsure at all n locations
agcgccatcctngtagcagaccttatgcttagcgggcactctccagctaattcaattatgcagaagctgaatttctgcaacttccgctaagcgacctgatgcaatcctaccacgcaagggcatatggtagaagactccaagtatattgtgctagagatccaatggaaggcccgaatgttctcatgagccctaaggtagatttcgagcgcatgggctaagtatgagcccacttatctctgtacatattataatacgtttttcctttgtctgagccttgtattttggccattctattgagtagtcttcgtagtaaagactttctttttgtattttcatcgtttctgcatcggagagcttactattataaggcgtgtgtagctaagctctagcttttcactcaaggaggtaacttagctattagagaagattgtgtagtaaacnctacttctttataatcctctaacgaacctctacagaggtgcctactttaaaaggtgtggtctctacttacttctaggaattttctaagaactttacg

SEQ ID NO: 9544 - DNA, 420 bp, Glycine max
  unsure (1)..(420): unsure at all n locations
atgagacttactccttatttaatagacaacatcttatcattttgtgtttccaatanattttaaatacagtgtaataaatagagagtgtgttgcaacactactcctctntaatctttgcatcatttacttagtcttaccgaagtgtattgtgttcgtatttgattaacttanaacatgaaattgttaaatgtaaggatattcgctctttaaaatgtgagatgttacataaattatttataaaagataacaaatttacaattagtttatgaatatgtacnaaatgtgataaattaatcatacagacaacttaatgacatacttactcttanatttataaattatatcanattgatctttaaaaatataattatttcaaattatcatgacgataacactatcatattctcttgtatatatatc

SEQ ID NO: 9545 - DNA, 274 bp, Glycine max
gctgtccgtcatgtttggcttatattatgagatatatatactttttgatgcatccttaaggactctgcttcacaattactaaatcgtgattgacgatgaaatttatgggattacaggaattaaatattttaaggcttactatatctttcctactcatctacttttctttgcgtggaaactgccactaataattgtgataaaagtgacttgtgaataatgtttgctgtagtgacatattgcatgactttgcattctgatgaattcgagcgatcat

SEQ ID NO: 9546 - DNA, 258 bp, Glycine max
ctcagttcttccacggcagcctagccttacccacatgagtgatcatgtcatgactggtttgcttgagggttgtaactttcatggttgtatcaaacaagctctggatatcattgacaaagaattcttgggctttctttccaaaagaacgacatgatttatatgatcaaaggatctccaagatatccggctcaactgattgtcataacacggcacacaattgatagtcaagcttcttccattcaggtcttttatcatctg

SEQ ID NO: 9547 - DNA, 410 bp, Glycine max
  unsure (1)..(410): unsure at all n locations
gtctagttatgcatatntgtcaagtgtgtggtaaattattttttntaaccattatattggtataaaattgtttctactaaaaaatggtgaccaattttcattggaaaccttaaatgcatataagatgagtatttntcttttaatatgatntattctatacataagtgcgatcatcatttagatgcctaanaatatgtatntctttgattgcacttaacaaattcagatactagtgggtgttatttacgatgatcacttgattntntgctaaacacataagttgttgatgagtgttccataatagtanggatcgaanaccaaatttcaactntntgaggaatgaaagtcaagattttttttataaggactaaaatcaaaaatnnttgtgatttatagggactanaatatat

SEQ ID NO: 9548 - DNA, 254 bp, Glycine max
  unsure (1)..(254): unsure at all n locations
cgtccggggattattatntgatgatatacaacctttgatggccgcttcaagatacttggcaccctttgttgcacaatatgtgaagtcccgagatgtgccgaanatcaaaaggaagcaggcttacgcgatccgtgaaaattccgtaatgtgacaganatcgaaaggaagtgtttttcgcaatccgtgagttttcgtaacttcttcganagctaanaaagagtaaatacataatccgtaaggattcgtaaccttgc

SEQ ID NO: 9549 - DNA, 462 bp, Glycine max
  unsure (1)..(462): unsure at all n locations
cgttcacttgcacaagacattctattaatctaagaaaatgcactcatatacaatcaaggcagcttcgttacctagattatntacatgtacttccaaggtgtatntgttacttacatcacacacatttccttggctaaatntacatacatgcatactcaaagcantttgnggtaccaaaaattgcacatgtgcacatcttggtatttctaatacctgtacatgcacaaacttcatgatgaatcttgactatctacacaataaggtgctacatttcatgttcttttcaagattntgctacctaaagccgcatgcaaattcaagtatantttcctttgctgactaannatgtattcaaattaaaaggtatatattntttttgtaatgtattntctntacataacatgcaacnattatatatatatatatatatatatatatatatatatatatatatatatatat

SEQ ID NO: 9550 - DNA, 347 bp, Glycine max
  unsure (1)..(347): unsure at all n locations
attatacagattacatgctcattcatgctatactttattcagagtatatgaattttgctattattcacttgcgtgataatataaattaattaatctgcatctataaacttcagggtagtgatcatatttcagctatagtggatttgggatctgtcagctacatgtcactatntgagattgataactatgaatggttgcaagaatgtctatctttcaaaattaatttaatgcatatttatgctggacatnttgatagttcctgcagcttcaaatgtacttgtcgatatccatatcttctgctgacatntactttatgttaatatcttagaatgctctatatacagagc

SEQ ID NO: 9551 - DNA, 388 bp, Glycine max
  unsure (1)..(388): unsure at all n locations
ttcttgagatcaaatacaataattgttcaatgaangaaagttaaggaaaaaataattattaagtcaaaaggcatctatgtcttagaaacaaatcaagactattaattattgtaattagatgcaaatcaatacaaaatgataaaaagttgactctactgtgttaccagatcatgatctgtatctcatcgttcgaagtttcagatgatgtctctcacatacatgatttgacatagcatataagtgttgcatgtaagacctgtattcaatactctgcgtatganattctnttatctatcaagtcacaatcctatgaataatacatgaaggccataatctaaaagtggtgacctttatcanaagaacgttcactatgcagatcatctctgat

SEQ ID NO: 9552 - DNA, 320 bp, Glycine max
  unsure (1)..(320): unsure at all n locations
attcatggctatggcattgaagatctggtcacttcaacactcaagctntatgctgctgcctcaaaataatatgatgagagatctaccatgcctatatgactataatgaatcttgtgaaggatgtcttcttaaaaagcaacaaaattaccattttcaactaacaaagcatgtagagctaaagactcgtcagagttaatccacactaacatttgtggaccaatgacgacatctgcactaaacaacaacaggtatctcatcctctctattgatgacttttctagaatgactcggtctacttctctatagaacaatcaaaggtc

SEQ ID NO: 9553 - DNA, 334 bp, Glycine max
  unsure (1)..(334): unsure at all n locations
ctcacatatggcggtgagctgcgatatgaatctggcaatataattcaagcgtcccaggaaacctcagacttgcctctctgtacggngttctggcatctcaaggatagccttcaccttttcggngtctacctctatccctttctggcttacaatgaaaccaagcaatttccctgatttgaccccaaaggtacacttagcggngttcaaccttaatngatatttcttaagcctttcgaacaacttccgcaggttgacaaggtgttcttcctcggatttagatttagcaattatgtcgtccacgtagacctcgatctctngatgcatcatatcatgg

SEQ ID NO: 9554 - DNA, 310 bp, Glycine max
  unsure (1)..(310): unsure at all n locations
accgccgctgcagctctaccaatgactaccttgataanncctttttagctcttttgatccttgttccctnacctagatncgaagctcactacaagccttaatgaaaaaccatgtcatcaccatatccttaaggaattctggagctttggaattgttttgggaattagtgtggggggtttttgtttcattggattactcgttttgtggctctgctacatgatgtattttgggccatacttgatgtacattgtatatcggttaaatgtgggacatgctgaatgaaatgttgtttctcaaaggctatagagta

SEQ ID NO: 9555 - DNA, 384 bp, Glycine max
  unsure (1)..(384): unsure at all n locations
atcttgatatcggtggctcatgtataatctatccaaagttccacattcttccgtatccaatactataataaagaatggtttgctggtttcaaagctatcccatcntgatttagtgaccacacaatgctnttttcccaggctcctagttctcttaaacggtgattcttggttcttttaaagagttaatgagatttcataagatgggtatgcaaaatactgggatgttgaatcaaactcaatctgcatcacattcatcattttttntaactatcttgatttatgtgcattgatgtntaaaatactctganagcannagttttattaatgtgcatgttnntggtcatttaacgactattagtgcccataagaagctacttctatgac

SEQ ID NO: 9556 - DNA, 120 bp, Glycine max
tgaaaatcagacggatcacttttctgaagaaaggttacaaccctaatgggtatagcacctgtattacccttttcaacatataaactgagaacgtgtcttaaagagctgatctctgaagtt

SEQ ID NO: 9557 - DNA, 612 bp, Glycine max
  unsure (1)..(612): unsure at all n locations
ntgannncctttgatnacctatactagcctctcctgaggcaagcggcgtcgtccgcgtgaatcataactctatgtgaaacattttgacctgtcttacncttattatctccggcgatcattatctgaagatatacaacctctgatcgccgcttcaagatacttggcaccctttgttgcacaatatgtgaagtcccaagatgcgccgaatatcacaaggaagcaggcttactcgatccgcgaatattgcgtattgtgacagaaattcaaacgaattgtatttctcaatccgtgaagtttcgtatcttcttcgaaagctataaaagagtaaacacataatccgcatggattcgtaacctcgcggaaggaagataagtatcgatactaatctcgttaatgttcgtaacgttacggataaagagatacacaacgggtaaagcggtgtatatagtaaaaacggacgtactaatagcaatcacgcccacgtgtgccttncacattcttnctacataangttgttgctccttgatgaagcacactagcttgctaggctatgctggtgcatgctcttccttatttagtatatatacgtggatgagtgagccgcgacgggtg

SEQ ID NO: 9558 - DNA, 107 bp, Glycine max
ctatctcttctcttgccttcgctgcatctcatgggaaaatcaccatgaagactattgagctaagatcacctcataaagctcacaagcagcttcatactttcacacaa

SEQ ID NO: 9559 - DNA, 322 bp, Glycine max
accacactattactagacttgaatatagtgtgtcaagttctatgttcttctagtcagacaaacaaagtaaacagtgatcagatatactaagagggagaatctctagtttcacatttgtattatcctgcagccaatcaatattaccaagaacatgaatcaatttttagtagatagtacctatagaatggttatttgtccaagtaaaatattcccctgtactattcttctcaaaaagcccagcatgatccatcaaattcctgagatctacatactctctctcagtcaccaagtttccgccaaccctatccatggacgttatcac

SEQ ID NO: 9560 - DNA, 329 bp, Glycine max
acatccataggacaaggcccacacaaagtgtacggacatcactttgcagaggggacatctccaactccacagcttgcaaagaatgcattgagaaagcaagccgagatatcatgaataggtgcaagagtgagaatgcaatgatatggtataacctttgccaagtacgttactcctttcagagctctaaggtcgtggcttatactggacagtatccgcagcagaataatgaggagaagagagtatcggatcctataagagttacggaatacttgacatatgtaatgagcaatctctcagacgaggctgctttcaatcctgataagaacatg

SEQ ID NO: 9561 - DNA, 366 bp, Glycine max
  unsure (1)..(366): unsure at all n locations
catatgctctctatgtacacaagcatataaacaatanaagtttataacactcnctaaagtaaaacagacacaattngaccagaatgctatgttgagaatattataaaaattctgcatatcaacattaacaaggcaaaatgttgaaaattctattaacctcanaagctctccaacggcaagcagtgaaccatgtatgctgtgcacgggtgcatttttacccaatccatcttgtgttgcttcaaacattcgatagtacctgcaataaaatagaaataagggattcactctccaataggggcatattgtgcaatanatcattaaagcannaaaagcatgcgataagatgaaagtgtgtataaatgaaat

SEQ ID NO: 9562 - DNA, 285 bp, Glycine max
  unsure (1)..(285): unsure at all n locations
atctagataagataagatctagattaaataacatctagatgaatcaaatctaaataatatctagataagtgatgtgccatcattntcttctattttctanaaccctcttgcaccattntaattattgattggtcttaatcgtcaattaattaggcagttctattatttgggctcatttagctaattcgatggtctttaatctaattcaggaattaatgaaacattgngcttaatccggattntggttgtggacttgaagagggcaaataaagcagcgcttacctt

SEQ ID NO: 9563 - DNA, 136 bp, Glycine max
ctcactcattgaactaatagttcagatggactgcagttgacctcaccttacaccacttaatacacctcataaacacaactcacgtcactctcatattaaaatcacatggctgaattcacagatgatatgcaattac

SEQ ID NO: 9564 - DNA, 236 bp, Glycine max
  unsure (1)..(236): unsure at all n locations
ggaaatctggcaaagtcttgcaacctatgtctactactataaaggtcagatatgaatntgatagagcagtccccctccctcccacacacaattatatttatattatattgtgcttaaaaagttatgtgtattctaatatctcaaggcctcttaatccatggcacgttaaatcatttactcaattgttgtagtgacaattaaaattatagcagctccaagcattggtaaaatcacgt

SEQ ID NO: 9565 - DNA, 267 bp, Glycine max
  unsure (1)..(267): unsure at all n locations
actaagtcaaggttgtgagttaggaagtcttgtagttntccattagcatttagtatcttggaacaaggtattaagtatctatgtgattagtcaaatgatcactctattctagtataaataggggatcatactcttatanttgatatggtaaagagataacatcttctttttcaacatatgcatatatntccggtcactgctaacttgctaacagaatgctngagctactttatgatacctgttattactagtatgggaacattatac

SEQ ID NO: 9566 - DNA, 252 bp, Glycine max
gaaatatgagcattcttattctggctattgagtgggtgttcaaatttatgtatcattttgccttgcgagcatatgtgataatctagatttacactcttgatgtagcagaccactgcacttggtgcatatattgcttggtgctggagcagatccatatgctcaagaattacagcatgggtggacaactatgcatactagctgtatgactgatcgatgtgaattggttaaggtgagtcaaccacattcttcatt

SEQ ID NO: 9567 - DNA, 364 bp, Glycine max
  unsure (1)..(364): unsure at all n locations
atcgctgaagtcngtgctctgacccgactaactntngattccactcagtatagatggaggtgacccgacctatccacgagccgtcatctnttgtctttgcgaaaaaaanaatataaacaaagttaggttccccgaaaagacaagataagaaaggaagaaaagattctaacttgaacttgagaggaaaactgacatgaaaatataaataatgggtgtcacccatgggttgggcctcgtgccctcagagaatcaagcctgaagacgaagacatgttattctaaatttgaaatgaagaaagaatgaatgaatgcggagaaggcagggagggagactgacaagatagagttggcctagaagttcaaca

SEQ ID NO: 9568 - DNA, 377 bp, Glycine max
  unsure (1)..(377): unsure at all n locations
tggcgagaaagacgatgctttcatngacttctgcgagacatgctgngactcactgcccatgccgtcattcatactggcggacatgctgactaggaaagatgagcatctcgccagtcctttctgcgagacacgagcccatgccgtcattggtactggcgggacatgccaacgtggacagtcccgccattggctcctacgagacacgttcacgccatgcttaagtctgaagatgccactgttgatgatgagactgaagcattgtgatgcacgctagggctcataggctaaggctgtggttcacatgcattatatgcagaggctgaagcattntnttcgtgatgcacgctagggctagagttgtagttcacatgcattct

SEQ ID NO: 9569 - DNA, 476 bp, Glycine max
  unsure (1)..(476): unsure at all n locations
caagaaatcagataatatggcaaggcatagatcgaatatggttctatttgacaagagcatgcctagctacaatgaccaccgcacaaaatgatgnctattttgtataattatcaatgatgttactttgtgtacacaatngcacaattgtaagttctaattatcaccctaattacacaagcaatactgcttanaaaaaatntaattggtacantttattttntacanttttaagataatgaacattnttttgattcatttcttatgaattagtttagtgtattatagtgcaatcttgagtctgcggttgacaagtaaggaataaaacaagtcatgagagaatagaatctgcaagttggtgaatctatgtattgatacattattttaagacttaacttatgtttaaagccgatcggagtaaagttattaataataatatactatttagagacatatctgagcaataatatatatgatat

SEQ ID NO: 9570 - DNA, 413 bp, Glycine max
  unsure (1)..(413): unsure at all n locations
cttttggctgaactttaccagcgtctacctgtcattgctgttggtgttggtctctgtacatatgatanagcatctgtatggatatttatcatcttacctttacatagactgcaccaattcattagcgattccttactggactataggtcatttttcttttcctgganaacttcaatttctgagaatcttttagcaccttacaaggtttcttcaatagacattaacaattgcactactctacataaatgcttcagtgcttggtgtctgctgcctatgttcctcaacgtcgcatctaagctcctttatattatctatttgatattaaatngccagttctttntgttcaggagaaatactgtatacaatcacacatncaactgaatgaatatanggatcaagcgatcttggtgagt

SEQ ID NO: 9571 - DNA, 357 bp, Glycine max
  unsure (1)..(357): unsure at all n locations
cctcgatcggtcatgtntcctggcctatgtcgactgtcatntatttcgatcaatatcagtgaatatatattntnttttccgagaagctaatgttntcctggccgaataaatgggaacatgccattttcggcccgaacaaaaggttgctcaatgtcgctgaaaaatatcagtcagggctatttcacgaccgatgtcggcaattgagttttcaattcaatccatgaacgatatttgcattatatcnagttggaaaagttcgatcggcatcatcttgtgatccttctttttagacctcgatcggtcatgtttcctgatcgatgtcgactgtcagttttttcgatcattatcggggaatat

SEQ ID NO: 9572 - DNA, 320 bp, Glycine max
  unsure (1)..(320): unsure at all n locations
tctcatgtgcacccaaactcaatctccgggttcgaagacaaccttctntctcccgttggtggctggtgtagcatagctattatttttgctctcaatttgatctttgactctctcatgaagcttcttcacatagtccgcctttgcttgaccttcttaatgcttaaaaacagaaacattaggcataggcaaaagatcaagatgagttagtgagttaaaaccatacacaacttcaaaaggagaacagttagtggtgctatgaacagctctattgtaagaaaattcaacatggagtaaacaagcttcccaagcttttaagttct

SEQ ID NO: 9573 - DNA, 595 bp, Glycine max
  unsure (1)..(595): unsure at all n locations
nttggnnccattgaanccncttggatccgccgtctctctanacgcgacctgcaagcatgacagcttgcctgtggagctgacacatcaactgttctaactctattanactggtgatccctaagctcttgaccttgacttgatagaacctcgtttacacgaacgcgtgngacttgaacccatgttttactaaagtgaaacaaaatctattgcgaatcanaactcctacattaatcatgggtggaatggatgaatgcttgtaaaaatgcatatcgatacatctgccatttatgaatacgggagcttgggagattgtcttctatctagatacatacgtcttgaggagcacaacgcccgatgcttgtatttataaaagaacaccgaccctccgtaggtttgccacggatataggatcaagatagaactcgtgctgatgcacatgcgaaaggaccaatcttggacgtacacaatacgagcatatcacaatcgaatatatgcaagggacatgaccttatgctgcgcattgaacatattgaccgcgcggtctgtcctgcctcttttatgaccgcctgaacaactaatggcttttagataacct

SEQ ID NO: 9574 - DNA, 355 bp, Glycine max
  unsure (1)..(355): unsure at all n locations
tctatgaccttggtcccacttgtacctctggactatatccacaagtttggacagcatacttctccataagtttngaagctcctccatgcactttttcccaggctntcatgcctcgaacagcaatagctgcacaaatgtgtgcacatagtcagcatagtaacaaggagaatggtgggtgtctaaaagaaaaaaaaattgtttcataaaccttggattcatagattgattgcatagaattgtgttacatccactctcttnttcttaaaccacaacccatgtgcttctatatcttcaccaagagaaatttctntaggaaatctcttctcataatcaataatcctaccagcaacacagt

SEQ ID NO: 9575 - DNA, 296 bp, Glycine max
  unsure (1)..(296): unsure at all n locations
tggtgcacaacaattctccacatccacaaatcacgataaaaccaccatcctctgttgcctacctccaactgagctcacgtactcccacgtagcccatatcctcgtttctctcaacaccgggtgcgcatcaatcctcccaagcttccgcaacattcaggtaatgcaacatccaaattatcacaaactaacataccaagcaaaacagggcaaaggcagagaactctgcccaaaactcataccataatcacagctntttctcacttaaagaccccagtaacatttgcttcgttccaatt

SEQ ID NO: 9576 - DNA, 152 bp, Glycine max
  unsure (1)..(152): unsure at all n locations
atagagttcacttataacaatagttttcactctattgtggcatggctccctatgaagctctgtatggtagaatgtgcangacacccctatgttggctagagcctggagaagaccttaccttatgacccgaagtggtacaacaaaccaccgag

SEQ ID NO: 9577 - DNA, 294 bp, Glycine max
ccccacattatttccatgacacatatgaaagatgatgatttggaaatgttatgctcaactggtcatgcatgcacctatgtggacgctcatgtgtcaagattttatggccatgtgatgctagggctcaagattcatttgctctattttagatcaacccagtgtttccataatatgctcgtttatcaatttatgtcattatactagttcatttcgtgcgaccggcgaaatattcacagcattcacccttcaggtgtagacacgctttttcttcaaaaatcggttatgatctatgaa

SEQ ID NO: 9578 - DNA, 222 bp, Glycine max
  unsure (1)..(222): unsure at all n locations
atttcactgagttcgatgagttcaaggaggaactcaagagaagacactgtgatgaggagttgacttatnttactgatggcagcatagatgtcaccatcgtgaaggaattntacacgaacgtctatgaccccgaggataaatcacctaagcaggtgggggtgagaggtcatttggtgaaattcgatgaagatactctgaatacgtttctgaagaccccagtga

SEQ ID NO: 9579 - DNA, 310 bp, Glycine max
  unsure (1)..(310): unsure at all n locations
atccgagangagaattattgtcctttaaatatgctgagacttcacttntcaattacgagcgtctcgatgtattacgggtctcaatcggacttccgagttaaaaattattgtcgtttgatttctctcagagctnttgtgttcaattacgagcgtctcgatatcctacggtacactattggacatccgagtgaaaagttattgtcgttcgaattttgttagagcttatgttttcaattacgagccgtttgatatcccacgggacacaatcggagattcgagttaaaagctattgtcgttagaatattctcat

SEQ ID NO: 9580 - DNA, 240 bp, Glycine max
  unsure (1)..(240): unsure at all n locations
agactctgatgtccgantgtgtcccgtttatatcgagatactaganattcagaacagaagctattagaanaatcaaacgacgatgactntntacacggatgtccgattgtgtcccataatatgtcgagacgctcgannatgataacagaagctttcagcanattcaaaagacaataactntntactcgaatgttcgagtgagtcccataatatatcgagacgctcgtaattgataacaga

SEQ ID NO: 9581 - DNA, 168 bp, Glycine max
  unsure (1)..(168): unsure at all n locations
aagctcactacaagccttaagtganaaaccatgatattaccatatccttaaggaatgttggagctctggaattgttctgcgaataagagtggngggttattgtttcattggacaacttgttttgttggctatgcttcatgatgtattttgcgccatacttgatgtaca

SEQ ID NO: 9582 - DNA, 347 bp, Glycine max
  unsure (1)..(347): unsure at all n locations
taattaaggtaagtccattgggctagaagcttataagacaaaattgcctcaatcatttccaaatatgcatgtgaattaggaagcatcaagaagaatcaagccaaggctattgtgcaagcaatcaatggggcaaaacacaccaaatgattatggtggtggatggctcanattctcacaaaggtaaactcatcactttcaaatngagctntcaaaactatcatgacatgtagaggagaatcaaggatctcaagtcacanaatgtcaagaacttntattttcaaaacaattacccatttcttgaanatatcctataattcgaagaaaacatgcaaagtcgtacattgatc

SEQ ID NO: 9583 - DNA, 368 bp, Glycine max
  unsure (1)..(368): unsure at all n locations
gattagtccagaatccgatggtctactggatctattgttcctgattagtcgatcttgatctagtcnaaattgatttagtccaagaagctaatgggtgtacctgaatcaaatattctcgactagctagtattgatgtagtcatagtccaagaagttgattagtctacttagatataatattctcaactagtagatatcaatgtagtcgtagttgagctagtccaagaagcagatcgaattacttggatctaatactctcgactcagttgtccttgatctagtctgagtccaagaagccgattggtcaacttcgatatactattcttgaataggcagtcttcatctagtccaagaagtcgattgggcaac

SEQ ID NO: 9584 - DNA, 425 bp, Glycine max
  unsure (1)..(425): unsure at all n locations
ctgagctgcagcttataagccgggttcgagacataggcaagcgttctcgatattcttagatgatattccgagtactgtggatttggtacgaccatgccctcctgattccagctgggaaattggcgagtggaggaacgccccggcatttacgcaacaagcataatgtacacctttacgattataaaagctctatagttgggcctatgctatagagtttatccttntgttaaggctntgtgtcttttgatttagaattataatacaaggatctttcttcatctgttcctggtctctacccattctcattcatttgcatgtttacttcttattctgaaacggcagatccgatgacgagtcctccgaaggtactaatacctgtgacccgatgtctcaacctacccttcggcgggagggcgacgcgtgac

SEQ ID NO: 9585 - DNA, 468 bp, Glycine max
  unsure (1)..(468): unsure at all n locations
aagtatgtatggcanaacttcattactgttgttcaagacatacaagtgagcttgtaacanatgttctacacttggagtgatcacatgcagtcctcttgaacccttaccacccactctgtcatcatgccgagactcaggaaggccaacaggtttagccttctcaatgtattctgaacaaaattcaatggcttcttctgcaatgtacctctcaacaatagatgcttctggatgatatagattctttgtataccctnttaagatcttcatgtatcgctcaactgtgtacatccaccgtagataaacaggaccacaacatttgatttctctgaccagatgcacaatcaagtgaatcatgatgtcaaagaatgcatgcggaaaatacatctgcaactggcacaatataatngcagcctcattttccagctcatcanacttgacangatcaatgactntgctacatatagcatg

SEQ ID NO: 9586 - DNA, 634 bp, Glycine max
  unsure (1)..(634): unsure at all n locations
tgctgccgnnttgannnccatgatctccactagactagccnnncacctgangcgagcaagcgtgagagggnntggctctcgaactctatgaacgacttattagatggttcattctgtgatcgcaccgcggagaggcgcacgaatatgatatctaactatgcaatataagagaatcaacgtctgatcgatagaaaagacaacgaagtatagtgtgttgttaacaaactatgttaatgacatgtgcatacaccacgttatgttatacacggttaccggtctatagtatactgggctgattacgaaacaatgaaccacgatatagcttagatatacaacgctagttatggctatagctataataacccctcatgactctagaatgtattagttgtagttatgattatctaaatgttcaaaccataagcacacctagtcacggttgcacactatatattttaatataacgtgggtgctgtgatgattacattacaatgcactaattactagtgaatcactgataataatgtactcggtagacagtgagttattccttgtatcgtttagaatgcatatattattatcgttatagatagggttagacaccctttgtcaaaatgactagtatcgcgtgcag

SEQ ID NO: 9587 - DNA, 152 bp, Glycine max
agttcacactgatgtgtgatgctagtgtctatgctataggtgcagttctgggacaacaacgagacaagatattccatgccatatactatgccagcatggtcctgaatgacgaacagttaaattatgtgaccactgaaaaggaaatgatgggc

SEQ ID NO: 9588 - DNA, 369 bp, Glycine max
  unsure (1)..(369): unsure at all n locations
ttctggagaacatcctggaaggcccaagtggacctggttgctattgcacccnctatttactaaatacacccctttcctttttttgctaattctttntccgtaacgttacgaaactttacgaatttcgtaatgatacttgttttctttctgtaatattacgaaaccttacggatcacataatcatcctctttntgggctntcgggatgttacggaactttacagattgcgcactaagacttcctttcgacttccgacatgtcacggaacttcacgggttgtgcaacaatgctntcttctgacttccaacatgtcacagaacttcacgaattgcctaacgatgggtgccaagtacctcgaagtagtcaaac

SEQ ID NO: 9589 - DNA, 332 bp, Glycine max
  unsure (1)..(332): unsure at all n locations
ctcgcaacctaggataagagactagcttgtgtatcaaggagaagcatctatatttaattctgatattttctaattaaatattactcgctgcttaatntacaaaagcaaacacccncccccaatntgttactatttcctactatttgttatgaacatttggtttatcatttctcattgtgaaacgacctangatcacttcctagttacttcattntaatatttatttgatttgngtacggtctcgatcaattattcaacaattaaagcaatgaanagcacacaaaagcaagctatgactcaaagagaaacctagaatngctctatagtagagt

SEQ ID NO: 9590 - DNA, 266 bp, Glycine max
  unsure (1)..(266): unsure at all n locations
tacttctggggngtctcatctgacatacacacttgctaactcatgatanaacatatatcttaattcaatcatgcattcaattcacaacactaatttcacacaaagatcaagtgtttgcactgcatactcagagaatcacgttaagttgttctgtgtacttcagaacatgcatactaattatgcacacaaacacaagtatataattataaatataaaccaaaatcacctaaaacagtgtacgtagactataatatatataataattt

SEQ ID NO: 9591 - DNA, 333 bp, Glycine max
  unsure (1)..(333): unsure at all n locations
tgaagtaagacttcattggttgcctgcgattngacagtacacaagtgacggtagaattagaaataaactccattatctntagcaaacatactgacttagcagaatnttagtgattgaaggaacatgtnacacattatgaagataaagaggaaaattatgattggtangggacctagaagaaccagaaccagaaccaagaattttcaaaccttcaccattaccaatataaatctgatctggtccatcaaagtggccaagctgatgaatattgtggttctccagtcacatggaatgaagctcccgagtcagggatccaagttgagtagcattttc

SEQ ID NO: 9592 - DNA, 322 bp, Glycine max
  unsure (1)..(322): unsure at all n locations
tagacatgtggcctcagatatcttaagaaggggggtgtgaattaagatatccacacagtctccgctaattaanaatctattgcactctcttcttactcaagttatgaattcccttaatgacaatcttctagatattaattcacacagagcaactcgaatatgaatataacgcactaataaataacggagattaagggaagagaatatgcnttctcagttntatactgggtcggccacagcctagtgcctacgtccagtccccaagcaacccgcttgagagatccactatcttgtaaattccttctacacgatctaaacacac

SEQ ID NO: 9593 - DNA, 314 bp, Glycine max
  unsure (1)..(314): unsure at all n locations
ctgtggatactgaataagggtctatgtatgatgcgaaccatgtttgatatgnttgttcttgttgctccatatggatatttctgttagatttccatatgcttctgagtttgtttttgctgttacagattgatttacttgttagaatatttctcttggctgtcactgttttagaaatattctgttattggtaactataaatgtgtgaatttggattatacctttaccttcgttattagntgtgtgataatatggtttatagttattntgagttctgactcgtgtttctttgaatcgattccagtttaagtcatcat

SEQ ID NO: 9594 - DNA, 322 bp, Glycine max
  unsure (1)..(322): unsure at all n locations
aagctaataatactgtcaattaataacgttctattcataatttttcttcaaggntataatgaatctatacacataganttacagctacacgttntatattcacatgtattatgttgtgattgtcatacatacaaagtgattccagatgatgagataaaatacaaggcgcaagcaaagttctctttttattgaaggaatgctagcatggttaaaaaattatatttgtttaatgaanagttacaaaaattatattgtgcactaaaagaatgtatatattaatggttagttgtttgatttggtatggtaatcgatatcataattg

SEQ ID NO: 9595 - DNA, 337 bp, Glycine max
  unsure (1)..(337): unsure at all n locations
ttctggaggaacttcctgaaggcccaagtaggcctgtttctatttgcaccctcctgtntactaaatacaccccttgcctatttttgttgattctttntccgtaacgttacggaactatacgaattccgtaacgatacttgttntcctttcgtaatgttacggaaccttacggattacgtaatcatcccttntttggctctcagaatgttacggaacctcgcggattatgtaacaatgcttccttttgatctccggcatgttacggaacttcacggatcgtgcacaatgctctcttttgactttggacgttatggatcttacgtattgtgaacaatgg

SEQ ID NO: 9596 - DNA, 333 bp, Glycine max
  unsure (1)..(333): unsure at all n locations
caataggtagaggtggataatgcctttctttctcaccgcgatttacatgaggagagttggagctgcctctgggcctcacttctacgtgccaaatcatggcatggcttaaaacaacctaatcttcattgatgtgccaagatggcttcctctcttcaataaactactacatgtcactgatgcggactctcatgatcttgcttcattcagaagattaattgggcgcctctagtacctctacaccacaaggcctcacatcngttttgtcgtacatactatgagtcagttcatgcatgctcctactattcatcactatgaggcagctacccagcacca

SEQ ID NO: 9597 - DNA, 353 bp, Glycine max
  unsure (1)..(353): unsure at all n locations
gaataacactaacaatantttgttttttttactgcaacacatacaattctggatcaaatatgtgaatnnttgggaagcaacgtgtattagttnttgcatcacataagaattggacttgaaaatcaagtaatgggtgggtttcaacaccattccacacacattaaanatatctgagaattcttatagaaaagtttatctatatagcacacatttataattagatgagaatgagaatgtaaatagaatatataaaccactggaagtgtcttgagttcctaccaatcancaaatacataaactattntaattgcattgaanaacaacataacacaatatcaaagctataatctata

SEQ ID NO: 9598 - DNA, 177 bp, Glycine max
  unsure (1)..(177): unsure at all n locations
tctgcacctgttactgtgcaagagtctgtggtcaatgatcttctgctgatcaccatacagatctctgtccttctttgcagcaatctggagtcaatgagtaacctaaagcctatgttgcaaacatttataatatacctnctcagtatcaaaacccataacaacaaaataattatgatc

SEQ ID NO: 9599 - DNA, 338 bp, Glycine max
gctcccaatatacagcaccgttagacgctacaccacaccttcaggcctcaaggatggtatttctcggagtgacgcgtcactcaggacacagtatccacttcaagagagatagtcaccgcgggcatactggtaccccagccaagtcaccaacatatctgagttatccatgctggctacaagaggcggcaaatggacctggtgaggtcatgatccgtcatcggtctctagcagtcctggattcttatgtgagaggcagaatgcattgcaagagatcgctatgttgtagagctcccatgtggtatggagatttccactgtctgaacgtagtctcccactac

SEQ ID NO: 9600 - DNA, 277 bp, Glycine max
  unsure (1)..(277): unsure at all n locations
atagataccaatccaggtggaggaatcatctaaatctgagatggacaagtcctccacaacaacaacagcctgtccctcctttccagaatgttgctggtccaagcaagccatatgttccttctccaatgtagcaatagcagcagtagtcacaacaaagacaacaagcaactgaggctcttcctcaaccttccttataagagttagtgaggcaaatgatcatccagaatatgcaatgtcagcaagagacaagagcctncattcagattctgacaaatca

SEQ ID NO: 9601 - DNA, 270 bp, Glycine max
gactatagcgtcagttgtggcgctaaacttgtgagagttagagccatcttctcaattaaattcctggcttcagtatgagtcatgactccaaggactccaccactggcagcatctatcatacttctctgcatattactgagaacttcatagaaatattgtagaacaagctgttccgaaatctgatggcgagggcatctgacacatagttatttaaatcgctcccagtactcatacaggctctctccactgagatgtctcatacctgagata

SEQ ID NO: 9602 - DNA, 404 bp, Glycine max
  unsure (1)..(404): unsure at all n locations
gctcgactcttctgactcatgatgtagatccatgtcattctngagtagtcatcaattatggacagaatatatcttccaccacccagagaaggtactcttgcaggccctcaacagtcagcatgaatgtaatcaagagttcctttggtggtgtgaattgctttangaaatntaatcctatgttgcttgctgaaaacacagtgctcacaaaatntcagttcatctagtttctgatttcctaacagctgttggtttttgaagtatcatcatacctttntcactcatatgacctatcctcatgtgccacaattgagttaagtcaggtatgctcttattggatcttgatgcaacagctactagaccatcctcaacacatgttgtaccttgaagtatatagagattacccc

SEQ ID NO: 9603 - DNA, 607 bp, Glycine max
  unsure (1)..(607): unsure at all n locations
nttgaaaacccatgagtnccncatgatctagcgttgcactgagcgcatgcaagcgtgaaggcagactgcatgcataggttcactagagaatctggctgtgtgagaatcatttcatctgcaccngggcgcaagggactgaggttagagctcctngctgaccaccatacagagctctgcccggacatgccagtatcctaggagcaatcgagtaccctgaagcttatgcaggatacatatacaatagacctcctcaacctcaccagctaaatcaaccacagcacaacaatgatgacctctgcagcagcagatacaaacctggatggaggaatcactctaacctcagatggcgcagccctcagcaacaacaacaggagactgctgcttactgacaaaatgctgctcggccaagcagagcatacattcctccaccaatcgaacaacagcaaaaagcgcagaaacagccaacaggtgaggcccctccacaagctgacctcgaagaacttgtgaggcaaatgactactgctaacatgcaggttagcaagagagcatagctcatcagagctgaccagcaatgggcagtgctacccatcatcacatatgcagattg

SEQ ID NO: 9604 - DNA, 611 bp, Glycine max
  unsure (1)..(611): unsure at all n locations
ggggnggaaatgannncctttgattccttgatcagcgacacnngnagcnngcaggcgcgggcaagcctgtgctcatacactctgaagagggtgttcctacatgnncttcactggacgacaagacacanggcctgccgcagagagatcataggtccacgcacaggagagatctctcgataggcatcatcacatgagtattcctatagtatagtgccaccatgactcctcctgatggcaacaagagcatgtgttaggtaaggcggttttctattctctacagggagagagataagaatggctatactgccttgctcctacgtacatctttagcagagatgaccttaagaatgcgcccatggagaaattcctccctgcaactaggaccacgtgtctctcaaaagagcattcacgcataatgcaccttatcgtacatagctcgtattagatcttgtaaagattaccatattgtgtgcgacctgtctgaccactngagtgctgagctcatcttctcagaagtctatacgtgctatctcattgagcagaggtgaacatgctgcgctgcgcagctctgtgaagctccactcgactcgcactgatgacatatgctcccn

SEQ ID NO: 9605 - DNA, 410 bp, Glycine max
  unsure (1)..(410): unsure at all n locations
ctaactcttgattctttggtatcaccataacattcatggaagccattgcttccacacttagaagctcaattctaggattngataatatttgggacttgtatgctttagatgaacatttctctcccagttagagagttgtgggaaataggcccaagatggatgtcttttggctgaggggtatttagtcaaagagggaaaactntgcataccccaaggatccattagganattacttgtgaaagagatccataatggtgggctcatggtccactttgggatagacaagaccctcgtctactcanagaanagttntattggccctatatgaagaaagatgtccataagcattgcactatgtgtgtggctcgttacaagccaagtctatggtgatgccttatgagctatacaca

SEQ ID NO: 9606 - DNA, 376 bp, Glycine max
  unsure (1)..(376): unsure at all n locations
tctgagcttccctgagttctttatgtaaatctcccaattccttattatgttgttcaagttgaaccaatttacgttccagttctctcaccaccatctttntctctcttattgagtttctcatctgtgctatttcttcatttctcataattgtcaatagttgtatctctgacttctttcctactctactgagaactntaaaaagtggagtggttaanaggttcaatgttntgtctatcttacaataacttcgtttacctttctgcagacagtaaagatgtttgcatataaataacctctacataagaacatgcacactcacaagcacanaatgtctgtntgcacacctcaatgcacaatatagagaagtaataacact

SEQ ID NO: 9607 - DNA, 293 bp, Glycine max
  unsure (1)..(293): unsure at all n locations
tgagaatctcgatatatttctggattcattatgcttctctgtaannaagtatcgncgntttgaattgctcactacttctaatttcaatgttgagcgtctcgatatattacgggacttaattggacatccgagtgagaagttatagtggctngcatctgctacgaacttctcgtttcaatttcgagcatctcgatatattgcgggactcaatcggacatccgattaagtaaggtattgtctgttgaatatgtcaccaactttcgttttcaattctgagtgtctcgatatattac

SEQ ID NO: 9608 - DNA, 220 bp, Glycine max
cggcgcttatgtgagtttgaatcattcgctctttctataacgttattcgctgggcttgatattgaacgcagagagaactatgtgttgtgtgtaagacgatcctgtgtgtgttgctgccagaaatgatcggaagacagttgtcactgcattgtgggttgaacacagcgctgatattggaatgcctgttgatgctacttcggttagtttggtcttacttctt

SEQ ID NO: 9609 - DNA, 288 bp, Glycine max
  unsure (1)..(288): unsure at all n locations
agtatgacagtcaccgctttatgagcgccgtaccagcagcgcttcgaggccatcaagggatggtcatttctctaggagcgacgcgtccagctcaaggacgacgagtatacagatttccaggaggagataggtcgccagtggtgtgcatcactagttacccccatggccaagttcgatccagaaatagtcctcgaattttatgccaatggcttgccaacagaggagggcgtgcgtgacatgaggtcctgngtaaggagtcagtggatcccgttngatgccgatgctatc

SEQ ID NO: 9610 - DNA, 237 bp, Glycine max
  unsure (1)..(237): unsure at all n locations
cacaacactcttgtgctgagcgtgaagaagactctataagaagatgagctgtacagcttcactaagcgcactgcttcagttcatccgctaagcgagaaagatgcactaagccaaaaatcactaatgtgcgctaagcgcacaagcacgaacaagggccacctattaagcctgagatcagattntgtgaagggagtttggactgggattcagagctntgcatgtctatggtttctagag

SEQ ID NO: 9611 - DNA, 395 bp, Glycine max
  unsure (1)..(395): unsure at all n locations
ctaatacattngctgcccaagtttcatggtcttgcaaggaagatcctcataagcatcttaaggagttccatattgtttgttccaccatgaagcccnctgatgtccaagaagatcatgtctttctaaaggcttttcttcattctctagagggagtggcaaaagaatggctatactaccttgctcctaggtccatttttagctgggatgaccttaagaaggtgttcttggagaaattcttccctgcaactaggaccactgccatcagaaaagacatttcangcatcangcaacttagtggagaaagcttgtatgagtactgngaaagattcaagaaattgtgtgcaagctgtcctcaccaattgagttctgaacatcttcttcttcaatatttctat

SEQ ID NO: 9612 - DNA, 565 bp, Glycine max
  unsure (1)..(565): unsure at all n locations
nttgagacccgttgannnattaacgccactgttangtcacactatgantactcaagcttctcattccatganttattntctagatgatgattcctcctctcacactcttttnctttatattccactgcaactccatggctgagaatcaccattgaaggatcttatcgaagctcanagatccaaactccagaagaacttctcagcaagctttcatcaatctacacaatttacactaagctactacacacaaataaatgtttgggtggtctcttggagactcccaatccacccctaagaatgtctaaacattagaaattgcataaaataaattcagcactcaattgttctatacaagagaataccaaacaataaggtcttcaaattgcctcagtgctagttgtttcttaatgtntactcaaatatgtgacgctttgtacttcaatcaatgtgctctatagctagtgctatggtatatattatatataatattgcctaaaaaatatctcatatcttgttatattttatagattaatatgtgttatacgacatattataaatgttgatg

SEQ ID NO: 9613 - DNA, 319 bp, Glycine max
taataaactcacccctcacaatattgtaccgcgtggttggtacctgtgatgatcgcgatcttttgtgggagcagaatgactacagttgtggacgagaagtatgattcttttgtggagtcgtcgagccgacatgatgacattgggattattttgggagaaagttgtagtttgttaatcaactcctccatagctggttctgtaattctctgtgttgatttgaagatgtaaatcacaaatttagttatatgtatgaacaaatctatcttccattatgtgaattatgtgtactaggttactatacctatatatatatatatat

SEQ ID NO: 9614 - DNA, 282 bp, Glycine max
  unsure (1)..(282): unsure at all n locations
acatcaatactatatnntgaaacaccaagaagaagttgaatagtaaaacctgcatatgcaagaagaggtcaatattctttgattnnttgtattggtccaaccttgatgttagacattgtattgatgttatgcatgttgagaanaaatgtgtgtgataatgtcattgacacgcttcttaacatttaaggaaagacaaatgatggtttaaatactcgtcaagatctaactcagatgggtatacgtgactagttacatccaaggtctgatggtaagaaaatatac

SEQ ID NO: 9615 - DNA, 280 bp, Glycine max
  unsure (1)..(280): unsure at all n locations
ctaccagcagnagcaacaacatatctttccatcttcccttcaaatcaccatagcagatcaccgcctccaaacccgctcctcgaccaccaccaccattcctcaactgctgtagaatcccaaccctcttcccactcctacccttcacgagccttctcaatccanaaactctaaccccattctcctcgccgagaatcataaacccgaacgcaacgttcacggaaaacacctggcgcgtgcactcaatcaccgcacacctcatcaatctcaaaccaccatcgtc

SEQ ID NO: 9616 - DNA, 272 bp, Glycine max
  unsure (1)..(272): unsure at all n locations
ttatattatatctctacacactcgctcggacgagccctctgggcttaatgcatggatnatgcacnaaacccattacccgttcaatattcaagcttttattattatagtaggacggactctagatcacttaatcattgaggctttgacataatgtcgtgagccacatatcccagaaacatagagcntttaggtaaacacatgaatgcgtttatattatattattctaggacactctaagtgtactggtatttatcctcctcacaataatctcc

SEQ ID NO: 9617 - DNA, 313 bp, Glycine max
  unsure (1)..(313): unsure at all n locations
gtgagctnngaacaaatcttctacacttcgagtgatcacatgaagcctcttgaacccttaccacccactctgtcatcatgccgagaatcaggaagcccaacaggtttagccttctctaagtattctgaacaaaattcaatggcttcttctgcaatgtacctctcaacaatngatacttctggatgatatagattctttgtataccattttaagatcttcatgtatcgctcaaccgggtacatccaccgtagataaacaggaccacatcattngatttctctgaccagatgcacaatcaagtgaatcatgatgt

SEQ ID NO: 9618 - DNA, 314 bp, Glycine max
  unsure (1)..(314): unsure at all n locations
atcttgagcttcaatgaggtcctttaatggtggttntctaccatggagatgcagcggaagacaaaggagaagaggggagaggaggcgccatccactatggaataagccatggaagaaggagcttcaccaccaagatgagccttggataagaagcttggaaggatgcttcaatggaggaaaagaaagagggagataaagagagaggggggagcacanaattgaaggaataaaagaggtagagaagtggaactttgaagtatgtctcacaagactctcattcatcanagttacaacaagtgttacacatgcttcta

SEQ ID NO: 9619 - DNA, 427 bp, Glycine max
  unsure (1)..(427): unsure at all n locations
accgagctgcagctgctctctaatactctcttatctacaanaatatggataatcattactaaataatcacgagatcaacatataaagttaacattcttaaactattaataataacaaaacaaatagagataaaacattaattccattccaaaagctaacttgtagggtaaagattatctttggcttatattttcttgagtctatttaatgtgagacttanattctcttctatacattctcttatgtaagtacttctgacgttgagtataatacgtagataaaataattagtactctatctaactaaattatgataaactcttgtaccatattacgattcgttatccgtaatttgatgcaagaattgtgnctaaagagaacgacgaatacgtcgaactcaaattaaagcatttaatttccttcacttt

SEQ ID NO: 9620 - DNA, 353 bp, Glycine max
  unsure (1)..(353): unsure at all n locations
gccataattcatattcaatgttccacagtcctcgaatcgctaaagacagttgcgccacaatttccatccaaaggattcaacatcgccagattatattntattcaagtatgttgtgcttatgcatatcattgaaaggattgagaaaccatacgtatatntaattggaaacataatatagaagtgttaccactagacattagcaaattcactgtgtcacacgaacaaattcaattaaataagaatgtatcaatgggtaatacaattaacaaactctgcagtggtcactactcattggcaaattgaattatacaggtacattgaagataaaacaagcaattatatactaagacacg

SEQ ID NO: 9621 - DNA, 615 bp, Glycine max
  unsure (1)..(615): unsure at all n locations
tgagtatgacnnnnttttgaagnccgcttgtangngttgctanaccattacgtacagctccaacactattgctagacangcactcatgctagcagcnaggagactgtttactatgatatnatgttcaccacggacgcggcgatgaacaccagctgatagctgcatctgctagctgaaacagagtccctgtggcactatttctatcagtgttatccccacaccaatcagcatctgaagagccaatcatctcacacgaattgctactcaagtatgtcggagacagcacaccaaaaccgatagtctcattcaagaaccttagaggccgttgtagtgcattcaaatgagcttgctgtggtgctttgaaatatctactcaccaagccaactacatatgctacatctagtctggtattgatataacctcaaagagccaccatatggtgatctaatcttatcaccaatgtttaagcccagattgatctacacagcactatgttcacacgagatgaactgagatgagtgaacatgtgaacctcntatgactctatagtgatgtgctaggtgctangaatccagcctagtctctgactcttgccagaaatatgagatgtcagag

SEQ ID NO: 9622 - DNA, 384 bp, Glycine max
  unsure (1)..(384): unsure at all n locations
atatctatgtgatttatgaagcatcaacaagaatcaagccaaggctattgtgcaagcaatcaatgagcaaaacacaccaaatgattatgatgatggatggctcatattctcacagaggtaaactcatcactttcaaaactatcatgacatgtagaggagaatcaacgatttcaagtcacaaaatgtcaagaacttttatattcaaaacaattacccatttcttgaacatatcctataattcagagaanaacatgcaaagtcgtacatgcacacaaaattgacccataatattaaactataaatccgacgaaactaacaacattaacgaaatagcacaactaacanattaacanaaccaacaaaactagcaaaaccaaagaacac

SEQ ID NO: 9623 - DNA, 332 bp, Glycine max
  unsure (1)..(332): unsure at all n locations
tggaccttcttctagtaattctgacttaccgcaaccgcttatccgtcttccattcccacctagaggaattccaatcaaaaaaatggaagaagcggaaaaggagatcttggagacctttatgaaagtagaggtgaacatacctctgctagatgccatcaaacagattccaaaatatgccaagtttctaaaggagctntgcacccacaaaaggaagctcataggcaatgaaaggattagcatgggcagaaatgtgtcagcattgatagggtaaattgttcctcacattcctgagaaatagaaagacccaggtactttctgtataccttgcatta

SEQ ID NO: 9624 - DNA, 500 bp, Glycine max
  unsure (1)..(500): unsure at all n locations
tgcagctatgcgctatttccttacaacattctctggccattaatcttattactaagananangcacccatatacaatcaaggcagcttcgttacctaattatgtacacgtacttccaaggtgtatgtgttacttacatcacacacatcgtcttggctaaatntacatacatgcatactcaaagcattgtggggtaccaaaaattgcacatgtgcacatcttggtatttctaatacctatacatacacaaacttcatgatgaatcttgactatctacacaataaggtgctacatttcatgcgtctttcaagtttttttgtntttttttttgctacctaaagccgcatgcacatacaagtataatttcctttgctgactaaaagtgtattcaaagtaaaggggatacattctctttgaatggattntctctacataacatgcaacatatntatgtataattnttgtgagacattctgctacgcaaaatatatgacatacatc

SEQ ID NO: 9625 - DNA, 297 bp, Glycine max
  unsure (1)..(297): unsure at all n locations
tgcttaccacctcganagactgtacagcggtttctaatgactcctctgcggcctccacataaggcatagaggatgggcagctcaccaagatgtcttcctcgcctgatacgatgaccagatgtcttccactacgaatttcaagttttggtggagtgtagagggaacaactcccactgagtggatccacaggcgccccaacagacagttgtagggnggttaatatccattatttggaaagtaacttgacaggtgtgagggcctatctgtactgggagatcgatctctcccctaaccttt

SEQ ID NO: 9626 - DNA, 190 bp, Glycine max
  unsure (1)..(190): unsure at all n locations
cattggtaaagcaccgttattcactntaacaaatcttactagacttaactgagtgttgtgccaacaattatcagagggaaagccacttgtagaagaaaaatgtaggtcaagcattattgttttcaatctatatccattctagcatgtctgagatcagagagctgaatcatgtagaagatgaggtcagtaa

SEQ ID NO: 9627 - DNA, 280 bp, Glycine max
gagagaaaaagagagtgacgactgtctgtctggttgaatggacagagggaacagtggtggtgggctttagatagctcttatcttttctcgaagagaagagggaataatgccttgaatgattgatggaataatcgcaacctccaaattgaaacagattgcatgaaaaccaatggttggttggtgctaaatatgacactatgtctctcttctaacttctaattcgcttctgccccatacaagtggctttcctcaccaccgctttaatgagtctaaatcatgg

SEQ ID NO: 9628 - DNA, 369 bp, Glycine max
  unsure (1)..(369): unsure at all n locations
gtcgatctagncaaggtcttagagaccatacaagtttctaacgatttctaattatgtgggccattaagtctatcatatgctgacaatagccgagaagcccatgaatctcttcgggggcggagtaggtgtctgccatcgccttggccttggctaacaatcggagaagttcttgactcccgttcaaggtaagagcanaccgatccatccacatggttgcctcttggtgtaaagagtcgatcacccttcctctagcctctntntccgcgtatacttgggcatattcgtccgcaatcctatgctcgtgggccgcggctagacctaactcttcttggtacttggcgatgatagctagcatgttggctccgtctc

SEQ ID NO: 9629 - DNA, 512 bp, Glycine max
  unsure (1)..(512): unsure at all n locations
ntttgaacccctttgagnatcgacgccgctgaangtcgcacttgatactaagctgcatgggagtgtgaggggnactttctgctttatgtgttctcacaggggacctggagatatgtcgcggtggtcacgagacctcggtgacgtcacgtggagtgctattgcccaagaccaagcttgaccaatcccgacccaacccgggcatagaccgtcagtgagatcatgagacgtacctaagcacgcgagctcctggcagccacagatagatgacaacaaacccagagcaggaggcttgtggggctggcactggaatttgcgaatatgggattgggcctggaatcataccaaggtggaatgatacacgctctataaaacagaggctaatgctctgcatgataccggaggtaacataccgctgcaacagcagagctggagctcttatcatacaaggtgatcgacctcttaaagaatggatgtgcacttgtgtgtacactgttatgagaccagaggtatct

SEQ ID NO: 9630 - DNA, 476 bp, Glycine max
  unsure (1)..(476): unsure at all n locations
gcagcttctattaagctgaaccatnttatcaataaacactattttgagttntattcagaaaattagagtttatctcttttatcttagtgagagtactctcctaaattcttgagtgattcaagaacaccctggctgtatcaaaagacattcacaacctttgcgtgttgccctcgctggaaagagagattctttccttcctttcatcttcacccttgttctttcaaaccacaattccagaatatccacctctgcccagaattatctcgtggccataactcccattttacgcactcaaattaagtgattcttgagcctaaattgaatctcaaaacgagtcctttcacctcgttgtggaatcacctcatttggagccctttagcttcagttatttccatgttctatattctgtccagccaccacttaacctacgttntaccatcccattcatccattttatgccaagaaccaccttaata

SEQ ID NO: 9631 - DNA, 340 bp, Glycine max
  unsure (1)..(340): unsure at all n locations
gctctcgagaaatctagtggcataaatnntatacatatgtccgattcggngaaataatatatcgagacgcacgagatagaacaacggaagctctcgagaaattagaatggtcataacaattcactcggatgttcgatccggagacataatttatcgagacgctcgatattgaacaaccgaagctctcgacacaatagaatggtcgtaacttctcacgcgaatgttcgatacggtgacataactcatctagacgctcgatattgaacaacggaagctctcgagacatatgaatggtcataaggtttcacacggatgtccgattctgggacataatatatca

SEQ ID NO: 9632 - DNA, 385 bp, Glycine max
  unsure (1)..(385): unsure at all n locations
agctngnganagatcaaatagactcaacctaatgctcattataatgactatcgcanataacattaagacatttatccccaaaccganaatgctaaagaatttatcaggttagtggaagagcactcctaaacaactaataagtctcttgctgggacattaatgagtatgttgaccactatgaagttngatggctcacgtactatgcatgagcatgtcattgagatgacaaacattgtagcanagcttaagacctcggaaatgactatgaatgagaatttcatggtacaatntattcttaactcattaccatccgagtatgatccatttcanatgagctataatactatganagacaaatggaatgtgatgaaagtgcacaatatgt

SEQ ID NO: 9633 - DNA, 248 bp, Glycine max
  unsure (1)..(248): unsure at all n locations
gcaatcccatggaagtacacttctncgaacaaagaggaagaagaaaccaccgacatcagttcattgtcggccaaagtaaccaatatcacggngctgagcagtgtgacccgcagcggtcatgtatttgcgccccccgacctaccaattcagcccacgaacatcaaggggaaggcaaaagtggtggaagaacaagatgataaaaccccccacactccgaacgaggatattccagcgaanagtcctccgga

SEQ ID NO: 9634 - DNA, 571 bp, Glycine max
  unsure (1)..(571): unsure at all n locations
gttagccctagaggcttnatgacacctgaagcncttgatctaactctctcatctttatggcatggagtccactcaatttatattttgaatnaanctgcccataacgaaatttgtgtcttgctttctatgaggatgtacattctcgtgttgtgtgtcttgaatttagcaatataataatgggtctgatctccaacttatctgttaagcttgtggcagatcattcactgctgaaacatgctgtcgctgttagcgctcttcttataatgatcggagaagtgttgaactttcgtggatattgggaacttaaagagacatacatctgattaataagcacactcgtttctgagttgactggatatgtaaatattaacttagacttcatacaactatttcattcattagaactactcttcacaccttatagagtgggtgcatattgagtatatattcactaatggaccgtggacaaactatactccgacataggatgatcgcctacccaatgcatgctatactaataatctatacctcacgtgcttggcctgattngaatttacgaagtgaccactct

SEQ ID NO: 9635 - DNA, 249 bp, Glycine max
gggcaccaagcattatttcacgcggtaccaaatggtgtacacagaaggtagccgtctctgaggaaaatatctcggtgtttctcattctctggtttaacagtcaagtcaagctcttataaagaaagatgcttactttcttttcattctaaaaactactttgtataatcaaattattacaaataaacaataaaagtattgttaataattggtactgtatttcaaatgattaactgggggtactactaattc

SEQ ID NO: 9636 - DNA, 199 bp, Glycine max
  unsure (1)..(199): unsure at all n locations
tcaattaacgattactctgttctgttgttagttaattatattgctcctcgctagattataacttcggaaactcanaaattgngattaatacgtgctntattaagaattaagagatgaatgcatgcatggagatgaagatctagagggagaagatgcagatatacgtaccgagatcgtcaccaacgttaaacgttgtcgt

SEQ ID NO: 9637 - DNA, 313 bp, Glycine max
ctgcagctaactatcctacatggaagttatcatgctttttacaaatttttacacattactcatatgaagtagaaacctagccaaactacccatcatattcccaaaacccaatacccacgagaatcaagagagaaagaagtctacccaaacctgacatttcgaggccccacacgtatagatgcgcttcacgactccgataatgccttcctttcgcgatttggagcagaaatgatgaccacaggttggatgcttgctggagcttcaatggtggatgaagaagatgagaatggcgacgtgagagagagaggaaaag

SEQ ID NO: 9638 - DNA, 408 bp, Glycine max
  unsure (1)..(408): unsure at all n locations
ctcttcttcctctntcgccccattagtgctaccacgtgatgttaacattggttntntacanaaactgatgttaatagaatttttcttaacatcganttttgaaaaatcgatgttaatgtggtgatattaacatcggtttttgaaaaatctgtttttcaaaaatcaattaacattgattntgtaaaaatctgatgttaacaccgccacgttaacaccggttnttntaaaaatggatgttaacaaaatcaatttatttacaaaaatgccattngccttttgttaacatcggtttaacananaaccaatgttaaagaagtgatattgaanacattctttctagtagtgaataatcttgattatggtgtggttaanggtgctttggggctttctttgatctgatttggttct

SEQ ID NO: 9639 - DNA, 419 bp, Glycine max
  unsure (1)..(419): unsure at all n locations
tgcagcttctgaggaagcctctaatggaagttttgaggaatctacatgttctgtctcggtaataacgatgcccagcctccgttaacagttggatctactcgaatttggtctatagcttcacaagacaattgtccacgatctgaccgttgtgatcgttgagaagatgtctggagtgtgcgcgaagcttccgttcctgagagcatttctcatttaagcatttcagcctttgctttcatgtagcttaggagaaacaccatttcttcttctttctgtcttccaaagccatttctaacgtnccaagcattttctccatcacccacagccaccattatccaccacaaaccgtcgttgttctccgttgcaaccccacactgagaggaacccttcgatcgaagcggaatcttcaacttggctctggt

SEQ ID NO: 9640 - DNA, 334 bp, Glycine max
gctcgatcttccaaagaatgttgatatagaagccacagagaaaccattttcttcatctgtggtctatctccatgaatatgagattcttgttgtaagcctagtaccgaacattcttcttgccaaatcatccagttgctcctcttcccacacaaagacagagtgagttaccaaatattgtcgctcgcaagttgcaacttacaatagtatggactgagtcttcatatgtgagaccagaacgagggttaattatgtgacctcctctgactttccttgttacaagagactctaaccaatcggatcttgcactacacgtaattgagatatgatgtatatc

SEQ ID NO: 9641 - DNA, 582 bp, Glycine max
  unsure (1)..(582): unsure at all n locations
ntgancctgaccgcatgttacgtcacctgcgctgctgctatactgctgctcagcggtcatagagtgtctagcnatatatctggttccggcgtgccaggattattagtcgcccttcaaatactgcacaaagaacgttgccctgctctatgctaatctctataagcagatcgctttctctctatgatcatgaacataagctattaactgcaaaacgatgacgtcttattcgtttttccaaacctggtgcgatgccaacgaatgacaacatagctgcaacacgtgtaacccatcatctgctgaagattcaagagagtagatggagagctttccacagacttaccctctctactgttccgtacacttacaccaagaggatacacttttctagttgtgagatgatgctcctctatcacactgagantggtgagagctgctgtctgatatggaggcnactcccttgatcacttgttccttatccttatatacaccacgtgagacctcctctctctctgcgggattctcaagatgatgagagaagaggcaaactctgaaactgtttcttagcaagagaatgataatgcg

SEQ ID NO: 9642 - DNA, 421 bp, Glycine max
  unsure (1)..(421): unsure at all n locations
gctgtcacgaagtcactcttattggcagatagtttctcctcatcatctaaggcttgtgcacatgtntcctcctgaaccttctactcttnaaattaatactaatgatnggctatttanggacccatggatttcaagctttggcggngtcattcgtaatcatcatggtaaatggatgcaagggttctcaagctattgtggttntatgtctaatatcattgtagagcttatngcaattcaccaactgtcaatctctttattgctaagtctagtggctttcagtccgtggtatgcaaattagactcaaccctcgcacttcatcttatcaagaggagagttcctcgcactcatcctctcnaccccttggttgacaatntcaaaagcttaattacttctcaatgaatcattntcctttagtcacatg

SEQ ID NO: 9643 - DNA, 337 bp, Glycine max
  unsure (1)..(337): unsure at all n locations
tgaagntatatagggtttggtctcattcacaatcctcatttttggtgatgagttcttggaaaagggaagcattgataagattgtaagagatgatgaacaagcaatatcatttgattgagatcccaggaataatgccattaaaggtgcagcaaatgctttatcttatatgcatcatgactgttcacctccaattgttcatcgagatatatcaagcaagaatattgcttaggatttggagtatgtggctcatgtctcagatattggagcagccaggcttcttaatcctaattcaaccaattggacctcattctgtggcactgttggatatgctgctcca

SEQ ID NO: 9644 - DNA, 300 bp, Glycine max
  unsure (1)..(300): unsure at all n locations
gtgaaccctgtaattggttgtacgatatatcaactgatatcaagcttaccatctcttcaaggctagagagatcccctgacagattattatgagagagattcaatgtttctaagcttttcaactctcgaagcaatggtgctattgttccactcagaaagttcttgctaagatcaagacttcgaagatattntagtttaccaaactcagatggaatacttgccctgaatatatcttggctcagatntaagtgtaataagttgaccaaactgccaagatgatttggaatcaagccaatgaaat

SEQ ID NO: 9645 - DNA, 343 bp, Glycine max
  unsure (1)..(343): unsure at all n locations
agctngcagagaatatatcatactcctctctttcttatatctcttctctatgagaaactattccctctttccatattcttacttctgttcacacccagcgcacacaagagaacacgaagagagagacagatagagagggagatagagaaaatcacaaaccctctctcaaggcatgtcatagatcgtgtttaagtaataggcaggcaataacataggagataagatatataccacgttatcagactcnattgtacataattgttctgtagcacacatttctgattccaaaatcagttgaagaataacttaacagatattggaggcagattctcatctttagtaa

SEQ ID NO: 9646 - DNA, 266 bp, Glycine max
actcttctagggtcttcagcatgatagggtcttcaacagtatgagaatgccctgcaatatgataactagaagatgcctctgaagatcaaggttcttcttctggagttgctgcttgatgtaagctccattggagcttgtagccctaggatcttcttcatcaatgaattccttcgcttcttggaagatgaatggcatccgaatggagaacgaagagagagaggagacaccacttcacggagaagatgagtctagaagaagctcaccac

SEQ ID NO: 9647 - DNA, 597 bp, Glycine max
  unsure (1)..(597): unsure at all n locations
aatagacgcnccttangangnattgactnccgttgtnannggccactatagantactaagctngagggcatacgcgatgcataggtaactngttaacccagcatgcctttgtctcattatattagtatctgncgcaacggattgcggatagtgctcctctgctgaccaccatacatacctttgctcttccatgtagcaacactggagcaattgagcaccctaaagcttatgctgcaaacatttacaatagacctcctcaaccttcacatcataagtcaccacagcataacaattatgacctctccatgacagatacaaccctggatggaggagtcacactaatctcagatggtctagccctcaacagcgacaacaacagactgctcctacctacagaatggtgctgcccaaacagaccatacttnctacaacattccaacaacagcatcagctccagaacagccacagatgatgttcttcacaacttactcgataactctgatgatatgatctgaaacattcatttaacagaaacagacctcattcgagctgctatcaatggacattgcttcaattgatcacagatcttaatctgcg

SEQ ID NO: 9648 - DNA, 354 bp, Glycine max
  unsure (1)..(354): unsure at all n locations
gcttccgtcagtggtaccttaagnttcatgggataatttcttcattngcgtttgangaacaccccatggatcaatgcatataccacaaggcagtgtgagtaataatatgttttcttgttctatatgtagatgatattntacttgcaaccaacgatcggggtttgctacatgaggtgaaacaatttctctctaagaattttgacatgaaggatatgggtgatgcatcttatgtcatcggcattaagattcatagagatagatctcaaggtattctgggtctatcacaggaaacctatattaacaaaattctagagagatttctgatgaaagattgttcaccaagtgttgctccca

SEQ ID NO: 9649 - DNA, 315 bp, Glycine max
  unsure (1)..(315): unsure at all n locations
cagcttacanaactgtgctctaggaacttatcactcgtgtcatgatgtctgattagctctntcaacccaagacctgcattaagataagacaataccgtagtctcaagaatcaagtctcctgcagtgaanaatntaacacaatgtcatgaccaataattctctgtacaatgcctcaatgtttagataacanataaatcaatcattattagatgataatagaggggggatgaatgaatatatcctgtgatctgaaagttagaataaacaagtatacagaatagtttccatatttatccaatgtgttgcacatacatg

SEQ ID NO: 9650 - DNA, 359 bp, Glycine max
  unsure (1)..(359): unsure at all n locations
acacaatgataatactatgtatttattaaccatacttaatagagaatcttataacactacgaaataaccataaattgggagagtttgatacaatttatacaagcttnatacacaaaagatagtcatttntaccgactaacacctacccgcaagggcattggataaagaagacttcaagtagattacgccaaggatccaagggaaggccctatggttctcatgagccttagggtagatttcgggcatatgggttaagtatgagcctgctaatctgttaaatatacaataagtattccttcttttggcccttgattctggccttctatagcatagggtttagccttgtatttaagatattt

SEQ ID NO: 9651 - DNA, 326 bp, Glycine max
  unsure (1)..(326): unsure at all n locations
tctatcctttctatgatggagccaatctcagtcacnctcattaagaactagctctnttcttcctctattgcctttagttgaatacaccctcttgttggttctctatttggttcttaaccctctcatgcatcttctttacaaattctgacctagattccccttctttatgtataaaagaagtgtccagtgggaggggaatgaggtctaacggtgttaggggattaaacccatagacaacctcataaggggactgcttggtggttctatgaacccctctgttgtaggcaaattctacatgaggaagatactcatcccaagactttatg

SEQ ID NO: 9652 - DNA, 468 bp, Glycine max
  unsure (1)..(468): unsure at all n locations
accgcgatctctaagtcacctgcggcatgcaagcttataatatatcacaatctatgattgtttacagaatatatactatcttacattgcattctaatataagttcgcttttcatactagagagcacctgtatatttcatttactatttgattataaagaagaatttagaatgcaagaaagacagataaaacctacaacccactctggtgttgtatattctgttcagagttgagaatatcctctggttgccttaaaattttaaccatacaggatcagtgactgtgcacctgaagatgtctcanaggcactgactaagactctcgaggaacctaagcttgactacattgatttatatcttggatgatccttgattntaaaactctgtgcaatgatactgcaactggagataaatgatgatatntgatgataaatatcttgtgaatatgcattggcattatgacgaaccgg

SEQ ID NO: 9653 - DNA, 320 bp, Glycine max
  unsure (1)..(320): unsure at all n locations
tcggatccctgtcagatacaatactagaaggaattccatgcaaccttactacttcctcgatgtacaactccactagctnttccattctatacttcatattcaccggaacanaatgagcagatttggtgagtcgatctactatgacccacacggcatcatgcncacgactagtcttgngtaaactagatacannatccatagatatgctctcccatttccattccggaatctccaatggcttcaattctcccgatggtcgttggtgctcaaccttagccttttacatgtanacatcttgctcatattcgctacatctttct

SEQ ID NO: 9654 - DNA, 522 bp, Glycine max
  unsure (1)..(522): unsure at all n locations
ttattgcttgcttgtggagcttctatggaggcgtggaacttgagcttcaatgagtcctttactggtgattntccaccatggagatgcatcataagacaaatgagataatggtagaggctgtgccatccactatggaataagccatggaagaacgagctccaccacctagatgagccttggataagaagcttggagaggatgcttccatggacgaaaagaaagagggagagaaagatagaggggggagcacgatatttgacgatgataaaaggagataagttgaactttgagttgtgtctcacaagactcttcgtcatcaatgttacaacaagaggtacacatgcgtctattatagactaggtagctttcttgagaagctagagaaacttccttgcgaagttctntgagaaaacctcctgtagatctagagcttatcttcacacactcccttgcttatctaggctcaactccttgtgaagcttcgtgagtacgattctcatcgagctctgaccntgatacccg

SEQ ID NO: 9655 - DNA, 312 bp, Glycine max
  unsure (1)..(312): unsure at all n locations
aagctccttaactgcacaatgctctttaatattgaagagtatacttgtggaaccttcacctgacgaagacactgacaagaacttatcttctccttcttggacaaagtatggcaagctggaggcaacgtaaatttcttcccatcagaccttggatgcaactatgctcttatacccatatcagctagatcttgaccggtattcaagccatccttcgtcttgccttgaatgttaaggagcatcccaatcacactgtcacaaacattnttcttcacatgcataacatcaatataatgtctaacgtcaagatcacac

SEQ ID NO: 9656 - DNA, 419 bp, Glycine max
  unsure (1)..(419): unsure at all n locations
agctnttatatagagttgatattacattatttttttgtgttacanaggagtttcactgtagcanaattaaaattatacactaatactcttgcactggattttcatgcttctgagccttgtttggtggggcaaatggatcactcgctgatacgaatcaacttatggtcgtcttgaagtcaagaaaacaaaacaaaaaggaacttgaccctaaccgcaacttgcccatagaaccaaagttatcanagaagcgtgtctctaatcacgacctgccgatagaacaaacactataaaattcttaaccaaagaacanaagggagctctctctgtggagaanacactcacattcttattatatcaattattcttgttgtgttccatacatgnngttcctattatagggaagagaaaacaagtacata

SEQ ID NO: 9657 - DNA, 535 bp, Glycine max
  unsure (1)..(535): unsure at all n locations
ggtgagtaacaacttttgtgttttcattgttggacaatgagttgtagtgtaatgtttgcttggcgactcgcacaagntcaagtttgctatgagtnttgataattgctctttatattctattctgtgaccaaatatatttatttttcattaaaataggagtttagatctcttaatttgtatatacaatattacaataaatgaataaatgttgttntggattaatntccacatgaagggatgaagaattagacgagataagaatgaagttgtacaagtgcatgatcagatctcaagccatgaattacgtacacaacttatagcaggaaaccgtcagcgaagaanaccttcaagttaagatcagaccttaaccatgagtccacaacgtaactagcaacttccgagagaaacgtatggactaagtgggatactaggctaagcctattgaggataattatatgtacttgagattatgatgtcnagtcacatacattgggtctatgnacacaatgtggctgacaatggcctcgaccactcg

SEQ ID NO: 9658 - DNA, 211 bp, Glycine max
  unsure (1)..(211): unsure at all n locations
agctttcaanattatttnaggggaatttgtgtgtcaagttaatcaacttatactaaagtatctgacgatggtgtagtgaaaattaaatgtgactcaactatatgggtgaccaaagatttaggtaaactaaaagattcaatcaatccgaggcaaatcgaaaaaaaaaaaattgggttggtttaggtatatgtttgagcacatgaagttcgac

SEQ ID NO: 9659 - DNA, 194 bp, Glycine max
tattaaggattgtctattttttttatatgaatgtttttagtacttgaatatctattattgtagaagaaaaatgaatgtaaacaattttgttaatccaaaggaagaatattacaaacagataactaggagaggattacaatttgtatcatcaagaagattatttgaattaatatcttggtacgtacagtactgct

SEQ ID NO: 9660 - DNA, 232 bp, Glycine max
  unsure (1)..(232): unsure at all n locations
ccacctgagagcatgcaagcttggatanctattgctttggaaacctttcctttctcatgtgaacccaaacccaatctccgagttggaaaacaacctttttgtgcctcttgtttgcttgtatagcatagctcttattcctcttttcaatttaggccttgactctttcatggagctttttcacatagtcttctttggcttgtccttccttatgcctaaaaactgaaatacttgg

SEQ ID NO: 9661 - DNA, 193 bp, Glycine max
ctcaaccacaatacccttctttatgctagcaatgtgctacgtgaagattgaaactcaacaggtccatttcgggttcctggaacttaccaaatagcgtagcaagagacatgcgagttaaatctcgtgactgaacaagggctgataccttaggggtccattctctgcttaaacatctcaatacattacaaatgag

SEQ ID NO: 9662 - DNA, 214 bp, Glycine max
  unsure (1)..(214): unsure at all n locations
agctttgcttacttttggggcatttggcttggctggagttatcttttgnaggtggctgaaaacttgaaaccgaggacccgtgatgggtgaccggttatacccagttagaatcatagactcacccgctgagacaggtaccaaatcataaatattagtagtagcttattattagggccatagacctaaaaggccatacacataggctgtgtgtgag

SEQ ID NO: 9663 - DNA, 196 bp, Glycine max
ttaaacgctttttatatattctaatcattcttcagtcatatgatgggaaaggtaactcattgacaagactaggagactagaggtattagtacctatgtggacaaataccctgcacaaaactacctcaattattcagcaacatacctcgtgaggatatgtcaatgtggatgcaaaaattttagaaactgatgatgca

SEQ ID NO: 9664 - DNA, 214 bp, Glycine max
agcttgtgagattttttactgctttactagtatgcttttaaggactctacttaaggtgatgtatactatgctatggatttctctgctaggttatcaattaataatgtgtgttccaatcttgtaatttcttattggcaatcgttctagctagaacccaaaatgtttgtgaatagaatttattacgcaccttctcctttaatcgtaataattttat

SEQ ID NO: 9665 - DNA, 196 bp, Glycine max
tttaagatgttctcatttgtataaacaacatctatatattggtagtagttcaggctcacgtaaccacaagctgcaataatatgtgaacatggataatgaagcgcagaataccttccgcattgacaataatgaccattcaagttaactgcccatttttgtccgccacgttgcgtaataggatggaaggtctcctcta

SEQ ID NO: 9666 - DNA, 213 bp, Glycine max
agcttcttagttttagatgatgcagctgagtttgtagctacctcatgcactcctctaatgactatagcatcatttctggcgctaaactgctgggagttggaagccatcttctcaattaaatttctggcttcaacaggagttatgtctccaagggctccaccactggcggcatctatgatacttctctccatattactgagtcctttataaaaa

SEQ ID NO: 9667 - DNA, 198 bp, Glycine max
ttggccaatttttctttcttgaagggcaaattgatcttggaagtcagaacctctgtacttgaagaatagggttacgagtttgggcttttgttttgtataactagcttagttagttaatcagcttgttagttaggtacgtagttagttagttactaacactctatatattagtgttagatagttagttaagaactaaac

SEQ ID NO: 9668 - DNA, 214 bp, Glycine max
tttgcaagttatgatcttccaccaccgccgccaccatcatcttagacttatattttaatattagtactttgattttcagccttgtattttggctatattagtatggtatttgaacaatttactatttccttatttgcatagtatgtttagaccaatattaagtatgttatttggctatgtgaagtttataatttatctatgcatggttgtttgc

SEQ ID NO: 9669 - DNA, 192 bp, Glycine max
taataatatttatataacttgtcatttgtcaatacaataatgagactattattgtatgtataagattttaggttattaaattaacacttttcaataaaaaaagcgattataatttgataaaggaacatgtaagtatgtaatcatgataaacaaaagaaaatttgagtaaataagagtacaataagttctagc

SEQ ID NO: 9670 - DNA, 209 bp, Glycine max
agcttcatcttctttgcattccaacattgaaacggttgggccggcccatgcattccaactttaatagatgtacatgtgtgatattataaagttggaaagcctacactacccctctaaatctaccccaaagtaactttttaataaaaatatttattttttattttaatattatttcttaattaatagtattacaaattgttgcattgatt

SEQ ID NO: 9671 - DNA, 192 bp, Glycine max
tcatagattattaaatgttttgaatgaaaaataaaaggccataagctgaattaatctgttcattcttagaaaacaaaaaaaggtacatgaaccttacaattccaccatttgtgtttcttccccccttccaatcctacattggatctcatgacaaccttgagacatcttacatgacattcgcaccatgtttca

SEQ ID NO: 9672 - DNA, 207 bp, Glycine max
agcttttatataagctgaaccattttatcaataaacacaagttgagttttattcagaaaattagagtttatctcttttatcttagtgagagtgattctcctaaattcttgagtgattcaagaacaccctggctgtatcaaaggactttcacaacctttgtgtgttgccctcgctggaaagagtgattctttccttcctttcatcttc

SEQ ID NO: 9673 - DNA, 190 bp, Glycine max
tctttttattttatgcacctgaatcagacttccgtttgaaaagttatgaccatttgaatttctcgacagattccgttgttcaatttcgagcgtctcggtatattatgcgccagaatcggacttccgtgtgacaagttacgaccatttgaatttctcgagagcttgcgttgttcaatttcaagcttctcga

SEQ ID NO: 9674 - DNA, 207 bp, Glycine max
agcttgttcttgatttttcctcagttctttaacaagctttgaacaatatacttggccttcatttaactgtctttgggcttgacggccacgctcaacaaagtactttcgacacctactgtacgttgatttcaccaatgctgttatgggaatgttgcgacaatcctttaaaaccttattgatacattctaagaggttcgttgtcatgtg

SEQ ID NO: 9675 - DNA, 190 bp, Glycine max
  unsure (1)..(190): unsure at all n locations
ttttattntttgcagttgaagatgaatccatggccacctcatggactcctctaaggacaatagcatcatttcttgcactgaattgttgggagttggaagccatcttctcaatcatatttctagcctcaacaggagtcatatcaccgagcgctccaccactggcagcatcaatcatactcctgtccatgtt

SEQ ID NO: 9676 - DNA, 216 bp, Glycine max
tgtttgcaagtttgttctaaatttacattgatgtttgtatgggaggaggttacatgccatttttgctttaagagtaatgtcccactaaaactaactttccaaatgtttgccttcgcaggaatggcaccgaggaagcttgcctcaaagaggtccaggaaagacaaggcggccgaaggaactagttccgccccggagtacgacagtcaccgctttagg

SEQ ID NO: 9677 - DNA, 194 bp, Glycine max
tgtttcaaatttaatcactcctacattttatctctagcatgcattgtatgttagtctcgtcctttgtcacgggaagccggaaggtccatatcaccttcttaattgtacacatggggcactgcgcccccaaatgcgcgagtaagaagagataattttccgggctctcgtgtccgtaaaatgcattcatatcatgc

SEQ ID NO: 9678 - DNA, 208 bp, Glycine max
ttcaagtttgaagaagagcttgaagaagttttgtcttttacttgcccaactctcttgagtggcatttgtattgtttgttatactgaatgttgcatcttagtttatatcatatcatttgtgcatcatgcatcatcatgtgtgagtgtgaagaaaatttctaaagttagaaaatttcttcaaagggaaaaactctttgttttaatcgatt

SEQ ID NO: 9679 - DNA, 192 bp, Glycine max
ttcttctattataattctacatgaagttgtctcggtaaaaacgctgcccagccttcattaaccgtttgatcttctcgaaatttggtctgcaacttcacaagatacttgtccatgatctgaccgttgggatctttgagaaaatgtctggagtgtgctagaagcctcttaatgaaacttctggaggaagcctct

SEQ ID NO: 9680 - DNA, 203 bp, Glycine max
tttagtttttaaccttgacttggtagaacctcttgccggtttgatttgttcccatgcttgctaaagtgagacaaaagctggtgcaaatcaaaactccgatatctatgggtggaatggatgaatgcatgaaggaatgcatataacacagatgcaatctaggaatgcgggggtccggggaattcatccccttcttagacacaacg

SEQ ID NO: 9681 - DNA, 191 bp, Glycine max
ttcttctttttgattcatcttctccttgaagtggcgtctccaatcatttttcttccttctccattctgctgccatgatcttctagaagcaaaggactccattgatgaagaagatccaaggcctttaagctccacatggagctacgtcacattgtgtgcttggttgtgcgatcttagtggttcctcattatt

SEQ ID NO: 9682 - DNA, 213 bp, Glycine max
agctttaaggcattttgtttgcaggggataacttggtaacccagctggccttgaaccagaaatctgtacctgtcgcaagggtctgtgatttgtgctcctctgctgaccaccatacagacctttgcccttccatgcagcaacctggagcaattgagcagcccgaagcttatgctgcaaacatttacagtagacctcctcaaccttagcagcaaa

SEQ ID NO: 9683 - DNA, 198 bp, Glycine max
  unsure (1)..(198): unsure at all n locations
tgcctaantatccngattttgattagaaaaggantatgaaacacacaaaatgaaaatactaagtatttattacctatacttaacagaaaaaacttataacattacaaaaaaaccataaattgggagagcttgatacaatttatacaagttttatacacaaaagttagtcgtttacaccgactaacaagcacaagatta

SEQ ID NO: 9684 - DNA, 214 bp, Glycine max
agcttgtcgaactatattttggaatctcgacatttcttccatctgaatgtagcccttggctcgctcccgtaactcgtccatgctgctggaaagcttcttgcacaatctgttagcaagtttgccaagttgtagggctagcaacatagaatgcaacgccacctcaggattaaggttcctaatttggacaacaagctgaccaaatctgcccaaaatt

SEQ ID NO: 9685 - DNA, 210 bp, Glycine max
gacactacacaagcctctagcggacttagaataggcaaccaacccctctctgaaaaccatgcaatgcgctcgcgacgggacccttactccctgccgcaacttgagttcactattgctaccccatagaactccgcgaaagccgcccgggccaaactacaccctgcgagcccccatggccacatgatcaagggctcgagcaagaattgcaac

SEQ ID NO: 9686 - DNA, 214 bp, Glycine max
  unsure (1)..(214): unsure at all n locations
agcttggatnnctttttattagggaatctatccttcctaagatggatccaaacccagtcaccgtcattaagaactagcttttttcttcctctattgcctttagttgaatacacctttgtttggttctctatttggttcttaaccctctcatgcaaattctttacaacctatgacctagattgcccttctttatgtataaaagaagggtccagtg

SEQ ID NO: 9687 - DNA, 196 bp, Glycine max
tgccttgccttttgatttattttagggactcatggtcactatgaatgacaaattccttgggataaaggtagtgttgccatgttttcaaagcccgtactaaggcatacaactccttatcataagttgaatagttaagggtaggaccacttaacttttcactaaaataagcaattggatggccttcttgcatcaacac

SEQ ID NO: 9688 - DNA, 215 bp, Glycine max
  unsure (1)..(215): unsure at all n locations
agctttttgctttatcgtcatggnaatataataaatgccaagctgatctttggaataatttttttattttatgtccaaaaatattgtagtattattgaacataaaaaaaaatactaaaaatgttctcataaatttatgcagtgcaagtatattatgggtcatttcaaatccttcatgattgtgttactacttaaatagaaatataatatttaatg

SEQ ID NO: 9689 - DNA, 196 bp, Glycine max
  unsure (1)..(196): unsure at all n locations
ttagtgatattgctnctcaaaactctatgaataatgatcgatgtgcctccaaagaagatggattatctatgaaaaagaatatagatctactaactttaattaattatataaaataaactccggtaaaagagaaaaaagacaaaaacaggaataagcatttagatatgatggataacatcacgacgaatttaaaaga

SEQ ID NO: 9690 - DNA, 217 bp, Glycine max
agcttgcttctatatctcttgcatacatgtcactcgctgtgggtgccacgtactggagacctaatggtgtgttcttgcatacttgtcacttgccgtgggtggcacgtactatagacataatgacatggtcttggatacatatcattcgtcgtggatgacacgtactggagctatagtggagttgctcaatctccgtaatgcggttttggagttattg

SEQ ID NO: 9691 - DNA, 198 bp, Glycine max
ttattatgcctcctcctctcggcggggatttcttcttcggcgaaggcgagatggttgttggcagtgatattattgaccagccctccgaaaccttctaccgagatgtcttgggccacgtgggcctcgttcagaacttttactagcagagcccgatgaggctcggaactcatgagtaactccaacagcgagaccctggcc

SEQ ID NO: 9692 - DNA, 209 bp, Glycine max
agcttgcaggagagggagagagtttttagagaagatgaaggtcagatgcaaatttttttccataatttctattaattatcactttaaaaaaatcctttatgctacttttcatccatggtactcccctcaagatctcaattgttaaggattttattcttatatccgatagcttaaaaaactttggcattatgccatacctacctcacttt

SEQ ID NO: 9693 - DNA, 192 bp, Glycine max
ttataatttttattaaaacgttcaataactgctggtaatcgattaccatatatgtgtaatcgattacacagtgcaaattttgaattcaaattttaatagctgttgtaaatcatttttggccaccggtaatcaattacatcctctgataatcgattaccagagaataaatctcttgaaaaagattttttaact

SEQ ID NO: 9694 - DNA, 209 bp, Glycine max
agcttttgttttaggtgatattttaattttaattaaacaccatatgtctaccaattaaagacgatctttatagtataaccgtcattgtctctcttggcttcaaagatgatgcatgtccgcatcgtcttaaataattttaagtaaatttcaaaaatgtcattggctttatgatatatagctttctaggacggtgttgcagtaccagtcgt

SEQ ID NO: 9695 - DNA, 191 bp, Glycine max
  unsure (1)..(191): unsure at all n locations
ttatatnntattttattttgantaaaatttgaaatttcatcattggtttctatcgaaaaatatggttgtttctgataaccaaggtataaatttttggcttaattgtatttttatacctctattttttatttttggtaaattttatgatcaacaaattaatttgacatattttattctcaatttttaagaga

SEQ ID NO: 9696 - DNA, 208 bp, Glycine max
agcttgtcatttgcgacaaaactatgccaccgaatcctatgcccacgacaatcatttgaaaagatacctccaaccccataaaattttcaattccctcaccaaggagaaactcaacaatctcattatttggtttaactcaagattaaaagatgcaagaaatgacaccaccacaccattacattatatttaggctgacctaccaatccaa

SEQ ID NO: 9697 - DNA, 190 bp, Glycine max
  unsure (1)..(190): unsure at all n locations
tattataaaattattagaatnaataatggacaaggtcctaaactagcctagctgtgcagagaataaggttctaggcgcaagtccaaaggctcggaatcgagaacttaaccgcaatttctttccactggaggcttcaggaaaaatgaagatgctgtcagtgcaaaagaatatgtacacagaaaatcttcgg

SEQ ID NO: 9698 - DNA, 213 bp, Glycine max
tttgcaagcttgtttttctggaagggtttcttcgccaggtacgctcattttccgggctaattctgttttctcaacttccatctttttgaaataaagagataaagagaactcaggaagcttagaattaagtgagttaaatttatatgcactctcagggtaaaatattttacataaacacccaatgagaattattctgtcgtcatatgatatcaa

SEQ ID NO: 9699 - DNA, 190 bp, Glycine max
  unsure (1)..(190): unsure at all n locations
tccaaacattgttnttagaaagnnggatcttgcatagaattttcttaggctgatggatattctacctctctctttctagtgatattccccaacttcaccaagatctctgagttgtcttcaaaatattgtttgaagcttccaaaagttggctttaagaaagtcggaacttgctttggctgatggacattcc

SEQ ID NO: 9700 - DNA, 211 bp, Glycine max
agtttttcccctattttgctataaatagggggagaagtgaagaagaaaagggttcagcctcttaggcacttctctctctctcgaaattgctgaggaaaattatttccgtgaagaaaatccaagccgaggcgcttccgtaacgtttccgtgagaaattacgcgaagattctcgaccgttcttcaagattcatcgttcgttcttcgttttctt

SEQ ID NO: 9701 - DNA, 194 bp, Glycine max
tttttgtctttaataaaagggttttctctttttctattattttatttaagcaatgccacatgtctccatttgagtggagcaaaaagggcccactttccctttttgactgtgacccatactcagccacaaaagtgaggaaaaatctgatctttgaaacgctaaaatcctgcctcggtttgcgtgccatttctctg

SEQ ID NO: 9702 - DNA, 208 bp, Glycine max
ttaagcttacagtaccttcttagcaacagtgtcattgcctttctccccttaaatattttatccatcaatttgtggagaaaatgtccaaagggcccagagtaggtgaaaccatagagctgcaaatcaatttgatttcaaaactgctcagtactcaaaaattttcactacaaacttcatttctgcttcatcttttgagaaaaggtgaaac

SEQ ID NO: 9703 - DNA, 187 bp, Glycine max
  unsure (1)..(187): unsure at all n locations
ngatcttttttttttnnatctttaatctttaatccctgaacgaactattcaagtttgtaattcgaactttaattatcttttaattcgttcctaaagatagatcgccaaatctgttgctaacagcacattaatctgttaaagatataacagatttatgtgtccagtattttcgggcaagatgtcctgg

SEQ ID NO: 9704 - DNA, 189 bp, Glycine max
aacaggttgttatagctaaatgaactagaggaattcaggtttatagcatatgagaatgccaagatctacaaggagaaaacaaagagatggcatgatgctaggataagatagagaacatttcaagtgggctagaaggtgttggtgtacaactctcgcctacatttgtttcatgggaagctgaagtctaga

SEQ ID NO: 9705 - DNA, 187 bp, Glycine max
tctttagtttttgaataatcgattatcaaatgtggtaattgattagttcgatacacgaagaactcctaaagtttcctaacacaatataaatgattactaaatgtggtaatcaattatctggaaccacaacgacttccttctgttggaactagcttatgtaatcggttactaaaaatggtaatcaatt

SEQ ID NO: 9706 - DNA, 215 bp, Glycine max
agctttgcggattttgttttcaccagtgaaaggatcgatgtgggtccgaaaagaggcaaatttgatcatcctactaggacgactgaaaaaactggggcaaatgaagagggtgaggaagagggagaaacccatgctgtgactgccattcctatacggccaagtttcccaccaacccaacaatgtcattactcagccaataacaaacctcctcctta

SEQ ID NO: 9707 - DNA, 197 bp, Glycine max
ttataagtgctggtcttggtattttaaggtcaagtgttcgcgatatgtgaagatgatgttccaagtacttcggatttggtccgaccatgccctcctgatttccagctgggaaattggcgagtggaggaacgccccggcatttacgcaacaagcataatgtaaacctttacggttttaaaagctctatagttgggcct

SEQ ID NO: 9708 - DNA, 216 bp, Glycine max
agcttgaagaggtttgctttaatggaggaaaaaaaagagagaaggggggagcacgaaattgaaggaataaaagagggaaagaagtggaactttgaagtgtatctcataagactttcattcatcaaagttacaacaagtgttacacatgcttctatttatagactaggtcgcttccttgagaagctttcttaagaaaacttccttgagaagctttct

SEQ ID NO: 9709 - DNA, 194 bp, Glycine max
ttgatgatatggcctttaccgacgaaatgagcaaagtaggtctaaaaagaggcaaatctgatcattatgctttgatacatgccaaaaaaaacaagggcaaatgaagagggtcagaatgagggagaagcccatgctgagactgccattcctatacaaccaagtttcccaccaacccaacaatgtcattactcacc

SEQ ID NO: 9710 - DNA, 214 bp, Glycine max
agcttccttttaatgcgttacatttaaagccgagctcgatggtggtgcgagcctttgatggtactcggtgggaagtaatgggggaaatcgacattcccattcagataggcccccacacttgcaatgtggtgtttcaagtaatggatataaatcctgcctatagctgcctcttgggaagaccgtagattcatgccctgggagtggtcccttcaac

SEQ ID NO: 9711 - DNA, 194 bp, Glycine max
taggctaaattagtcttaactttcataagctatttaagttaagtctagtccaacaacaaggatatgaggatgaagcttagtttatgttagtctaaacctaggagggctatctaaattgagcctagtccaacaagagggatctgaggatgaagcttggattgattcagtctaactagggatcaaggtttagtaat

SEQ ID NO: 9712 - DNA, 213 bp, Glycine max
  unsure (1)..(213): unsure at all n locations
cgcttttacgncttttttctccgaaaggacacgacgaattgaaagttcaaaatccgaaatgaaatttagtaagttaaagaaatttgaataaatgaaatgatagtaacatgacatgaaattttgcttctttaagaaaagcataaattgttttttaattgagcaaaaataacttaaacaaacacactaaaaacaaaaaattatttattttaacaa

SEQ ID NO: 9713 - DNA, 193 bp, Glycine max
  unsure (1)..(193): unsure at all n locations
tgtgncaaattttaaccttaccacaaaagagaacacagcacctatccctaatgaaatgaatgcaaaggaaagccttaccttcggaaggccattgattcagatgagcaatagaggtatcttctataggaccaatgtaataggtctcttttggatcacctgttaataaggaatgatcaaaattttctgtcattct

SEQ ID NO: 9714 - DNA, 216 bp, Glycine max
agttttgcaaatttaattttggtcaaagtgagaaaacagtgtggatctaactattgggtccacaatgactaatgcttatggttaataaataggaaggttaggtacctgttattgtcacgttattagttactctctactatttgtccattgaaaactctaaaatttagagagtgtaatcaggcaatggaaggtttagctttgaggtttctgtagtgg

SEQ ID NO: 9715 - DNA, 199 bp, Glycine max
tttagagacttcaactttgacttatctatgttaatatgtcttgagcagccactatcaagataccataattgtgtatctgctgttaaacaaatttcaagtagaagtaagttcttaataaacttagaaaataagaatattttatccacttcatgtttgatcaatcactaagcatgagaaaaaaactaagactatatcacac

SEQ ID NO: 9716 - DNA, 208 bp, Glycine max
agcttccatcaagtggtaataagagcacaagagcttcaagtaggtgctccttaaacctccattaattttttgctttaccttctcttccattgttttttcttcatttttctccatgtatctcctcacatgtcttgttctaaatgttgttaacatgattctttagagtttgcatcgattaaacttgctatagaagttagatttgattttc

SEQ ID NO: 9717 - DNA, 191 bp, Glycine max
tggaacatattgtctgaattttgggtcctcttaaggacatagtcaaaatatccgctggctgatcattagaatcaataaactcagtgacaatctccttggacagaagcttctctcgaatgaaatgacaatcaatctctatgtgcttagtcctttcatgaaaaactgggtttgaggcaatatgaagagcagcc

SEQ ID NO: 9718 - DNA, 208 bp, Glycine max
agtttcactttattacttagattacattactatcaaataacacttatagctattcaatattcatcccttttggaaactacacatttacttctatgagttattaagagagattcctccaacatgaaaacatcatcaccattaaattctgaatgaagcccttcatgtccatcaaattccttgagtcctaccaatgcctcaattggaatct

SEQ ID NO: 9719 - DNA, 191 bp, Glycine max
tgccatctgttctccatccaagccggtgtcacaatagaataggaagatgggagaagaatgacacaaagtagttagagaactttcaaagttttgtgaaagatgaactaccccctcaaataggttttgtgaaagcctgaattggcaaggaggattgtagcatgatccatagaacttttagagtttgatctata

SEQ ID NO: 9720 - DNA, 208 bp, Glycine max
agctttctttacaacaaagagaagagaaaaatgaaggattgaagaaatacaagtagtggggatgtctcctccacctctagaacctcacaatcactcacagattcatctcatgctcttaggatgacttcctcttcatgctcagttctctgccaatcttcgcacaaccaaagctctcaaaactctctggaacttggacctttctatctct

SEQ ID NO: 9721 - DNA, 191 bp, Glycine max
ttttaatattaaatggttaagtcatccttaatttttgcaccaaataataggaaataaatacgcttattatcttctttaataataaataaattatacatttgcaagtgtattttagaagaaacttctgtcgagtgtcattcttgatttgttaagtagtttcctatggtgcaattctttccttgatattcttc

SEQ ID NO: 9722 - DNA, 214 bp, Glycine max
tttgcaagcttttattattatggggtacccataacatgtggtactaggtggcggtcgggcgatggtgcacaacaagttttccacatccacaaatcgcgcataaacccaccatcccctgttgcccacctccaactgagctcacgtactcccacgtagcccatatcctcgtttttctcaaccccgggtccccatcaatcctcccaagcttccccaa

SEQ ID NO: 9723 - DNA, 192 bp, Glycine max
tgccgcccatctcgcccaggcgagcaaggttgcttcctccagaagcaacaaccttctggaggaatcttctggagggcccaagtgggcctggttgctatttgcacccccctttttaccaaatgcaccccccttttctatttttttgtaattctttttccgtaacgttacgaaactttatgaatttcgtaacga

SEQ ID NO: 9724 - DNA, 211 bp, Glycine max
agttttaacatagaaaacttgtggcattacaaacacacacatctattcatttaattacacatagcttatggatttcacaacatacttcaaactcacatttctcacttaaacatgtaggttctaaatgagcaaagtgtttaagctgatttgatcgttacaacattatagagggaattgtttgacaaattcattatttacataaacattcttg

SEQ ID NO: 9725 - DNA, 196 bp, Glycine max
ggcttttatatttaataaaaaaagcataaaaacaaaaaaaaacacaatgaaaatataagtgtattatgtttttttaaaacaaaaaatacacaataaaaatatgattttattgggtgtctcaaccaagatgacaacagaattgtgtttccgttgtgtatttattttttgttttaaaatgtgaaataaaaatacaatt

SEQ ID NO: 9726 - DNA, 205 bp, Glycine max
tcaagcttcaacacgtggttcttctacggtttccctggggctgttctcatcctcatttgttattggtgcatcatttgcctcctctatgtgcccaaaggttcggctcgggctttgtctgcttacttggatagagctcacttgaagagagacctcgaagctctcggtaagtttctcatttcaatcatattcatttttttttaaataa

SEQ ID NO: 9727 - DNA, 191 bp, Glycine max
ttctttgtttggtttcaaagaaagagtttcctcatgtacaacctactctccactacgttttgttaaagaatattgtgatgagatcctcatgctttttaccctgcaggtgcaaacaccctcatcccttccaccatgtcttcttatttattcacacaacgtccctacctttatccatgcatccaaaaccctct

SEQ ID NO: 9728 - DNA, 206 bp, Glycine max
tcaagcttttgagcttcgcagttcgcacagagggaaagcaaaaaacgagtttttgctatcagagattggtgtgcatcggtttggtatatatgaagaagagaagagggggagcgagaaggcaatagattgcatgctggggttagttttggaatttaaaagtttgtcgatgacgtggacaagacaatttccagccagatagcgtgcat

SEQ ID NO: 9729 - DNA, 191 bp, Glycine max
ttctttgtttaggtactacagacttggagcctatttctctagtttggaacctgagcaaaagccacaagcaaatggagttcatcacaagacatctcgcatctattagactatattaatcacaatcctttgtgattcaccatccaatctcacttgtcaatggaagagagattttattgttgtgcttgagcaca

SEQ ID NO: 9730 - DNA, 214 bp, Glycine max
agcttggcacattaattattttttttgctgacattgtgcaatattgtttttcaccaacaccgggcaataattgctttagtacgatcaagcaaattttccttgttgatttcgctcaatgataggtttaccatcgacgtcgcctgtggtatttcgtgggaactcaaccgccgttgtgtttcggtcgacattggcctgcgctggtagaagaggcaaa

SEQ ID NO: 9731 - DNA, 196 bp, Glycine max
tctatttaatctgaaccattttatcaataaagacaagttgagttttattcagaaaattagagtttatctcttttatcttagtgagagtgattctcctaaattcttgagtgattcaagaacaccctggctgtatcaaaggactttcacaacctttgtgtgttgccctcgctggaaagagtgattctttccttccttt

SEQ ID NO: 9732 - DNA, 214 bp, Glycine max
agctttacttattattttattatattttatttatttatatttttatcacattatttattttatttatcacttttttgttacttgtttgttgtcttcttatctccctcgtttatatctcaatcaccccgagacaaattaaacgtttatcataactcttatctcatactacttctttaaaaaaaatcgaaaaaaaaaatgcacaatttgaaacttc

SEQ ID NO: 9733 - DNA, 197 bp, Glycine max
tcaagttgcttactgcttaaaattatgaaacagagacgatgcagttttggtttttaaacaggggaaggaaatcaaccacacatgcaaatcacgtgacctcttagttaggtgtaatcaaaccagggtttgctttttacttaacctatttatttttattttctttctttttgaaatgatataaaaagtgacgaagtatt

SEQ ID NO: 9734 - DNA, 216 bp, Glycine max
agcttcagacaatttgtattatatcgattacgacaactctgtaatcgattaaaacaaagagtttttgcctctgaagaaaattttctaactttgaaacttttcttcacgcaaaccatgatgatgcatgatgcaatacaaatatcaaatgtactaagatgcaacaaccaatacaaatgccattcaaaggagttgggcatgtaaaggccaaagcttctt

SEQ ID NO: 9735 - DNA, 196 bp, Glycine max
tatctccagctcttaatcttgattattccaataagaaatatcaatagcattgctaacagaaaatattatgacattcccaagtagtgatttgtaaacatcatctcttaacttttgaagtaataattttattgttgaaacaagatgcataatatttacaatatcttgatattgttggggtaaactctgtagcatccca

SEQ ID NO: 9736 - DNA, 215 bp, Glycine max
agctttagaaggtggttagttgaagttgttttcaactcttgaaattgaatatatatgacacttaagttagatcaatccatttccacgataaataattcttaatacggtgaaaattgagaagtggtatcaatccaattgagtgtgcttgatgatcattaacaacttcattaaagacttttcagaactctaaatttgagagaaagaatatctaaaag

SEQ ID NO: 9737 - DNA, 196 bp, Glycine max
tgaattgattgatctttttgtgagtaaataaatattaagatgtccactttgactgttgcattttgcaaatgtcttaatggagtagctcaaactatatgttttggtcttaaattaactaacctttactttttcaggaaaccagaatctccaaaatcaagatcaagacctaactttgaaatgaaagacgctactccaa

SEQ ID NO: 9738 - DNA, 186 bp, Glycine max
tatatatatatatatatatatatatatatatatatatatatatatacatatatatatatatatatatatatatatatatgtgtagggagaaagataccttggatatgcatgtatgtagcaaaaaaaatttcacaaaatatatatatgtatgtttagggagcaagataccttggatatgcatgtata

SEQ ID NO: 9739 - DNA, 199 bp, Glycine max
ttgttctttttataaaatgagatgttttgaactcatcacgttacctaaaaaacctttgggtggatccaagtgctccaatcattcatttgcatattcatgttttgatggcatactcacctttgtttatttctttaggaatttcatcataactaagaaaacaccaaggcacccctataacactcgatccagaaaaatggat

SEQ ID NO: 9740 - DNA, 193 bp, Glycine max
ctagagttttttttgtcatcaatacgatctatccttaatagaatgataattgctaatcataaatatatttttgggttaaattatagatgaatttgtaaattttctcttcttgtttttcctttttttgagcaaataattgttaaattaacaccacttaagtttttgtgcagagaatattaaaagtgatggattt

SEQ ID NO: 9741 - DNA, 190 bp, Glycine max
  unsure (1)..(190): unsure at all n locations
tgtttanagttatggatatatataaataataatggctgctgaactggctgcaatacctataataattatatatgactgtattcattcacagacatcaaagataaaattcatttgcttcaatgcctttgttatgtaaggaggaggggttcttacttcttacttcttagagatacaagtgaaaatcttctca

SEQ ID NO: 9742 - DNA, 208 bp, Glycine max
agcttttggaagctcctcatgccaagtgcttagtactggaaggggatgaccttcggtggtaaatacataattgttctcatgtacaaatgaatcatcaaatagaagatataaatatttgcacctgaagaaaacacaggattactactcaatctcaaatccaataattaattgagagataatttcccatttttttaattttctctgtaat

SEQ ID NO: 9743 - DNA, 191 bp, Glycine max
tgattaagtgtctcgtttgatttattaagggtgtgttttgaagaggttatgactaacacttgtgaaagtgtttaggagagtttaacaaaatagcttatgatatatccgtaagctgtttttagcttattttaacaagttatccaagataagggtaaataaaatttacagcttatataaaactagtttaacgt

SEQ ID NO: 9744 - DNA, 208 bp, Glycine max
agcttttatataagctgaaccattttatcaataaacacaagttgagttttattcagaaaattagagtttatctcttttatcttagtgagagtgattctcctaaattcttgagtgattcaagaacaccttggctgtatcaaaggactttcacaacctttgtgtgttgccctcgctggaaagagtgattcttccctttctttcatcatca

SEQ ID NO: 9745 - DNA, 191 bp, Glycine max
taaacattcattttcgagtgtctcgatatattacgggcctcaatcagacatccgagtaaaaagttattgtcgtttgaattggctcaaagcttaaacattcaacttcgagcgtctcgatatattacgggcctcaatcagacatccgaataaaaagatattgtcgtttgaattggctcagagcttcaacattc

SEQ ID NO: 9746 - DNA, 261 bp, Glycine max
  unsure (1)..(261): unsure at all n locations
tctttgcaagcttttcacttgtaaaccagnngagggagaatgaagaaagaagggaaaaaactccaaagccgagggtgctttccgttaacgccttctcgatgacgttttccgtgtagcgaattccgtgtgaaagttttttcagccatttctttagtccgttctttcggttcgattctttcggttctttcaattcggtaaagttttcccgaattctgagagctttgcaaattcaatttcttggttattgtttcgctttttcat

SEQ ID NO: 9747 - DNA, 191 bp, Glycine max
  unsure (1)..(191): unsure at all n locations
tgcttcccatttcgcttttgcgagctaggntgcttcctccaaaagcaaccgccttctgggagaattttctggaaggcctaagtgggtctggttgctatttgcacccccatttttactaaatacacccccttgctcttttttggtgattcttttccgtaacgttatgaaactttacgaatttcgtaacgatg

SEQ ID NO: 9748 - DNA, 216 bp, Glycine max
tttgcaagctttaagtactgcgacggtttcctcttcagaaaagttcttcaaaaaaggatagttatctataggcataggatccttagttccttatatagttgcagagtccaccgtatatttgtctcctgccaaaagaaaattatgcttttaccttcttgctcgtgtgataatatagtaatagcaggaaaagagaaggattagtaatttaagtttact

SEQ ID NO: 9749 - DNA, 195 bp, Glycine max
tgcttacccatttcgcccaggcgagcagggttgcttcctccagaagcaacagccttctggaggaatcttctggagggcccaagtgggcctggttgctatttgcacccccattattactaagtacacccccctgcccttttttggtgattcttttttcgtaaagttacggaaacttacgaatttcgtaacgatact

SEQ ID NO: 9750 - DNA, 205 bp, Glycine max
tctagtttgggaggattgatggggacccggtgttgagagaaacgaggataggggctacgtgggagtacgtgagctcagttggaggtgggcaacaggggatggtgggtttatgcgcgatttgtggatgtggaaaacttgttgtgcaccatcgcccgaccgccacctagtaccacatgtgatgggtaccccataatcctacaagctt

SEQ ID NO: 9751 - DNA, 189 bp, Glycine max
ttcttacttattattttttagggtttttatgatgatgcttgtgatgtttgtgtgctgaaattgcttatggaaaactgttagagatgaagggtagagttaacctaggattagaaagtgagaatgtggtgttatgagtggaaaaagagtgaggctttgagagttggaaggctaaatctggattcagtggta

SEQ ID NO: 9752 - DNA, 204 bp, Glycine max
agcttgctgccacggagttttccgactatgctcttgtgtggtggaacaagctacaaaaggagagagcaagaaatgaagagccaatggttgatacatggacggagatgaaaaagatcatgaggaagcggtatgtgccggctagttactcaagggacttgaaattcaagctccaaaaactaacccaaggcaacaagggggttgaag

SEQ ID NO: 9753 - DNA, 187 bp, Glycine max
tgttcttttttacacttgcttatcttatccagagctttcagtttctaaactaagtgcttttaaactatttgcataacttttgttgattttgttacttatggtgtgtgtcaggtatttgtgttccattccttgtttagttatgatgcattttttgatgatactcaagtcatgtgtaacttttgaacat

SEQ ID NO: 9754 - DNA, 214 bp, Glycine max
agctttacgccattagaactggcagcatccatggccataacagaccctccttacaatttgtttaaaaacaaaccttgtttggtaaatagtttttaaatgaagccccctacagtaaatttgcctatcttgcctatcttaggacatccttttcaactctacaggtaatctgtcacacatggtttatatttatttctcgagaattattcaatctgca

SEQ ID NO: 9755 - DNA, 196 bp, Glycine max
  unsure (1)..(196): unsure at all n locations
tgtgccngttttatttttatncctaggatcatgagcaactaggtgtgtcctactatgacttgagaaacaaagggtgatcaaataacaagcagaaatttaaagggtactaggttgcctcctagtagcgcttctttaacgtcttgagctggacgcgtgatgacttgttgatcacagacctagtacttttgcatacctt

SEQ ID NO: 9756 - DNA, 214 bp, Glycine max
agcttgtcatctttatagagtagaagatagatcattgatccatcctccaccttgttgtgataaacacaacaatcatagagacttctcttgaatccttggctggtgataaagctatcaaacctcatgtaccattgccttggagattgtttcaaaccatacaaggacctttgcagttgacaaacatacctttcttttacttgaacttcaaaccctt

SEQ ID NO: 9757 - DNA, 195 bp, Glycine max
  unsure (1)..(195): unsure at all n locations
tgagtgaaattagggtttttaatggggngatgaatatgggacacttgttcatttggggcgggttggctagtattaggtgaggaagtggtggtatgaggtgagttattattgggaggagaaatgacttgacttaggatagaatcacatgactggggaaggataggtgggtttttatttggaaggggaggaatggaa

SEQ ID NO: 9758 - DNA, 213 bp, Glycine max
agcttctcaaggtttgtgatcttagctattagaggggtgtgtgtagctaagctctagcttctcaaggaagttttctcaaagaagcttctcaaggaagttttctcaaggaagctacctattctataaatagaaacatgtgtaacacttgttgtaactttgatgaatgagagtcttgtgagacacaactcaaagttcaaattctctccctttttc

SEQ ID NO: 9759 - DNA, 194 bp, Glycine max
tgagaagctttctgggtttgttatgatcgattaccacattccataattgattacctcaattctggaaatgaggaacaaagagggatttgaacgaattaattgattatcatatttgataatcgattaaatcaatattaggtatttaaattataaatatcctcacttgttctttctcgttagtaactcttgataca

SEQ ID NO: 9760 - DNA, 212 bp, Glycine max
agctttcattttttatttcgaccatctcgatatattaccggactcatccggacttccgtgtataaacttattgtcaattcaattttctcagagcttcggatcaaaattttgagcatcttgatatattacgggactcatttagacatccgagtaaaaatttattgtcgttagaatttgatacgagcttccgttttcaatttggagcatctcga

SEQ ID NO: 9761 - DNA, 194 bp, Glycine max
  unsure (1)..(194): unsure at all n locations
ttgagcaaattgaaatttcaataactnnatacacggatgtccggttgagtcccgtaagatatcgagacgctcaaaattgagatccgaagctctgagaaaattgaattgacaataactttatacacggatgtccggttgagtcctgtaatatatcgagacgctgcaaattgaaaacggaagctcgtaggaaattc

SEQ ID NO: 9762 - DNA, 218 bp, Glycine max
agttttgagcctttatcctgactcaccataaaccttgacccagggtgagaatgtcaatccttaccctcggaagcaaaaaagaatagaagggaaatttccaatcaaaaaagaatagaaggaaaatttccaatgaaagcaaaaaaagaaaagaaggaaaattccccaatcaaagagtgggagaaagcaaaaagaaaagaaaggaaattcccaatcaaaga

SEQ ID NO: 9763 - DNA, 198 bp, Glycine max
ttgaaggcttttcacgtttatggcctgccccctgtgtaagctctagagcatagaatgaagcatctctggagtaaacaaaaaatctgagggtccaaaagatgaaggagttggaagtggtatctgagtagatgaagtagaagaaaaaggtactagaggagtggatgaagaaggtgcgactatctctagtgctactgaagt

SEQ ID NO: 9764 - DNA, 207 bp, Glycine max
agcttgggtacaattctctcatcctatcctccaactcccatgtagaatcaccctcatcggttccccaccgcaccttcaccaacgcgatctcctttcctctcaacgacttcattcttcggtcagtgatcttctgaggttgtgctttataggtgaggttatccttcacctgtacctcgtcctctgcaagaatatgtgatggatccgggt

SEQ ID NO: 9765 - DNA, 192 bp, Glycine max
  unsure (1)..(192): unsure at all n locations
ccccttatggatgtccgaggcggggacaaaanataacgagacgcccgaaatcgaacaacggaagctcgcgagaaaaagcgaatggtcataacatgacactcggatgtgcgaagcggggacataatatatcgagacactcgaaatggaacaacggaagcccgcatgacattcgaatgctcagaacatatcaca

SEQ ID NO: 9766 - DNA, 212 bp, Glycine max
ttttgcaagcttcatttaaatattttctcatatcaaccttgttgcattgcactcttggacaagtttgttccgggaaaaagtactagctactgatcaagttttctcttatgtttggccatatcagacgttgataacatctttactgctactcatattataaaatgaataaagggatgctctgctgattcttgcatgctcaggaagaacaataa

SEQ ID NO: 9767 - DNA, 189 bp, Glycine max
  unsure (1)..(189): unsure at all n locations
tgttgcgatttaatttaatagngaacttttacctatgattttgattgacgttatcctcactcataaatcaatttcgaaccaactcaacgatcatttaaatagtataaatggagcgattcaaattagtaagttgttctggtcttgatcctgctagactcgtcaattgtcaatttgcaaggtggaatcgtt

SEQ ID NO: 9768 - DNA, 211 bp, Glycine max
tttgcaagctatatatggtgtattggattatacgctggtggcgtccgtcccaccgaagaagacggtggcgtttatagtggttgcggattagcctccagttgcgtcatacgctgaagaaggttgtcaatttttgtgttcattgcgagttgagacgccgagagcttcgtgattgcgtcctcgagacgatctgtcaaaaacctggaacgagtca

SEQ ID NO: 9769 - DNA, 131 bp, Glycine max
aaaagggaaggaagaatttcggactatctgcatctagggctggacaacaaatgtgggcatgtatgatttccaataaagtaaaactccgaattgcacccttttcagacttgttaggttgcgtacccctaaag

SEQ ID NO: 9770 - DNA, 208 bp, Glycine max
agcttgccttaaagagatccaagaaggataaagcagctgaaggaaccagttccgctcctgaatatgacagccatcgttttaggagtgctgagcaccagcagcgcttcgaggccattaagggatggtcatttctccgggagcgacgcgtccagatcagggacgacgagtataccgacttccaggaggagatagttcgccggcggtgggc

SEQ ID NO: 9771 - DNA, 192 bp, Glycine max
tcttttggattttgattctgcaactaactcctctttcaaaaccatgctatgtgctcgcgactggtccctttcttcctttcgcaacttgagttcactattgctaccccatagagctccgcgaaatttgttccggccatactcttccttgcgagccctcttggtctcttgttcaagggctcttgcggtaattgc

SEQ ID NO: 9772 - DNA, 216 bp, Glycine max
cttgcaagctttttgtctgagtgtccacatgggtgcatgcatgatcagttttgcatgaatttctaatcattattatatgcgtatcatggaaacaatttggggcattcccttattcttgaaccacatgctaaacaaatatcctgacatgcaagctttttgagccaaacctcgactctttggccataaaccttgacccaggataggaatttctatcct

SEQ ID NO: 9773 - DNA, 194 bp, Glycine max
tactaaggcttctattctagctcttcgtgacttttctaaaacttttgagctagaatgtgatgcctctggagtgggagttggagctgtattgttacaaagtgggcaccctattgcttattttagtgaaatgcttcatagtgccaccctcaactaccccacctatgataaagagctttatgccttaataagagccc

SEQ ID NO: 9774 - DNA, 202 bp, Glycine max
agttttgattattttaatgtgggtgaattgatcatttcattaacattgttctattctttattttgacatgcatatacttgaatgaattttgtgttttatgaaaacatgagactttgataggctttcttgagaccaatgaattgttttgactagtttttcccctagttgactactttgagattgaatgattatttcctttttg

SEQ ID NO: 9775 - DNA, 191 bp, Glycine max
  unsure (1)..(191): unsure at all n locations
ttttgattttaaggttgtanncagaggagctgaaagcagtgccagtaattaagatagaggcaacgagctgaagggtgagaccgttataggagaaacaggtagccagaagcgcaagccatgacgagcataaaaaagcttatcctcctgaagtttcgccagtgcggcagcttgaacaaacgataatggtggca

SEQ ID NO: 9776 - DNA, 204 bp, Glycine max
agctttgtaacgatctatggatccatttgcatgcagacttaaagagaacacaaacttgctacttaaaggcttaacagatgtaggacacgggactatatcccatgtttgattttcttccaatgctagaagttcaatttcaatagctttctgccaacaagcattcttcatggcctggctataagaggaaggtatgggaatagagga

SEQ ID NO: 9777 - DNA, 191 bp, Glycine max
  unsure (1)..(191): unsure at all n locations
ttctttattaggattttggcttggggttnctacgatgtcgaacggtcttgaatgggttaattttgtgagtgctgttgtgcaatggtgctgtgaaaaccttttatcaccaggttttgacaatacctgagtgtgaggtcgaattcggggttgtctatgttttgtgttgttctatgtataatatggcacctttt

SEQ ID NO: 9778 - DNA, 211 bp, Glycine max
agttttaaaagacttgtgtaatcaattacgaataacctggtaattgattaaaacaaagagttttatgcactgaatatgtttctaactttagaaacaatcttcctacctctacatgatgatacatgatgtacatatggatagataaagactaagatgcaacaatcaatacaaatgtcactcaaagagttaggcttgtaaaaagacaaaactc

SEQ ID NO: 9779 - DNA, 197 bp, Glycine max
tctcccctattttgctttaaatagggggagaagtgaagaagaaaaaggttcagccccttaggcacttctctctctttcgaatttgctgaggaaaattatttccgtgaagaaaatccaagccgaggcgcttccgtaacgtttccgtgagtaattacgcgaagattctcgaccgtttttcaagatccatcgttcgttct

SEQ ID NO: 9780 - DNA, 213 bp, Glycine max
agttttttatccttttcactctctaggtggtgaagcttctccttccatggcttattctttagtggatggtgcctcctctcacctcttctccttttatcttccgctgtagctccatggctaaaaatcaccattgaagaactttattgaagcttaaagatccagtcttcatagaagcttctcaagcaagcttccatcaacttctaacatgatcaa

SEQ ID NO: 9781 - DNA, 70 bp, Glycine max
ttaaaaaatatgcaaattttcatttttggtcccctagtaatttaattcacgaattgggttctcctatttt

SEQ ID NO: 9782 - DNA, 213 bp, Glycine max
  unsure (1)..(213): unsure at all n locations
agcttgagatgattttgtttataagggngagacttcctgcttttattcgnngaccacaaagtggtacctggagatatgtcgcgggggtcaggagaccttggggacgtcaggtggggtgctattgcccaaaaccaagcttgaccaatcccaacccaacccgggcatagtcagtcagtgagaacctgtgatgtacctaagtaggcgagactcctg

SEQ ID NO: 9783 - DNA, 196 bp, Glycine max
  unsure (1)..(196): unsure at all n locations
tataagaacttaatngtttcaatcattgccaaatatgcatgtgaattaggacgcatcaacaagaatcaagccaaggctattgtgcaagcaatcaatggggcaaaacacaccaaatgattatgatgatggatggctcaaattctcacaaaggtaaactcatcactttcaaattgagctttcaaaactatcatgacat

SEQ ID NO: 9784 - DNA, 215 bp, Glycine max
agcttatgcacattatattgtaattatgaaattgagatgcccgaagaaacaccatttcctagttaaccatgcattaggtaccatgttcaattattttgttttgttgtgtgttttttttttttatagaaatgggtttatgatcccaacatggttggctcatggtgcctaacacatgcaactaagaatgtagtgtgaagtttcacgcttcccctttt

SEQ ID NO: 9785 - DNA, 197 bp, Glycine max
ctcgagacgcattggaagttttggcatcaacaaaacagcggctcgatactggggctacaaacccccccagttggatgatgacaatcccggaaatcaagacaaactagatacaagaagaaagcacgtacacacaacccaaaacaccccctaactaacggcatggatgcttaactatacttaatgagaaagtactaatt

SEQ ID NO: 9786 - DNA, 215 bp, Glycine max
agcttgggtaattctaacctactcactttgaatgcaatttaatagcattattcgtgtattgaatgaaataacaaagtttatgtaaaatacaaaaaacaaagtttaatattgataaggataatctttaataatacatgatattataaccattgtctagtcaaaaaaagcaataatagacaatgtttggtactttggattccataaaaagactacat

SEQ ID NO: 9787 - DNA, 199 bp, Glycine max
tctcgcatcctcacttttaaggatctgattactgccttccttaggtaatatcagtacaactccgatatggctcccgatcggactcagctgcagaacatggttaaaaaggaaagcgagtcctttaaagagtacgctcaacgttggagggacttggaagcgcaagtagcccctcctatggtcgaaagggaaatgattacca

SEQ ID NO: 9788 - DNA, 148 bp, Glycine max
gtggatagaagaaccatgttgcagggagctggggaatagaatcatagatagggtatgttgtttgaagtggcgatatttcaaaagtgcaattttactttggccaaggaacttcaacattttcatttcccgccacaaaagcaccatttga

SEQ ID NO: 9789 - DNA, 190 bp, Glycine max
  unsure (1)..(190): unsure at all n locations
ggcttcaatcacagncgcacatcacacctcttagaagctagctcgacagttctttggttgttttcagatcatgcagcgtattggcaaagtcgcctatgagcttcgccttcctctggagtcacggatccataacgtttttcatgtctccctcctttgtaacaccttaaattctttttccaaaattttgcta

SEQ ID NO: 9790 - DNA, 208 bp, Glycine max
agtttccttttgaagattcctaaagaagctagagcttagctacacacacatctctaatagctaagctcacctccttgagatgagaagctagagcttagctacacaccccctataatagctaagctcacccccatgacaaaaaaagatgaaaatacaaaaaaaaaagtccttactacaaagactactcaaaatgccccgaaatacaagg

SEQ ID NO: 9791 - DNA, 192 bp, Glycine max
  unsure (1)..(192): unsure at all n locations
cngtttgattttggggtatccatcacatgtggtactaggtggcggtcgggcgatggcgcaagacaattctccacatccataaatcacgtataacccaccatcccctgttgcccacctccaactgagctcacgtactcccacgtagcccttatcctcgttcctctcaacgctgggtccccatcaatcctccca

SEQ ID NO: 9792 - DNA, 208 bp, Glycine max
agcttgatgttacgctaagcctcgcgtctcaggctaagcacatattgcaaaaagatttttggtgttgcagaaagcgctaagcaccgcctgccacgctatgatgcaatcctacctcccaagggtattggatagaagactccaagaggatcgggctagagctgctaaagaagtccctggggttctgatgaacctaagggtagattttttg

SEQ ID NO: 9793 - DNA, 192 bp, Glycine max
  unsure (1)..(192): unsure at all n locations
cncttggaggttagatattngagcttcaatgaggtccttcagtggtgatatttagccatggagttgaagcggaagataaaggagaagaggtgagaggaggcaccatccactagggaataagccatggaagaagaaacttcaccaccaagagagtgtcttggataagaagcttcaatggaggaaaataataag

SEQ ID NO: 9794 - DNA, 204 bp, Glycine max
agcttttatataaagctacatgacgctgcctcggtaaaaacgctgcctagccttcattaaccggtggatcttctcgaaatttggtctgcaacttcacaaaacacttctccatgatctgaccgttgggatctttgagaagatgtctgccgtgtgctataagcctcttaataaagcttctagaggaagcctcttaatgaagcttct

SEQ ID NO: 9795 - DNA, 189 bp, Glycine max
  unsure (1)..(189): unsure at all n locations
ncctagnnattttagctaaatcctctgttggttcttccttgtaggtagttgatgtaaatacctgtatatctatttaatgatgttttgtgtgttcactgtgctatcattatttcattctaacatgcttttgccttgatcacatagatgcatgctttgttaggatcattcaacagtggaaactggtatgat

SEQ ID NO: 9796 - DNA, 214 bp, Glycine max
tttcaaccttaccatcaaaggaagcgagggataggatcatgaaggggggaaaagatgagtggagggagagtgacaaaaggagcacgaaaatttgagccgcaaatgaggtctgaactttgaagagtaaacatcaagagatgaaagatccaaaaattaacgcacgcggactatagttatagtctaaacgtcacacaaaattgggaggaaacctgaa

SEQ ID NO: 9797 - DNA, 198 bp, Glycine max
ccatttgagctttgggcacccagcccacggggacctgggtggagaccgggcgatggcacaaatcaattctcccatttccacaaaaccactgcataaacacaccatccccagttgcccacctttacattgagctcacgcactcctacgtactgcttatcctcgttcctctcagcaccgggtccccatcaacccctccaa

SEQ ID NO: 9798 - DNA, 213 bp, Glycine max
tgcggcatttttgctattgggaaacccatctgcagatttttctttgtcattctgtgtgttactccgattgagttttcatgtttggtcttctctttctccacctttgctctcaggtgttccaccttggcgcgcttcttcgtgacacggtccttgggatcagaggattccgacatggaacgcgagccatgcttacactcaattgattgaagctga

SEQ ID NO: 9799 - DNA, 190 bp, Glycine max
  unsure (1)..(190): unsure at all n locations
ttcttgcattagtttggacgcacggagagttgnctatatgggttgagacgaacatataccaaatcgcctagctggaaatggacgtcccgacggtggcgatcagcatggttcttcatagtcatttgtgctttcaataggcaattttgcagtttggtgtgcagagcttgtcgggtggtaaaaatggagtctg

SEQ ID NO: 9800 - DNA, 217 bp, Glycine max
ttctggcatgtcaagcttgtccttggtttagacatgattgatacacgatttgggacttgtaggattcaatttgggaaaaattggatgagggaaagtgtgatttcgaaatctgcactttatgcagaattttgctgttgaaatgtacagcagaattttgcataagtgcagaaaaatgctatgtatttgctggttgtggaaagagtagtacagaatgagt

SEQ ID NO: 9801 - DNA, 192 bp, Glycine max
tttttcattatcattaactaacccgttgaagatcaaagaacgaggaagaacgaatgaagaacgacaaagaacgtccacgtaatcgatcatgggaacgtcttggaagtgttatagaagcaccttagcttggattttctccttatttttcttctcttcactaattttaagtgaaaactgatgcaatcctacccc

SEQ ID NO: 9802 - DNA, 213 bp, Glycine max
agcttcaaccaattgggttggtccatttcaagtacttgaaaggataaatgacaatgcatacaagattgaattgaccggtgagtataatgtgagtactacatttaatgtgtctgacttaaatctttttgatgtaaatggagaagccgatttgaggacaaatccttttgaagagggagagagtgatgaggaaatgacaaggactaagggaaaggt

SEQ ID NO: 9803 - DNA, 197 bp, Glycine max
tgaagaaaatttttgaatatattttgtcttttacatgcccaactcctttgagtggcatttatattggtttttatattgaatgttgcatcttagttcatatcatatctgttgtgtgtcatgcatcatcacaagtaagtgagaattttttttcctgaagttagaaaatttcttcaaaaggcaaaactctctattttaat

SEQ ID NO: 9804 - DNA, 211 bp, Glycine max
  unsure (1)..(211): unsure at all n locations
agctttggagcctgtcttcgataaatngcgtcttttgaagcataaggccgctaatgatatgtgaggtctccttccttttataggccttctttgttatcgatatgattaggtttattaggataacatcataattttctatatgataaagtggatatcttctagcaagagaataaaggacctttgaattattctcaacttattagggaggatt

SEQ ID NO: 9805 - DNA, 191 bp, Glycine max
tgtggcctattcatcgtcttgaaaaaaagcaagaaattggaagggaagatttcttcaaccaaggtaaatgttgccgtacatgatacttaggcacattatttcagatttctggttgtgtgcttaagtttccatttatatatggaatattgggaaactatttttctctccaaagagcgattttttatttacaa

SEQ ID NO: 9806 - DNA, 214 bp, Glycine max
agctttataagctcgggtctgggagacaaaggtcaagtggtcgcgatatacgaagatgatgttccgagtacattagatttggtacgaccatgccctcctgatttccagctgggaaattggcaagtggaggaacgccccggcatttacgcaacgagcataatgtaaacctttacggttttaaaagctctatagttgggcctaggctttagagttt

SEQ ID NO: 9807 - DNA, 198 bp, Glycine max
ttctaatatcttttggtaagcagcctaaggcaatgacaacaacatgaataataaatattggagtatttaaaaaaaaatttagcttaacaaaattgtaagtattttatatcactgcatgtcgaggcatgtcaacatcaataggtgctggtgcaggtggatgtggcatagctgttgtatcaacaggcaacacagatggat

SEQ ID NO: 9808 - DNA, 217 bp, Glycine max
  unsure (1)..(217): unsure at all n locations
agcttatgaagattttgtgttgntacattgtgtgaacaaatggatatggatttgactttcacaagcaccactactagaaaatgtagatttaacattgtcaagttaacattggtttttgataaaaccgatgttaacataaacactatgacataattgtaaataatgtgtatactttaacatcgtttttgttttggaaaaccaatgttaacgtatgata

SEQ ID NO: 9809 - DNA, 198 bp, Glycine max
ttggctctttttctttgtcttcttttctaagatctttaacttcaacttcttcttccgaagggacttccttcaatgtctttaggtgcttcaagaattcttcatttttcgttttcctcctcctcattgagaacttcaaatgcatctataagggctttctcaagaggtgaagcatcagataattgcttcttggagggacaa

SEQ ID NO: 9810 - DNA, 217 bp, Glycine max
agtttttagacgttgcagtatatttagtgtggacatggctcataaatctggacaaagatttcaaacttcacttcaaccaatggtcaactcatattagagagggatttttgttttaattttcagtatctcacagtaggagatgtagcagttctcacttattgtagccatactatggttcctcttcaaacttctgtagttttattgtgggaaccatgag

SEQ ID NO: 9811 - DNA, 199 bp, Glycine max
taagctcatttctgctttccctacagagccccccgcaacttgtttctactccattcctcctttcgggccctttttgtttcccactctaacacttcgaccatggtcaagtggatatattttagcttatcacactctttcatgaccctagtgactgtcgtccttagcttctctttcactactcttgtcctttcgagctctg

SEQ ID NO: 9812 - DNA, 206 bp, Glycine max
gctttggagtttccaagtgccaattcgtcttcttcttttgtccagtcttcttctggcttcaattcattagtgggctttccttctgtgtccagcatcttgggatgttcccagcctttgatgatagctttccaggttctgctatccagtgatttgaggaaggccaccatccttgctttccagtattcatagttggttccatccagaat

SEQ ID NO: 9813 - DNA, 192 bp, Glycine max
tggactgtgctttgagagaagaacaaatgaccaaagtgaacaaagagccatttctagggcaaatttgggtgttgaagagtcaaattttgattcggtgagattttaggtgtaaattcagtttgagcaagtttagattgatgttatggacttgtgtggggtgagagtttgcttcaaatttacctcattctaaat

SEQ ID NO: 9814 - DNA, 210 bp, Glycine max
tttgcaagttgcttttgggggaggcaattgagcgagaagttgaccttggaagtacttgtcaatgcgactgtaccatgctctcagtgcttgttttagtccataaaaagccttctttagcttgagaactttgtcttcttctaatttcacctttaatcccaacggttgttcgatgtacacttcttccacgaggactccattcacgaaggtaga

SEQ ID NO: 9815 - DNA, 190 bp, Glycine max
tctaaggtattttgttttttcttttaaattgaccttttcatcatactccattttagtatcttatttgtgagttgttctagacattgtaacttgtatgtaatatggtatgacattttttaatttctatgatactttttaattagtataattatataaatcatttattttattatattcttttattttatga

SEQ ID NO: 9816 - DNA, 194 bp, Glycine max
agctttagtcttcatgttaattatgttgctcccctatatctaaaaaatatctgagactctttatgaattccaagcaaaagaatttctttgtgaaggaggtgggtttttggaatattgaaagttaagtttgggatttaaagtgaagaagatcttggtttgagtgggaattcctatggggaataatttcttggttg

SEQ ID NO: 9817 - DNA, 191 bp, Glycine max
ggtctgacttaatcttcaactttttctttaagtttttgcatcaatttttcctcaaaagcacttgtaattttcttcttttgaattctgctggtaaaaaattaaaatgatattaaaatccttattattccattaaaaataacagtaaagtagaggaattctaatcattctttatcaaaattgactatcgatta

SEQ ID NO: 9818 - DNA, 214 bp, Glycine max
  unsure (1)..(214): unsure at all n locations
ttttgcaagtttttttatctatnnttcttccaaattagaataaattaacttgctgtcatttgaaagcaattttaggtgatgacctaatataactataacttccgggaagttctttttattaactgaacgattgagttgttgcacatcagtaggattcgttgttttcagatttattacttgatgttatttccctgtcttccacactcacgccctt

SEQ ID NO: 9819 - DNA, 192 bp, Glycine max
  unsure (1)..(192): unsure at all n locations
tctttagagatttntttttcaaaataaaaaataaaaaaaggatcgattatttcctcaaaaacagtcataacttaccaaacatattgtgagtggaacacatacacatgatgcgaatgtgtgtgcagagagagagagagagagagttatagaagatagagtgagagcaccaaaagtgctagttcttatcaggac

SEQ ID NO: 9820 - DNA, 210 bp, Glycine max
tttaagcttgaagaactacaaagttcacttgaagcgcatgagcagagattaagagaaaggaatcctgagaagcacaatgatcaagccttacaagctcaaacaagcagaaagtttgacaagcaaggagacaaatccaaaaagaacaaaggaaagtggcgtgatgagaagtggagaaagactgaagattcaaaatgtggtgattctggatca

SEQ ID NO: 9821 - DNA, 193 bp, Glycine max
ttctttgttccctttgcttggatgtttgaaatcctccaaattagtgacttaaaaaatgttcatacggggggttttggaggttcacgtgatataccctcttcttattcccaaatgagaggaggccttacttaaaaccttcccagcttcccttccattgctatctcatccatccaaacatatctagctcaatgag

SEQ ID NO: 9822 - DNA, 201 bp, Glycine max
agctttgagggtgcgtagcccaccatcttttcatagtagaacaccggtcacgtgtctactatcattgtgataatctctttctctgttattgggggtgctacttgagttgccaagtctctccatctttaggtgtattctttgaaagatttgtgcccctttttgcacatgttctgttgttgcatcctatccgaaaccatatca

SEQ ID NO: 9823 - DNA, 187 bp, Glycine max
tgtaggatttttgggtacccgtcatatgtggtactaggtggcgatcgggcgatggtgcaagtcgactctccacatccacaaatcacacataaatccaccatccccagttgcccaccttcaactgagctcacgtactcccacatagcccttatcctcgttcctctcaacaccgggtccccatcaatcc

SEQ ID NO: 9824 - DNA, 199 bp, Glycine max
tctgctttaataggacctcagtgtgaaaagttatgaccattttaattccccgagagcttccgttgtgcatttaccagcgtctctatatgcgatgcgccttaatctaacatccgcgtgaaaagttatgaccatttgaatttctcagaagcttccgttgttcaattttaagttgatggatatgtgatgtttcagaatctta

SEQ ID NO: 9825 - DNA, 193 bp, Glycine max
ccattcttcatataaattgccccactcggacatccgcgtgaaaagctatggccatatgaatatctccagagctatccacgcggaattccgagcgtggcgctatattatacgccaggatcggacctcagcgtgaaaagctatgaccatatgaatctggcaagagcttccgctgggcaattccgagcgtgccgat

SEQ ID NO: 9826 - DNA, 213 bp, Glycine max
agcttgcttagattaacgtctttagggtttctccaacattcataggagaaaaacatcacatccacaacatcgttgttactaccaaaatatgaaaagtgaaacatgttttgcctagagaaacaatggttttgaatttttaaattttaatccaacggtatttactagccaatagggaacccaagtttttatagctcaaaggttttaaattgtgat

SEQ ID NO: 9827 - DNA, 214 bp, Glycine max
agctttgagaatttcatgacactggatttttttcatatcaaaggtaaaggaaaagcaatgtgtatcagagtatttctcttctttgtgacagctgcctacttatgtcgcatggactgtctaatcagtattgtttcaatgatatactgatgtatgtgtgcacagttttcccaaatatttttttttaaaatgaagtatataaaaataaaatcatgcc

SEQ ID NO: 9828 - DNA, 196 bp, Glycine max
tcaggttgctcattgattccagattgctgcaaagaaggacatagatctgtatggtgatctgtagaagaacatagaccacagactcttgcaataggtgcagatttctgatttatggcaagctgagttacttggttgaccaaggcatcaagttttccttcaagatttttcttgcactgaatttttaggagttggaagc

SEQ ID NO: 9829 - DNA, 214 bp, Glycine max
  unsure (1)..(214): unsure at all n locations
agcttgaccagtttttattttgatgggccggatgttgaattcaggttgntcctggtgcggagatgatggtactgtgggtgaaccaggagctgcagtttcttttggtgaggtagccatggaaaagcagagcgtttggaatgatttcgtaaatctcagaaaactattgggaaatgctggtaaaaacacgaatgccaagcagatataaatttgaatg

SEQ ID NO: 9830 - DNA, 198 bp, Glycine max
tgccacccatttcgcctaggcgagcaaggttgcttcctctagaagcaacagccttttggaggaatcttctggagggcccaagtgggcctggttgctatctgcacccccatttttactaaatacaccccctgccttttttggtgattcttttttcgtaaagttacggaaacttacgaatttcgtaacgatacttgtttt

SEQ ID NO: 9831 - DNA, 214 bp, Glycine max
  unsure (1)..(214): unsure at all n locations
agcttcaacctttggtgcccattnctgctccaaatcgtgaaaggagggcattttcggagtcgtgaagcgcgtctctatgtgtgggacttcgaaatttcaggtttgggtggacttctttctcctttgattttcgtgggtatggggttttgggagatatgatgggtagtcttgctaggtttctgctttatgatgattatttgtgaagaaacttgtt

SEQ ID NO: 9832 - DNA, 197 bp, Glycine max
tgcttgcggttctcctttggaggctggatctttgagcttcaatgaggtcctttaatggtggttttccaccatggagatgcagcggaagacaaaggagaagaggtgaggcgccatccactagggaataagccatggaagaaggagcttcaccaccaagataaggcttggataagaagcttggaaggatgcttcaatgg

SEQ ID NO: 9833 - DNA, 210 bp, Glycine max
catgcaagcttgtaggattatggggtacccatcacatgtggtactaggtggcggtcgggcgatggtgcacaacaagttttcccacatccacaatgcgcgcataaacccaccatcccctgttgcccacctccaactgagctcacgtactcccacgtagcccatatcctcgtttctctcaacaccgggtccccatcaatcctcccaagcttc

SEQ ID NO: 9834 - DNA, 194 bp, Glycine max
ttcttctttcgcgttggattctccaagtttgctgggttccctttgtcagagacacccatggtaggcaccaaatgttctgaccaaatttggcaaaacctcctcatggtggttctcctccatgagctcttcctccaacggttgtgggatgtacctacaaagacactttggcactcaagttagcagtgcaggggtat

SEQ ID NO: 9835 - DNA, 214 bp, Glycine max
tttgcaagcttgccatctatccctaggccaaactggtatcacaaaagaaaagaaagatgggagaagaatggtgcaaagctattagagaagaagtgtacaaactccttaatgccaacttcatcagagaagtcagatattccacttggctccccaatcttcacatggtcaaaaaggccaacaacaaaatggcgaatgtgcactgactatattgatc

SEQ ID NO: 9836 - DNA, 191 bp, Glycine max
tcttcttatgtggcagagcgggcttccttcactttcttgtctcaaccgcgagctttgaccaccgcccttccttcccgcgatgcttctctttacatctgcctgagtgggcttatagcctaaaccatacttcccacgatttcctttggcatttatcaggccagttatgccgccattgtccctgcctaaaccca

SEQ ID NO: 9837 - DNA, 213 bp, Glycine max
  unsure (1)..(213): unsure at all n locations
ttttgcaagcttgacctccgngaagacgaggaactgttcagaatcgacctcaatagtgttgcgaatggtcttgtagaggatgatgacaacaatgttgacaagagtgcggaggacaacaatgaagacgtggatgggtttgcaacgcatgacgacgacgacaatggcgacacaaaatgcttgtaggttgttcctacaaatggagatgggagtgag

SEQ ID NO: 9838 - DNA, 191 bp, Glycine max
tctttacaagttagatgatcagaccacatcgcaaggaacttgaaataagaatgggaggtggcattatggttattaaaagcaaaaaaaagagggaagtggtcatatttctatctgatgagggtgtaataggaaataaaatcccatgcatcaaagtaatgttgcttacacaaggcacgatccaaacgcatgtc

SEQ ID NO: 9839 - DNA, 210 bp, Glycine max
agcttaacaaaaggcatgcgaagtgggtggaattcctagagcaattcccttatgttatcaaacataaaaagggaaaaggtaatattgtagccgatgctctttctcggcgtcatgcattactttctatgcttgaaacaaaattgattggtcttgaatgtttgaaaagcatgtatgaaaatgatgaaacttttggagaaatttttaaaaatt

SEQ ID NO: 9840 - DNA, 192 bp, Glycine max
ttgttcaaattctaacgacaataactttttacttggatgttcgataaagtcacgtaatatatcgagtcgctcgaaatagaatacagaagctgtgagaaaattctaacgtcaataactttttactcggatgtccgattgagtcacgtaatatatcgagacgcccgaaattcaatacagaaactctgagcaaat

SEQ ID NO: 9841 - DNA, 210 bp, Glycine max
agcttgaactccttccatatagggacctagatgagctagtccaactttgtataagagtggagcaacaacttaaaagaaagccttcttcaaaatcttatggctttcactcttatccaaggaaagacaaagcccaaggaattttgggggcttcaccttcaaaacccaaggaagataagggtaagaccatagagaaatccacccctaagacta

SEQ ID NO: 9842 - DNA, 193 bp, Glycine max
tacctacaatttctaattgacattataaactagaatcaactcactttagactccaatttacactaactccaagtttagcttctctaaccctcaaaatctcacacttttctacctacaacattgtcattctcacatttaaccctaagttaactttccccttcatctctaccagttttctatcagcaatttcagc

SEQ ID NO: 9843 - DNA, 207 bp, Glycine max
tttatctttaagtactgcgacgggttcctcttcagaaaagttcttcaaaaaaggatagttatctataggcataggatccttagttccttatatagttgcagagtccaccgtatatttgtctcctgccaaaagaaaattatgcttttaccttcttgctcgcgtgataatataggacttgcacgaaaagagaaggattagtaatttaag

SEQ ID NO: 9844 - DNA, 193 bp, Glycine max
ttctggccacccatttcgcccaggcgagcagggttgcttcctccagaagcaacatgccttctggaggaatcttctggagggcccaagtgggcctggatgctatttgcacccccattattactaagtacacccccctgcccttttttggtgattacttttttcgtagagttacagaaacttaccaatttcgtaa

SEQ ID NO: 9845 - DNA, 204 bp, Glycine max
taagcttatagaaagaggagggaaaataaatcaatccaaaatcaatggtacctttcaaggaactaagaattctttttgcagcttttaaatgaggagaggaaagagcctccataaagcgacacacaactcccaccgcatatagaatatcgtgccttgtattggttaaataccttaaactccccacaagactcttgaagatcgtgg

SEQ ID NO: 9846 - DNA, 189 bp, Glycine max
tcttggtaaaaattataataaagaagagaagctagctacaaactgggaaagccttattaaagttactaaatgactcaaaaatggagcctaacgattggagtatttattaagaaaggcgattccgaaaacttggaaggtcacttatctcaaattctattatagtggagcttgtaagtggtgatgtactat

SEQ ID NO: 9847 - DNA, 208 bp, Glycine max
tctagcttggaggattatggagtacccatcacatgtggcactaggtggcggtcgggcgatggtgcaaaacaattctccacatccacaaatcacatataaacccaccatcccctgttgcccaccttcaactgagctcacgtactcccacgtagcccttatcctcgtttctctcaacaccgggtccccatcaatcctcccaagattccac

SEQ ID NO: 9848 - DNA, 191 bp, Glycine max
  unsure (1)..(191): unsure at all n locations
ttctncctcatgttggaatcagagcataagggcttcaagtaggtgctccttaaacctccattaattttttgctttaccttctcttccatttttgtttcttcatttttctccatgtatctcctcatctgtcttgtgcgaaatgtttttaacacgattctttagagtttccaccgattaaactttctatagaa

SEQ ID NO: 9849 - DNA, 232 bp, Glycine max
tgatttcaagcttaaagaagtggccttgttcgtgctcgtgcgcttagtgcacatatagaccgcttaacgcacgttagtgatttttggcttatcgcgcttctctcgcttagcggatgagctgaaacggtgcgcttgatgacttggagcggtgcactcaacgaacctgacaactcatgttttttctagattcttcctcgcacttagccactgagtgtcgcgcttagcaaatgct

SEQ ID NO: 9850 - DNA, 390 bp, Glycine max
  unsure (1)..(390): unsure at all n locations
nagcttgcattgtgtagaagagtacatctttcttttatgtttagacgaagagaaatatcttcatatataaacaaacttatacaaataattgattcccagatttctaaagatgtagaaaaaagtattaaataaaacagacagcattgtttagattntataacgtgtacattattatatatatcattagtttaaaaaatattatacttgcattatctgggtcatctgtttgcattaaataggtaaaaaattctactcatgtaaaacacagactatcgtaagtcttgttatttgaaataaagaaatatattgcgtcccatatcgcattgaatgtctgtctcttggatattgcactttaaaaaaaaatcatcggttttttgataattacttgac

SEQ ID NO: 9851 - DNA, 59 bp, Glycine max
atctccactcaactgaatacctttgtaaagacagagggggacctgaaaaaagacttact

SEQ ID NO: 9852 - DNA, 402 bp, Glycine max
tctatgtttcggatgaattggttgttttgaacgtaataaaagcgatgatgggggcaatctataaatcaaacggtgatagtggagacctataaatacttcataaatatgtgaaagatgaattgaccggaaagaagtctcttctcgttctggatgacgtctggaatgatgatcgacaccaacggaaagctttgaaaactcctcttaaatatggggctcagggaagctaaattcttgtcacgacacgcagtaacaatgttgcttctaccatgcagtcaaataaagtctgccaactaaagacattacaagaagatcacagctggcaagtttttgctaaaaatgcattccaagatgatagtcttcacttgaatgttgagctgaaggagataggttcatagatcggtg

SEQ ID NO: 9853 - DNA, 173 bp, Glycine max
  unsure (1)..(173): unsure at all n locations
taccactactggaaacacgaatgcanattntatcgaggcaatagatctaaatatctgggaagccatagaaatagggccttatatactcaccacagtagaaagagtntcaatagatggtagttcatcaagtganagcataaccatagacaaacctagagatagatggtctgaag

SEQ ID NO: 9854 - DNA, 402 bp, Glycine max
  unsure (1)..(402): unsure at all n locations
ggatccttaagtcaccgcggctgcagctttatataatatactttcgtgctttctatgtttatgtacgaggctgggttatctgatacctgagaggtgttagtctttaatattgcgtctcaagatatatattttacatagtcactgacatatgtttccttcaagttacaacaatggctttctttggtagaattgggaatttgttactacagacagcgagctggcaggttagttcaaaattgcgtatcgcccccttcattttttcaagctatacgctgtatgtcatctgccccaagcacaaaactgcttataggaggtgcgtctgcactccattttgagctggatgcctataatacttttatgattcgttgccttggcgataataacgattattnacatatttgt

SEQ ID NO: 9855 - DNA, 179 bp, Glycine max
  unsure (1)..(179): unsure at all n locations
tcttttgctagcaaatggctaagagatttggactggaagaagctttgttgttttctacccataacgttaccacaatcttattngtattgctgagtatgtttagtgctttgattgtnaacaacgccggcaccatatctctagtctggctaatatcaggagacccaatatttaatgcttct

SEQ ID NO: 9856 - DNA, 258 bp, Glycine max
  unsure (1)..(258): unsure at all n locations
tgccttcttgactataactccatgctatttggtagccgtngggatgggcccggggcgggccatcggtgtatgtctcgacnggtcgtttttgccgccttgtaaacctcgacccgtaacgggtctgcgtnncggcgccgctatcgttcatcaccacaagataaagctcatcaccctggcgcctctgaaggtcggtatctgtggattaccacacctgacgaaagtggtcgaaaaaaggccgcgtctggccaagcgaactga

SEQ ID NO: 9857 - DNA, 497 bp, Glycine max
  unsure (1)..(497): unsure at all n locations
tcgcatgggcatcgagtctcgctatctacctagcgcgcgctggctctgtcgcaagacgtcattcacaccgtactggtgctagcacatacatgcgcttaccagcggtcgatgcgggtagtacctggcaactgtggcggagtatctaatatgccgtgctgggacacgcaatgggtatattccatcgaccgacgctctgacgtttcgccagacgcaatacgggtcactcttcgcctgagtaactgttctgtactgcagcgtgcgtgtcanttccgtaccactctctcggcaatctaaacgtacagtcgcgacgttttcatcctcttattgatgcgcttcagaccatggtttgcgatgcaaacccatgggttatacatagtgctgccaccgctttgacctctagtgatcaatccctaagccagatactattggaacacccgaccactcgcagtacgcgaaacggctaatcgcgctccgtcttctgatatagagtgcgcggt

SEQ ID NO: 9858 - DNA, 430 bp, Glycine max
  unsure (1)..(430): unsure at all n locations
agctntattcaagacaaagcaattaaagtatttctagatagatgatcaagacagtctatagagtcttagaaagggtatattaaataagaagggaattccaattgaagtagcaaaaggtttggccaagataattaaattaaaaagtcttttacaagaaatttactctctggtaatcaattaccagaggatgtaattgattaccagtggccaaaactgatttacaacagctattaaaatttgaattcaaaatttgccctgtgtaatcgattacacatatatggtaatcgattaccagcagtttctgaacattttaattcaaattttaaagcttgtaatcgattacacatatatggtaatcgattactagagcagaatttcagaaaatattctcaacagtcacatctttttatgtggttcttgaatggctatc

SEQ ID NO: 9859 - DNA, 62 bp, Glycine max
ctaattatgtgggccattaagcctatcatatgctgacaatagccgagaagcccatgaatctc

SEQ ID NO: 9860 - DNA, 393 bp, Glycine max
  unsure (1)..(393): unsure at all n locations
agctttgagcaaattcaaacgacaataatcntttntgtcggatgtctgattgagtcccgtaatatatcgagatgctcgaaatggaataccgaagccctgagcaaattcaaactacaataactttttactcggatgtctgattgagtcccgtaatatatcgagatgctcgaaatggaataccgaagctctgagcaaattcaaacaacaataactttttactcggatgtccgattgagtcccgtaatatatcggaacgctcgaaattgaatgttgtagctctgagcaaattcaaacgacattaactttttactcggatgtctgattgagtcccgtaatatatcgagacgctcgaaatggaataccgaagctctgagcatattcaacgacaataac

SEQ ID NO: 9861 - DNA, 628 bp, Glycine max
  unsure (1)..(628): unsure at all n locations
atgtcatgctcacgactgaagtacactatgantactacagcctctatatangctgaaccatntatcaatanacgggaagtngagtttattcagaaaaatagagtttatctcnntttatctagtgagagtgantctnctagnatcttgagtgnatcaagaacaccttggctgtatcanaggactntcacnaacctttgtgtgttgcccttgctggaaagagtgattctttccttcctttcatcatcaccctnngtctttcanaccacaattccagaanatccacctctgcccagaattatctcgtggcccataactcccatttacgcactcannataagtgattcttgagcctanattgaatntcanaacgagacctttcacctcgtntggaatcacctatattgaagcctgtacttcagttatggcattcatatatcntgccagccacacttacntacgtttaccatccatcatcctttatgccngaccactatanaccacgaatacccctatntcatccttctatcattcatttcataggtatctaacactacagcctggctgggtattacttcatcatcacttcatatcagatataactcagaagatgcgtatctcactaatcatc

SEQ ID NO: 9862 - DNA, 407 bp, Glycine max
  unsure (1)..(407): unsure at all n locations
agcttcccctatactcgaacttgcctgtttgatttatcctttggatcataaaggttggcataaaactccttgaccagggccacatcaatgtgaccatcaggcttcttggtcaaggctttatgccacctgcgcctctcaagctcccgacggaactcgtcatactccatgacatataaggtgatgttcctctctgaaaggatgttccaggagtgaatgttttgctcgtatctctcccaagcgccctcagaaatgaatctggtcgtatcataggtctcctgnggtctggaggtggttgatttccacttcctagaggccatctgcatcaaaagaatcacaaaaattgaaattagacaggttttattcaaaactgaaagcagaaaattaaaatagaaaaatagattgcgtgc

SEQ ID NO: 9863 - DNA, 197 bp, Glycine max
  unsure (1)..(197): unsure at all n locations
caatgacactatcataagtgtgctgctctattccacaatatnnggtttggttntcatgagtgtccaacagcatcatcattgtattactnntgctttaacagaggccagacagctgcttctgcaattaagttgacatttgagaataaaatcatgtaatgtaattcatgcccctctattcatgtgaatacttanataca

SEQ ID NO: 9864 - DNA, 420 bp, Glycine max
agctttcttgagaaaagttccttgagattcttctttgagaaaacttccttgagaagctagagcttagctacacacacccctctcataactaagctcacctccttgagaagcttccttaagaagattcctaagaagctagagcttagctacacatacctctctaatagctaagctcacctccttgagatgagaagctagagcttagctacacaccccctataatagctaagctcacccccatgacaaaaaacatgaaaataacaaaaaaagtccttattacaaagacaactcaaaatgccccgaaatacaaggctaaaaccctatactactagaatggccaaaatacaaggcctagacgaaggaaaaacctattctaatatttacaaagataagtgggctcatacttagcccatgggctcg

SEQ ID NO: 9865 - DNA, 206 bp, Glycine max
  unsure (1)..(206): unsure at all n locations
catggcatccctacatcanagtngtataatcagcacacatgtatgttaggaatgagaaaaaanaactataaagaaacacaacttgtagttgccatactccacaagtgcatgtccattcacctaaattgacctcaaccttattcccccacatgtggacctcatatctcatgcccatgttatcaccacaccanatgggagtccattga

SEQ ID NO: 9866 - DNA, 398 bp, Glycine max
agcttgtagactccagaactacaccaatatcatcaccggtgttaacagtatcaacaaactcagaaccagtatatattgcttttaccacactctcatggtcctatgataagaaatggtgaagaatagaaatcaatggaaggcatagtagctgattccaatataatatttcatgcgtaagtgaaaaagtctaatacaactgctcaaccaataaccaaaaaatagtctctttcattatgtccacttccattgcaagttgaaaagatgcaagccatcaaaatatgaaggagtaggaggggagagaaataatagcagaaactcctctattcagtaatcagtagtaggggtgtaaataaagttaatcataaattattgaatctcaacttactaaatgcttattt

SEQ ID NO: 9867 - DNA, 245 bp, Glycine max
  unsure (1)..(245): unsure at all n locations
ctattaatctgctgcgtatgtgatacccggacctctgctacttacngatgtaatatcacagtcccataattcaggatccagcctgtatcagtatgtctatattattttatctgatttcgttcgctggcaaaaatcacggagtggagagtggattccacacctttccacgtgagttgatgtgacctacataactatgccagattgcagatacacaaatagcttcgaatctcttatatatatatata

SEQ ID NO: 9868 - DNA, 426 bp, Glycine max
  unsure (1)..(426): unsure at all n locations
agcttggatagagctntatttgtttagttataagtggcagngcataatacttgtaataatttgtgataagttagtggaacttggtgaatttcccagaattagatgtaatctcggggttgaaacgaaccaatataatttcccctgtcttatttgtgcttatctcttttcagtttttatatctaacctagggtttgaatttgattttattaacaaaaatctcttatgtttagaacatctattttaatcgtctaaatgtgtttttagaaaatttgttttttgtcttacaaagttttttttttccagacgataactntatttgcttgcaaaaaagacttttaaaatttctaaaatcacaattcaaccattcttcttgttatanttgcctttacaatgatgaccattataagtaccatgaatcatagaatg

SEQ ID NO: 9869 - DNA, 494 bp, Glycine max
  unsure (1)..(494): unsure at all n locations
tgcttatgctacatgagaactatatctagcttaaattatataagacatgactatgnaataatctgtgcttttgtttctacttatagaccagaaggattacttgggattacaatacttataagatcgcatattctgaaaagtcacagacaagaaatgatatagtgagatctcatccaagaaataaataaataacgtggatttcaaggagggaaactcaaggatcagctattgtatataacgtgaattaaagggaacactcacacttctaagatgctgcatactggtttgctttattacctaaactaatagtatatcatgacttgatttgtatcagagataatcattgagaatagttgtatagtgtgaccatgactcatatgacaatggataaataatgtactgatactaaattgtatatgcttagttccaacagatgtaacactcctcgctactacataatgctgctgtatagataacttaaggtaagattatgg

SEQ ID NO: 9870 - DNA, 429 bp, Glycine max
aagcctatagcttatcaagttcaccagcctgaaattgcaacaatctcataaaacaaattaagattaaactctacacactttcagaatgaatcatgcaaaatatgatatatcatcgcatacataagcattagcatattattgtaccatgaagcacacatgagaaatgcatatgaaaattagagacttgtcaacaccggatgcattatcagataccatcacctctaacgtacagtattacttgttttgcaactacttggaaatgatatttttgtttctaatcggcatttaaatactaattaatctcagaaactctgcatattattccaatggaatgatataaacccccttctgaaaccaactaaaatgcacatcagtgagatgaggacatataaacaaagattacatattatattataaaatatataatat

SEQ ID NO: 9871 - DNA, 437 bp, Glycine max
  unsure (1)..(437): unsure at all n locations
agcttcataagcttcatggtgattcatttgtgttntgatgataacaatgatgataacaaaagatgatgacaaaggtgatgacaaaaacctcaaagatcaatcaaataacaactcaagtaaattcaagagctcaagataagaatcaagaagaattcaagactcaagaagaaagttaagagtcaagaattaagattcaagactcaagattcaagaatcaagagaaggcttaattcaaaaatcaggttcaagattcaagaatcaagagaaggcttaatcaagataagtataaaaagtttttctcaaaaattgagtagcacatgattnttctcaaaacatgtttaccanagagtntttactctctggtaatcaattaccagattgctggtatcgattaccagtagncaaaatgttttgaaaaagtttcaaatcgaattaca

SEQ ID NO: 9872 - DNA, 87 bp, Glycine max
cttagctatcactagtggagatctcaatcgaatggacatctcacacacacagctgtctctttcaatgcgtggccacagccttatctc

SEQ ID NO: 9873 - DNA, 424 bp, Glycine max
  unsure (1)..(424): unsure at all n locations
agctntttattcaaatttagaaattcatttagatgttctaatgtctgaaatctatgggattaagatggtcactgaccaatccctattttatgatttaacaaaattgcctagtgaaggtgtgccttttgagggtgcactgattgatgaatggaaattcgatttctctgtgcatgatgcccgccggttggtttgcaccaaccaagcggatatgaccggaaggcttcttgccggttcattggcttttgaaagccgcatcctccattatcttatagttcgcgttttgcttcctagatcttcaaaccttgcccaggtttctgaagaagacctcattgtcatgtgggcctttcataaaggtctacaaattgattgggcacatcttgttagatatcgcatgcataaggcattgcgaatgaatgccccatta

SEQ ID NO: 9874 - DNA, 639 bp, Glycine max
  unsure (1)..(639): unsure at all n locations
ttgacatgagaccattgatctcngctactgggtatgcanctnngtantatatcaaccctgtcatatgtcaatannaacanataaattgctgatagaacatagacaattagctcttatcctanataataaaaccagtaatgacctgtcattntatcaactaaagaacatagacanattttcaactgcatatnnngtgaagtggatntaacnngttattgagtntcaagaaaaagctacctgtcantttatctcatgactttagctctctgaagtngtgtgagggtactgagatangtaaatttgcttggatagtngtcagtaagaaataataacgaactgtagttnttcatagacttatgtattattgtccgatgagttttgctttccaaaatannattcctttttaaactatattgtgcacatgctcattaacacattttctgaccagtactgatangtgcagactgtatcttctattgtgctgatgtgatatntcagatgtagctctgtgtactttcggtctcgaatcatactgaggctatcatggaaagaacttattatgatggactgcttatactgttcagacgatcctgactttgagaaggtgctcaatgagtatcttactgcgacanatacttg

SEQ ID NO: 9875 - DNA, 305 bp, Glycine max
  unsure (1)..(305): unsure at all n locations
agcttgatgcatgatgttaanaagaatattctctaatataancaaancggggtgaattagttctactctaattcgttaggcttgtctttcaaatcaaaatttgatagaactctagcgaacattgtataattgtcacatacaaataaacgtttctttcatatttaaaaaataattacccctggcattttatcttgcctatattgagattgttgatcacgtcatcatatagtctatcctaccatgatcaacttcatgatataacttaaacattctaaccttaagctaacctctgccataaatcccta

SEQ ID NO: 9876 - DNA, 130 bp, Glycine max
  unsure (1)..(130): unsure at all n locations
tacacacacnctctataatagctaagctcacccttangccanaaatacatgagaatacaaataagtncctactacanagactactcataataccctgagatacaatgttaaaaccttatactactagaat

SEQ ID NO: 9877 - DNA, 408 bp, Glycine max
agcttcacctttaggtcctcctcatagttgttgcatgagaaaacatgctctattttcatctcccactccaagtaggcctccggatcattctttcctttaaatggaggaatgttgagtttaataccatcaatttggttttggctaggaacaccatcattccctcttctcctcctttcttcttcattatgatctctattctccatttgatccaacctctcatggagcgcatcatctcgttgtttcattaacctctccaaatgttgcatcaaagcttgcatttggaattgcgaaagccccactccatcattaggattagtacctgacatctcacacaaacaaatcaaacgtaacaagacaattatagttgttgtttgaatacctcacccactcaagtgtatcacacaatta

SEQ ID NO: 9878 - DNA, 233 bp, Glycine max
  unsure (1)..(233): unsure at all n locations
gccttccctcgcggattctctcgcaagcaaagtgtgcttgttatgaccttctcacctctacggagtctggcctggcctgtcaactttactactgacccagagctgactatagtactcacacagacctggncggttgtgctgtcatacctgatccttgtgatatcgagactctgctcttacatctcttacctcttttcgagactcccgattttttgagcaggtttatattgtct

SEQ ID NO: 9879 - DNA, 430 bp, Glycine max
  unsure (1)..(430): unsure at all n locations
ttaagcacctgagctgcagcttgtttgaaaccattaactttttgactnttctatctttaggcctttcaaccagctcccatgttttgtttttgtgtatcatagacatctcctcctccattgcaattgtgcttcctcacagctagcatgttcataaattgctacattacatctttgatagatgtcggacaacagcctttttcctctgattggaaggtcatcttctaattcactctgcataagctctgttgtttgctctccaggatgattgtctccactattgaggaaaaacctagttgtttgtgaattgttccaatcccatttctcaccttcgttgaagtgcacatctctagtgattgtcatctttttagtttgaggatgatagactttgtagggctttgaaactgaattgtagcccacaaagatgcccgga

SEQ ID NO: 9880 - DNA, 502 bp, Glycine max
  unsure (1)..(502): unsure at all n locations
atgctttgtgcctcgagtgtactctatgctaagcttcacaatgtcttcaatatcttccacgcagaacctacaattctcctctatatctcaaacccatcncacgagaataagagggaagaagtcaccccacctgaatntcgaagtccactcgtagccaccacttacgacncgaaatggcttcttccgattggacaaatgacaccaaggtgagcttgtgggttatgaaaggagaagaaagcactgagaaaggaactttgattttgttggtgtgagaaaaactttggttaataagggttcttttttatattattagctctgccagtcttattgtgacaaggacccttttctttgctggacctaccgccaagtgaaaactacttaacctaatctgctgtgggccgtttatcatttccgttttgtcgcggcgttcaacacatttttaacctcataaccacggtaagtgtgtattatccgcacaattactatatgatactactcgttg

SEQ ID NO: 9881 - DNA, 418 bp, Glycine max
  unsure (1)..(418): unsure at all n locations
agctnggttatctccttcttcactacatgtagattcaccgggttgagtcttctctatggttgtcttactggtttagctccatcctctaaatttattcgatgcatacatgtggatgggctaataccaagaatgtccgccagggtccagcctatagccttcttatgcttcttgagaactgacaacaacttctcctcttgctcatcagcaagggaggcagatataatcactggaaaattcttgctatcatccaagtaagcgtattttaaatttgatggcagaggcttcaattctggtgtgggcggctagacagtggtagaatgagatggtatctcagcctttacctcataaagaaagtcagaggaatgtgtagctcctgaaacatggttagtcctatctgactctatgaaatcaatctcga

SEQ ID NO: 9882 - DNA, 612 bp, Glycine max
  unsure (1)..(612): unsure at all n locations
atgcgtgatntcgatttgcgnatactatgnacactcaagcctctctgaaaaactctanggaagctntcattagttagtgatctaggctgtatataganacatgtgtatcacttgtcataactntgatgagtgtcaaacttctcttcctctatttcttcttcaatntcatgcgcncttctctctctttcattctcttnctnncgtgaagcttcctctctaagcttcttattcgaggcactctcttggtggtgaagctcctcatttcatggctatccctagtggatggtgcctctctacctcttcttcttatcttacgtgcaactcatggtgaaaacaccattgagaccttatgaagtcaagatcacctcattagctttaacaagcttctcagtgtatatacacattacttagtggtgctcttaacctcatactttaacttacttctcctcatgtgttcttcattttcatgatcctccatgctgtctaatgcgtacagatcttaaattcaccataactgcttaaactaattgatttatgtcaattctgtctgtctgacatgatggtgatangtcctaattgtttgatntggtaacaacataactacaacatagt

SEQ ID NO: 9883 - DNA, 400 bp, Glycine max
  unsure (1)..(400): unsure at all n locations
agctnggacagacaaagcaagaaaaccatcctatgtacatagagtttggagataaaaattaaagctttctgacataaaaatcggagctttagaagaaacaatgaacatgcagtgaagaaacaaaaaactgagataaaaaaacgcatgcaaatgcaaatagaggtaaaaaaagaaaaaatagaagacggggagggaaaacgaagcatgaaaacaaacctgtattcactttgacagacaaagcaagaaaacgaacctgtgtacatggagtttggagataaaaatcgaagctttctgagataaaaatcgcaactttagaagaaataacaaatatgcattaaaagaacaataaaccgaaatagaaaaacgtatgcaaatgcatattgaggttaaaaagaaaaca

SEQ ID NO: 9884 - DNA, 211 bp, Glycine max
  unsure (1)..(211): unsure at all n locations
gctcactacaagccttaagtgagaaaccatgatatcaccatatccttaaggaatnttggagctntggaatnngtttgtgaataagtgtggnggttattgtttcattggataacatgtattgttggtcatgcttcatgatatantttgagccatacttgatatacatngcatattnggtaaatgtnggacatgctgaatatgaatgctgttc

SEQ ID NO: 9885 - DNA, 397 bp, Glycine max
  unsure (1)..(397): unsure at all n locations
agctntttaggttttaaaaaaaaaaggttttctttttttctattatattatttaagcaacgccacatgtctccatttgagtggagcaaaaagggcccactttcccttttgactgtgacccatactcagccacaaaagtggggaaaatctgacctttgaaacgctaaaatcctgcctcggtttgcgtgccatttctctggttccaattcctcgcgtttctctgcgtccgtcggggccagttttcgaaagcaagcaatatatatatcaaaacgctcagaataaaaccccgagcgtggttcagagattggtttcgttaaattttaaggtacacgcaaaacgatgatttttaaactaattaattaagaattaacccataaccctccagttatggatttctc

SEQ ID NO: 9886 - DNA, 169 bp, Glycine max
  unsure (1)..(169): unsure at all n locations
ctatctatattctgatagtatattctatcatatacaaactggatagctaggctaagaatactgatcgaatatcttatcatatattctatcatacnccgcagtcgaagcgagagatcgacgaacacgaacactgagactatctcgaactggacccaagaccaccatcact

SEQ ID NO: 9887 - DNA, 426 bp, Glycine max
  unsure (1)..(426): unsure at all n locations
agcttgcctatccgatgcagccgtaatgttggcccgagttatgttggggaacggntacgaacccgggatgggtttaggcaaagacaacggcggcataactagcctgataaacgccaaaggaaatcgtgggatgtatgggttaggctataagcccactcaggcagatataaagagaagcatcgcgggaaggaagagcggtagtcaaaactcgcggttgagacaagaaggtgaaggaagcccaccctgccacataagtaggagctttataagcgcgggtctgggggacgaaggtcaagtggtcgcgatatacgaagatggtgttctgagtacattggatttggtatgaccatgccctcctgatttccagctgggaaaatggcgagtggaagaacgcctcggcatttacgcgacgagcataatgtaaac

SEQ ID NO: 9888 - DNA, 287 bp, Glycine max
  unsure (1)..(287): unsure at all n locations
agcttcatatccagagcaagttttacttgttgtgttcctgctaaggncttgggtgaggtaaattgatatacaactctgcacacgacaattattatggaacacttgctagtatcatcacaacttttattcatgtataccgacattttctattgatcaaaatggaattgaacctaaaaaaactaccattctgtcctttggtagctcttggggcgaatactacatacttttgacattgttagatctgcacctccaaattcatcacattgagcatttgcttatggaaactc

SEQ ID NO: 9889 - DNA, 434 bp, Glycine max
  unsure (1)..(434): unsure at all n locations
agcttaacaatatttactttgtttttgtttataacaaattggttactttgaatatgtccatgcgtcacgggaaggtaggagattccatactctggtggagtataatgtgagaacatgacaggttagattgttagaaagaagtcaataaatattgatcaaattataattaacaaccacattaatttgtataaaaccaataagtattattttttatttacacccttatcatttagatgttaatttacagattcgtttgagtgaagggtttagtgaaatacaatttaaactgattataatgctacaagttgagttagctagggttagtttgtgtaattntgtgattaaacttatactgaacaaactcgatcaataattaataatggaatggtttgactcggattcattgagtaaatttaattaaaatcattttattt

SEQ ID NO: 9890 - DNA, 436 bp, Glycine max
  unsure (1)..(436): unsure at all n locations
agcttgtacctttgaaacacatcanatattcacttattagctacattggattgngcttctaccaattcaattaaatttattttcaaccacacacatcaaatattcacttagtgcatgtgaaattacaaaactacccctaatacaaaaaactagtctaggtgccctaaaatacaagggctgaaaaatcctatatttctaaggtactctacctacattatggagccctaaatacaaagcccaaaaataatgaaaccttaatctaatatttacaaagataagtgggctcatacttagcccatgggcccaaaatctatcctaagactcataagaaccctagggccttctcttgcatctcttgcccaatctacttggagtcttctatccaatacccttgcggggtaggattgcatcaaaaggttacagagaacttacattg

SEQ ID NO: 9891 - DNA, 206 bp, Glycine max
  unsure (1)..(206): unsure at all n locations
tgattcaagagcanagcgcaaccctacacattcgagtgatatcatggagtattatataanaaatctntccgaccatcattaataagcanaatacgaaggttattggcatntaatngaacaataatatattaanatcaactagatatttcgtgacacgaatatactaaaagcacacttaattcacgataataaagtaatcaaacata

SEQ ID NO: 9892 - DNA, 437 bp, Glycine max
  unsure (1)..(437): unsure at all n locations
agcttcgccgcctgttgaaagatttttttgtaacgtgtaatgaccaaagagtagggttttattttactttttattattatttagacttaaatataattttggtctttttaattcattagatcaatacttttgatttttctattttaagataaagacattcaatttatttattntaaaaaagttataattgttgtcctttatgtcaaaataaagacattagttctcctattttacaaaatttttaattttaatcaaatttttaatttttttgttntatttattttattttgattctattaaatcttagatctaacatattcatttaaagtatcataaaaaatgaattaattaattgttatgtaagaaataaaataaataaaacataaataanattgaagattgaaccaaaattattaatnttttaanaaatatgggat

SEQ ID NO: 9893 - DNA, 488 bp, Glycine max
  unsure (1)..(488): unsure at all n locations
ttctggcctgagttcgctactgattcttagtaaccatcctctatgaatagcccgaaaatataaactgtacatataatcactaataataatgaattnttctacaaatttaatatagacatntacttgtaatgtatcgataatgtaaaataatctcttcataagatgagtcgattcatactttacatgagcctttaccttaatcataataatagcgtgcactatctgtcatatcaactattgtaataattcttaagttgatgcatcataatgtatatatttcaacatcatttaaacaaatgtgtctatatggttgctattcgtctaaccgatttatgactataaatatcttctatattaaaaaacaaatcaccaacggcaatggaaataatagagtaactaagatacctgcaaatccatgcatgatatgagagtagtatttgaccaccacgcttatgtcttttatataaagtttgtcccctcctctcttg

SEQ ID NO: 9894 - DNA, 405 bp, Glycine max
  unsure (1)..(405): unsure at all n locations
agctntctaaagttttctggttttctaatccttgataacttgngttattcattcttttcatctcttctccctttgccaaaaagaattcgccaaggacctaactgcctgaattcttttgtgtctctcttctcccttttccaaaagaacaaaggactaaccgcctgaattcttttgtgtcttccttctcccttgtcaaagaattcaaaacgacatagtctgagaattcttttgattcttctctttcccatatacaaaagatttcaaaggactaaccgtctgagaattcttttgtatccccattcacaaagtttcaaaggtttaaccgcctgagaactttgtcttaacaaaatggagggtacatcctttgtggtacaagtagagggtacatctacttgggtttgactg

SEQ ID NO: 9895 - DNA, 171 bp, Glycine max
tgttttggcaacttattggtcttaaaagatcttataaaggcccactgaggacccctgtatcactattactttaatcgttttacaagaagtcatagactgcacttaatgcatattaaagaatggcgtctatattgaaaaaaatattacttttatatatacttaaaggccgtt

SEQ ID NO: 9896 - DNA, 388 bp, Glycine max
  unsure (1)..(388): unsure at all n locations
ttatttataacgangacgaacaaatgaagaatgtttaagaaccgtcgatacctttgcgaaactcatcacgacaaacgtcacggaaacgttctagactcacctcggctataattttcctcacggaaacaatttttctcagcggattcaaaagaaagagaactgcctatagggctgaacccttttccttttcacttcctcgcgtataatagcagacttgggaagtgatgccgcccactcacccaagcgaactacctgcgcaacttagccaggtgcttcaccaaaccacagctattagaagacatttccgacgtcggatcgggcccggtgttaatgcaccaccatcttaaggctcgcgggcggtgcgttttcttacgatgctcataaaagc

SEQ ID NO: 9897 - DNA, 247 bp, Glycine max
  unsure (1)..(247): unsure at all n locations
tatatntatatacatcaactngtctggtagaaagacctaacatntctacctactgctgtcactntcacttacctngcatnntttatagttttagcatananggttagtntaaattctgtttgaaaatatcaatcatacatgttctctcaacaattcttcatttctaaacttaactcaggctaacattagttccatgtgttcaatattcagattcatccattntaattnttaaatacttgacgatctg

SEQ ID NO: 9898 - DNA, 430 bp, Glycine max
  unsure (1)..(430): unsure at all n locations
agcttaacaaaaggcatgcgaagagggtgtaatttctagagcaattcccttatgttatcaaacataaaaagggaaaaggtaatattgtagccgatgctctttctcggcgtcatgcattactttctatgcttgaaacaaaattgattggtcttgaatgtttgaaaagcatgtatgaaaatgatgaaacttttggagaaatttttaaaaattgtgaaaaattttcagaaaatggtttctttagacatgaaggctttcttttcaaagaaaacaaattgtgtgtgcctaaatgttctactagaaatttgcttgtttgtgaagcacttgaaggaggtttaatggggcattttggggtccaaaagactctagaaacattacaagaacattnttattggcctcgtatgaaaaaggatgtgcagaaattttgtgaaca

SEQ ID NO: 9899 - DNA, 640 bp, Glycine max
  unsure (1)..(640): unsure at all n locations
ttgccgcctggtttcattgatantacgntcgntntggtatagcacccacctgcgtcncaggtctctgaccccgcacatatctttctgtaccactttgttgtcaacaatanaagcaggaagtntcacccttctacacttnctcatctcaagcttgtangaatatggngtacccatcacatgtggtactatgtggcggtcgggcgatggtgcacaacaagtttttcacatccacaaagcgcgcataaacccaccattctnctgtgcccaccttcaactgagctcacgtactcccacgtagcccatattctctnttctctaacaccgggccccatcaatcctccaagctttcccacatcaaagtaaacgacattcnacagcacagctatacagcccagccaacagagcaaggcaganactctgcaaacaccaaccaatacagctttctacttaaagactcatacanntcttcgtcngtcataaccgggatcactcganattactggagcttatactagccacatttgacgtggactctacacatcgactcattcatactttcacacacaatctacattctgactgcaatctgtgcattaagaaactgcaagggattgaatcctcttctcactgcanaatctct

SEQ ID NO: 9900 - DNA, 179 bp, Glycine max
agcttatgagaattgcagattataagtaatttgtaaaatctaaaaaaggagttttcagcttggtcaacaagtattattatttgattctcgattaagattgtttccaggtaagttgaaatccaagtggtctggaccattcatcatcaaagaagttatgccacatggataggggtgggtag

SEQ ID NO: 9901 - DNA, 471 bp, Glycine max
  unsure (1)..(471): unsure at all n locations
tatgctgtgcttaaggacttgatctagctgatcaccatgctgagtgctaactggatgttcgatatgttctctttctttgagaaagtgggaatccnatntatagagactangaaccttagtngaagagttttccatactggaatataatatggacatatgaatctaaatcatgtttctgagatgaaaaaatattgacatcatgaaatcttgataattctaattcaaatagctatttaatgtttatattcccaatattataaaataatgtatttcatataaaagataactcaaagttatatacctttcaaaagtttggaaatgtaaaattcaaaaattctctaaatgtttttaattataattanatcattcacctatgcaaacaactaccctctacgcttgagaaaaaagatactattaggctgttaggtgtaccacttcatcaaaattctacttcattgcttgctgtcatgn

SEQ ID NO: 9902 - DNA, 422 bp, Glycine max
agcttatgcaagaagcattatacattttatttatctataccacacaagagagtaaaggccaataggttcctttcaatggtatacctgatgattgccaacatgaagtctgagtatcgatccctttcatgaatttcatcctgaacaaaaaatgaatgtcaccttagtttgcaatgcatagtttccaaggaaaggatgcacaagatatgctttgcagtgccaaggcatactttccaaggaaagtatatgcaggaaatgcctcatatgccaagattcatgaagagggaatatatgaagacatttgaattcacttctcactcatcacaacgaagtctgtaagataataacctataagaaagtttcaaagtacacttcccctcaaagtattacaaatacccattgcaggagatacccatctgaaaacc

SEQ ID NO: 9903 - DNA, 86 bp, Glycine max
  unsure (1)..(86): unsure at all n locations
gtccaaatacactttaaaatgcacaaataagaaaataagtcatcaactatatggcacacctgtgccanatacatcaatagtctgat

SEQ ID NO: 9904 - DNA, 403 bp, Glycine max
agcttttccaagtggtcttcggcataatatttaaactcgatccgttgtcgataagtacctttgcgacaacgtggtccatacatctcaccgacacatgtagagccttgttgtgtcctctcccctcaacgggaatctcttcttccgcaaacgcgatgtagttgttggtggttatatgattaacgatgccttcgaaaccctccaccgagatatcatgtgctacatgggcatcgttaagaaccttcatcaacaacacacgatgaggttcggagtttatgagtagttcaagcaaggagatccttgcgggagttttattcagttgtccgactaccttaaactcgctttgttggatgaggcggaggaactcatgggcctcttccaagacactgtttttcttgaagccctc

SEQ ID NO: 9905 - DNA, 233 bp, Glycine max
  unsure (1)..(233): unsure at all n locations
tagactcttctctctctnntcgaattgctgaggaannatagttctgtgaagaanantcgagccganggcgcttcgaacgtttcgtgagagntacgtgagatctcgaccgtctcanagatcatcgtcgtcttcgtttcttcagcttaacgggtagtacctcnaccaagctttcaattactctatgtcccgtggtggccacatnttgttcatgtattttattctcgtntcattac

SEQ ID NO: 9906 - DNA, 388 bp, Glycine max
agcttccttaagaagattcctaaagaatctagatcttagctacacatacctctctaatagctaagctcacctccttgagatgagaagctagagcttagctacacaccccctataatagctaagctcacccccatgacaaaaaacatgaaaataaaaaaaaagtccttattacaaagacaactcaaaatgccccgaaatacaaggctaaaaccctatactactagaatggccaaaatacaaggcctagacgaaggaaaaacctattctaatatttacaaagataagcgggctcatacttagcccatgggctcgaaatctaccctaaggctcatgagaaccctagggcctttccttggatctctagcccaatctagttggagtcttctag

SEQ ID NO: 9907 - DNA, 108 bp, Glycine max
  unsure (1)..(108): unsure at all n locations
cttctcccttactatcattctctntctctangttttctctctctctagctggcctgggtatgtatatatctatctgcatatacaaatgatactctctttttacttcat

SEQ ID NO: 9908 - DNA, 423 bp, Glycine max
agcttatgggacacacaaatatgatctagtagagggaaaactgaacaaaacccaattccgattccaaatgttggtccaataccaattaggaagattcaattcccagcacacaaattataacaaaacaacagcaaccaagtaccaaaaacacaaccagtatagaaattatgcagacaattgaaacgcaagtgcagcaataaaaaagcaaacagcatctggttgctgctgtttggtttattcaggttttttcgactcttcctaattgattaggaccaacaccaaaaccaaaaaatagagggaaaagagacattaccttttcccaaacttgggtgtggtttttgcagaagccggcaactatggtaccacccttcttccctccctgtactcaatccaaagttcctccttcagcgcacaagtgacatg

SEQ ID NO: 9909 - DNA, 401 bp, Glycine max
agcttcaaggaagtgacaaaaatttgttttcttcttacaacaaaggtttgtcttcaaatattgttttcaattgtttcttttcttttaaatttgacttttaatagtttacttgttggtgatactagttttgaaggaccaaaactagacctaaccaggggatgatagataaagttgaatctgacaagagttctctcaatttaaatgatcgattgattgaagataagatgaccatgcttagtaagtgactggaaaccagtgaaagttaaaagcatgactatattaaatgctatgaggatccctacaacattgttcaaccaatcaaaatgatctagaataacattcaccacctatacaccaaacaagtacactacatagaatgaagacatgctaattcatggaca

SEQ ID NO: 9910 - DNA, 514 bp, Glycine max
  unsure (1)..(514): unsure at all n locations
tgcttatgtcccctaggacatatctagctatcaacaaataaattcagagtgacaacgcttagctataagggttaaagaaggatcatgagacaaggttaccagaattaagtaaaagtcttntcanacanattactctctggaatcgataccnaggatgaatcgatactagtggtcnaactgattacagcgctattaaattgaattcaaattgcctgtgaatcgatacacatatatggaatcgataccgcagttctgaacgttaatcnatttaagctgtatcgataccatatatgtatcgatgcaagcagattcaaaatatctcacatcactttttatgtgtctgatgctacaagctatttattactgaacacattgtgagtttcaacanaagctatctctatagaaatgttatctctacaatctgcaatactggatataggatttgaggtaatgtcatattttcaaagatctctctctctatctaaggataaacagtctgtgaaattaacaagat

SEQ ID NO: 9911 - DNA, 363 bp, Glycine max
  unsure (1)..(363): unsure at all n locations
ctgcagcttttggttgaattataatcacatttctctttatgtttgtcatatccggngttgccaccgataacagagcggtaacttctctcacattactccctctgcttaaatttgtacatactagtattatcttatgagatttgggcgcctcattgataaagtttattaaaccagagacaataccaattcatactttatttattaactaaattacactcaatctggtaggactcaatgaaaaatgttacatgtacgctcctttattttagacactcatttgacacatttattcaaaggggttagatcatctgttatcaagctgataaatgatgtggagagtgtgcacaggggcattcttgagtg

SEQ ID NO: 9912 - DNA, 241 bp, Glycine max
  unsure (1)..(241): unsure at all n locations
ctactctgttgcacttcgtctacatatacctcaacattactatgcttaataaaaattggtgatcttagtanaacatanagcactntctcatatattaagatcaaataacattcagcgtatccaagagatgcagccaaaataaataatgagaacattaataaactgaattacctcacttataatgagaacctctctcttggatgctngacacgcaacanattcatagctgacaagagtcatt

SEQ ID NO: 9913 - DNA, 448 bp, Glycine max
ctctcctatgttcgtagagccaaggaactttatttttaacctagaattcaaaaatacaacatgcataaatcatagggtcacatcacagatttcagatttcacaccaaagcataacatagtagaagtttaacttttcataatcaaagcataggttcaaattgatcaagtactccttccttacctcttggttgacacagagaagcagaaagatgaatgtggattgatttgaaaccttgacctcttcctagaacataaagatgaaaatgaagcaagaggggaagataatgagttgatgagaaaatgatgaagaagagcatggaaaatggttagcaaactcacatagacctcttaaaattccttcacaacactcaataatggagaagaagagaagaaaaagaaaaaaaagatcctctctctctctagccggcagcataacaagggaggggag

SEQ ID NO: 9914 - DNA, 223 bp, Glycine max
  unsure (1)..(223): unsure at all n locations
gctagcatcttatactacaccttngaatagttattcaatagtannaaatgaattataagtntgttataacaatanaaagaacactataatctacttttaaccttcccattctaatagaagaaaaaaggagttctcaataatttctctccttgtgagtagggttcccatgtatttaacacagctgctgtacgacgcttacccatggaggcagagaagttatgga

SEQ ID NO: 9915 - DNA, 294 bp, Glycine max
  unsure (1)..(294): unsure at all n locations
agcttaagctgtaacactgatatataagtatttgtttcccccttcccacaccctcttcggttgagtatgctggagctaagcaagtaatgactcttttctactggaaatgggatagagcttaaagaaaatgttagtggctatggttgctgatgttccatgactggtggaggcacaccagtaaaatgaagaagttcgacaaaaagcgtttctgtatccaggtgcataggtgaacttttggcattgaagtgaactgttgcagaaatntgatacgaagactggagctaacataagcta

SEQ ID NO: 9916 - DNA, 644 bp, Glycine max
  unsure (1)..(644): unsure at all n locations
ttgcgnctggacgcttgantctcatgcttcnctgcngaacanccatacctgngctngacagtgctgatgtatgatggagtagatacatgaatgataatnggtattgtacctcaattctagaactgcaacaagcatatgtaaaagtcaagatgtggagatgaagtagaactatngtgcccaacacatatgcagatcatgccagctgcataaggaaagggaggccaagatccgaacactgtgggtgaggaaagggaatgggctggaattacagaaggcangtcaatattttgacanaatngaccagtccaagaccattaatagttgtggagatcccacattgattagtgatatggccanantanagtacataagtggggggcaactcctcacttacangccngttntgtaggtccaaccctgattctaatatatatcagaggctatttagctattgtgttgacctatgtccactcctattgacctacanatctctcaccatatggataggccatgaagagcagaatggtctgaatgagaatagaatgtaatgtaatctttctattacatctaccactangagggggcaccaatatactgtactgtcactacattcattcatgggcatgactaacaatcaagtacct

SEQ ID NO: 9917 - DNA, 313 bp, Glycine max
agcttatagctcaactggcgccagcctattatgtttgccattgcatcacatgcatgttttctgatcacaatgtaaggggttcgactctcctctacgccagcttaccctgagctatgaagctgctagcttcttgtgtataatgaagatactgaccattgctacttactaagacgttactcacttactggaggttgacaaccacagagggctcattgggatacatagacaatcaaagaaaacagtgattttggaagtaactgctcgcacttacatattctatcattttaccatctcctaccagccaactacctat

SEQ ID NO: 9918 - DNA, 54 bp, Glycine max
  unsure (1)..(54): unsure at all n locations
tatagcataagcacactagttactgtntctgtaactataatacactacgatatg

SEQ ID NO: 9919 - DNA, 703 bp, Glycine max
  unsure (1)..(703): unsure at all n locations
gatgacactgagtgactatgntactcaagctgtggggtcacccanantncgttgtcatatgctanactngatcccatatctactngataattcaatggtagccataaccctagccaaggttcatcaacctncatttctccgagaatccgactcgaacgcaacgtgtgcttatcgtggaggagccctgnggcattccattgagcattgtatgaccccgaagcataaagtgcaaggtctaattgatgcnggctgactganattngangagaattgcgtgtanatcttgacattgacaagagatgccacacatggnggaantnnttgaaagctgggtgtagggtgtccctaatgactcatcaggggtttctaagttatgccattantgtaaaccacagctacaatggtaannatgaatggataaagtngatatctttngtccctcatccntctacaaacngcatgtntgcttatttcactntcacnncgatgtgggtgaggccatgggtctgttgtcagcaacctgngctctggtgttgactcangaccgtcattcgagatactcatcttcacgtggtggggtgccganacacgagcaagtcatacacaatagttcanataangaaatagttcaaataaaatanagggcttgatgctgtgttcagtaaattnacgtctgtactattgcttataagaggatatagat

SEQ ID NO: 9920 - DNA, 399 bp, Glycine max
  unsure (1)..(399): unsure at all n locations
agcttgtaatatgcaggaaactggttgtgatttgggtgatggtgtggacattgtgcaatgggtgagaaaaatgacagactcaaacaaggaatgagttctaaaagttcttgatcctagacttccctcagttccacttcataaggtgattcatgttttttatgtagccatgctatgtgttgaggaacaggcggtggagcggccaactatgtgcaaagttgttcaaattctgaccgagcttccaaaaccaccaagctcaaaacaaggagacttaacaatcatagaatcctctttgtcattatcaaacagtttagagtctccaaccacggcatcaaaggaacccaaagatcaacatcatcctcaattgccaccaaccgatctacttancattttgaatttgaa

SEQ ID NO: 9921 - DNA, 58 bp, Glycine max
  unsure (1)..(58): unsure at all n locations
gcggtagctgcattntcttctcgtaacccagcacactctntccggacgtctgtagcaa

SEQ ID NO: 9922 - DNA, 380 bp, Glycine max
  unsure (1)..(380): unsure at all n locations
agctntataagcgcgggtctgggagacttatgtcaagtggtcgcaatatacgaagatgatgttccgagtacattggatttggtatgaccttgccctcctgatttccagctggggaattggcgagtggaggaacgccccggcatttacgcagcgagcataatgtaaacctttacggtttaaaaagctctatagttgggcctaggctttagagtttttcttttggttaaggctttgtgtattttgttttttttttttttttaaatttataatacaaggatctttcttcatctgttcctacgtctctacccattctcatccatttgcatgtttacttcttttctgaagatccgatgacgagtcccccgaaggtactaatacct

SEQ ID NO: 9923 - DNA, 563 bp, Glycine max
  unsure (1)..(563): unsure at all n locations
tatgcttatctcgattgagtacactatgantactcaagcctggactggcgggttgantnntagcctagtttcactntagttatagtaaattcaatntagaatgatanatcccanagagaaaacgtccgatggattnntttcgcttcatttntactacaaggtattnttngactattatattattatttacctctttttgattccaacgtggtacngacaccgaacgtgtattatttaacaaataataatttcaataatgatcgggaattatttatttttgatatgcgagaatgactatataatgatgaacacgtanaaggggtcggaagtaatgaaacgaaaataagtctgaacaatgggacacacggtcatgaatgatgaaactcgtggggactacantgagacgagnacgagacaacataagctagacgtgaatctcctatacccgaactacgagcctcgctgattctacgaacattctacattcaagaacagtgcgaagtgacttctctatctccttttacaaaggaggtgacactccgcagcagatctcaaaccctgag

SEQ ID NO: 9924 - DNA, 408 bp, Glycine max
  unsure (1)..(408): unsure at all n locations
agcttaacttaacataattcacatcatttttataatcattgtgtaacatcacttgtcctaaggatttaatcacaaaatcatattctataccttcacattaatcacatgttcataacaaaacatctcaagtacaacacaacatctctcacacacaattcattacccaccatcacgtagcaagtcacaatgatcattacacagacgttatgcaacatatatactaagactcaatcctatattgaatgtggtatcttgtcagtgaaaaataacactagggcacctaggagtacataataaaatacaccacacaatgggtaaggaggtcactcttattaaaagaaatcataaggtgatcaattanggttatntctgttagcgtgaatgttctaaccatatgagatcaacata

SEQ ID NO: 9925 - DNA, 578 bp, Glycine max
  unsure (1)..(578): unsure at all n locations
tgtcttccgcgctangtgcactatgatctaagcttaatntaaatgatanatcatatgtctaacttcattggaatgtgtcaaatgtaaacaactaagaagcanattaaagttagactcagacctcannattgcaaagaaagattcgaangaattgaaagtnttgaagaggcaatatgcggcactaccaaaacaagagaaaattagcatttaccagcagtaattggtattagcttttgttatntgattgngtatatnatagctccaggatagcaggatttatacanaagattatctangaagttaattattttcttaataattaattatataaaaataccatatcttcttgtttcgacttagaattataccgatagcagatgtatagaaacatatacatctaatgtaacataaaactgtccatgataactttgcggaagatatgattttgatgtagaatattattatttttatattttatttttcattaatacgaccttctgtataccatatattgcgcttgcaccagatatgaatggttacaataatctgttttttatcataatggagctatatttgtt

SEQ ID NO: 9926 - DNA, 284 bp, Glycine max
  unsure (1)..(284): unsure at all n locations
tacccgttggtttctattggttagtcttttccttctatggggaaaaattattggaaaaatttgggggtggtcttcttcaagaaccccccttatgggtggctattttgaaaaggatagagtcccanatgatctcatgtcgaattttccacaccanataaggcagcatatagaagtaattcaaagagacaaagagagccaagacagtggagagctgatggaaaaagatgggtagagatgttgacccatgtctatgccatcatctggtaatcaactcttctcactct

SEQ ID NO: 9927 - DNA, 358 bp, Glycine max
  unsure (1)..(358): unsure at all n locations
tactcttataaagcatagcttagacannatacaggagtattatcacagccagaaggatntctaatatataagcaggaccacacgtacttaatnggcgtgtgatgaatatgtgatgactgtntatntctttcttagaaatacatgtatgaagagatttatcaaagtataaatttttttaatctaataactttctaaattgactgaataacgtaaaaaatattgtgtgcctgtttgcaaacatttttttagttatgaagatataataatgtgtttaaaaagtttatatggactatttctagcttattactattaaataaatgttagtttcnaatcttattattagctattataatgtttt

SEQ ID NO: 9928 - DNA, 424 bp, Glycine max
  unsure (1)..(424): unsure at all n locations
agctntcagccaattcacccgacaatatctttttactcggatgtctgattgagtcccgtaatataacgagacgctcgaaattgattgttgaagctctgagccaattcaaacgacaataactttttactcggatgtctgattgagtcccgtaatataacgagacgctcgaaattgattgttgaagctctgagccatttcaaacgacaataactttttactcggatgtctgattgagtcccgtaatatatcaagacgctcgaaattgaatgttgaacctctgagcctattcaaacgacaataacttttttctcggatgtttgattgagtcccgtaatatatcgagacgctcgaaattgaatgttgaagctctgagccaattcaaacgacaataactttttactcggatgtctgattgagtcccgta

SEQ ID NO: 9929 - DNA, 148 bp, Glycine max
  unsure (1)..(148): unsure at all n locations
tagctcagaagttcaacattcaatntcgagcgtctcgatatgttacgggactcaatcagacatccgagtaaaaagtcattgtcgtttgtattggctcagagcttcaacattcaatntcgagcgtctcgatatattacgagcctcaatc

SEQ ID NO: 9930 - DNA, 430 bp, Glycine max
  unsure (1)..(430): unsure at all n locations
agcttccaaagtgtccagaaactgtatgttatatatatggcattggaagtnttgaatatactcctcaatttacgaattttctcttgcaggtctttatttttgatttatatgcagtaaactaagcttatatgttttgtggctatggactgaggtgttcaagttatcaagctatattttggcgttgagtttatcttgataaatatagtaatttggccttacataatccccttgaccttgagataataaccacaaatacgatttttcactatatattatttttaatatatttttttgctatttgtcgaattttattatgagttacaaaaaaaatcattggtatactttattaactacttataagagaagtgaaactcctttcatgcatgttatgagtatgggtgctacaaaaattaaattgtaaaaaaacgta

SEQ ID NO: 9931 - DNA, 633 bp, Glycine max
  unsure (1)..(633): unsure at all n locations
atgcttgctccctcaatgcggaacatganactaagcttaatctgtagatcgataataaccctagntcatgaactaatcactatatagaatgntcattcttcactanaantatataatatatgagaatcagaatgcatgtcatctatcacaaattcaacactattaactggattacagatattaacttatatatatatatatatatacatatatatatatatatatatatatatatatatatatataaactctgaatccttcgcatgtgtgtgggtgttcatctcatcttacactcataacgacgcactacactataagagagcactgcacacatggtatatgttgggaatcacacacacgcgtatatataatttcattcgtgaatacaaacgtcgctctctacggtactgatatagattataacactcggtttgcgctcggtctctttgatctaaaaaacaancactactatatatataacacgttaatagtaagacaaacctgtaattgacataccgctgcgtgatatttctcctccacctattcatttggagagaatccatatgaaaatatatatttgttctatgtatagagagaagggcgctctcccaaaaaacctcgcgtttataacct

SEQ ID NO: 9932 - DNA, 321 bp, Glycine max
  unsure (1)..(321): unsure at all n locations
agcttgttttacaatcggtgctttatacaataagnttgaccatattctcatggtgaagctaaccaatctgttggataaatagggagctgtaggatcagcataacctgcagataggcccgatcatgaggtagatgatcccctatatctgatgacattaatcatcccacaactttttctgaagccattgcaagatatgtgggatgctaccgtgtttggggtgtataatgaacacttccccttgtacataaagaatgaagatctgtctgaaatagcacacgatggtcaatgtctcagcatatctattatacagttgtagattct

SEQ ID NO: 9933 - DNA, 544 bp, Glycine max
  unsure (1)..(544): unsure at all n locations
cttcctttgattgcctacgnattgacgtacactatgaatactacagctggactntgcgggtngantntcgccttagtntcactttagttattagtcaattcaattaatatagaganatcccacagagaaacgtncnngatgatttnnttgctnntatttactanaagggtatttttgattattatattattatttacctctttttgattccaacgtgatactgacaccgacggtggattatttaacaaataacaatatacaataatgacggaaatattattttgtagcaaagacaatatgatagcactaagaggtcgagaataacaaataatccacaatggacccacatctaatgatgaactcgttggactaccgtgaacgagaaacagaacatatatgtcaaacgtgaatctcctatacacgaactacgagcgctgctgattntacgaacattctanaattaagatcgatgcgaagtgaccctctttctctcctatatcaataggggttggacactccagcacatgtgctgaacagtgtctca

SEQ ID NO: 9934 - DNA, 361 bp, Glycine max
  unsure (1)..(361): unsure at all n locations
agcttcttggtgggaaagaaaatttttctgatgatcatcagaaaaggagcagcaganattttcttatcacgccaggtctacttgaccacagttcatcgctgcttctttttcgaattgcatgaggtcaataggtcacagatacgaggacaaagcaggggtatttattgtattttaacttgtaaatagcacaattggctttgaaagataaagaacggttgcagagtcgctccagttattttgatgtcttgctaacttatattctaaggaatactactgtagaataatcagagaaatgtggggctagtgaaaataaattgttataaacttataattggtactagtattgtattagttacttata

SEQ ID NO: 9935 - DNA, 478 bp, Glycine max
  unsure (1)..(478): unsure at all n locations
tcttgcatggtgcttcatctagctacacaatgagtctcgattagtgccatgaaaggtaaagacagtgattctgngatctcgtgccctaaaacactttagtttagatataaggttttttatgtattttaatggcgacagttgggcaagtcggcatatttatctttccgcctgtccgttgacttcaaagacccactgactctctgacactagtttttctaagtggcgatcaacgtaccacctcggtttatggctgttatctacctcctcagcttatactgattgttaaatgctctgctcctctacagctgatgtctgaatgatagtatattttatctataatatagttttaattatattaatatacttgacatattaaatatgatattactactattataaattattaaaatattctgttgttatgttgattgtaaatttacgtcttatcatccattcagaaattacaattttttctttt

SEQ ID NO: 9936 - DNA, 398 bp, Glycine max
  unsure (1)..(398): unsure at all n locations
agcttaggaaataaggcagaatctaatgttttctaaatgggaaagattaccctaaaatgattctatatagtttatatatgcaaaataatcgaacaaatgaagaatattgcggcaaagttacaagctgatacaaacctactgagaagttgataggaaccttcaaattcatgcgttcccagtagtcttccaacaaaatgcatagttcctatatattgtaagttgcaacaacttggtaaatataagactagcattacatataaatgaaggttntaaaaattaaactgattattttaatcagcaatttgagtgtttagtagtttattaatctaacctttggtcaaatgggttttaaaatctttcttcttaccttaaccaaaatgaaaaaactctactaactc

SEQ ID NO: 9937 - DNA, 150 bp, Glycine max
  unsure (1)..(150): unsure at all n locations
gacaacttcccattggaatngaattagtagttagtgataacttcccatcttatattgtattagtagtcaatgtcataagcacaatgtctcttgtcttgcttttgaatatcatacaaggagtaacanattgtagagtgcctctacaatcat

SEQ ID NO: 9938 - DNA, 566 bp, Glycine max
  unsure (1)..(566): unsure at all n locations
gtactcgactancttcactgacctatancantaaancntacanacttatatcctctatattttatnttnnaactnctatagacagatagatanatgaatcatactagtaccncgngatcctntanagtcgacctgcgagcatgtcagcctctatctatgtggcagggccggctttcttttcttatttgtgtccaacgcgagctctgaccactgttctatctgtccgcgatgctcgtttatgtgctcctgaaagggcttatagaccaaaccatactttccaccaattacttgggttattatataagctaatttagcccgcagtgtctgtgccctaaccgcagccgggtgcaatacccgtccccaacaaaaattgggccaacattacccgctgatccgacaagccaaggtgcccaatgaaggagtccccggagaaatgccgacccctcaaaagactggaaaagcggttcaaccatcttttgcgggtttcacataagcgtgggggatggcagcgtaccagaattttcttggcgagaaaaaacaagggcccatcaaacaaattaaatttg

SEQ ID NO: 9939 - DNA, 507 bp, Glycine max
  unsure (1)..(507): unsure at all n locations
tgacactggtagcttgantctcagctgctgtgagctctatgggctgatcttggctcatgggccttatgggatttcacctggtatgctcggagacaaggaaatngtagaggaggcgcctcatatgaatagcctggagaagacttaccacagatgacctggataaagctggaaggatctcaatggtgaaagaaaaggaagaagaagaggggagccacatgaagaataagagattactggacttgagttgttacaaacttatctcaagtaccacaggtaccatctctttataacatgagcttcttaaagttttggaaacttctgagagctctgagaactcctggagtaactacttcccaccttatactactactctgtagctctatagatcctaaacaactactcctcctttatgtactactctgatgaactactactccccttatactactaccctcaaaactaatcagagtcttcagcttaatgcgacagtaacatcttatgcatcct

SEQ ID NO: 9940 - DNA, 330 bp, Glycine max
  unsure (1)..(330): unsure at all n locations
agcttgtttcatcctcttagtcttggactttgtcatangctggttgcacctccatcattccctccctctttgaaaggattcatccttgaatctgattcattacctacatcaaagaaagatagatcaaccacattaaaggtagtacttatgttaccatattctcttggcaagtccaactagtaagcattgtcatttatcttttctagaacttgaaaaagcccatctcctcttggttgcaacttggattttcttttagcagtgaacctttccttcctcatatgaaccgaaacccaatctgctggtttaaaaataactttgatgcgaccctta

SEQ ID NO: 9941 - DNA, 80 bp, Glycine max
  unsure (1)..(80): unsure at all n locations
tcatgcatgcacctatgtggacactcaagtgtcaaaattttatggtcatgtgatgctanggctcanngatcattccctct

SEQ ID NO: 9942 - DNA, 683 bp, Glycine max
  unsure (1)..(683): unsure at all n locations
tatacactgttagcattgagtagtacgtctgtcannnatctaaatngtatctatgtccagcctgtctaataaagaatgaatgatngacatttagaatatgatttcgttcgatctctgaaaaagacgncacacgatcgatcttaagtcaacaccgcgccgtaagcaaggaatacacacatatattnttattactctgatcttcagccctcattatccagtggatacatattacgacatntaccatcaaaccgatatatccgtgcataatctacacagaatacattcttaataattatattttacatcgtattctaataataccatctaagttaaatatatttatacatgttacatcaacaaaagatgagtatatgacgcgcgatattctcatntaactcaaactcttgatatcatgttgtaagtctgtttctgctcaaacactgtgtattattgatagaatattcgtctctaatctgaactaaataactaaaccaaatatcatctcttgaatgccataataacgaagaaccgagtatgagatatatggaataagatcantgttagttgcactcttgaacaaatgcgacaacacgatgtctttgacaaacaaatgatgcgtgctaattattatgctggtgcacagctatataatgcataaaaactactcctgatatgaatattct

SEQ ID NO: 9943 - DNA, 282 bp, Glycine max
  unsure (1)..(282): unsure at all n locations
gtctccttntgcacatgttctgtagttgcatcctatccggaaccatatcagaatagtactgatactgcctaacgaaggcaaccattangtccttccaagtatggactcgggaaggttccaagttagtgtaccaggtaacagctaccccagtaagattttcttggaaggaatgtatcagcagttcctcatcttttgcgcatgcncncatcttccgataatacatctntagatggtnnngtgggcaagtagtccccttgtacttgtcaaagtccatcacctttg

SEQ ID NO: 9944 - DNA, 365 bp, Glycine max
  unsure (1)..(365): unsure at all n locations
agctntgtgcctgggttgctatcgattattgcttgcattatttgtgcactcgtaggagactctcttgtaccttttattaataataatggagctatctctttgatttgggtgaactttgattttgttttaccatactttgagagattttccatgctaaaaatcttgtgcctctttgatgagtttgtagtatataattttattgatcataattttgattttataatatatgatgcgtatgaacctaaaactgacaacatcgcgatagaaacctaaaacatgcgtattgtgtatgattatatataggttgggataacctacaacaaagggaacattaaaaaagccttagcttgtacattgattaatgc

SEQ ID NO: 9945 - DNA, 640 bp, Glycine max
  unsure (1)..(640): unsure at all n locations
ttatagcacattgaggaacttgatactaagcttntanaactgnttgatanaagatctagtctagtatnaagatgcttgtacactaacatgccagctcgtntaagtaataataatagtaagaagaatgataataactattatatataccatnnttatgacattatgaatgagaggatgaagtgacaataaagttgctagaacactcatttgcatgtgaaatattnttaagatgaaacaggcttaagttacaatgatgatgctaccagactaatcattttaaagaacaaaatgtcttgtatagacattttcagaccatgtagatagttttatttggctatattagtatacatcatctctaatccatatancttttaatacttatgtgttcttatctcgcatttgactaacttcgggtctaactaactngaatcaatatgatgttgttatcaatattnttggactcgacatcactatcaagatctataagttctcttttgttagctctataggtttatacagtacttgtaagatgctgtacaacctttgttgtaagccaacttataaaaacttgtatggtagcccagctggtttactagcaaccatctaaagttgtgctattcccctattaaatatcacagcg

SEQ ID NO: 9946 - DNA, 367 bp, Glycine max
  unsure (1)..(367): unsure at all n locations
agcttctacttatgtggcagggcgggctttcttcaccttcttgtctccaacgcgaactntgaccattgttcttccttcccgcgatgctccttttcatgtctgcctgagtgggcttatagcctaaaccatacttcccacgattaccttgggtatttatcagtctagttatgccactgttgttttttcctaaacccatcccgggctcataaccgttccccaacataactcgggccatcattaccgctgcatcggacagactaggctgcccaaagagggagtccacggagganatgctgaccacctcaaaagactggaaagcagtttctaacaactcttctgcggcttccacataaggcatggaggatgg

SEQ ID NO: 9947 - DNA, 466 bp, Glycine max
  unsure (1)..(466): unsure at all n locations
tgcttgacccattgacctataactagctgctaagagtcagaggacacgcgacaagacagttcgtcgatatatgtccgttagatgctgcacacaccttgagcataagatggcgttatctgagcgagcgtacactanggacgacagttactgattccacatgaataggcgccgcggggcatactggtactccatggcagttgatcaaatatactgatttatcctgctggcacaatgaggggcggctgaatctagtaggtaggatccgtgtccaccttcgcactctagttcttgtgtgagagcagatgtattgcaagagaccgctacgtcatagagctcccactcttatacgacgattgccgcgtgagagaggcatatcccacgaccctcctatgtactgtttacctctgccgttattaccctgcatcatgggcctctcgtaatttgtcttcctcgtattgcgtgcccg

SEQ ID NO: 9948 - DNA, 433 bp, Glycine max
agcttgatagcagaggggcttaggtccttcatttacaatgatcaatggtcacggtagggaccaagaagggttgctattctgacttctgagtgatattgaaagggtagtctagacataacatatgaacaattaatatcactattataatgtttatttgcaaatattattgtcattattatatgttaacattatatgggtcaatcgctaattgaaatattcgtttggtttgtggaatgacagacagacaaggcatccatgctagatgagatcatcgattacgtgaagttcctgcagctccaagtcaaggtgcgcatcccgcgtttttctcttgtactagcatttctttatttgaatttgttcctcatcagcatcaattaatagcatattttaattaccccagttgattatttaattagagactctaactaagtat

SEQ ID NO: 9949 - DNA, 119 bp, Glycine max
  unsure (1)..(119): unsure at all n locations
atttggagcanactctcatctcacacaagtctataacattaatctaaactcgctcannactggtttacgacgaaactctactgaatcanaatntgactcctcaacacccaatntaccct

SEQ ID NO: 9950 - DNA, 437 bp, Glycine max
  unsure (1)..(437): unsure at all n locations
agcttataagctagttgaaagcttatattatatcagttaattagtttataagttttttttactaatttttaatttttcaacttttagcttatgacaatatatgtttggtaaggtctttgaagaactaataagcttctttaattagcttataagtttctttgagcaaaataagtttgtttggtatctaacttattttaatagtttattttctataagctactacttcaagtaatttattttgataagttatttgaagtaatttatagaaaataagataacatataaattattattttttttcttcttctccattttacttttactattttatttgacatttcattctacccttatattcaattaaaaaatcttcttatctcttttgtttgttggatgaaaaaactttggtatcntaatttatgtttttacacatatga

SEQ ID NO: 9951 - DNA, 425 bp, Glycine max
  unsure (1)..(425): unsure at all n locations
agctnttaactntaacactgtatttaactattaagcccatttaaactaacttgcaactccaatgaagacttagacatgtatcttggtaaccttgcattctccataactctgcaagtaatgttttattctatctttatttgtttcaattttaattattttctgttcggttagtgaacctactaaataaatattagaaattaacgaaaataatttaatttgattgatgaacatgaactattgaacttactaaagttggtttttttcatttcgtttggataatttgttaagtttattttaattctttaagcagccttgcaattctcaaattgtcagccaagttaacacgtagactgacgtagtgttgcctgctgtccatcacgtgtaataacttgaaatattatttttttaaaaaaggacaaaaataa

SEQ ID NO: 9952 - DNA, 468 bp, Glycine max
  unsure (1)..(468): unsure at all n locations
atgctactgcacattgggaccataactagctaattgcggatttcacattctatattctatcgaacatattgctctattntatgttgatggatgaattcagacttaaatatgatgtgcatatagggctatataaaaaggaaatattgagcggccggtgctaatttgtcaacttctagataagtactgccttcatcttaccagctaaataggacagaaaacataaaaccaagcgggaactgtgacgcatataaattgaatgcatctgtaatacacanaatgctagtactataactaaataggcaagcgcagatgaactacacagaacatctctatactactactacttgacgcttanaatttatgacacacatatagattttttcttattgtgagatactggagtcgcgaattttttttactgatcagtcatttggactacactggtaaagctaactgacataagcattt

SEQ ID NO: 9953 - DNA, 424 bp, Glycine max
agcttattcatgcacttccgttttgatgtttggccacaggactatcttgatgacatacaagcacaagacacatgctgttgatagtgatgggaaaattacatccaatgccgatttagatttctatattaatgatgtaagcttgctcactattttctcctgaatattccttttctcttatttcaaatgctatttgggaatgttaacagattttctgggccattttggcatgagtgtccttttcagttgaatccgtttctttgataataatagcatttccttgctctctaagtctttgaagatataaggatcaagtctgagctcaaaccaccaaatacattactgagtcagcagtacaccagcgattgtcatttgattaatcttaccatttgtgttctaattgacttatgttttacttttatgtata

SEQ ID NO: 9954 - DNA, 619 bp, Glycine max
  unsure (1)..(619): unsure at all n locations
gctgtcctttatttgactnaccattganagtgaccccatcactactatgcttgtataagaccgcnngaagagtcagaaggaagaaggtntnngtggtgtggtgtgngaatactttgatggaagtgtgcttagatctttgcaaccataatngctactccttctcttgtggtagagacacactnagaactctaactctcactcatctnttcgcctctgaatttatggtatgaagaaatagagaacaagaaagatcaacctgtgcttgttntntttttttntttctcttcttctttcacaagtcatgtcctccctattggaattctgattaatatgaaaaggttcgttgcacaagacgcccacttttttatntcccctttnttaatcgtgtgtgttgtgggactttgcatgttcgaatatacacgtgtgcttcctattaaccaacatatgttttctttaattattctctctctgcaaaattaaaaacttcgaaatatatttcacgtcgtctcaaattgctaccatcctttcctcaaaacaaatgacactttctttttaaacaagaacccattaattgttatatccattgttttttaaccactccaaataaccctttttttcg

SEQ ID NO: 9955 - DNA, 429 bp, Glycine max
  unsure (1)..(429): unsure at all n locations
agcttgagcttggncaaccctaaatctttgaatggcaattctgatcgccaatacttcaacaacatctcgtaaggatgaatgactcgggcatactttaagcttatgcacggaaaatgtaattatgaaattgagatgcccaaagaaacaccatttcctagttaaccatgcattaggtaccatgttcaattattttgttttgttggtgtgtgtttttttttatttttagaaatgggtttatgatcccaacatggttggctcatggtgcctaacacatgcaactaagaatgtagtgtgaaatntcacgcttccccttttttggttttttagagganaacacaaggatgagcaaacatganaacaaatggtatgcaattttgtagatcaaaaagtttgttgaacgcatatgcatgatgatgccatgactcatgc

SEQ ID NO: 9956 - DNA, 216 bp, Glycine max
  unsure (1)..(216): unsure at all n locations
ctaccaactacanaccctaagataactatattatctacacaataagtacacttctctatattngcatagagggtgttnttcctaaggactgacagaacttgcctgagatgtcctaagtgatcatctangctcctactgtacanctaatatatcatcaaataaacaactacaaatctacctatgatatcccttatgacatgatgcataagcctcata

SEQ ID NO: 9957 - DNA, 432 bp, Glycine max
  unsure (1)..(432): unsure at all n locations
agctngcttctacaattaggccatcaaatcctatccagaacaacatacattgtatgaaaatataattcctaacactattttaactatcaactatcctagcatcatgcaatcagaacaaaaatcaaagctttaaagtaataaactaagttgactaacctaaagcttaaaaaaaaaaaataaaaaataaaaacaaggttaaaggaagcttacttggtgttgaccctcttccacatttcctttntccaaaatttgtaattactctttttatgcggaagcggtttaccggaaagtgcctcggatcgccaagtaaataattaaaacggaatgatccgagtgtcaaacacagggaacttattcctttggcaaagcttntgtcaacaatcatgcattttgttgacagaaaataataattgtgaattgaagtaaaagtat

SEQ ID NO: 9958 - DNA, 233 bp, Glycine max
  unsure (1)..(233): unsure at all n locations
tgtgttttacctctcgctagccatatgtnggctaatgagcgtccgctattcgcaacactgctatgctatgcgcgaggaagaatccataagacgatgagctatacaggttcgctgagcgcaccgctccaggtcatcaagcgcaccgcttcagctcatccgcttagcgagagaaagtgcgctagccataatccagtaatgtgcactaagcgaacgagcacgaacaaggccaccta

SEQ ID NO: 9959 - DNA, 337 bp, Glycine max
agcttctatccaggctcatcttggtgttggagctccttcttccatggcttattccctagtggatggcgcctcctctctcctcttctcctttggcttccgctacatctccatgggggaaaatcaccattaaaagacctcaatgatgcttaaagatccagcctccatagaagccacacaagcaagcttccatcactagtatcctttaaattcccagtaattattactggtgtgtcttcaaagtaaatattggatgcctaatctaccctaagggggttcgagtaagtgaacgctgacccttagagagccatacttatgtcttccctaaaacaaaaagtac

SEQ ID NO: 9960 - DNA, 223 bp, Glycine max
  unsure (1)..(223): unsure at all n locations
taaactgtacaggctcaaggttcaatcaaacaatcatactntcaactcanaatgggttgcagggataaaacaatcatgcacaaggtaagctntntagctaagtggctatcttcaatcanaacatggccttcgtcatcttcaatttcacgcattcattccatactctgagattcatgcaanaatannatactcaatgtagtcgttctctcacaataaagatcac

SEQ ID NO: 9961 - DNA, 344 bp, Glycine max
agcttccttaagaagattcctaaagaagttagagcttagctacacatacctctctaatagctaagctcacctccttgagatgagaagctagagcttagctacacaccccctataatagctaagctcacccccatgacaaaaaacatgaaaataataaaaaaaaagtccttattacaaagacaactcaaaatgccccgaaatacaaggctaaaaccctatactactagaatggccaaaatacaaggcctagacgaaggaaaaacctattctaatatttacaaagataagcgggctcatacttagcccatgggctcgaaatctaccctaaggctcatgagaaccct

SEQ ID NO: 9962 - DNA, 615 bp, Glycine max
  unsure (1)..(615): unsure at all n locations
cttcactggtgcatggagtctcagctgnactgangagtgtgagggtganacttctgctnntatngtgaccacagagtggtactctgagatatgtctcgtgggtcaagagacctttgggacgtcangtggnngtgctattgcccaaaccaagcttgaccaatcccgacccaacccnggcatagtcggtcagtgagaacctgtgatgtacctaagcatgcgagctcctggcagtcaacagataanaggataacangaccacatagcanggaggcttgtggtggctggccagctgtgaattatgtgaatatgtggatggtggctctggaatcgataccaanggtggtaatcgatacacggctataatgaaacagaggctagatggctctggtatcattaccacgngtgtatcgatacangcttgaacaggtctgaactatgaagctctgtatcataccangggtgacgataccaactatatgactggctgttgttcctcgtattatatccttcatatctctttccatagtatgcttctttaatctaattaatattgtattcggaattatagcttgttcaatatctagaattctataggttgtcatatataaatttccg

SEQ ID NO: 9963 - DNA, 291 bp, Glycine max
tgatgcaacaatcgaaaggggtggctatatgagacatcttgccgaacataggcaggtgagccataactcgctagagcgttttcttgcatgccatatgtaacaaagtcgttgatcctatgaagtttgatgagttggaaaatgaggccgcgagtatactgagccagttggaaatgtattttcccgctgctttatttgacatcatgattcacttgattgtgcatctggccagaaaaatgcaatggtggggtcctgtatattcgtggtggatgtacccggttgagcggatcatga

SEQ ID NO: 9964 - DNA, 423 bp, Glycine max
  unsure (1)..(423): unsure at all n locations
agcttcgccggatgatgccgatcgatcattttccaatcgacatcatccactaattattcagggattgaatagaataaacaatggccggtgtcggtcgctatatggccccgactgatatccttcagccgacattgcgcaatttcttttagaaaagctggccgataatgtttttttacggtagaggaagttttttgtttttgggttccctaaaaaatttacgatgtatgtcggctaggtttctccctgcgagctcaacccangttgtgtttcggacgacactggcatgttctcatttattaggccaagaaaacgttagcccaccccagcacaaaaaaaacatcatcaacggaaattgataaaaaaaaatgataggtgacgtcngcgtggagagatgaccgatcgaagtctaaataggaagcatca

SEQ ID NO: 9965 - DNA, 588 bp, Glycine max
  unsure (1)..(588): unsure at all n locations
aatctggccttggagccttatctcgctctttagctgacctntatantaacacccgtggtttatcattaaatagagtttatctctnntactctagngagagtgattctcctatattcttgagtgattcaagaacaccctcgctgtatcaaaggactntcacaacctttngtgtgtngccctcgtggagagagtgattctttccttcctttcatcttcacccttgttctatcagaccacaattccagaaatacacctctgccagaatatctcgtggccataactccatttactcactcaaataagtgattcttggcctaaattgctttcaaacgagaccttcacctcgtttggatcatctcatttgagccctgtagctcagctattgcattcctatattctgccanccaccactatctacatttaccatccatcatcatttatgccagacccctatanaccacgaataccactatgtctccttctatcattcgattcatagttatctacactagcgcctgcctgagtcttattgataactcgttagaacctcttgtgaatggactctctatctgctaatactctatcaag

SEQ ID NO: 9966 - DNA, 411 bp, Glycine max
  unsure (1)..(411): unsure at all n locations
tattcttatgttacaggagatcaagttgaactagaagctccctgtcttaggttgggatatgcaaacaaactgactcttatatgcctaaggatcgccgaaaagagtgctgttggtccatctgtctatgcggaagcttaatagtggtggaattattactattgagtaaggacacatacacgaggtagtacaaatctaggcccctaattttggaatcgagtgtatataacgtgaatgtatgcacaatggttgcatatatatttctgagtatacaagctatatatatgtacgactgcttttaagcgaatatatcactagacatatgctatcatgagctcttggtgctttatgaggatatttgtagcatgaataatcatattgtagaacggatatgtgttggatagtctcccatcn

SEQ ID NO: 9967 - DNA, 378 bp, Glycine max
  unsure (1)..(378): unsure at all n locations
agcttatatataaatatcatggataaatgattacttaaattngcatacacaaaataatttctcaataattaacatattgaaagataagaaataaagaataaataataatttataacaacaaatttatattaacttgttcaataaattatttagggttaaatatattttttattcctaataaatactcaattttagtgttntctccctaataaatctttgctttgcgttgagtccctaataaaataacacttttattttatatccttgatattgtgttntagtccctaataaattagaaaattttgtgtttgcttcctaataaattaacaaattgtatttgagtntctattaagaaatgggaaatatttatcatggagc

SEQ ID NO: 9968 - DNA, 187 bp, Glycine max
  unsure (1)..(187): unsure at all n locations
ctcatcaccatccatttttcatggaaggccggttntctcataatacttagtagataggaccttgctaatgtncaatttgagatcaacttccccttgtgtcctctntcttacatctcgtggtgaataatatcataagctangagaacattgtctatgatagaacggtcttcaacanaatatgatcact

SEQ ID NO: 9969 - DNA, 379 bp, Glycine max
agcttcatcatatgggttctgttgaatgtattcaatatttgtaacctattaaatgtctacataccattatagttgcttgaaagaggtctagaaaagagactagatgccatagaagacactaacaagagcattctaaaggtcatctacaaccttgttcgacaagaggcatgcagctctccaaagaatacaagagaccatgtccccatttctagaagccaaattacgttgcctttggaaaaaagagttgacttagttagcgcaaaatgctatgggaggcaccaagaaccaaaaatgtcaagtggatctcttggacgtgcttctttggcatatttgaaaaacattgaaaccattggtatcccaaaagatgaagatgctcatg

SEQ ID NO: 9970 - DNA, 426 bp, Glycine max
agcttgccacccagctcgcccattttttcttgttgcttccttggaggaacttcctggaaggcctaagtgggcctggttgctatttgcaccccctgtttactaaatacaccccctgccatttttgctgattctttttctgtaatgttatggaactttacgaattccgtaacgatacttgttttctttccgtaatgttacggaaccttacggattatgtaatcatcccctttttggctttcggcatgtcacagaacttcacggattgcctaacgatgggtgccaagtacctcgaagcagtcaagcaaaggttgcatgccatcaaacaatggtccccagatgagaatagggtatgacagttgcccctctttactttacctttatcggagataggaggaacagcaaagataaacacttgattcggtcgtc

SEQ ID NO: 9971 - DNA, 475 bp, Glycine max
  unsure (1)..(475): unsure at all n locations
gtggtgatgactcgattgaggaacatganactaagctgtgcctaagagatggctgtgatggagatantgaaatgtagtaattctcaatgatggaagagcttactgatccgatagagggatctaatttggaaacacatctttatctatttgcagatcttaagatggactatgctgaaatgaggtgatgaggcatgtagatgtatagcactcccaaaactgacggtgttgatgatatccttgcccattgaccgatgatattatgatgacctgccatcaggtattctgtacttgctangtgangaacatatctcagaacgtgtcaacaattgtcaattgggaaatatagtaatgtcaatgggagcctgagatgatgcagaaactccccttttgttcctatgttttttggtaaacgatcaagataaagttgtgatatatgatagctatagagtgatctagaaagagtttgtagcctact

SEQ ID NO: 9972 - DNA, 416 bp, Glycine max
  unsure (1)..(416): unsure at all n locations
agcttccttggggccatttcctgttagatcaaacatttagaagttagttttacaagataatgcttatcttaacgcaaaaaatgtcatgctaatccctctgattttagaacgaactcatgtaacctatttatgcacacgcgtatgtgtagaatatcctactatttatatcaacatagaggtcatccaacacattctaattgtcatacatatatatgcatttgaaaagaacatacattctcacgcccaaggcattgcgtcaaaactcacacttaattatatcctaaacacttgctattacaaactaactacacacatttggaatatatatcatacnaaatntattgtttctgcatattggaaagctaattacatcctgcacatacttgcattcaaaggggaatccatgctatcataca

SEQ ID NO: 9973 - DNA, 333 bp, Glycine max
tgcttgtctcattggaaatcctacaagtatagggattggatgtagtctaaggttcgagggaactaatataaaattgtcgtgtttgatcctccttatttgtttctcatatctatgtgcatgttgcatatttattctaattcgttaaaaatcttatttttttaataagtattaacttagtcatgcattaaaaagatttttgaaacataatttaatcatcaaaagtagcattacaacttttaaaaaaaaaaggaaatataacaattgtatataaatcaaatctaatatattatagaactattttgagaaacatcttctcataatataaacttcaag

SEQ ID NO: 9974 - DNA, 667 bp, Glycine max
  unsure (1)..(667): unsure at all n locations
aattcattggtgactntgactactcacgctctagganagcanctggagacctngtcananacnctaagcatacttncncaacaactacatccttgtaatcctgtctatgtntctgtaatacaagtangagggtgctctgtgtgagaggagctcatgagtcaagcacctgcacgactcaagagtaagcatcataagaggttaattatatggccatncataatcaccaagggtataataaaggaagcaatgcangttatcatccaggaggcatagcagaatttcagcaatgaacaatngatccagacccatganggtctnttgcatcaagctagtgatgttaaagaatcgcttactgngaggtaacccaggatttctaacatattctncttttttgaagttaaaataatatggttaacatatggcatagtttatgtaatatntttgaatcttgccttgctgatataccttactgttgaaccgctggctantcatgtatatcataattgacaagtcaaatcaaatgctggatgctgttgtgtgaatangcatgtgcaatctgtgtgcgcctaacgcactgacactagccaaccacatttgctatcctagccgacaccacanccactattctatcgaaatttgtatggctacgcaatactacagctgctct

SEQ ID NO: 9975 - DNA, 457 bp, Glycine max
gatccttaagcacctgcggctgcagcttttattgaacctgaaatcattactcactttgatttctgaggtttttgggataaaaatggtcattgaccaatcccttttccataacttaacccaattgtccagtgacggtgtaccatttgaaggtacactgaatgacgattggaaatttgatttctctgcatatgatgcccgccagttggtttgcaccaaccatgcggatatgactggacgccttcttgccggttcattggcttttgaaagccgcatccttcattatctcattgtgcgtattttgcttccacgatcttccaaccttgcccaggtttctgaggaagaatcttgtatcatgtgggcctttcataccgggcgtcaacttgattgggcacacttagtcagatatcgcatgcataaggcattgcgattaaatgctccattgccatatctacacctt

SEQ ID NO: 9976 - DNA, 640 bp, Glycine max
  unsure (1)..(640): unsure at all n locations
atgcatgagaccatgagtctcaagctatcgcctccatcacagagccttatngagaatantgcatgctcgggcaggcatagcatataatgtcntgctcagtagcagcagcaggaggaccagcaacaaccagtcgcatatgcgccaccaccacctctatggcagccaccatccctggagtccatcttcgctcacctgtggaagatagagccccagatgcacacgtacatgcagcatgtaactggccaacaggcaactaatcacaggggtcaggtgcagctaaatgaaaccttctaccggtacaccaagcactagcagagctaggaccccaatcctttcctgtgngctacccccgagaaaatcgaggcccacagtgcgtggcttggagatgagcctgattttanaacagggcaggaccngcggggcccttgaganangatgagctangaggatgatatatgctatgtctgagtactatgtgagagcnagttcatggtggatcgctaaaactggatntgcttattatgtacacttcagntatcttatctatttgatgatggaatatgtatcgttcagttgttctatatatgacaacttatgatgttagttctattatgtaaactacgttacgtactcatgctgg

SEQ ID NO: 9977 - DNA, 354 bp, Glycine max
  unsure (1)..(354): unsure at all n locations
agcttgataacacgcagagactaacgtcttcttttgcggccttcgtcaatcgcggccgacaagcccgttgacacgcagagatttatgtcatcttccgcgcttacaagatctgtcatactgagttttgagtcacgctgacgggcggaaatacccgagtggttatccgtataaactttntgttgtttgtaagacgaaaagcctggtagcacgcaaagactaacgtcgtcttctgcgcccttcgtcaatcgcggccgacaagcccgttgacacgcggagatttacgtcatcttccgtgctcacaagatctgtcatactgacttttgagtcacgctgacgggcggaaatacccgaatg

SEQ ID NO: 9978 - DNA, 234 bp, Glycine max
agcttcagctctcagcccaaactctctttttctatctgatttcaggcttaaataggtggccttgttcgtgctcgtgcgcttagcgcaattctgaaacgcttagcgcacattagtgaatcttggcttagcgcgtgcttttctcgctcagcggttggactgaagcggtgcacttagtgagatgaagtggtgcactcaatgaacttgtataactcatattcttccagattcttcctc

SEQ ID NO: 9979 - DNA, 624 bp, Glycine max
  unsure (1)..(624): unsure at all n locations
ctgatctgcgacgactgagtctccgctgaatgaggagtgtgaaggtgaactcctgctatattcgtgaccacgagtggaccttgagatangtcgncgtggtcangagacacatgggacgtcangtggngtgctatngcccanaaccaagcttgaccaatcccgacccaacccgggcatagtcngtcagtgagaacctgtgatgtacctaagcaggcgagccctcctgcagtcaacagatatatgaacaaagaccacatagcanggaggctngtggtggctgccagctgtgaatctgtgtgaatatgggtatggctctggaatcgataccaaggtgggtatcattacatgcttataatgagacaggagctaaatgctctggtatcgatacanggatgtatcgataccngcttganaacaggcaggaagcatgatcctctggtatcgataccatgagtgaatcgatacaagctanaanggactggagagatgggctctgtatcataccatctggtatcatacacaagatggcactgtatcataccagatggatcataccatgctttgctatctgctgagtggatcagtaccctgaacatcctcgtcctgtactaatcttcttacgct

SEQ ID NO: 9980 - DNA, 364 bp, Glycine max
gcttcaattgcaagaacttgaggagaacttcttactagcctatgagaactccaatatttacaatgggaaagtgaagaggtttcatgactctaagattcttaggaaggagttccatattggccaaaaagtgcttttatttaattttcaccttaagcttatcttcagtaaactttgatctagatgggatggaccttttgttattactaatgtttatcccatggtgcagttgagattaaaaaggaagttaatggcaaagtcttcaaagtgaactgatgagaatcctgaaactggccaaatacaggctaaaggcccaagtggagaaggacaaaggcccaagtggagaaggacaaagcccccgagtgga

SEQ ID NO: 9981 - DNA, 146 bp, Glycine max
  unsure (1)..(146): unsure at all n locations
cgtgcatcatcatatatgagtgagaagaaaaattctaaagtagaaaattcttcaaaggcanaactctctatntaatcgatacaatcttatcgtaatcgatacaccaattgcttaagcttgtagagtatgtctcgtatcagtataat

SEQ ID NO: 9982 - DNA, 440 bp, Glycine max
agcttctctcttcacatttttcactacctgcttctttggtgcattcttaatctccttgcactccttatccaacattaccaagaaatcacgtactatcataaacaatctcaacccttcatccttccctgagtccccatgaaagtaatcaccagtgttcttcactagggccatgatttgcttctcttcttctagcaaactcgtgacatcaacctcagctttctccacaaaactcttcactgtctcatgaaagcctttgtcatcatctatgtcacttaggtctttgtttacaaaatctcttgtttttatgagtccatggcctagtctagaggttgttcctatcaatgcatcagcatctaacgctgctgctttcttcacattctcgagttcactgctcaaacgtgaaaccacttgaaggccaagttcgcggattggtcttctga

SEQ ID NO: 9983 - DNA, 529 bp, Glycine max
  unsure (1)..(529): unsure at all n locations
atgcatggtaccctgagtgnactatgatactcagcttnttttttttganaagtatctttataactnttgtagggggtttctatagagtaattctagtatattntannaaaagctcagtggtaccaaatttgccttgagacatcagacatgtgaatagagactttcgtattattaattattaaataaaagagtgtcatagctttaagtttgttcaagaaataaaaaaataataatctttcagattcaaaatgaaaaaatctgaaatttaatataaacaaaaattcatctcatgatagtataagttaaatatcgaacaacagatgtnnttagcctgttgtaaatacagtataaaccttatacctaggcctcatttttatattctttggaaaaaaactataggagaanatattgtataatataattatcataacaacattcactgattatcaaaaacgtatactcgcactgattgtcaatttctctagtaacttttctctctgaagtgcaacgatgcaattcgaatataggg

SEQ ID NO: 9984 - DNA, 443 bp, Glycine max
  unsure (1)..(443): unsure at all n locations
agctntatgaganaccataaaaactatgtatgtttctatacaaaaatcaattgagaaagcttcgccaagtatccccattgaaaaacctctattcaaacatttcaaagttagtgagaaggctacacgaaaaattacggaacttagaaaaactaaatccttaattgaaggcgtaggtgacaatcatagtgaattactaaacaagattggtagtttacttaaggtcataccagatactccccaagcctcggaaaatacttccaaaatggtaacaagaagtacctccaaattaattaatgttattaatgaagatagtgaccaaaactctgataacacaactgagataggatcagtgtcagacaagaatataaatgcgattaattccaaacacttgaaaacaccctcgtaattatattatcaacgtccgactgcccctgaccttctat

SEQ ID NO: 9985 - DNA, 240 bp, Glycine max
aacattagtatcttaagcctacaagactaatgactaatttttcggacgtttattaatatcaaaactttcttcataaacgactttgtcttcacatactcttgattaaaaaattggagattaaaatttcattttaaaattaaaaaaatttaaataactggtcctcttaatgaaaattatgccttcatatgagggaccttcttaaaattaaaaaaatctattggcctgaccacaaattacaat

SEQ ID NO: 9986 - DNA, 266 bp, Glycine max
  unsure (1)..(266): unsure at all n locations
tagatctctctgccacggctctgtcttttcaatntctcctctctttcgtggaacgccctcacccttattatatcataactcagacaacctctgtaacttcattttcaatcatatagacttgttcnagtgctcccttagttntagtatcaccactttatcatgctcatgggaaactgtntcagaaagaccaccaataatccacgcccttctccctcaggtacacatatgagtatgcttgagtataatctgatatatacaaaataagt

SEQ ID NO: 9987 - DNA, 437 bp, Glycine max
  unsure (1)..(437): unsure at all n locations
agcttgctgtataattacacgtaagactttatatatgaaaattctccacttangaatacgaaagtcactgcaatgacatcaaattttttctcactttatctgctgcataataatcacaggaagatcagctaagttgcagttatatttgtttattgaatgggtttcctcaaactttcccttgaacaggcctgcgacatttggagaaccttcagctttaacgttgatgcaatcatcatttaccaccagcttagtccaaaactgacgcttgccatcatttttctcataataatcagatgttttggtttggctaccacgaagaatagattgaggaacctccatgtagagtgtccatgaccaagcccgagaatgccatgtgggattagaaattagctgtagatatgggaccttgcatacctgcaggtatcaaaaacttaaca

SEQ ID NO: 9988 - DNA, 258 bp, Glycine max
  unsure (1)..(258): unsure at all n locations
tactgcatgaaccaatatagcttattttacttatgacagtaatgtccatatcacatcttttttacagaaaagaaagttctagaatcctgctcttacaaagctatcgggacttgttgcttttacaataggatttgtttaaatatactacagtgagtttacattaccctactagtagtgtcttatgatatgttcttgactttatcatntttaagcatatagatgctgaattgacgataatgttgcttggtaaatataata

SEQ ID NO: 9989 - DNA, 62 bp, Glycine max
agcttattataaatgaatatatatatatttatatatatatatctatatatatattcaagact

SEQ ID NO: 9990 - DNA, 690 bp, Glycine max
  unsure (1)..(690): unsure at all n locations
atagtcntatactgatgtcccnattgaagtgancctatgantactcaagcttcagcattctgatgcccangctgctacagaagaatcatncanacaagatgatactacatcatattccttccccgcttctgcagagccattacacgactaaactactnngaagtntgaatttntttctttctcttggacacntttattttccccacattttcangagaagtatataatacataccatctattcccccctttcacctgcaattctgtggagttggatagtttggtcagaggttgttgtgacaaccactatcatcgtgcgaatggaaagattctntgtggtgaataagtgcngtagaaaattatgacactcacgttntcattctctctctctctcttcggntggggttgatacacattannnaatgctaatgaaaaattagggaagtatgacatacttgtactgactccgtttaanggcgtgcctactataaaattttttaanataattanaggtcaatacttaatttgggcttgtngagttgaaatcatgatatgtcggggcttgtacagatatggcacttggcattctgtcctactggagattactngagaccatacnttggatactattatccngtggtcggctataactattctgcttatatagtatatgacgacataacgataactt

SEQ ID NO: 9991 - DNA, 383 bp, Glycine max
  unsure (1)..(383): unsure at all n locations
agcnttgatgatatggtcttcactcgacttatggatcatagtgggtctaaaaagaggcaaatctgatcatcatgctttgataaatgccaaaaaaaactagggcaaatgaagaacaccacctttagcacaaacctaaatcaaccacaaagtctgtctaccgcacttccaatgacgaacaccacctttagcacaaaccaaaaacaccaaccaagaaatgaattttgcagtgagaaagcctgtagaattcaccccaattccagtgtcctatgctgacttgctcctatatctacttgataattcaatggtagccataaccctagccaaggttcattaacctccatttctccgagaatacgactcgaacgcaacgtgtgcttgtcacg

SEQ ID NO: 9992 - DNA, 236 bp, Glycine max
  unsure (1)..(236): unsure at all n locations
atggcatataacctccataaatacaaacatcaatgtannattagagcaagcttatgcgcatatnttcttacgaacgttctcttgcacaagacattctattaattaagaaaaatgcacccatatacaatcaaggcagcttcgttacctagattatntacacgtacttccaaggtgtatntgttacttacatcacacacatctncttggctaaatcacatacatgcacactcaaagca

SEQ ID NO: 9993 - DNA, 416 bp, Glycine max
agcttataagaacaaaattgcctcattctttttccaaatatgcatgtgaattaggacgcatcaacaagaatcaagccaaggctattgtgcaagcaatcaatggggcaaaacacaccaaatgattatgatgatggatggctcaaattctcacaaaggtaaactcatcactttcaaattgagctttcaaaactatcatgacatgtagagaagaatcaaggatttcaagtcacaaaatgtcaagaacttttattttcaaaacaattacccatttcttgaacatatcctataattcaaagaaaaacatgcaaattcgtacgtgcacacaaaattgacccaaaatattaaactgaaaatccgacgaaactaacaacattaacaaattaacacaactaacaaattaacaaaaccaacaaaac

SEQ ID NO: 9994 - DNA, 436 bp, Glycine max
ttactatgtcgctgggacatatctagctaccatatgttcttgagaatgtggacttacacctctcttgtttgtaaaattgaaaattatgtatcaactgcactattatatcattgcattttgttgcttaattggagaaataattaacatttaccctgagagaaagactttgtactcttctttatctttcgctaatagggaaaaactcctctttcactataacatcacttaattttatgtgactacatatgacatgttgtagacaattaaccctgagcttcatcgagctgtagactaattatactacattttgctaatcaacattatgtctattgtatgatatctttctctaactagaaaccattaatctattgacgcatgctattacatttacactaagatgcgtattatcttaaatacacgctagctagttatctct

SEQ ID NO: 9995 - DNA, 440 bp, Glycine max
  unsure (1)..(440): unsure at all n locations
ttaagtcacctgcggcatcctagcntttgagaaaatgggttctgacatttaactttcttgggactgtgccgaatagcttaatccttcgggagagtttgatcttcttcatagggaaaattactggtcaatggctggggtttatttataggagatgtcatctttttctgttcatactccatccttcccctgcttcgattaatatacagaacatgaaattcctcctattgaaaggcaagtaagctgttaccctgagcagactactatatttttggatcctagaatattatcattttcatttgatcacttagtttatttgctcatcgctgctaattacttctcatttgtacaacatcttgaccagttagatacatgaacttaaaaaccttgcacatcacctgttgcacaaccattattaagattgtgtatctcaatttatctgt

SEQ ID NO: 9996 - DNA, 392 bp, Glycine max
  unsure (1)..(392): unsure at all n locations
gatccttaagtcacctgcggctgcagctatactatgactttagtcactgttgttacattacagatncatgtncattcttgtccattgaactaaagttttacagattcatgttcattcttgtccattgaactaaagttttatggttttttttttatctgcattgcgattcactaaattaaatatgatcttttagattcactgcctattcatgctactagactttctatatctaaattgtctactaatctttggttttgttgatatgaactattaacttttccaactcaaaagctatcaatcaatgcaaaagaagcttcttggtattcaaacacaatggaatcacacctgcaattcagaaaaatgtttattcttccataagagtacaaatgttg

SEQ ID NO: 9997 - DNA, 155 bp, Glycine max
  unsure (1)..(155): unsure at all n locations
tctcttccattgttgtttcttcatttttctccatgtatctcctcacatgtcttgtgatanatgttgttaacatgattctntatagtntccaccgattaaacttgctatagaagctagaattgattntctatggttcnaatttcttgttctttgtc

SEQ ID NO: 9998 - DNA, 427 bp, Glycine max
  unsure (1)..(427): unsure at all n locations
agcttggaacatatagattgaatcctatttcctctttggacttagtcaaaatatctgttggctgatcattagaactaataaactcagtggtaatctccttggacaataatttctctctaatgaaatgacaatcaatctctatgtgcttagtccgctcatgaaagactggatttgaggcaatgtgaagagttgcctgattatcacaatataactttatttgcaccacttcacagaacctcaactcttggagaaattgcttaatccacataagtttgcaagtaaccatagccatagatcaatattcagcttctgcactggatcgagcaactacattntgtntcttgcttttccaagaaataatatntcccctaataaaaacacaatatcctgaggtagatctcctatccatggaacaaccagtccaatc

SEQ ID NO: 9999 - DNA, 167 bp, Glycine max
  unsure (1)..(167): unsure at all n locations
atgtatacctgcaggatcacataacangattatttaccaaacacaaatgacaagtcatcagacaggggtacctaggctaatctaacacttcagtgaatacccatcctggtactcatcctaattggtcatagaattggactatatgtaattacgatggttcaatgaat

SEQ ID NO: 10000 - DNA, 354 bp, Glycine max
gcttacttgagtcactgtgctcgggaattcatatcatggatccgcggctaatagttggaatgactagaaacttgacaagtttgctgatgtaatttaacacttgtgaaggtccattttctgtattacaaggttaagagaagaggctgtgttcaagccacaacaatgcgatctgcatgtaagctgtgttggttctgccctccgtatggctaaaagtaacgattttttctgtaaattcatatgataaaggctatttacgtacaagtacaacaagattattcaattttttaaaggttagagctcgtctttttgaaggagattattattacaaatcaacattaagagactgtctgattc

SEQ ID NO: 10001 - DNA, 613 bp, Glycine max
  unsure (1)..(613): unsure at all n locations
ctgtcactgaggccatgagtctcagctanannattatgggttaccagtgtatgtncancanagtctttatatgtatatacattttttntatttttganatagtgcaatgagtgtggatactatgtcatgcattggatgtggtgcatagtcagcggcgggttgaagaatgaatggaataaggtangcatactataagaataagtaatcagttnggtggtatgaaatcctaactcaattggtgatgtacanaactaattttaatattaacattntgtagttggtttagatggacaacattgacaatgacccatganacactacngagaaatggcaacctatattttcacttcaaacatggaagtatgacaattagatgcatangaccatgtatttgaactaatgtttcattgtatgctcatgataatatggcatacattaatcacatantgatagtattctaaatttatgtctatcatggcatgttcggtacaatgactatccatnatagtgtttgtgtgcactgtgatcngtacgntcgatatgactcttgcaattggatagagacaatngacttctgctactagcatattggactttacttgtactgtgccct

SEQ ID NO: 10002 - DNA, 380 bp, Glycine max
agcttgcttctacattcaattgttttatattttcatggatggtaagggtttgtatataccatgagacaaaaaccaagaggccaacaagttggcccaacaagcttccaaatataaggagttagaggtcgaataacatgattactaatggcttgaggcggttgcccaacatataccgttggctgataaagattggcaatgtgagctaatagactacttggaggaatagtttaccaaggcaagtgcagtgataaaaagaaaggctctgaaatacactttactaaacggtgatctatatagaacgacaatggattcatcgtgattggaatgcgtaaacatgactgacgctctgataattatgggcgaggaacctgaagggatat

SEQ ID NO: 10003 - DNA, 425 bp, Glycine max
  unsure (1)..(425): unsure at all n locations
tgtccttaatgactcgatacggaacatganactaagctatatgataatcagtgatcagagttgatatactgaagattctatatccataaaaattcagatgatcacaatcagataagaaagtgattcagatcagaaaataatcaggtcagaaaaataaaaactccggaagtgaagatttataacactaccatttgtttaaaaatttacaattttggtaccaatttactttggaatcataccgttctgatcataccatgcaagtgttaaacttacgatcaagtcatattaaatgatatcaaatgatgatcaggtgagaaataatattaagctctccaagtggacatcagtgatatcatcattacaaaaagattcagtcattcaagtactagttgcataactaacacctgtaactatgtaattttgat

SEQ ID NO: 10004 - DNA, 403 bp, Glycine max
ttcaacaggccactatcacggacatcttccaaggttgaacatcttcagccatggctttgatccgaggcatcactacatcaaagtgaaaatatgggcacgagaatgcatgacagtataattgaatattaaaaaagaagctaacaaatacctatcgcatagagatgataaacgaatgccataaaggtactaaacatatgcatattcaccattactattgcatgtttttggagatggaagaaactaatattccatttatcatccatcatgcactgatctattgttctggtggcaagaaaactgtttgatccaacagcccattcaagagcactacacctgtgtaagaagtggtgccgcttcttcaatgaaggaaaatattcgttgagccattgtatagctattgatg

SEQ ID NO: 10005 - DNA, 541 bp, Glycine max
  unsure (1)..(541): unsure at all n locations
nttgtcctgctangcattgaatanacactgantactangcttcgcgctgccaagagtcagagatactntntgaacgccgaatgatcgngttcttctagnnactgcntatatntnnnanananaanngnnnttctttaattcttctttatccatgagatntatgtaaacaacaatatttaatgtgtgaagatgcacatggataaaaatatagaaaccataataataaccatagaatatacttacatgccacaacatgaatagctattatttaaatatattataactaaattctttaataatcaacctaatataggcagatttagttgacttatatatacattatgcatatgatttaaactaaatgtaattctaactttttttttaccgttaattcctataaccactaaattccaccgttaaaataatattatacaatttgtatataaaaataactttacaataaatatacattaacaactagtatgtgtgtgacaatcattataactacatctactctctccactagtttcaaataaatcag

SEQ ID NO: 10006 - DNA, 415 bp, Glycine max
agcttgtcaattaaaagaagtagcatagttgatgataacgttgttgcaagtggaaaactaaatgtaagtaagaaagaaaccttaatgttttgccctcaaaacatgtattgagttttggttaactccataaaataaaaaaacatcccggtattcttctacatttatctgctacgtattttgtccaaccatgccatagagcattttgttattctccagttgtcttttgttgttattttggtgttttcttctcatagattttattaaaatttacaggtggagattttgaggaggaaaatggagggattgtcaaagggcatattattacagagaatggaggaagagtataattcactgctgtccactgctagtagttctctcgctagttctggttcacattccaaaagactttgatatc

SEQ ID NO: 10007 - DNA, 187 bp, Glycine max
  unsure (1)..(187): unsure at all n locations
tatattatnntgcatgatagtaagatcaaagaaagagtanaatcattngttntggctttngaccaatggttntgtatatgccttngcagtataagtgcagcacanaaaccttgttcttaatcaatgctatttccatcccatttcagttattgcatcggaattatcaccacaataattcctaaagact

SEQ ID NO: 10008 - DNA, 434 bp, Glycine max
agcttgttgactgagacagaatagaaatgtgttttatgttgttgattgtttttggttactgatacacaaaatcaaggtctacaaaatgcatatatgaaatagacatgcaacgagaagcacatgttagcactctaagaagcaaatttgataagccaagttatctctttatatattatttgtcttacatatacatttgatggccatggatgtatttagtgtaaatatggtaggttattgttatatttttggtgaacatgcaaacatcatgtcctaatgtgagtctttgtagctattataaattggaccaattcacatcttctgttagcgagattcgtactcctggtacctccattacatataatacaagtattagagcccctgcaatgcacggaaaactggtttattgtagaatatcatgaactataactttatac

SEQ ID NO: 10009 - DNA, 249 bp, Glycine max
  unsure (1)..(249): unsure at all n locations
gcttctcttattcgtcatttcgattctttcttcgcttaacgcctcttccgttattaagccgtttctacctaaaatgataaatgaattcaccgatcattggtgtatctattaatactttaaatgaattaacgacgtcaccttaacctcgtaaccaaaaagtgaatatataaatatcaaatatctgaaataatatanatatcaatatcttgataaataataaaaataatcgacgtttttggaagttctgat

SEQ ID NO: 10010 - DNA, 417 bp, Glycine max
  unsure (1)..(417): unsure at all n locations
agcttataatatattgatatgctcgaaattatacattgtaagctctcgagaaattcaaatggtcataacttttcacacggatgtccgattcgggcaaataacatatcgagacgctcataactaaacaacggaagctatagagaaattctaatggtcaaaacttttcacacggatgtccgattcaggcgaattacatatcgagaggctcaaaattgaacaacagaagctctcgagaaattcaaatggtcataacatttaactcgaatgtccaatttaggcgcatcacatatagtgacactcgaaattgaacaacggaagctctcgtgaaattcaaatggtcantaactttcacactgaggtccgattcaggcttataatatatcgatatgctcgaaattaaacatctgaaactctcgc

SEQ ID NO: 10011 - DNA, 657 bp, Glycine max
  unsure (1)..(657): unsure at all n locations
ctgatcatgtgaccactgaggcactatgatctaagctgaatcgacaccgtgtgacactatgaccatntgaattacgagagcnnttcgtgttatttttctagtgtcactatatgtgatgcacaanaatnggacattcgaattanatggtatgaccattngaatntctcaagagcttncggtgttcaattctgagcgtctcgatatgtgattngcctgaatcggacatncgtgtgaaaagtatgaccatntgaatntctcaagagctanntcgtgtcaatgtcgagcctctcgacatattatgcgcncgaatcgacatncgtgtgaaangtatgactatntgaaattccgagagttctgacgttaatntcgagcgtatnatatattatngcctgatcggacatcgtgtgaaaagtatgaccatttatttcatgagagctttcgtgtcaattccagtgcactaatatgatgcgccaaattgacatcgagtaaatgtatgaccattgattctcagagcttcgttgtcaatttagcgttcgtatggtattgctgatngatatcggtgaaagtataccattgattctcagacattgtgtcattcagcttctctatattcctatagcatcggtgaagttacattaatctcaagctcaggtattt

SEQ ID NO: 10012 - DNA, 408 bp, Glycine max
agctttacaaaatccggcatatattatttatttagacttaatgcttaataacttcatgtacaaaaaaattattgattaatatttatataataatttttacatgaacatataataaagtatattaaaaataatttattaaatatatttttataaaataattttaaattactttattaataatatcttgaattaaattaattttattttttggaacagtaaaaactacaagtaccattcacaaaaaataattctatttaagtaaggtaagatcattatatgtgacaaatttctttctgtgagtgtttaacacaacttcactattaaaaaaaacttaaaataacaagttgttaagttcaaggattaaattgaaaaaaaactttagtcacaccataaatgtaagttgtcaca

SEQ ID NO: 10013 - DNA, 351 bp, Glycine max
agcttattaaggaccgacagcatgtgctttcaaaattctccggtacaccatgccggtgaagaagaaattgcagctgatgagagtcttttaatttattgcaagcctgttgaactgtacaatattctctaccgccgcgctcttcaaaatgtaatataataaatacattttttttcttgctgaattgagtttgtgctgtgttgtcatatttcaaatcttcaatttactctcctacttttcataattagaacaatccaatttaggtcaaaaccttttactatcattttttttttatgattaccttttactatcatctgagtgtgcgtgacttttttttcttttcttttttaacta

SEQ ID NO: 10014 - DNA, 536 bp, Glycine max
  unsure (1)..(536): unsure at all n locations
attccttactgttccccagacgtgacacatgatactaagcttctgtctgtagncantgagacantaatataatgtatagacaactaatgcgttatatgannnaaaaagatctgtaaacanatgcatagtataccatgagcaacagaaaactcaccattaagacngagctcgttgatccttttccatgcataagctgctnttctcaaggtgtnttaaaacactcttcctataagcgtggtctatcatcttctgaacccacaatatataacaaccatcaggttcaatttaaaaactatatctatgttcccaactaataaaaggtgaagaangaagcgactatccatctaagtgagtgagacagtattggaacatatactgtcaacctctaaaatattttactatgaaagtaatattttctctttataggtatgaaatatcacaacacgaaacagtcttttatattcatcaaaataacaacctccaatgaaggagaatgaagagagatacgtctgacagaaatctcagcaattcaacct

SEQ ID NO: 10015 - DNA, 404 bp, Glycine max
  unsure (1)..(404): unsure at all n locations
ttcaaagacataaaaggaatgaggtttgagttctgaaatgcctgaatgcattcaaaactctcattggaaaagaaatccatgtcaatgaatttatgatcgataatggaacgagaagagaaaaggtttgtgtactgcatctgttgttcttctgatgagaacagcgaggaagtggaaaatggagaagggaatatgcgtttcctgagcctcggaatgctgttcgcttcgactcgaagaacccttgcgcttctttgatggttccatttcatgttcctacaattttccaaacaaagtggcaaaagacatagaagaaagatctttactttcagaaatagcagctaccttgggctgccattcctacctaagcatcttaaaacntaataattagctcttcattatggaatatt

SEQ ID NO: 10016 - DNA, 638 bp, Glycine max
  unsure (1)..(638): unsure at all n locations
tgaacttgactganctccccattgacgtgnactatgantactacagcctgtgactctnggcantntctntaanactagtcacttaaaaagttgtgactnttgattaaaatcttagaaataagtcacttgaagaatngtgactnnttggaaatgtatntnntgaaatcaatcanctggtaatcgataccattaaggtgtaatcgantacacaacaacagatgtgattcttcatttngaattttgaannataannacgttagaagctctgggtaatcgatacangtgtngtgtaatcgattacanctagttataatgatntgaaaactgtanacacaagtngtaactcttganatntaaatctaaaccgtttaaacactggtaatcatactaccttctgtatcgataccgagagtaaactctgtgtatgaattgtaaaactgtgtctactcatgttgaaaaaaatagactatctgatgagctctctgatctgatctaactgatatctgatctgatctgagctgatctgatctgatctgaactgatatgagcttgaattgtactctgatcttgctatcaatacctgaggctgctccatattctatttaaggcttctacttacagaattattttaggctttg

SEQ ID NO: 10017 - DNA, 434 bp, Glycine max
  unsure (1)..(434): unsure at all n locations
agcttaggctaaattagtctaaactttcttaagctatttaagctaagtctagtccaacaagaggaatccgagggtaaagcttagtttaagttagtctaaacctaggagggatttctaaatttaacctagtccaactagagggatctgaggatgaagcttggattgattcagtctaaatttaggctttagatcattacaaaatatgcttagctgagcaacatcttcaaaattgtgattaggacatttcctcagcaatgatttgaattactcctatacttcacaaaagggttcttttgatcctttcctgaatgtagaaatatctgactttacattgatatacctagatggagggaaaaatctatcaagaacttttcttccactatgctccagcttgtcaaactntgatttggatgagattgtagccatgctttggc

SEQ ID NO: 10018 - DNA, 425 bp, Glycine max
  unsure (1)..(425): unsure at all n locations
tagtgacatccgtgacttgatcttgagcgaagatgttcgcaagagatattcatgagaatcttccagtcatgtttccaattcagcattgaatactgaaggcangggaaggactacctagaanggtcaaaatggtcgaggcagatcaaagtcaagagggaaaggtcagagaaaatttcaaagtgacgttacttgttggaattgtgacaagagaggtcactttagcaatcaatgcaaggcaccaaagaagaacaagtcgcacaanaacaagaagcgcgatgatgatgaatccgcanatgcagcaactgatgaacttgatgatgcattaatttgcagtttggatagtcctgttgattcatggatcatggactcangtgcgtcgttccaaactactccctctaaagattatcgtctaactatgtttctgg

SEQ ID NO: 10019 - DNA, 419 bp, Glycine max
  unsure (1)..(419): unsure at all n locations
nnagcttgcggattggtcttcactggggaaaggatcgaagcgagtctgaaaagaggcaaatttgatcatcctgctttgatgaatgagaaaactggggcaaatgaaaaggatgagaatgaggaaggaacccatgttgtggctgccattcttacatggccaaacttcccaccagcccaacaatgtcatcactcagccaatattggcccttctcattacccatcacccaatcatccacaaaagccatccccaaatcagccacaaggcatgcctgcttaccacatgcccaatgcccaaacaccacctatagcgcaaaccaaaaaggaattttgcagcaaaaagcctgtaggattcaccccaaattctggtgccatatgctaacttgctcccatatctacttgataatgcaatggtagccataa

SEQ ID NO: 10020 - DNA, 411 bp, Glycine max
gtgcgatcactgttgctgcctaaacccattccaggtacaggaccatctcttagcataactcgggctaccatcagagaggcaccaaacaaacgtggttgtaccagaggagactccacataagcattattcacgatctctaacgcttgaaatgacgtctctagcgactgctgcacaacttcgacataaggcatagaagagagacaactcactagtatgttctacttgcccgacactataaccagctgaccctacaccacagatcataatttctggtgcaatgttgatgggaccaccccaacagagtggatccaatgctgacctaacaagcaactgtatgcggtgtttatgtccatcaattggaaagatatctggcacgtgtgtggcccaatctgaatcacgagatcaatctct

SEQ ID NO: 10021 - DNA, 436 bp, Glycine max
agcttgtcgggattagattttcatcaaaccatactttctgtacattaaagcataatacccaacttgagattcaatgttaatatcgatcattgttggaaaacaatattataatctttaattccttaggtgtgaagacctaagttccttgattaaatgtcaatcccttacacatttgatagaggaagctttaagcttaatgacctaaagataaccaataaccctcatcatattcctagctccaaagttaatgagtgttctagcacaaatcaagataaaaagagagtattttccaatcacaatctcatcctaaaatcaagctattaaagtatttcccaataacaaaccataacaaacattaagaatagaggcaaaacactaacattgaagtataagatgcatatataaacatatttcaaacaaaatacatgagaatata

SEQ ID NO: 10022 - DNA, 481 bp, Glycine max
  unsure (1)..(481): unsure at all n locations
nncttgaaagtgttgttnttcaccttatcactaagccaatccgctagcttagcgagcgtccgctaagcgcaaggaagaatctagaagaagatgagctatgtaggttcgctaagcgcactgcttcatctcactaagtgcaccgctttagtccatccgcaaagcgagaaaggcacgcactaagccgaaattcacaattgtgtgctaagcggttgagaattgcactaagcgcatgagcataaacaaggccacctatttaagcctaaaatcatattttgtgaagggagtttgggctgagagctgaagctttgcatgtctagtgattctagagatagaaaggtccaagttcttgagagttntgagagattttattgtgtgaagatctgcagagaccagagcttgaagaggaagctgttctgagagcttgagatgagtttgtgagtggntgtgagatcctagaggtgaatgagacatnctcaccact

SEQ ID NO: 10023 - DNA, 441 bp, Glycine max
  unsure (1)..(441): unsure at all n locations
agctnttggaaggatcaaaaagtgccttatgaatcctcccgtgcttatgccaccagtacctggaaggcctctcattttgtacatgacaatcttggacgagtcaatggggtgtatgctggggcaacatgacgaatccgggaagaaagagcgcgctgtttactacctaagtaagaagttcacgacctgtgagatgaattactccttgctcgaaagaacgtgttgtgctttagtatggtcatcccatcgcctaaggcagtacatgctgagccatactacctggttgatatccaaaatggacccggttaagtacatctttgaaaagccagctctcacgggacgaatcgcccggtggcaagtcctgctatctgagtttgatatagtctatgtcacccaaaaggcgataaaaggaagcgccttagcagattatntggctcaacagcc

SEQ ID NO: 10024 - DNA, 463 bp, Glycine max
  unsure (1)..(463): unsure at all n locations
tctaaggaggtgagcttagttatgagaggggtgtgtgtagctaagctctagcttctcaaggaagttttctcaaagaagcttctcaaggaagttttctcaagaaagcttctcaaggaagctacctagtctataaatagaagcatgtgtaacacttgttgtaactttgatgaatgagagtcttgtgagacatacttcaaagttccacttctatacctcttttattccttcaatttcgtgctcccccctctctctttctctccctctttcttttcctccattgaagcatcctctccaagcttcttatccaaggctcatcttggtggtgaagctccttcttccatggcttattccttaatggatggcgcctcctctcacctattttcctttntcttccgctgcatctccatggtggaaaatcaccattaaaggaccccattgaagctcanagatccagccttcatag

SEQ ID NO: 10025 - DNA, 395 bp, Glycine max
agcttcgttgagaagattcttagagaagctagagcttagctagctacacacacccctctaatagctaatctcacttcctttagatgagaagctatatcttagctacacataccccctataatagccaagctcacccctatgccaaaatacatgaaaatacgaaaaagtccctactatcaaagactactcaaaatgccatgaaattaaagactaaaatcctatactactagaatgaccaaaatacaaggcctaaaagaaggaaaaacctattctaatatttacaaagaagagaggaccaaaccttgactcatgggctcagaaatctaccctaaggttcatgagaaccctagggccttctttagcaactctagcacaatcctcttgaagtcttctat

SEQ ID NO: 10026 - DNA, 477 bp, Glycine max
  unsure (1)..(477): unsure at all n locations
tcttgggcaatcctcattccagcgatcagttggttnttgcgtaagagcttgaacaacggctcacaaatggcggtgagctgcgatatgaatctggcaatataattcaagcgtcccaggaaacctcggacttggctctctgtacggggttctggcatctcaaggatagccttcaccttttcggggtctacctctatccctttctggcttacaatgaaaccaagcaatttccctgatttgaccccaaaggtacacttagcggggttcaaccttaattgatatttcttaagcctttcgaacaacttccgcaggttgactaggtgttcttcctcggatttagatttagcaattatgtcgtccacgtagacctcgatctcttgatgcatcatatcatggaacaaagctnaccatggcccgtgataagtngccccggcattcttgagtccaaaggacatcaccttgtaacagaacgtnccccac

SEQ ID NO: 10027 - DNA, 403 bp, Glycine max
  unsure (1)..(403): unsure at all n locations
agcttgcctcanagaggtccatgaaggacaaggcggccgaaggaactagttccgctccggagtacgacagtcaccgctttaggagtgctgtacaccagcagcgcttcgaggccatcaagggatggtcgtttctccgggagcgatgcttccagctcagggacgatgagtatactaatttccaggaggaaatagggtgccggcggtggacatcactggttactcccatggccaagttcgatccagaaatagtccttgagttttatgccaatgcttggccaacagaggagggcgtgcgtgacatgagatcctgngtgaggggtcagtggatcccgtttgatgtcgacgctatcggccagctcctgtgaatatccgtggtgttggaagagggccaagaatgtgagta

SEQ ID NO: 10028 - DNA, 418 bp, Glycine max
  unsure (1)..(418): unsure at all n locations
agcttcagtcaacatcatgtgagataggaataacatataattcatagtatatgacaattaataaataaattggaagtaattagcaccaatttagattaagatgagaagctgataataacatgtcagatagtaggggggaaaattcatgattagagttccattttcagttcaaaccaagtcttaatgtcgtaaatggtttgaaattgttgactagtgaggaactagaagcaggttcaaagtaagaagcataatacatatttggaaatgaaatcacacaaaccacagaaatcaatggaaaattggaaggtaaactgacaagctcggtgatcagttgggatgcaaattaagtattagttcataaagggaactnttaagtctagtaaacaaaagcattgtggaggactntatataatatagc

SEQ ID NO: 10029 - DNA, 332 bp, Glycine max
  unsure (1)..(332): unsure at all n locations
agtatggaatctatccttcctaagatggagctcaacctagtcgccctcattaagaattagctnttttcttcctctattgcctttagtggaatacacctttgtttggttctctatttggttcttaaccctctcatgcaacttctttacaaactctaacctagattccccttctttatgtataaaagaagtgtccagtggaaggggaatgangtctaacggtgttaggggattgaacccatagacaacttcaaaaggggattgcttggtggttctatgaacccccctattgtaggcaaattctacatgaggaagatacttatcccaagacttat

SEQ ID NO: 10030 - DNA, 427 bp, Glycine max
agctgtacaacaaatgccactctactcctagtttttaaaggatatgttaacaaggaaacacaagtatattcaccaggaaaacattgttgtggaaggaaattgtagtgctgtgattcaaaagatccttccacctaagcataaagaccctgggagcgtaaccattccttgatcaattggagaagtcattgtgggaaaggctcttattgatttgggagagttggagatcatgcacactaagatgactttacaacttgctgaccgctccattaccagaccatatggagtaattgaagatgtgttggtcagagtaaaacattctatcttcctggcatactttgtggtaatggatatctgtcaagataatgacattcttgtaatattgggaaagctgcatagtttatatggggagaaagaagttggagttggg

SEQ ID NO: 10031 - DNA, 473 bp, Glycine max
tcatccgtagatccctcatttaagactaggcttagattaaacaacattatcatcacaacatattaagaaaactcaaacttaatccacagatccctcatttaagactaagtttcaatcctgcttctatcaagttctaaggaaacaatacatttctcaatgctaacgtcacctaactaaacatacaaatgggtgatcagatcaagagcatgtagaaattaagcattgaaagaagcattgaacacagaaaacacaatcaattagatattaaagtaattacatcagttgttccttagaaattcccaacaagagtgtttagccagccatacagaaaaaccctagcacaattgagattaagagtagagaataattgttccttacacaagaagggggatccctcctcctcttctcagcatttcacaatcactctacaactcactaatccctctctaattataaaacctaggtctctctac

SEQ ID NO: 10032 - DNA, 435 bp, Glycine max
  unsure (1)..(435): unsure at all n locations
agctntgttagtttccaccaaagaactattctagccaagttttgagtagtctctcttttcaatcatgttcttgtatatgcaaaactcgaatatgagatgctggttaatggatctcaacttcgtttcacttgaaccaacataatgttggttgagattcatggtttgaatttatttctagaatgaaaaatttaaaaagaattataaatataaaattaaaacatctattaattaagatattaaattttattgaaaaaattaaacaagttcaggtatacatgaataatatctagaatattaataattgtttctattactgtacctttataataaatagtcaaagacatgtccaaaaaaatgttttttatgaagaataatactactcatttaatccaataataaaatattaattacctttaagaaaaatagttgataact

SEQ ID NO: 10033 - DNA, 458 bp, Glycine max
  unsure (1)..(458): unsure at all n locations
tgaatcccttctccttctctctaatgcttggaaaccctagtagagcaacgagaggaaaaacttcaggaatcttagagaaccactagagatgcttgtatcactaccacacttttcgcgtgagcctgcttagaggtaagggatgagtttatcacaattgggttaaaatgaacatgtgtagggatccttaaaggatcaaattggaatttattttgggataataactatattgtaattctacctttacgaatataattatgagattnttgtgtctgacgggccaattgatgccttgatgcgaatnggttgataaaattgagtgctcttggtgttctcatattttttacctatgatattgattcctttgatttcgatatgaatatgtgaaattgtttgaagggtttaatcatatgaacataagatattaatattatagttgtgtgacatatatataatgcatg

SEQ ID NO: 10034 - DNA, 464 bp, Glycine max
atacagcacgcctgcaagcatgcaagctataaacctaagcatgttttctattctaaggttcaaaaaatacgaaaattaaaaggcaatgtagaggatacttacttggattgttgaatagagtgatgcaaaggaagcagagaagcaggaaattggtttgagcaccgtgcagatatcgcgaaatgagagtgagtaagaagaatgtataaatgattgcacaaaagtaactgcctaaggcagttaagtcttatttttggcagtttagactgcctcgcttagcgcaggtgactcgctaagcgagcactcaattacgtttgagttttcatatttcaaaatcatgcgcttaacaggtagactcgcttagcccaattcaaaaattaaaattctagagaaggatttgggcttagcgcgaagggtcgtgctgagcgagttctgcagctctgattggtctgcaactctcgcttagc

SEQ ID NO: 10035 - DNA, 412 bp, Glycine max
  unsure (1)..(412): unsure at all n locations
ntgcacgtatcagtcaagtgtatggaccatatcgtagctcaagtgctcatcgataatggttccagtttaaacgtgatgcctaagagaactttggagaaattaccattcaatgcttcccacttaaagccgagttcaatggtggttcgtgctttcgacgacacccgccgagaggttaggggagagatcgatctcccagtacatataggccctcacacctgtcaagtcaccttccaaataatggatattaaccccccctacagctgtctgttggggctcccgtggatccactcagtgggagttgttccttctacactccaccaaaagttgaaattcgtagtggaggggcatttggtcatcatgtcaggcgaggaagacatcttggtgagctgcccgtcctctatgccttatgtgg

SEQ ID NO: 10036 - DNA, 403 bp, Glycine max
  unsure (1)..(403): unsure at all n locations
agctataacaccattaagggtaaagactcttcccgtggcctttggatgtccagtttgaccattcgggcctccaccatttcgctctttcttgggtcgtgaacaatctctttgagtgtgtcccttttgtccataattaaaacatgttgcgcctatatcaagacaattcgaggagatgtgccctggcttaccacatctgtaacaaatgatatgagtggagaaagtattgggcttgctaccactaccacctgcaaatcccctagcaacagtcctctgattgtcatggcggttaccatattgcttagggggtttcgaatatggttttcctcaatgttgaggcccattctttttgttcctcattggacctgtactccaataataggccgccctatctcgngagtcttca

SEQ ID NO: 10037 - DNA, 493 bp, Glycine max
  unsure (1)..(493): unsure at all n locations
ctttatggnccatgaacgcaatttgatagctatngatgtaagcgcctgactgccatgatccatcttcgcctatctcgactgagtgtcattattacatgacaggcccaagttcgcttgcacccgctcgacgaccgtgaccgtggactggataatatcttccacgctattaaagatcatcgacggaagattgccccggacttcgagagacctttcatgtgtgataaggctttcttccgaggagccgtcgtgcttacccacatgggtcgctaagagcttccatgacccatgcactctgacgttgtgcatccatgtacacatataatctgtngcatataagatgcccatcatgttacctagctggcttgtgtcctagtgacgccaggagtacccatgctgcattcttcgcacatctgtagactagaacctgacctagcttaccctccttgctccctccatgactacacacccgacgttgtctagcatgggtcctccn

SEQ ID NO: 10038 - DNA, 409 bp, Glycine max
  unsure (1)..(409): unsure at all n locations
agcttataaaacaatagtcagactcatttnttataaaaggttcatttgtttaagtttttttttaaaaaaacatactaacaaattaataattaagcagctgttcatgtgtttgtctaaattatttttttgttaagaaaacagacaattgcttttttttaatagataaactttatctacttttagaaaaacattttaaaaacattcttaaaaaaattagtttagacaaatttgcccaaagtctaacgtacctattctttccctagttccctgccttgagtagtagttattttatttttataagccacatctaagtaaaaaaaagaatatattatgaattaaaaagtcagatttatgttttataaagaagtctataacaagtaacaggtcagacttaaaggccagaatggat

SEQ ID NO: 10039 - DNA, 402 bp, Glycine max
  unsure (1)..(402): unsure at all n locations
ctttgngaagtcttggtggcatgttctccataacttggaaaccaattaagacaggcacaataactggccctgttgnttttggaggttagtattttctctccatgctcatattctttaattgagtaatttacactggcaacccctgaagtttcatgagattgcacaaactccccatgtnttttaaaggattacagctacctcccttgtaagggggacacggtataatgtttttcaaacaattaaggtggttagtgcaatgttttttgaacaatcaagggagttagtgtataggtagatatttatggagtgtcaatataatntactccttttaatttcaactaatttgggttgcatgacaattgtatatgttatgtgcttcatgatacagatgatccggtgaga

SEQ ID NO: 10040 - DNA, 442 bp, Glycine max
  unsure (1)..(442): unsure at all n locations
agcttagaaaaagttaatttaatgtatattaataaatttatcttaaattcataatttttttcaaaactatcattataattaatattcctctcttctaattatttaccaatgcattctttcctttaaattatagtttaaaaattattaattcaagaaacattatagagtgaatcttataaaaatgaacaaacataattttaaacttaattttataaataagaacaaaagaagtaaataataaaaatattatttaggtcattaacagtttatttgtaaaaaaaaaaaggtcattaatggtttatattaagcaattttgtatagagcaaattacaacaaccttcctttaggtatactctaattacacatgcattccttcctttntttttcaccctacacaaaactgcctaacttttgcatcctcattgaacaagtctcccctata

SEQ ID NO: 10041 - DNA, 448 bp, Glycine max
  unsure (1)..(448): unsure at all n locations
aagatgaaaacagtataatgaaatatgcaaggaacatgactcacgctntaataggcctgaacttcttagtgctatgattcggcatagatccattcaagttatccagtcttggcaatctctttgatataaatgcagcttcctctctttttcccccttcctctaaagcagctatcagatcatctagacatgtcaatttctgatgtaaaccgttctccactaattcatagcataaactaaatgcttctgaaaccttgttaattntacaaagattcaaaatagttgcattacacaaatcaatatcaacattctggtgattntccaaactaaaaagcaacaatttgcatgcttctgacagctttcctcttttaagggagaaatgagccacttcttctatttaacatagtacccatcttataaagcanataataatctcaaatgctctttcatg

SEQ ID NO: 10042 - DNA, 445 bp, Glycine max
  unsure (1)..(445): unsure at all n locations
agctntaggagaaaccataaaaactaatgtagttcttaaacaaaaaacaattgaggaaacttcgccaagaatccccattgaaaaacctttattcaaacctttcaaagttagtgagaaggctaaaagaaaaattagggaacttagaaaaactaaatccttaattgaaggcgtaggtgacaaccatagtgaattactaaacaagattggtagtttacttaaagtcattccagataccccccaagcctcggaaaatacttccaaaatggtaacaagaagtacctccaaattaatcaatgttattaatgaagatagtggccaaaactcagataacacaactgagataggatcagtgtcagagaagaatataaatccaattaattccaaacactggaaaacaacctccaaattatattatcaacgtccaactgcccctgaccttctatta

SEQ ID NO: 10043 - DNA, 529 bp, Glycine max
  unsure (1)..(529): unsure at all n locations
natgtacccatgcatccnctgacactatcaaactaagctgganacaactcgttacataattgatatggcttgggcaacagatttcataagtatttcgttacccattctagaaagagattgctccatccacttgttcaattnttattacacactcttctaaatgctagagaaaatcatcttaaactttcccaataaagtggtagcccaagatatttgtcatgaaaattgtaacgacctgtcttgtcgttatgatatcaccactctaaagtaccgtaaatttaattnttaaatgaaaanttcattaatttgcttatgaaaaatgagagtaaatttttcgcgatatagattcaccaaacaacgcacaattatntaaatgaaatatatatatatatatatatatatatatatatatatatatatatatatatatatatatatatatantaacttagcacacattcacataatagaaagagtaaatagctcatacatataattaaatctatgatgtacatcctcaattcaaaag

SEQ ID NO: 10044 - DNA, 441 bp, Glycine max
  unsure (1)..(441): unsure at all n locations
agcttggacattccattcggaantttacagtttaatctactcgaatctttgcttattataatgtcatcatttcatcatccttccaaagttcctggggaaatagaacttgctgacaatctcatataaatcttttctatggagagtaatcagaatgtctgctctgtaagtgcagtatctcacggagggttaatgcttgatttcaaagcatgatgaattggagagacgaaccagaatagccgcatgcaactcataagcagcctcttcatttttcattgaatttgaatgtcacgtaattggggatagagccacagagaattccttcccggaaattcattctataaatcacgtactaaacgagctgcaaaggagccatctagtgaatgtttaactgggttggagaaaaagaaaccactgcttgtctcanaatcaggaggaacatat

SEQ ID NO: 10045 - DNA, 467 bp, Glycine max
  unsure (1)..(467): unsure at all n locations
cgctgagctctnccaattgactngngattgaaccagagattgagttctgatacaagtacaggttctgcaactcactgcacttccctatctcttctgggatagggcctgaaagaagagttgtgtaaatggctatggtttgaattcttttcagcttccctattgaagaaggaagactcccagaaatgctggtttctgcaaggcctaacaccaccaagttggtgcagtttccaatgtcccatggcacctcacccttaaggtttgtgttccctcctgctctcaacacttggagcgcagttaatgagccaatactctntggaatttcaccactcagtttgttgtcatagagtgtcaagttcacaagacttgataaacttcctatgttggatggaatgtttccttcaagaaagttggcatgcagagctaaagtctgcagtttgctcagcctgcaaatttcctgtgggaattca

SEQ ID NO: 10046 - DNA, 440 bp, Glycine max
  unsure (1)..(440): unsure at all n locations
agctntaaaatttgaattaaaacgttcttaaactgttggtaatcgattaccatatatgtgtaatcgattacacagggcaaattttgaattcaaattttaatagctgttgtaaatcagttttggccactggtaatcgattacatcctctggtaatcaattactagagagtaaattcttggccaaactttttgctacttcaattggaattcccttcctatttaatataccctttctaagactctatagactgtcttgatcatccatcttgaatatctttaattgctttgtcttgaataaagctttgagacgcatgtgatattttggcatcatcaaaacatcggcttgatcctttgtctacacctttatcatttaggaacaacgacctgagtgggtaaacgcacagagacagattctgcaccctttatcattcacgaaccaca

SEQ ID NO: 10047 - DNA, 458 bp, Glycine max
  unsure (1)..(458): unsure at all n locations
tctntgtctaatgaatctatcactttctccctcgcttcccttttctcttgtaggaccgatacctttgtgtgctcgtcctctagcctttgcttatgggttgcagctagatttagctnttctttatatttgtcgatgattgcccacatgttcgccttcgtcctactcaactatttgaacaagcttctctttgaaccttgaaaatccttcaacttgtcctctaatatcatacctttgactcttgactggtctctcttggcccttcaaagcttgagctcactgttgctgccccacaaagcccctcaaaacttgttttggccccattcttcctttcgggccctctntgtttctcgttctaacacttcagttgtggccacattgacgtccctcagcttgtcacactctnttctaaccctaatggttgtcgtcttgaacttttccttgaccacttgtgctctttc

SEQ ID NO: 10048 - DNA, 450 bp, Glycine max
agcttataagaacaaaattgccgtaatcatttccaaatatgcatgtgaattaggacgcatcaacaagaatcaagccgaggctattgtgcaagcaatcaatggggcaaaacacaccaaatgattataatgatggatggctcaaattctcacaaaggtaaaatcatcactttcaaattgagctttcaaaactatcatgacatgtagagaagaattaaggatttcaagtcacaaaatgtcaagaacttttattttcaaaacaattacccatttcttgaacatatcctataattcaaagaaaaacatgcaaagtcgtacgtgcacacaaaattgacccaaaatattaaactgaaaatccgacgaaactaacaacattaacaaattaacacaactaacaaattaacaaagccaacaaaactatcaaaaccaaagaacactccccccccatactta

SEQ ID NO: 10049 - DNA, 468 bp, Glycine max
  unsure (1)..(468): unsure at all n locations
ctgcccgcaanaattactaannaaccatttaaggtccaacgccttatacggtcctctntgctttttatcggttaacatggaccgttcaaaagcataaaatcaacatgtaactttactgcttttgcaagaactacgtaggtctgatttcctcatgacaattgaggatacgtaggagcaaaagccccgcttttgtcgaccaccccaagagatcgttaatggtccaacgccttaacgtttctctcctttcaaaaaccaagagatctttaatggtccaacgccttaatgtttctctcctttcaaaaccaagagatcgttaatggtccaatgccttaacttttctctcctttccaaaaatcaaaagatcgtttaatggtccaacgccttaaatgacttttgttcagttaaaatcgatcttttggaagaggatcaaaacaacttaaccaatgtttagttttgaaagaactacat

SEQ ID NO: 10050 - DNA, 444 bp, Glycine max
ctgcaagcatgcaagctatcactcggaggtccgtattatgtcttcataaatatcgagacgctcgaaattgaacaatggaagctcttgagcaattcaaatggtcataacttttcactctgaggtcggattcaagcgcattgtatattgagaagctcgatattgaacaatggaacctcttgagcaattcaaatggtcataacttttcactaggaggtccgattcaggcgcataatatatcgagacgctcgaaattgaacaatggaacctcttgagcaatttaaatggtcataacttttcactcggaggtccgatccatgcgaatcatatatcgagacactcgacagtgaacagaggaagctcttgagcaattcaaatggtcataacttctcactctgaggtccgattcacgcgcataatatatcgagacgctcgaaatcgaacaac

SEQ ID NO: 10051 - DNA, 427 bp, Glycine max
  unsure (1)..(427): unsure at all n locations
ctgatggtgtcgagaagaaatcacatgtntgtcatcatcatanatgtggagaatgtgaatgtatgtatacatgattntgatgatgccaaagaataatcaaacaaggttgcttcaaatgataagcatttgcttcaagaataattcaagagtgcttcaacaaacaaagccttgtttcaagattcactaaagaccaagccttgccttataacaaagtgctttcaagacatgcaatgctctggtaatcaattaccaggaagtgtaatcgattaccagaagacatggttgagaaatagctgttgaaaaaggttttgaatttgattttcaacatgttatcgattaccatatgtctgtaatcgattaccagcaacgaaactttggaaattcanattcaaaagtcataacccttcaaattataactgtgttatcg

SEQ ID NO: 10052 - DNA, 392 bp, Glycine max
ccaaaaaaaagcctacgggtgtatatatatattttatattttagaatgtaaaagaatctagcaaaacacattttatgggcacggtgataatgataggtaacggacatggcgtagatccatcgaatataaagaacctttcaacatttaaaataccacttcatattacattatgctcagttcaaagttgcatgccaattagatcgaattccttgtatttgaaaaaataatgaacactggcatgacattcgtaatacctttctcgattattaaaatataaataggtcattcctttaatgaaacaaataacaaatgtcccaaaatttatattcaaaagtcatggaaaagcatcagagcatcatcgagtttcagcaatgatgatcccatgagtaacc

SEQ ID NO: 10053 - DNA, 465 bp, Glycine max
  unsure (1)..(465): unsure at all n locations
atgtaccaagaagtcaaaattaatccgtatgcacgtacactaaaaaaataatacgaatatattggatcgacactaacttactattattattcaaacaaacagaaaatgtactataaaaaactcataaattatgtgcagctttcaattcaagatgtttttcaatttcaaaatatatagctataataacgttaacttaataatctttttcttattaaaatgaactaatcacataaacgctattctntttaggtgcataaaaataatatattattgagaatagtgacatattcggaaagaagaagaaaaatagggaaaatggagtagagaataaataaacaacaaataggcggcttacagttaggattaggcgttaagttgtgtagttgaacagtaagctaaaactaatctntatanttttaattttcttatcatggtatgggtaagaagttcgctctatcggaagca

SEQ ID NO: 10054 - DNA, 431 bp, Glycine max
  unsure (1)..(431): unsure at all n locations
agcttgtccaaagcccttatagttgattattcatctaatgataaatntgaggaagactttgatgaagatgagctagccttcatttcatgaaagatctgcaaaatatggagaaaaaaagatggctccagatagaaaatttcctcaagaaggatgcctaaagaaaagatagataaagataaaaactctattatctgctatgaatgcaagaagcctggacacttcaaatttgagtgcccaaaattggagaagggtcaaggcaagaagaaacattacaagaccaaagaaaaggagggtcttatgattacctgcgaagatctggatgacacttcatctgatgaggatgatgaagaagccaatatctgcctgatggcagatacaaccctngaagaatctaaatcagatcaagaagatgagggttaatttaatgaccc

SEQ ID NO: 10055 - DNA, 467 bp, Glycine max
  unsure (1)..(467): unsure at all n locations
tataagaancaaaatgcctcaatcatttccaaatatgcatgtgaattatgaagcatcaacaagaatcaagccaaggctattgtgcaagcaatcaatggggcaaaacacaccaaatgattatgatgatggatggctcanattctcacaaaggtaaactcatcactttcaaattgagctctcataactatcatgacatgtagaggagaatcaaggatttcaagtcacaaaatgtcaagaacttttatcttcaaaacaattacccatttcttgaacatatcctataattcaaagaaaaacatgcaaagtcttacatgcacacaatattgacccaaaatattaaactaaaaatccgacgaaactaacaacattaacacataaacacaactaacaaattaacataaccaacaaaactagctaaaccaaagaacactctcccctcccatacttatacaacacatggtcctcat

SEQ ID NO: 10056 - DNA, 424 bp, Glycine max
  unsure (1)..(424): unsure at all n locations
agcnttgagaagtgaaaaaataataacttatatactgtaaaatatacctcataagtttaactcacttcaaactaatgataaataagtcattactttttcattttataaagcttttcactttaaaagagtaaaatccgtctcagataataattgatcttataaagggtaataattatttcttttagttaattgatttatttttgttgatgtatagaataattagtgttaaatcattcctacgggtcatcaatctgacacactctttttgtttaatcccccacatcttgcaatcgaagtgacgataaccacatataatttttcgttagcagttaaaaaaatggaaaggtgtgactcttgcaacaaaccaaaaggcacatggtaagaaaacagttctgattgggcactacttcaaagaatagcctta

SEQ ID NO: 10057 - DNA, 473 bp, Glycine max
  unsure (1)..(473): unsure at all n locations
ctcaagctgccttcntactctctcgggaatttagcctctntcccactcagancctttagctttgggagccaagttatcccttgcgttctagacttcaaccatttgtgatagctgccaatgacgccattgctacttcccctaagctccttatcttttctttccactctatntcatgctttctggattctctaaagtatcttcacattagcttcattgaaacctcgcacaatgaaaggcgcgatgatttcctccgacggtgcacctctcattgggtaacctaactgtcttatggccagcacatgattataattaatacaacccctcatccctatcaaagggatatttgggaatccttcacatgagcataacactcctgcctttccttctnttcaccgtgngaaccaactaatggattgcttcgtcatgcctgccaagagttcttcccaatttgcttaacctttntagagcacatg

SEQ ID NO: 10058 - DNA, 401 bp, Glycine max
agctcctccctcttgccttttttatattgtgaggagggaagaacaaaaacgttcaaccctcctggtatctgaggatcacttgaaattagtgaaaaaaatcatttccgtgaagaaaatccaagtcgaggtgcttccataacgcgtccgaaacgtttccgtgggtgatttcgtgaagattttccgccgtctttcgttcgttcttcgtcgttcttcggtcttcaaccggtaagttcccgaaatcgaacttttcaattcattctatgtacccttggtggtccccacttgtttcgcgtacttttattttcatttcgtttactttccgtatccccttttgacgtgctttagtcatttattaaagacattttctcgcctaatcaaaatataaaataaatttccactga

SEQ ID NO: 10059 - DNA, 444 bp, Glycine max
  unsure (1)..(444): unsure at all n locations
gacactatgaaactaagcttacgcagatttagtaatgacccactaacctagaattaaaatatcttaatgccattaacctagggaattaaaaaaaacttaatggctgagtgtaactgaaattgtggcaaccaaaagtcacccccaacagccaacaagtcagccaccatttggtctcccaaaaggctgatgcctaggttgccaattgggcccttattacaacttgaactaaacctaactaaagcccntttagttgattaacccaaaacatatttttggtcagccaactttacaaggattgggccattatttagacaaactaaacactctaaaattgagacaaggtggtgtcatttagtcctcctccatctgggccatgatacaactcacaaccttggactnttcttcttgaaacttgngcttgtattcaaatagtatggacagcac

SEQ ID NO: 10060 - DNA, 345 bp, Glycine max
aaaactggcctcaccgtgataaaaaatgagaaggaggagctgattcctactcgggtgcagaacagttggagagtctgcatcgactataggaggctgaaccaggttaccaaaaaggaccattttcccctgccattcattgaccagatgcttgaacgcctggaaggtaaatctcactactgtttccttgatggtttttctggttatatgcaaatcactattgctcttgaggatcaggaaaagaccacattcacctgcaccttcgacacttttgcctataggaggatgcctttcggcctgtgcaatgcccctggtaccttccagcggtgcatgatcagtatttttagt

SEQ ID NO: 10061 - DNA, 459 bp, Glycine max
  unsure (1)..(459): unsure at all n locations
ngtccgaatatggcgtacgcatcacatgtggttctaggtggcggtccggcgatggtgcacaacaagtgttgcacatgcacaaatcacgtataaacccaccatcccctgttgtccacctacaactgagctcacgtactaacacgtagcccatatactcgtgtctctcaacaacgggtccccatcaatcctcccaagctttcccacatgcaggtcattcaacatccaaatcatcacaaactaacagaccatgcaaaaccgggcaaaggcagaaaactctgcccaaaattcaaaccaaaatcacagcttgttctcacttaaagaccccaggaacatttgcttcgttccaatccgttaaccgatggatcgactcgaagatattactggaagtgtctagtacataagtatacatntctaccagtcggatctactagaaaacatccagaactcattctgtactac

SEQ ID NO: 10062 - DNA, 352 bp, Glycine max
ctgctggcatgcgagctagtatccttttgagatatgagatttgactatactaggtatgggcaatggtgcaaacaataaaaaaatacaaatgaattaatggtctggactccttgcaacaggaactaaagtgaaggcacaccataaaacaactgcatacctgagggtacttgttttcttccttaaagccagtagatttgtgtacagttttataccaccaaggggcccataagccatctattggttgtggacctgctttccaactggaaaattcataatttgagttgtcacttctcatgtttgtatgcataaaacttgttgcatggaaaattttcaattactgaatgtctttaac

SEQ ID NO: 10063 - DNA, 395 bp, Glycine max
ctgttctgttggtgtaatggttttcatatcttggttggatcaatatctggttctacctaacacggtctcactgtataaggtttgttacttaatgtgctggttttggcagtttgattcatcagtttccctcaaactatggggtttgtctggatctattctctgtttctaatattcctcagtatttatttttcttcttcttattatccgtctattttcatttaaaaatgaaatgaaatgtggcgtagatggtggttccgctgaatatgtgggttctgatctcaaatttcaagtttggatacaatcttcttcgtcgtccggacggtactttcaaccgggacttatcatagattcttgatctggactgttccgcatatgcctaccctgtgacagagtgt

SEQ ID NO: 10064 - DNA, 435 bp, Glycine max
  unsure (1)..(435): unsure at all n locations
agctnngggaaatgtcaaaggagatttgtaagctctcaaagctacgacatcttttggttaagaatgtgaagttgtttgaattgaagaatggtcttggaggcatgacatccctacaaacattgtgtcaattaagtgtaggttataatgaagatgatgatgtagtagagttgttgaaagaactaggaaagttgaagcagttaaggagcttaggcttaattgaccttaaggaaggattaggaactgctctatgttcaacaataaatgagttgccaaacttggagaaactacatattcagtcagattgggattttgatttcaatgttattgatttgcctcttatttcatctcttgctatgttgaggaagcttaaactaagtgggaggttaaataagtntccagagtgggtcccacaactccaaaatcttgtaaaattgt

SEQ ID NO: 10065 - DNA, 474 bp, Glycine max
  unsure (1)..(474): unsure at all n locations
tataaaactaagcttacaatggtataaacatcacatttcctatatcaaaatagcatatataataacttaagaattaagatgctntcaagctcagatcaaaacaccaaaaatcagaacagagccaaatttctccatgcatgaccagnggatgcaaccgcacatatatatgaccacttgcatccatggattcgaacataagccaccaaatttagaaacacatcaagcaccacanaaataaaatggaaacatactaacaataactaagaatcaaaacaactacaataacgaagaataattaagaccaaatacttaagccctagctaggattntgtagtggggggcccaaaatcccagttcttcaaacttcaaacatgttcaaatagtagcaacccaagtatattttccttcatttccctagctcanaatatgcatggagtgatgtactccctcccttcacctatctaagttcttaag

SEQ ID NO: 10066 - DNA, 442 bp, Glycine max
  unsure (1)..(442): unsure at all n locations
agcttttgaaaccaaatatctgaacattggagagttataattgaaattcaaacaaatgtctcaagcattatgatattataagttggtatttatatacaatttaacaattcagattcaaatttaaaagttcgaaagccacaacttccttatttctttcatgttttgagggaatggtcattcatttagtttgaagttttgagttcacttgtgagttgtgacaaaggttgaaatttgatcctcttgtgagatatgatcaaaatagtgagaaatgtgaactttaaaacccccaacttggctcttacactttgttttgaaacatttccatgaataccttttcaatagatttatttatttattgtttattctaaagtaaagtgtatttgttaagattgaataacttatttatcanaatagtgagaagttantttttgttttcattaat

SEQ ID NO: 10067 - DNA, 456 bp, Glycine max
  unsure (1)..(456): unsure at all n locations
cttattaagttttcattgttatttctntttgttntctacaatgttttaaatgtttgatgtggtttgaagttgttttttttttttaaatgaagatggtgttttacggttttggccaaagtggttttacaaaggttttggatttataagtctcattttctatatatgttgttgngtctcctcttgtaaacatgttttaacttgtttgatgttgtttaaagtggtttcttctttaagaatgaagatgttttttntaaccttatttactcaaattgtgttgtaaaagttttggtgtttaaacttgttgtctatttatgtggttgtgttttctctcaaaggtatcttnttgttttcaaagtcggttagttttagtgtttcaactacaatgtattccacttggtttttcttatcccttttatggaaatcaaaatagctctcttgatacatgcttatgtttta

SEQ ID NO: 10068 - DNA, 433 bp, Glycine max
  unsure (1)..(433): unsure at all n locations
tctttctccatttncctctccttcttgctgctaaacctggcccacttcaaccgctgcttttccaactcaaacgcctgtatttgataactcacctgctgctcctccaactgcacaaccctcttcttcatccactgttttttctcccaagcactcttccctccgtcttgcaacacaccactcacttcaccactcaattgctgcatcatctgtgatgatgaaacaccaaaccctcccttattccttgctctcctcctaatcacatcattttcatcctcctccataccccttgatcctccttctcctgattcctcttcatcctcatcagaaaactcctccgaatcatcgtcctcatcctcatcctctttcaacattctcagactccccaccccgttctctgatgagtgcaaacactgctgctgttgatgttgatgtg

SEQ ID NO: 10069 - DNA, 438 bp, Glycine max
  unsure (1)..(438): unsure at all n locations
tggcaaacgacgccgtcgaaaccctaaacgaatccaccgagaattccaatcccaataccaattcccccgacctcgccgtcgttctcttccacccgcaccatgcggagattcaccttatcgcacagggagtcgccacgcgctgcaccaagatcgaaccctcttcaaactccagaaactccgtgtatttccgacaggtgttcgcggcgttcgtgaagcgcgtggattttaaggttgtgaagcgcgtggtgataacgagcgaggagtttcgtaggtttgtgatgtctttttttttttaatccataaaatattaatttgttagaatcataattttttttaacagatataaagaggatcgagtcccacaactttntttttttttctttcatcttaattattcaactcatactatatctcctccacacaggtttgtgatgtcgg

SEQ ID NO: 10070 - DNA, 435 bp, Glycine max
  unsure (1)..(435): unsure at all n locations
ccatcaagtggtaatcagagcacatatagcttcaagtaggtgctccttaaacctncattaattttttttctttaccttctcttccattgttgtttcttcatttttctccatgtatctcctcacatgtcttgttctaaatgttgttaacatgattctttagagtttccaccgattaaacttgctatagaagttagatttgattttctatggttcaaatttcttgttcttgttcttgaaccatgaattgtgttgagtttaggttcctttgagttttgtcttgttattttttgtggctgaaacctaaaccataaaattcttacaaaaacattaaagtagaagaaaacctcaaaaatctagagtgacttgttcacctattgtagttntgtcatagaagtcatgtctagtcatgaaacttgtcacataagatttcttatg

SEQ ID NO: 10071 - DNA, 437 bp, Glycine max
  unsure (1)..(437): unsure at all n locations
acactatcaaactaagctataataggggtcagtgtcttctagtactatattntgtttgttgtcatgtcattgcacgtagacttgttactgttgcactgaaagtgtaaatttgttttgttaaagcataatgggtattgtttctatctattatactagtaatataatatacattgacaagggtgtataaggtcttttacaacatcatctaatttttgtggacttttatataatgtctaatttctatgcaatgtttatgtaatttacactatcgactcatcagaagtcattgtaagtatgaattttagtgtaaaagtcaatagagttaccatacctgacaatttgtgattgaataaaattgtaaaatctgtaaaaaaaaatattgatagaacatgattattaaacgtaagttatggtttcttggttaatctttcattaaa

SEQ ID NO: 10072 - DNA, 424 bp, Glycine max
agctttgagcgcaacatggggatgtacttagtatggcaatatccacaaataatcatacagcaaaggcgtacatgacatttaggttatatgaatggcagtgtttaaaaggcacgcaacgtgttcgcttcgtgtccctattttagggacctaaacgggaggaactaaaaggcttttagtgataattcccaaggtggtcatatctctcttgatggtttctagaggtatcatccccttcaaaaaaacatattgcggcagtagggactacaagcaacaatatgttatcaaagagaaaaactctagatgagggttcattgttatcaagcaagtcggagacccaacatgaccacagattcacctccactccttatgtttccatagacccgggtatagggccccttttcaactcaccgtgtgtacaaatagt

SEQ ID NO: 10073 - DNA, 398 bp, Glycine max
cgttcaataactgctggtaatcgattactatatatgtgtaatcgattacacagtgcaaattttgaattcaaattttaatagctcttgtaaatcatttttggccactggtaatcgattacatcctctggtaatcgattaccagagagtaaatctcttgaaaaacactttttaacatgcattacttggccaaaccttttgctatatcaattaggaatttgcttctaatgtactagtgatcatcttaatgtttgtgtcttgtattcttgaatcattgtcttgaatttaaacttgaaaagcgcatttgcatcaaatcatcatgatcataatcaaaacatcaaagtcatttgcttctacaaatcaaacctcttacattgactcatctactaatttaccttttc

SEQ ID NO: 10074 - DNA, 434 bp, Glycine max
  unsure (1)..(434): unsure at all n locations
agctntaagcgctgtctattgatgatctatttcttctcanagntctcctctctagggtccaccaattctactgctccttgaggtctgacttctttgattatgaacggccctgaccacttggactttagcttacctgggaatagccttagccttgagttaaagagtaataactattgccctggctggaattctttcctttttagcttattgtcatgatacaccttcatctttttctagtagattctggatgactcgtaggcgtttagtctcatctcttctagttctagcaactgtagcttcctcttttctctgcatgtgttgttatcaaagttgagcaacttgagagcccaatatgctntgttctccagctccactggtaaatgacatgccttcctatacactagctgaaatggtgataagccgatgagagtctt

SEQ ID NO: 10075 - DNA, 399 bp, Glycine max
  unsure (1)..(399): unsure at all n locations
tgttacagaacttangaaanatcaagaacaagcttgttcgcacatcgttcgcgtgtacgatatccactcgacaaggtttgaagtagaggagaccttcaatcctataacgcaacgtggcggacaaaaatgggcagttaacttgaatggccattattgtcaatgcggaaggtattctgcgcttcactatccatgttcacacattattgcagcttgtggttacgtgagcatgaactactaccaatatatagatgttgtttacaccaatgaacacatcttanaagcatactccgcacagtggtggcctcttgggaatgaagcggcaattcctccttctgatgaggcatggacactaatccctgacccaactacaattcgtgcgaaaggtcggncaaaatcaac

SEQ ID NO: 10076 - DNA, 434 bp, Glycine max
agcttgttgtgataccattaatggcagtattgagggccaaatgaaaggaatccatggattgtaaaagggtagtgtggtgatttgtttttcttcatagtggttcaattgggtttggaaggcctctaatttatggaaaataccttgaaggttattctccgtggtgatggtggtagtggatttgggaggggagtaagcaaatgaaagcaccactattatagtgttgaaagctaggctactctaaaactacaaaagctaccattaaaagttataaagaagataaacataaactttgatattttcattgatgatccttgagagcaacaataccccatttaaatctaacataacctggccattttaggaaaatatcaaataacatagtaaatggaaataacgatggaggcccaattaagatgaataactattctacaata

SEQ ID NO: 10077 - DNA, 459 bp, Glycine max
  unsure (1)..(459): unsure at all n locations
tatcaagctcccaatgtacgaatcggccgcggaactctatcgagattcgctctcagacgccataatcgcaagtgaaccagaatagggtttgggttttggggcctcttgtttgaagcctctaatctaatcagatgtttggttttgagacttgagagggagataatctagtccaaggctggtctttgattcaataatataaaggttaaattattatttagaatttnttaatatatttctaatgtttaattaggtattttaattattgagtgatttaattagatcatctaattatttaaaataattttattggatcatttaagtgttaacattattaactggtcacttagataggattctaccatatacaatgacaaaagattcaactaatgacttattaacaacttagatgactcgttaacgacattaacacanataactcaattgaatcattttaaataa

SEQ ID NO: 10078 - DNA, 294 bp, Glycine max
ataccaccagcctccacaactgcaacggaagataaggccatggaagtgaactaattatttgatgttgaatcatctgctattctcttctctatctttttaaaggtttatacacctttctttcctatgttataatgtaactaatgatgaacagttgcttgccttatgctacttagacattatatattttgaaacatgcttctttctcttttggcaatgccattttgtaacactatagatggctattcccatatccttttttttattattacttgaataaataagcttatctataat

SEQ ID NO: 10079 - DNA, 435 bp, Glycine max
agcttccacgttcaatttcgagcgtctttatatgttacgggacttaatcagacatccgagaaaaaagttagtatcgtttgagttggctcagagattcaacattcaatttcgagcgtctcgatatattacgggactcaatcagacatccgagtaaaaagttattgtcgtttgaattggctcagaggttcaacattcaatttcgagcgcctcgatatgttacgggactcaataagacatccgagtaaaaagttattgtcgtttgaattggctcagaggttcaacattcaatttcgagcgcctcgatatgttacgggactcaataagacatccgagtaaaaagtttttgtcgtttgaatttgctcagaggttcaagattcaatttcgagagtctcgatatgttacgggactcaatcagacatccgagtaaaaagttat

SEQ ID NO: 10080 - DNA, 426 bp, Glycine max
  unsure (1)..(426): unsure at all n locations
tcaccttctggtcctcctcatagttgtggcatgagataacatgctctattntcatctcccactccaagtaggcctccggatcattctttcctttaaatggaggaatgttgagtttaataccatcaattcggttntgtctaggaacaccatcattccctcttctcctcctttcttcttcattatgatctctattctccatttgatccaacctctcatggagcgcatcatctcgttgtttcattaacctctccatatgttgcatcaaagcttgcatttggaattgcgaaagccccactccatcattaggattagtacctgacatctcaaacaaacaaatcaaacgtaacaagacaattatagttgctgtttgaatacctcacccactcaagtgtatcacacaattattggctttctctaatgaaacac

SEQ ID NO: 10081 - DNA, 509 bp, Glycine max
  unsure (1)..(509): unsure at all n locations
agcatgacttagacagcganctcaactagctctagctggcatgtcgctgcctgagggagcaggttatattttccaactngagtttcaaccactacgatcctagaatcacgatgatcgctagattttagaaagaatgcataacacgacctatgtgacaatgcttttatctcaaccgcgattatgacaaaatatatgtgatgccgattacataattcataattactggtgcatgactcccaactaaaacaggtttaggttttacaatggacctttaacttgttaaaagggacgccaaattattgtgtgataaagtgaaaacacaccattcgttgtaccttatcatgcataaggattaaacacttgcctttgcatatgcgatgattcattgagattagttatgggatctaagagagagcattcgtgatcaattgttgtgtgatgaataacgtgagataacttcacatttacaaatgtgtatgggaaatgatgagataataaacaatgtgact

SEQ ID NO: 10082 - DNA, 430 bp, Glycine max
  unsure (1)..(430): unsure at all n locations
agcttcatgatgatgaatttagtagttttgatgatgacaaaaagcccaaaagaatgattcatgaaaagacatcatgaagaatcaagattcaagagaagatgaattcaagattcaagagaagaaatcaagaagcaacaagtcaagacttaacaagggaagtattgaaaaggatttttctaaaaccaaacatagcacaattttgttntacaaaagagttttctcaaatttttctaagttaccagagtatttactctctggtaatcgattaccagtttcctgtaattgattaccaatgataaaatttgatttcaaaaagtctttaactaaatttgcaacgttccaaatgatttttaaatggtgtatttgattacaatatattggtaatcgattacgagtgtatctgaacattgaaattcaaattcaattgtga

SEQ ID NO: 10083 - DNA, 469 bp, Glycine max
  unsure (1)..(469): unsure at all n locations
ngaggatagagacttctcaaactatttatcttctctctcaaagaggctctctaactttctagctntctcactctaagaagtgaattcactctcgtctcggatggttaagaatgaaggctcctacccttatttatactactcctcctccacaatgaatggtggagattacttgtatcctatggtggagattaattctctagaatgctccacacattctaggagtctctacactcttctactcccttccatatccttccatactcttccataaggttccacacatatccagaatattctataggtttccacaaacttccacaagcttctagagagttctacactactctagagttctntaggacgttctagataattctacactnttctagatagctctagagatttctagaacctcttcaattaatgacggatcccaacacaatgatacaaaataagagtgttaattttt

SEQ ID NO: 10084 - DNA, 426 bp, Glycine max
agctggaaattgtacaacttaagctctttataaaatcgagtggtcataaattttcacacagatgtccgattcggggaaataatatatcgagacgcacgaaattgaacaacggaagctctcgagaaatttgaatggtcataacatttcactcggatgttcgatccggggacataatttatcgagacgctcgaaattgaacaaccgaagctctcgacaaattagaatggtcgtaacttttcacgcgaatgttcgattcggggacataactcatctagacgctcgaaattgaacaacggaagctctcgagaaatttgaatggtcataagttttcacacggatgtccgattcgggaacataatatatcaagacaatcgaaattgaacaacggaagctctcgagagaatcgaatggtcataactgttcaca

SEQ ID NO: 10085 - DNA, 353 bp, Glycine max
ctcagcttcttataagctgagaccatttatcaataaacacaagttgagttttattcagaaaattagagtttatctcttttatcttagtgagagtgattctcctaaattcttgagtgattcaagaacaccctggctgtatcaaaggactttcacaacctttgtgtgttgccctcgctggaaagagtgattctttccttccaatcatctccacccttgttctttcaaaccacaattccagaaaatccacctctgcccaaaattatctcgtgaaaggtctcgttctgaaattcaacttatgctcaagaatcacttaatgtgagtgtgtaaaatgggaattatggtcacgagataat

SEQ ID NO: 10086 - DNA, 409 bp, Glycine max
agctcctagtactccaccatatcctgatttaaattattaataattgagaggtgaccacagaataacaaaacaatatcaggtcgaacatatattattaaactaacgtttccaatttctcatatatgaggaggacagaaacaaaaaacaattctgagtcttctgatcactgaattaatagagaaattaacaaactgaacaaacaaaactagcaggttttttcggaaaacttaatttattctggtgtggacggcagacagacttatatttcttggtttcaataggacttctttagcatttttctatctactattatctacaaataatcaagttattaatgaccggacaaaatcaagaaataacctcttgcgtcaatattatagaagtcgttcgaatctcgcattacactact

SEQ ID NO: 10087 - DNA, 290 bp, Glycine max
acatctaaccctctgaggagatgagagagatgaagcccattttgttcttatgcctgattttcatttctcttatatagccccctatatttcatctgggatagaagaaatagatcttccgtttgcaaccttttgtctgatttaacatgttcagcttggataccaagcttgctatgcacttatctttgaaccatattccaaggataaataaaccacacgttgtacaactgggaaataaagaatatgtttggcttggtttgttttccttccttggctgtgtggagctcaagccc

SEQ ID NO: 10088 - DNA, 432 bp, Glycine max
agctttgatttcctttgttccggaaacctttcttttctcatgtgcacccaaacccaatctccgggttcgaagacaaccttctttctccctttgttggcttgtttagcatagcttttatttttcctctcaatttgatctttgactctctcatgaagcttcttcacatagtccgcctttgcttgaccttctttatgcttaaaaacagaaacattaggcataggcaaaagatcaagaggagttagtgggttaaaaccataaacaacttcaaaaggagaacaattagtggtgctatgaacagctctattgtaagcaaattcaacatggggtaaacaagcttcccaagtttttaagttcttcctcaaaactgtcctaagcaaagttcccaaagtcctattaacaacttccgtttgcccatcggtttgtgggtgacaa

SEQ ID NO: 10089 - DNA, 466 bp, Glycine max
  unsure (1)..(466): unsure at all n locations
tgcgaagtgggtggaattcctagagcaattcccttatgttatcaaacataaaaagggaaaaggtaatattgtagccgatgctctntctcggcgtcatgcattactttctatgcttgaaacaaaattgattggtcttgaatgtttgaaaagcatgtatgaaaatgatgaaacttttggagaaatttttaaaaattgtgaaaaattttcagaaaatggtttctttagacatgaaggctttcttttcaaagaaaacaaattgtgtgtgcctaaatgttctactagaaanttgcttgtttgtgaagcacatgaggaggtttaatggggcattttggggtccaaaagactctagaaacattacaagaaccattttattggcctcatatgaaaaaggatgtgcagaaatnttgtgaacattgcattgtatgtaaaaaggcaaagtctaaggtaaagcctcatggattgatac

SEQ ID NO: 10090 - DNA, 441 bp, Glycine max
agcttgtcaatgtttgaaatttcttctttggtgtttaagaagtaattattaagggtttagtgaagttggaatgttctaactagcttgttgtgcaattgtttccttgccctaacaaagtaatgtttgaatgtatgcgtttaggaacccattaagataatgttttcttgtttatgctccctagtgttctctgtcttttcttctttggtgttgaagaagttagtattaagggtttagtgaagttggaatgttctaacttgttgtggaattgttgacttgccctaagaatcaatttgacttgcgcttagcttgttggaaacttcaatcagtagatagattcaaatctcttgtttgaagtatttcttcagcctgttgcatgtgttacttggagtacaaaaagtacaactattgacatgaactttgaataagagttagcttcttaag

SEQ ID NO: 10091 - DNA, 368 bp, Glycine max
  unsure (1)..(368): unsure at all n locations
ntntggtacaagcaaacaactcanagtgctaaaatttaaataactgaaatntaaatgactaaacaaaaatcataaaataactgaaaataaactaaaatgttcaagatgcacaaatttaaatgtcctgctcttgtgtttgctcttgtgcatgctcattaaggtccaacacctgagcagctggtgaatcctgaaagataggctgctctaactcangtgctggtgcaaatggtgtggcatcattaggtatgggtactggggatggctctggggtctggtctatagaagcatcctcctcctgagccatgtgtatacctgcatcaaaataaaaaggctcagtagggctgagctcatcctcgccttctgctgct

SEQ ID NO: 10092 - DNA, 437 bp, Glycine max
agcttgccgcccagctcgcctaggcgatccagattgcttcctccagaagcaacagccttctggaggaatcttctggagggcccaagtgggcctgattgctatttgcaccccttttttttactaaatgcaccccccatttctatttttttgtaattctttttccgtaacattacgaaactttacgaatttcgtaacgatacttattttccttccgcaaggttacgaatccttacggattatgtatttactcttttttagctttcgaagaagttacggaaattcacggattgcgcaaaaacacatcttttcgattttcgccacattacggaatttcacgaaccacgcaagcctgcttcctttcaatttctgagacgtctcgggacttcattcattgcatgtcatcaagtaatattccccggacgaaattagggtatgac

SEQ ID NO: 10093 - DNA, 450 bp, Glycine max
  unsure (1)..(450): unsure at all n locations
ntattcaagacanagaaattaaagatattcaagatggatgatcaagacagtttttagagtcttagaaagggtatattaaataggaagggaattccaattgaagtagcaaaaggtttggccaagaattctaagttaaaaagtctttttcaacaaatttactctctggtaatcaattaccagatgatgtaatcgattaccaatggccaaaactgatttacaacagctattaaaatttgaattcaaaatttgcactgtgtaatcgattacacatatatggtagtcgattaccagcagttattgaacattttaattcaaattntaaagcttgtaatcgattacacaaataatgtaatcgattactagagcacatttttagaaaatattctcgacagacacatctttntgtgtggttcttgaatggctatcatangcctatatatatgtgacttg

SEQ ID NO: 10094 - DNA, 366 bp, Glycine max
agcttcaacttcgtgtttctagaagtgatgataacaatatggacatatgttgactggctctgagttagggagtcggtgaatgtgatgattggtagggtgtggtgggggtaaagtatgtggggtctagaataaggcggaaaatttggtggtgagaagttgaattttagggatgagtgggatagaatgtgtttgacttgaaggaagctcagtggaaataattcgtaaatggaagaattcactagcaccatctctttgaaccagacgatgaagttgaggtggggtaatgagatggagggtggattcattgtcaccctttaacttaatgagttgctcaccatacatgaacttcatagtgttgtcattata

SEQ ID NO: 10095 - DNA, 486 bp, Glycine max
  unsure (1)..(486): unsure at all n locations
ctaagcttctctactgaattgtaaacacggggctcaaatgtgagttcgaataacaacttcttttacatggtgatcgcggatgtacatcccaactttagtcatattcagattctcgttcaaactagcgtccaccattgcactccaacctactcaatataggagggctccatatttcaattgtgctataaccacgcattctctctaatctccccctgcaccttttttcattgaaccaatcctagaaaaaatatttgcataatgaatcacctccgaatctgtactatccttattgctccaaagcttttcattccatctcctccaaacactccataacatcatagcaacacgtntcccttgccggactgataggactngaattaatctgaatatgaattcaaagcacgaactctcatcanatatcgttaggtcctcaacaacatcccaagtggaagactcttaagttaatatttttaataagaaatatgt

SEQ ID NO: 10096 - DNA, 430 bp, Glycine max
  unsure (1)..(430): unsure at all n locations
agctntgtatatcaaatcctatcacatctatcgtcagctacattgaggctctgctttaattattgctcacaaggattgagtagaggtaccgtaattttgacacttggtcattaaaggcaacccatcacttgaaagcacgctacaaatgtacattctaaactcttactgattcttgtgtaatgtgtgatccatgggatgaaacttttacacttagctttaaattttttttaaattatagactgtgaaaccccaatagttctactatgtgacaaccttcatgttctttaaaattatatcaaaatgaaagaatttcctttctctttggtttatacaaccaagggctggttgtatttctaaccagttcccaatcacacttgaaatgacatgaagagggttgttttgaagaaattcttcattgcatcaggaacat

SEQ ID NO: 10097 - DNA, 474 bp, Glycine max
  unsure (1)..(474): unsure at all n locations
cttgagacgcatgtganaactttggcatcatcaaaacattcagcttgatccttngtctacacatgtcacaaggtggatgatgcttcccacatctcanaactctcttacagggaagttgtgagactccatggtttgcctaggaccattgtgtcagatagagatgctaagttcattagccacttctggaaaaccttatgggctaagctaggaactaaacttcttttctctaccacttgtcatccacaaactgatgggcaaacagagttagtgaataggtctttatccacccttttaaaggctcttctgaaaggcaaccataagtcttgggatgagtatcttcctcatgtagaatttgcctacaataaggggggtcatagaaccaccaagcggtccccttttgaggttgtctatgggttcaatcccctaacactgttagaactcattcccctcccactggacactttatttatacat

SEQ ID NO: 10098 - DNA, 435 bp, Glycine max
  unsure (1)..(435): unsure at all n locations
agctttntggttttaaataaaagggttttctctntttctattattntatntaagctatgccacatgtctccgtttgagtggagcaaaaagggcccactttcccttttgactgtgacccatactcagccacaaaagtggggaaaatctaacctttgaaacgctaaaatcctgcctcggtttgcgtgccgtttctctggtcccagttcctcgcgtttctctgcgtccgtcggggccagttttcgaaagcaagcaatatatatatcaaaacgctcagaatagaaccccgagcgtggttcagaggttggtttcgttaaattttaagtcgcacgcaaaacgatgatttttagactaattacttaagaattaacccataacctcccagttatggatttctcttccttaattagcctaacccgcgtatcttgcccccactac

SEQ ID NO: 10099 - DNA, 417 bp, Glycine max
  unsure (1)..(417): unsure at all n locations
tcggttgttcaatttcgagcatctcgatatgtgatgttcctgtatctgacctccgtgtcataacttatgaccattttaatttctcgagagcttccgttgttcaatttcgagcgtctcgatatattatgcgcctgaatcggacatccgtgtgaagggttatgaccatttcaatttcacgagagcttccgttgttcaatttcgagcgtctcgatatgtgatgttcctgaatcggacctccgtgtgataacttatgaccattttgaattctcgagagcttccgttgatcaatttcgaacgtctcaatatgtgatgtgcctgaatcggacctncgtgtgataacttatgaccatttagaattctcgagagcttccgttgttcaatattgagcatctcaatatatgatgtgcctgaatcgga

SEQ ID NO: 10100 - DNA, 436 bp, Glycine max
  unsure (1)..(436): unsure at all n locations
agctagatattgaacaacggttgctctctagaaattcaaatgctcataacatttcacacggatgtccgattcagatgcataacgtatctagatgctcaaaattgaaaaacagaagctctcgagaaattcaaatggtcataacttttaacatggatgtctgattccgaagcataacatatcgtgacgctcaaaattgaataagagaagctctcgagaaattcaaattgtcataaattttcacacggatgttcgattcggggataaaatatgttgagatgcttgaaattgagagataaaagctctcgtgaaattccaatggtcataacttttcactcggatttccgattcaagacacttgaaattgaccaacggaagctttntagaaattcgaatggtcgtaacttttcacacggatgtccgattcggcgaaataata

SEQ ID NO: 10101 - DNA, 467 bp, Glycine max
  unsure (1)..(467): unsure at all n locations
ngttggtcgtcnatacgactaactttgatagaaaantttntccaaaacttgtatagttcccccaatttatggttattttgtaaataaatcttgttttattgttaaagttgtctctagaatatttccattgaattcaatgatgaaatatatgcaatttcaggtgaaaaaaaggctaagtcatgaagggttaaaagtgatagttgagcttagctcatccgtgggctaagcgtgcatccaccgctaagtgcagcttcagcgcacttagcgcaatagaagaatctggcagagcattaatatcaaggccgcgcactaagctcgatatcagtgcgctaagcgcaatagttgtcttcagccaggctcagtgcacgactgacgctaagctcanatccacttactcgtgctaagcgtaatgttatgaattctgagcctcattaatgcctgtcttgtgcagaattatggtacaccct

SEQ ID NO: 10102 - DNA, 313 bp, Glycine max
cccttttgcaacatgcacgctaatgtgatcccaatgctggagcggaagtacttttgctccagacacggaatggaaaccgaacaggaatttgttcttctgtgccaacgactgaatttgtataagtgagaacatgctgatgatcttccgacactttcggtttcgaaattacaataattactagctcgctacctacattcatgtgaaatcgaatattgactcccacgaaactggattctggttctacattaacattacacttctcacgcgctccaagacgtcctattcctaactggaagtcgcatcatattcattc

SEQ ID NO: 10103 - DNA, 119 bp, Glycine max
atgtacgtctaaaacgtcatacgtggtgaaattgacacatacagaccttatgcgagtagttcatacacctgcgtggatcgaacaccaatagttgttatctttcatccactatgactcta

SEQ ID NO: 10104 - DNA, 432 bp, Glycine max
gcaagcttgcctgagcgactatgttagatttttacccttatggcagccatgatgagcatgtaccgagaagaattacatctagccacggcccacgagcacaaagtggcgggtgagtatgccgcgactgtacattggaagaatgaggcttggggaagggtgatccactcgttacatgaacacgcaacaatgaggatggaccgaattgatcttactttgaacgggagtcaggaactaaccagatagctggccgaggccaaagcaatggcagacacctactccgcccctgaggagatccacgaacttctcagctattgtcagcatatgatagacttaatggcccatataattaggaaccgctaggaagtttgtattgtcactcagatcttgactagttataactctctgaataagatgagtctatcctgcattttt

SEQ ID NO: 10105 - DNA, 308 bp, Glycine max
ttaggacactatgaaactaagctttgacggtagtccgcggtgcgtgatgggggaacattacattcgtgttcggatagcgtcccacacttgcgctgtggttatgcacgagatagacatagatcccgcctacgactgacttgtggcgaggacatggatacgcgctctaagaatggtgccttgaacacttctcccaacagagaaattcgcggctggtggactctcgttgataacgatatgagaagacgatatgaggttaagctgacgcgtctcatcaccatatgattatgcagctatcgaatcattgacaa

SEQ ID NO: 10106 - DNA, 386 bp, Glycine max
acaacctatttcagtactaactcgtgaagttagggggcaggcggaaatacccaagtggttatccggataaacattcttttaatatctctaagactcaacgcatgatagcatgcagagactaacgtcgtcttctgcaccttttgtcaatcgcggccaacaagcccattgccacgtggagatttacgtcatcttctgtgcagacagcctctgtcagtactaactcgtgaagttagggggcaggcggaaatacccaagtggttatccgtataaacattcttttgctatctctaagactcaacgcatgatagcatgcagagactaacgtcgtcttcggcaccctttgtcaatcgcggccaacaagctcgttgacatgcaaagatttatgt

SEQ ID NO: 10107 - DNA, 453 bp, Glycine max
  unsure (1)..(453): unsure at all n locations
tgtaactctgggcaatttctntaaaactagtcacttaanaagttatgactnttgaaagaatcttcagaaacaagtcacttgaagaattgtgacttttggaaatgtatttttcaaaatcagtcactggtaatcgattaccattaaggtgtaatcgattacacatcaacagatgtgacttcattttgaattttgaaaatcttaacattttaaaacactggtaatcgattacatgattatggtaactgattacagctntgtaaatcagtttgaaaaaaatgctggctactggtaatcgattactaccttctggtaatcgattaccagagagtaaaacactttgtgtaaaaaattggtgaaaacttcatgtcctactcaatggtttgaaaaagttttagtactatcttgangagtctctcttgatcttgaatctgatctgatctgatctgatctgat

SEQ ID NO: 10108 - DNA, 426 bp, Glycine max
agctagcacagagccacattaagctgtcttttctaacatcaaccactaatccaactcacgcagccttcttaattttcttagccttcacacctttcgtagcctttacacttttagtagcctttgccttcacttcctctcgcttcttcttcttcttcttcactcctgactcttgatccttaacaaccaactcacttccactcccctcaatcgcatctcccttaacccccccaacagacaagcccttcttcttcttcttccccttggcagtcaactcattaaacaccaacttcttcaattgctcaacaccactcaactcactcgaacctcctttcttcctcttcttactcaccatctcatcttcactatcatcgctggccaattgatcttcaatctcatccatgtacctaacctcatgaatcctcccct

SEQ ID NO: 10109 - DNA, 419 bp, Glycine max
  unsure (1)..(419): unsure at all n locations
tangtatatgttntatctttgccatatgcataataaatgactatcatggcataatggtggaacttcccattgcaagctacacagtcatgggttgattcctaatgatgccattttgcattttcctccttgcacagaagtgacattgacagaagcctacagtgagttatgcattatagtgacaggacgcatgactgcagaagcaggccagctggcctgattttcgttgaacctaacagaatggttcagttggagacggttcttactgattgaatccagttcaaggtcagtttgatgaaatcaaaacccaatccaataataaaacttaacaggccacaggtgcagttcccaatccaactggccggagtaatctggtttaataacagcgggttttgattcatattcaattttctcaatacaaa

SEQ ID NO: 10110 - DNA, 440 bp, Glycine max
  unsure (1)..(440): unsure at all n locations
agctntatgatcaaactctnttctctctttttctctcaactattcttcattcttcttcttttcacttttgttcttcctttttcttgcacaaattttgtggcttttccactagtgatgatcatggaaggctaaacactcaatcaattgaaggatccactccaagcaagactaaatttgagttatggtctagtatttttaataggtgtgaatgttcaactttttcttcaatcctattttcaattttcatgattatgaatgggcttaagattgaaaatgaattagtttagggattaatttcctaacttcaactttaatcacatattatttagacgatattccaacctaattttttatctaaatgaattttgggaattaattgattgaattaactctaataacattgattgaaccttcacaacttgatcattctctacaaaact

SEQ ID NO: 10111 - DNA, 463 bp, Glycine max
  unsure (1)..(463): unsure at all n locations
tcgaagggaagagagagaccaatcacgagcacatagcatggtcttgaaataggagttagctgcttgctcaaggtccaaaagaaacttgtctcagcgtttatgcgagatagagaccaacatgttagccatcgacagcaagtaccaagaagaactaaatctagccacgacccatgagcacaaagtggcggacgagtatgcccaagtgtacgcagaanagaaggctagaggaagggtgatcgacgcgttacatcaagaggcaacaatgttgatggaccaatttgctcttaccttgaatgggagtcaagagcttccccgattgctagccaaggccaaagcaatggcggacacctactctgccccgaggagatccacggacttctcagctattgtcagcatatgatagacttaatgggcccatataatagaaaccgctagggaagttgactgtcactcagatcttgac

SEQ ID NO: 10112 - DNA, 443 bp, Glycine max
agcttctctctgaactgtgctgtagatggacgatcattaaccaaatccgagtggcggaaacactaggaatcaaccaaaagtgtcagtcactttactaattcactcttttgatttacagtcacatcttttagaaaagtagtatcctatgtaataaaaaataaaaatagaaggagaagaatattactgttgtacagtctttgcacactccacccaacccacatggcccttcatctggtaaacagcaaggtggctgaacaaagacagacatttactattgtaattgaaagatatatgatggtacattgagcaatatttaattagattaatcatttaaacaattgatgtagatataaaaacaaggcaggggaaaagagaataaaccattacatatacaatgtgcatgaatataagttcaaaacttgtatgagagaaggaaagttgag

SEQ ID NO: 10113 - DNA, 441 bp, Glycine max
  unsure (1)..(441): unsure at all n locations
cgcatgagcactctgagcgcacatgcaaagtccagctgacataagttactgcactctaaatcgtcagatgtgggttaagtcgccagatacgcgctaagcctgacctcaacgttgactccttgcactaaatggttgttgacgcactactctagttcttcaaccatcttccaggactcctgttgtgtgattctacaaaaaatataatcaaacatactgtaaattgactaattttagcatctactggataaaaactcagaagaaatcaaattcctaatgttttgacacaaataaagtaataaaagagagaaaaattaaataattgttacgcgatgtaagtatacaaattangtatgcataacaattatcattagtcctcttattaagcaagagggaggaaaaacaattcagcatagtatggtgagctcatcatacgttaacata

SEQ ID NO: 10114 - DNA, 439 bp, Glycine max
  unsure (1)..(439): unsure at all n locations
agctntntagttntcaatttttagtccctcaatttttttttacaacttttagttctccattagttttttattatcacttttagttcctctatatttgtaggtccatttttagtcctttatttatttatatttttcaaaattagtctcaaatataaaataaatgaggaactaaaaatggacaaaacaaggactaattttgagtaataaaaataaataatgaattataaataaacaaaaaaagttagaaggactaaaagtactaacagaaaattaatgaaagactaaaaattgtcaaaaaaaaaacttgaacgactaaaaattgaaatctgaaaaaattgagggactaaaattttaatttacccaaatttaaatgtctatataacaaaattttatttagttntttaaatagtaatatattgaatttttttggtaataactt

SEQ ID NO: 10115 - DNA, 447 bp, Glycine max
  unsure (1)..(447): unsure at all n locations
ngcctgtccgatgcagcagtaatgatggcccgagttatgttggggaacggttacgaacccggaatgggtttaggcaaagacaacggcggcgtaactagcctgataaatgccaaaggaaatcgtgggaagtatggtttaggctataagcccactcaggcggatatgaagagaagcatcgcgggaaggaagagcggtggtcaaagctcgcgttggagacaagaaagtgaaggaagcccgccctgccacataagtagaagctttataagcgcgggtctgggagacaaaggtcaagtggtcgcaatatgagaagatgatgttttgagtacattggatttggtacgaccatgccctnttgatttccagctatgaaattggcgagtggaggaacgccctggcatttacgcaacgagcataatgtaaacctttacgatttaaaagctctatagt

SEQ ID NO: 10116 - DNA, 442 bp, Glycine max
  unsure (1)..(442): unsure at all n locations
agctnggcatattctaacgtatagtatgcaatttacaaagaaaaaaaatacccatattaaaattcactactttgataaaatattatttttcatgaatcatttatttttattctataatcacaattctgaaagatattttaagatgttttttgaattaaatattattaaataaattatttaatctatgtatttgataattagatttagttatatttaggttcagatggaatatgttttaaaataacataaaaaaatttaaaattttatcaaaatcagcgcaaatcaaatataataaaaccatttagtaatataatatttttaaccttaattaagtatccacatgattacatcgatgtaaaagccctgaaaaccaatcactgataactttgaagttagaccagcaccatatgcatgattagtttagaaaacttaggaggaaaga

SEQ ID NO: 10117 - DNA, 470 bp, Glycine max
  unsure (1)..(470): unsure at all n locations
tcggtcacttgctgtgtccttggtatttttttttcttttgggtattgaatttattcataagttataaaccaaaaaatattcataagtttcggctatttctataggaaattgtacttccagctcaagtcaagaccgctagttaaaaaatcagaggatgcatatgatgtattctgagagaaactctaacgcaagtgacctaggtaaattggttcttaaagttaaataatttgataatattattggaataaattattttttttatagatttttatataagagactacaaacaaagttgtttaaatatatataaaaaaaagtcaaaataaggttgttgtgtaaatagagaaataaaagttaatatatataaaaaaatgtcaaagttatttnttttcttttaagtaaaacaaactcacccaaacaattgcgagaatagctaacatagaaccaacccaatgaacccatgttgaaac

SEQ ID NO: 10118 - DNA, 446 bp, Glycine max
  unsure (1)..(446): unsure at all n locations
agctnttctttgagcaaagcaaaggcttgctcttgtttttcaccctaggtaaatgccacattcttcttcaccagctcattgagaggtgatgcaattgtagagaaattaggaatgaaccttctatagaagcttgctaacccatggaagctcctaatatctcccacactttttggggtgggccattctttgatggccttgattttctcaaggtccacttggaccccatttctaccaactacaaaacctaagaaaactatattatctacacaaaaggtacacttctctatatttgcatagagggtgtttttcctaaggactgaaagaacttgtctgagatgtcctaagtgatcatctaggctcctactatacactaaaatatcatcaaaataaacaactacaaatctacctatgaaatcccttaagacatgatgcataagcctcataaa

SEQ ID NO: 10119 - DNA, 249 bp, Glycine max
  unsure (1)..(249): unsure at all n locations
acactatgatactaagctaacagatatttattaannattttgaaataaatatttattattattattattattgtattaaattgttataatacattaaattttacatttatttatctttttaaatgttaatcatattgatctacgtaaagagtcaaactaaaacttataattaagtgtattgaaaaataagtttatatctttttaaatatcaaaatactactttcaatcctctctctctctccctccccc

SEQ ID NO: 10120 - DNA, 435 bp, Glycine max
agcttgcactatggtttatatgcggactaaataatgtgattaaatgaataactgcagtaaaatttcaaggatcaacctagcacaaagcttgaaaatcgactaaaagtagcaccggtaatagttttcttttgtgccaaactaatttgaaattcctagtacttcatgaaaatgaatttaattcctgtgagattgagacaggtttgattgcaattttcaataataaactcttatccgatgcaaactaactgaatgttgtttaattaaataagatgccttgccaacagggttggagaaaaacagtagttttaggagtggacaagccaggatccacgttgggccttagttgtagtgagtcctccatagtgggaattgaagagcctcgtggggtgcttatttggaggactgatgtatctattctccttaaacgctacatgg

SEQ ID NO: 10121 - DNA, 476 bp, Glycine max
  unsure (1)..(476): unsure at all n locations
tactcagcgcggcaacgtcaacgagtatctaacggaattcgaacccttagcgaactgggtaatcggacttccacctcttttcttgctaagttgtttcatttcaggtcttacgccggagatacaacgggaggtactcgcacttcagcctatctctctcccacaagcaattgctcttgccaaactgcaagaagacaagcttagagaccgacgtgcgttcacacgacccaaccttccgccatcatcttctacctctcgccccaacaatcttgcacaacactacaaggaaaatgacttatacctacagtcaaaatctgtcactagaagtccaaaatccgtaggtagatgtataaaggactntgtcctacagacgttntntgcgtcaactttgagggggtatacagtgacaactaatagtctgtcactatanggcttacctatggatatatnttacctacagtcaaatttaactatcacta

SEQ ID NO: 10122 - DNA, 271 bp, Glycine max
agcttgccatacggacgaacagactgttcacctatatgccacagcagatgatgctgcttggtccacctccctcctttcgctctccttcgcttgaggttgagcatgaccagctggacttgtcctgtgactactctgatgcattataccaaaccagataattgaaggtgtatcttgttatggactattgctgcacatctaagataaccaaactaatttgtgctgatattgtacgtggaacaccaacatgcatgccttccttccgatgattttc

SEQ ID NO: 10123 - DNA, 355 bp, Glycine max
tgtcttcggtgcactgatcatgcgtcagagttggcatgagatgctgctgggcgagcatgaattgaggctagcagtcgaagcacgttggctatgggatcattctccgaacagtcgcgacatagagcacgaactgacatcggcatgaaacatagactgctatgacctgtggccaacgaagaacgagagcgaccttttcgatgtcgacctatatatatgtcatggcctatgtacacggaagaaagaatattcgacatcgatcattatataggatcaaccgatgataactcaaatatgcatagcctcaggcttccaaaatatagatctatctatagttgatcgaactaccctaacttat

SEQ ID NO: 10124 - DNA, 430 bp, Glycine max
agcttatggtgatttatgattatatattatgacattgtaaaattattttatattgtcaatgcatctacgatcataaactcatccaaaaatgaatcacttcatgttaaattctcacacgacttcatcaaatgaaaatttcatgtctatttctctttttgaaggtatatttacaaaggtctctcatggctctaagaaattttattttttattttggatttattgcctggatacagtgattttattgaggagtgggtcaaaattggcttgcctgcaaaggcaaaggtgaagacacaacatggggatgcaccttctgctgagttgtgctcacactgtgagaaggtatgagacacattagtacaagctacatgctagctaaatagtattttctaatatttttcacaagactcagacttaacttcaacacatcttc

SEQ ID NO: 10125 - DNA, 429 bp, Glycine max
  unsure (1)..(429): unsure at all n locations
tgaacatgtcatctgaggaaggttgcatatgaagttttaagtactactttgntctaaataaagcatgagaaataaaaataaaaaaacatactgtgagttatagccaccaaatgtgatattctatgttaccccacactgcttgtttgaaaaagaggaaagttaaaaaaataaaaacaattccttcttataaaatagcatagctcaagcaaggtgtcaatgtaagaatcaaactaatttttatgggccatggtcacctacataacctcggatcatcatgattatttgattgaaaactgaaatatcaagaatagatggatgaactcttttgatttggttcccttcaagatgctctctaatttcaatgatcacgatgttttagttggtgttaacactctggaatcatgactacaaaatagtaacatattatta

SEQ ID NO: 10126 - DNA, 421 bp, Glycine max
  unsure (1)..(421): unsure at all n locations
agcttgaatcggatatccgtgtgaaatgttatgaccatttgaatttctgaagagcttccgtagttcaatttcgagcttctcgacatattatacgcccgaatcggacattcgtgtgaaaagttatgaccatttgaatatctcgagagcttcctatgtttaatttcgagcgtatcgatatattataagcctgaatcggacattcgtgtgaaaagttcttaccatttgaatttgcgagagttttttatgtttaatttcgagcgtatcgatatattatacgcctgcatcggacatccgtgtgaaaagttatgaccatttgaatttctcaagagcttcggttgttcaatttctagactctcgacatattatgcgcccgaatcggacatccgtgtgaaaagntatgaccatttgaacttctcgagag

SEQ ID NO: 10127 - DNA, 207 bp, Glycine max
tagcctctcgacatattatgcgctccactcggacatccgcgtgagaagctatgaccatatgaatatctcgagagcttccgacgctgaatttcgagcgtatcgatatattatacgcctggatcggacctccgcgtgagaaggtatgaccatatgaatatcgcgagagcttccgctgtgcattttcgagcgtcgctatatgtgatgcgc

SEQ ID NO: 10128 - DNA, 443 bp, Glycine max
  unsure (1)..(443): unsure at all n locations
agctcgactcagcgannatgttagatatttaccaatatgtgagccatcatcagccagtaccatgaagaattaaatctagccactgtccacgagcacaaagtggcggatgagtatgcccgagtgtacgtggaaaaggaggctaggggaagggtgatcgactcgttacatcaagaggcaacaatgtggatggaccgatttgatcttactttgaacgggagtcaagaacttccccgattgctggccaaggccaaagcaatggcagacacctactccgcccctgaggagatccacgaacttctcagctattgtcagcatatgatagacttaatggcccatataattaggaaccgctaggaagtttgtattgtcactcagatcttgactagttataactttctgaataaaatgagtttatcctgcattgtttcagtgcgaatcaaatc

SEQ ID NO: 10129 - DNA, 391 bp, Glycine max
  unsure (1)..(391): unsure at all n locations
ctttgacggtagtccgcgggaggtgatggnggagattgacatccncattcagatatgttcccacacttgcaatgtggttttccaagtgatggacataaatcccgcctacagctgccttttggggaggccatggattcacgcgctaggagtggtcccttcaacgcttcaccagaaattgaaattcgcggttggtggactcttggtgatagtgtcacgggaagaggatatgttagtaagctgcccctcctcagcaccatatgtagaggcagcgaaggaatcattggaaaaagctctccaatccttcgaggtggtaagttgtgcctctgtggaaacaagtccattgctaccttgtctctctaatgcggccctaatggtggcgcgggtaatgctc

SEQ ID NO: 10130 - DNA, 385 bp, Glycine max
gggcgcgaaacatgtagaggaatctaactgccttggctcgtgtctgctgcagttagagatttatagcatgaacaagtatttccattaaacaaagggatgcatggacttgctacaccacttgtggaatacagacttgctgatggaactgaatttgaaatggaagcgataccaatgggggtcaatagtcgggacatctctaacacgtttaggattgcctctccatttgtagttgatgaaactatgcttgaaaaagcgcttggggtaattgataatgatatgtcataatgccgtgttacaaatttttttaatatattacatgtgaatgaataggctcggctctgatgtcatcatgaatgatttttcttaagcaaatcttgaaggaaaa

SEQ ID NO: 10131 - DNA, 406 bp, Glycine max
  unsure (1)..(406): unsure at all n locations
tatccacaaggctgcagtcccaaagatagtggatctctgtctcctcatccatcatgcacatagggcacatggaagattcaacaatatatctcttccaccttgcagtgtttgtagcaagagcaccctntgctactttccaatgaaaagctcaccctctttcaagacccttttaactccagactaggcgaaataaaggaatatcaatctaatggtgattattcgatataactctataaccactcttaaccttataccttgtgtcatcagaatcttgccaaataaaagaatcttctccttcatcgataccactaggagcatgatcctttactactaagggcccgtttggatgtggcccanaagatcttttattatcttatctactgaaaaaagatctttttatttttta

SEQ ID NO: 10132 - DNA, 429 bp, Glycine max
  unsure (1)..(429): unsure at all n locations
agctttgcctttatggactttaccttttttctntcttccgaagctataacctcattgtctctcacagtctttagatctgggagccaacccaatccttgtgtccggactctcagccacttatgatagccgccgatgatcccattactgcttcccctaagctctctgtcctttcttcacgccacatcccatgccttgcaaactccttggagtaccctcacgttgtagtcactgaaacccagtgcgatgaaaggcgtgatgctttcgtctgatggcacttctctcatggggtagccaagctgtcttatggcgaggacgggattataattaatacaaccccttgttcccatcaagagaacattnggacatcctttgcatgaagatagaatcctgattcttccttccttctagcgagggaaccaattaacagac

SEQ ID NO: 10133 - DNA, 439 bp, Glycine max
  unsure (1)..(439): unsure at all n locations
ntgttctcagatccctcttgttggactatacttagaccaaacaacattattgtgacaacatatttaaaaccaaaacttaatccgcagatccctcatttaagactaagtttcaattctgcttcattcaagttctaaggcaacaatacatttcccaatgctaaagtcacctaaccaggcacacaaatggttgatcagaccaagagcatatagaatttaagcactgaaagaagcattgaacacaagaaacaccatcaattagatattaaagtaattacatcagctgttctttagaaatcttcaacaagggtgtttagccagccaatacagaaaaacccctagcaataatgagattacaaaacctaggtatctctacaaaagttgctcatcttgctgcctccagagcccttttcccaaatatgcactgtggtgtgctctggaa

SEQ ID NO: 10134 - DNA, 441 bp, Glycine max
agcttgcttgtggagcttctatggaggctggatctttgagcttcaatggggtcctttaatggtgattttccaccatggagatgcagcggaagacaaaggaaaataggtgagaggaggcgccatccattaaggaataagccatggaagaaggagcttcaccaccaagatgagccttggataagaagcttggagaagatgcttcaatggaggaaaagaaagagggagagaaagagagaggggggagcacgaaattgaaggaataaaagaggtatagaagtggaactttgaagtatgtctcacaagactctcattcatcaaagttacaacaagtgttacacatgcttctatttatagactaggtagcttccttgagaagctttcttgagaaaacttccttgagaagcttctttgagaaaacttccttgagaagctagagcttag

SEQ ID NO: 10135 - DNA, 402 bp, Glycine max
  unsure (1)..(402): unsure at all n locations
ngttgtgcaccatcgcccgaccgccacctagtaccacatgtgatgggtaccccataatcctacaagcttgagatgaggaagtgttgaagggtgaaacttcctgcttttattgttgaccacagagtggtacctggagatatgtcgcgggggtcaggagaccttgtggacgtcatgtggggtgctattgcccaaaaccaagcttgaccaatcccgacccaacccgggcatagtcggtcagtgagaacctgtgatgtacctaagcatgcgagctcctggcagtcaacagataaaaggaaaacaagaccactaagcaaggaggcttgtggtggctggccagctgtgaatcttgtgtaatatgtggattgtggcctctggtaatcgattaccaagggtgggttatcg

SEQ ID NO: 10136 - DNA, 431 bp, Glycine max
  unsure (1)..(431): unsure at all n locations
agcttgngaatgtgatcaaggagaaattgttgggtctcctaagtttcccttataaacctatgatatgaaagtttacatttcacttatctaatagctaacttgattatttattttgttgatcctttcagaaaatcgactgtattcacaacaatgcagttatggagttgatgagaggtgttagaaatcagttaactgaactcatatctggtctagctgttcaagacatggccccaatgagtttgggtttatctcacagcttatccagatacaaattgaagtttagtgcagagaaggtgtattttccgttgactttatggttataaggaattgatgttatcattgtactcttattctaagtatattgaccacactgtagattnttattatgttgaggtctatatcctactctgctattcaccaaagaaatactc

SEQ ID NO: 10137 - DNA, 463 bp, Glycine max
ctaagcttattaatgatgccttcaagcattgtataatctgtaactccaatctttccatgaagaagccacataagccaatccgcttggtgcaacaacagagcatgtttttggtttgaaccaacatgattccaccacgagacgagtttacacagagtggatgatccggtgcaaaccgtatgatttggaggagcaatagatttcaccgttgccaaagcatcagggcaactctcattgtaaagtaaaggtctccacaacggttcttccgagtcactgcaacaccagattcatattcctacttcagaattcaaatacacgataatcttaatctttaattaacagaaagattaaaatttaaaacaaaaagtcgatccacctatcgacaatgatagtagttgcagaagtcccatcaacagaaatggagacaacgtgtttgcgaatgtgaagtgtgacatcatgaagcata

SEQ ID NO: 10138 - DNA, 441 bp, Glycine max
  unsure (1)..(441): unsure at all n locations
agctntgctgaaatcttttctctggtaatcgattacacagatcaaaattcaaataagtttgtaccgttatgtcaccagttcaaaatttcaaaatgccatcttcatggtctctatggtaatcgattacaggacctggaaatcgactatcagttcaaaaatatcttacttttgaactgattaaactttgataaaggtattttgataaaagactttgaggccaaactattgcaaataaaaatgagattcttttaacaatttgactaagtccttatctgtgattttcttgatcttgtttgttgacttgaaacaatttgtgctttcatcaagtaaattcttttgtcatcatcaaaacctgcatgattcacaatttacaccaaccactaggaagtcattatcatcaaatagcaaggcatccatcaagtattccttcatctacttaaa

SEQ ID NO: 10139 - DNA, 463 bp, Glycine max
  unsure (1)..(463): unsure at all n locations
ctgatggtgtcgagaagaaaatcacatgttgtcatcatcaaaaaggtggagaatgtgaatgtatgtatacatgattntgatgatgtcaaaaaagaatctaacaaggctgcttcaaatgataagcatttgcttcaagaataattcaagattgcttcaacaaacaaagccttgtttcaagattcactaaagaccaagccttgccttaaaacaaagtgatttcaagacatgcaaggctctggtaatcgattaccaggaagtgtaatcgattaccagaagacggtgttgagaaatagctgttgaaaaagggtttgaatttgaattttcaacatgtaatcgattaccatatgtctgtaatcgattaccagcaacgaaactttggaaactcaaattcaaaagtcataaccctgtcaattataactgtgtaatcgattacgcaaacattgtaatcgattactagtggaaa

SEQ ID NO: 10140 - DNA, 436 bp, Glycine max
  unsure (1)..(436): unsure at all n locations
agcttgaaacgattataacttttgatattaatgtctgtttgagactcataatatgtcaaaatgttcaaaattgaaggagaaatctcttgacaaattcccgtcaactgattttttcaaaaaatgcttttaagtagctgaaaaatacaccccttttgggaataaatttctaaaagaaatccccttctcaatttgccacaagatgccaagagcaattaactctttaccacgccgttcattggtacaattaaagtctactgcgtggttgagcgataaacgaagtcaccctccctaaagggtgctgctactcgttgctattcatcaatgggttggaacttggaacataacatgcttaaaatatgatgcgggtgaattacacgactaanaatgtatttacaaaatacaagcaatagagtgaactaaaatctcaaagctttga

SEQ ID NO: 10141 - DNA, 426 bp, Glycine max
aaatgttcgacaccgaaacctagtgaaggttatcacttcttgctccagtcttgattataagggagaggaattcaaggcccttgttatgcaactcatgcccaatggtaacttggacgtgagtctataccccgaagatgttgagtcaggatcctctctaccttgttgcaaagattgaacattttcattgatgttgcctctgctatggactacttgcaccatgactgtaatccacccgtagtgcattgtgatatgaaacctgtcaatgtccttctagatgaaaatatggtagcccatgttgcatattttggattggaaggtttctatctcaaagtacatctgagatgcagagtagcactctgggactgaaaggatcaatatgctatattgcccctggtacacattaatgtttctcttcctattaatact

SEQ ID NO: 10142 - DNA, 426 bp, Glycine max
  unsure (1)..(426): unsure at all n locations
agcttgtgtcttgcgatgcattataatattaagatggaatacacttgaaaccctttgacttgtgatacatcaaaacatgaaaaaaaaaggaaaccatttgctaaaacatgaagaaaacaataatgtggccacaaaataacgataaaatgaacaaaacatgttgcgaaacatgcagaacggacatcaacaaagcattgtgaaggccttctntgtaggacatctttgcagaacaaacatgaacatttaagcaaaggaacattgacacatatctgaacaaaggaaacattgacataaaaaaaaagtttccttacaatgttggaatagaaaattgattttcaatactcattcccaactcatagatagaaaacgaagctgataatgataataaaaaaaatccttgagacaaaaacaatgaagtgaagcaaa

SEQ ID NO: 10143 - DNA, 440 bp, Glycine max
  unsure (1)..(440): unsure at all n locations
cgaacatagaagaatctgtttcgcaagacaactcaatgaagcaacatatgaagacagngctatgtaaaaatatacatacactgatctaaacatgcaaataaatataaatagcatatttagatcaaacaacggatattaaaagaattacgagcatatctctggccattgcaaattgaacgggaagcggtgcacacactaacctgaaagacagttttgttcttccatacccttactcactctgaatagatgatgtatcttttctgaatagagaagtgggtttggtgatacaaaacttagagcaccccatcctatttatatagtctgtccatcacagagctctcagcttgttatcagacagcttgtcatcagaacgtgagatatgaagttatgaaacgtgacataaaaagtgatcagtacatgagatgatgaatacgtgattt

SEQ ID NO: 10144 - DNA, 431 bp, Glycine max
  unsure (1)..(431): unsure at all n locations
agcttttctttntcaatcaatctatcctctgactaacatttctaatcgngatcctactttcttgttctttctcatctacatacatgctcattcaaaactcatgacttcaacacatgcttcaccctttcatgcaatcaattcacaacaccaatttcacaacaaaaataatcttgtttgcactgcatactcagataatcaagtcaaactgttcagtatgcttcaagacatgcatactactatccataatcaaaagtatgtaatcataaatataaacccatatcacaaaaaacaagtgtactaaaagcattgtaattataatattttttttaaaaaaaacaagaataggaatttaaaactcctgtgactaatcatcctgctgggtctcctgatcctgagtgccctcctcatctgtcaaatgtagcataggagtg

SEQ ID NO: 10145 - DNA, 468 bp, Glycine max
  unsure (1)..(468): unsure at all n locations
tcttccctattntccttataaatcggggagaagtgaagggaaaatatatgttcagccctcctagtatttcgagatcacttgaaattagtgaaaaaaattgtttccgtgaagaaaatccaagccgaggcgcttccgtaacattttcgtacgtttccgtgggtgatttcgcgaagattttcaaccgttcttcgacattcttcgttcgtttttcggtcttcaaccggtaagttcctgaaatcgaacttttcaattcattctatgcacccttagtggtcctcatttgtttcgcgtacttttattttcgtttcatttagtttccgtacccccttttgacgtgctttaatcatttacttaagtcattttctcgcctaatcaaaaaataaaataaatttccaccaatcatttgaattgtaatatccgttaatttctgtaaaatgaaatccgaccgttcggtcatgccgtaatcac

SEQ ID NO: 10146 - DNA, 433 bp, Glycine max
agcttcaagaataatggcctcagcaaacttcttattcccagaaggaaattcaataaataggcctccaatttttaatggaaagggttaccactactggaaaacccaaatgcaaattttcattgaggcaatagacttaaacatttgggaagccatagaagttggaccttatgtacccaccatggtggctggaaatgcaacaatagagaaacctagagaagagtggactgaagatgaaagaagattagtgcagtacaatttaaaggctaaaaacatcattacttctaccctaggaatggatgaatattttagggtttcaaattgtaagagtgctaaggatatgtgggacactctacaagttacacatgagggaacaactgatgtcaaacgatctaggataaatactttaactcatgagtatgaattatttaggatg

SEQ ID NO: 10147 - DNA, 448 bp, Glycine max
  unsure (1)..(448): unsure at all n locations
cttgatctaccaccatcgctgccaccatcatctaagttttctattatttttaatattactagtactntgttttctagtcgtgtatttggctatattatgacattttggataatttagtatttctttatttgcatggtttgattgaacaattatgaattatgttatatgactatgtggtttttatatttgatctattcatgtttcttgcttcatgattggtttatattcttcaatgtatgtcttgtgaatgattaatagtatatgattgtcatatacttgttacgcacttgggctctttgttgatgccaaagggggagagaaataggaattaaatcaagaactcacataagtaattaacttaatttcaagtgaagcataaattaaaaaacacagggggagaatggaaaattaagtgagtgatcgactacganaaagtgtgtgtatgtgt

SEQ ID NO: 10148 - DNA, 435 bp, Glycine max
agcttgttcttgattgtttctatgttctttaacaagctatgaacaatatacttgtccttcatttaactgtctttgggcttggtggccacgctcaacaaagtactttcgacacctactgtacgttgatttgaccaatgctgttatgggaatgttgcaacaatcctttaaagccttattgatacattctgagaggttagttgttatgtggccatatcgacgtccttctctatcataagtcatcgtccatttttcctttgaaatgcgatcaatacatgttgctatggctggactcagttcacgaaatttttctaaattttgataaaaaaaatgtgcttgcaaggagtgtatgctgcataaaattagttatgaataaaaattgtaagtatatatgatagttaaataaacgtgaccatcatatatgaaatcttacccaat

SEQ ID NO: 10149 - DNA, 426 bp, Glycine max
  unsure (1)..(426): unsure at all n locations
tatgctgcanatatntacaatagacctcctcaacctcagcagcataatcaaccacagcagaacaattatgacctctccagcaacagatataaccctagatggaggaatcaccctaacctcagattgtccagccctcagcaacaacaacaacaacctgctccttccttccaaaatgttgctggcccaagcagaccatacattcctccaccaatccaacaacagcaacaaccccagatacagccaacagttgaggcccctccacaaccttcccttgaagaacttgtgaggcaaatgactatgcagaacatgcagtttcagcaagagaccagagcctccattcagagcttaaccaattagatgggacaatnggctacacaattgaatcaacaacagtcccagaaatttgacaagctaccttctcaagct

SEQ ID NO: 10150 - DNA, 216 bp, Glycine max
atatcttgatgagggtgttccatatgttctcaagactggactaatatatttgctgcccaagaagccccctgatgaagatcctcataagcatcttaaggagttccatattgtttgttacaccatgaagccccctgatgtccaagaagatcatatctttctaaaggcttgccctcattctctggagggagtggcaaaagattggctatactaccttgc

SEQ ID NO: 10151 - DNA, 393 bp, Glycine max
  unsure (1)..(393): unsure at all n locations
gcttgaagatccaaggatcaatgttactgctagcgtgtggcaaattgtaagcanaagaccaaganagcacgtcatgcgattccccaggtatgtcgagtcccgtggcagcagagaaccctatcctcacccactcgggaagagaagtcttcaaatcgaccacatcggagaggatattgctggttctctgtgaagggtagaccacagaagcaaccaagaagctggtggaggcatcataggtaatgagaaccttggctactttattgttggccaaatcccaagacgtcgttttgatggatctgatagaattgacgttaattccgatgtgtggatttggtggatcccaagagttccggaaagtgtcaaactcaacagcgacgactngatcaccagact

SEQ ID NO: 10152 - DNA, 325 bp, Glycine max
  unsure (1)..(325): unsure at all n locations
ntctcgctgcanaattcacttcttagttggtgtgtttggttcgcgctaaaggcggtgttcgtcattggaagcgcggtatacagactttgtgtgagaattacggatggcctttgtggataactgggtggtgggtaacgaggaggtttgttattgactgaataatgacattgttgggtttggtgggaaacttggccgtataggaatggcagtcacaacatgggtttctccctcatccttaccctctctatttgccccagttctctaagacctcctagtacgatgatcaaatttgcctcttttttgactcacatcgatcctttcactg

SEQ ID NO: 10153 - DNA, 441 bp, Glycine max
  unsure (1)..(441): unsure at all n locations
agcttcaggattatgttctaatgcagcttcccaattttcatcaatccctttctgtaaaaattagtcaaaattgaacaaatatgatcctgtcaatcaggaaaagggacattaagacaagatcaattattacaaacaatagcttttgaggacaagtaatagatcgcacataacatgatattctaatagaaactgaaaatgactaaatatttgtcaactgcactctgtatgtaccattataaagtctaatgtgctgacccatcgatactttatatttcaatgaaacaagttgatataaaatataaaacaattaaagtccacagacacacatcatgttaggagtatggagtaagctgagctacaacccagattttgtcctatcacggtagactcanaaaactatatatcacttgtgaaatatcaacttattaagccaacataagt

SEQ ID NO: 10154 - DNA, 472 bp, Glycine max
  unsure (1)..(472): unsure at all n locations
tgtaccannagttgaaaagtaactaagcctatgtttgcatgtacgaatgatagctcctaattctgtatgaactatagctgtacatacccctctaatatcatatataacagcttcacaatctaattcaataataatccagactcaagcttttaattttttttagttaaagtcagattatatatattaaaaaaaagcttattaagttttatagactaacctatttagtaataattaatatttttttaataaaaatattgttttaatatgaaatataatattataattattttagtaatttggatatttgaatcattttaatgtttgaaataagttaattaatgtaaacatagatgaataatagaaataaggattattttcttttgttgggacataaaagaatttgatatcctatcacatgtaatgggttatagataaatttgatcaaatcttattatcttaaaatggtttatta

SEQ ID NO: 10155 - DNA, 439 bp, Glycine max
agcttgcatgtgctcgctaagtgcacatgcaaagttcagctagcataagtgaccgagcactaagtcacaagatgcgggctaagcctagcctctaagttggctcctcgcgctgagcagttgttgtaacgacccgcctcatcgctacgatatcaccactctaaaccacgaaaattttaatttttaaatgaaacctccgttaattttcttatgaaaaatgaaagtaaatttttttcacgatagaaactcaccaaacaacgcataattacttaaatgaatatatatatatatatatatatatatatatatatattgtaactaagtacacatcatccacataatggaaagtaaattagctcatacatataattaaatatgtgatttacatcctcaatccaaaaaaggaattatagaaccagctacagaggagttgattaacaaa

SEQ ID NO: 10156 - DNA, 473 bp, Glycine max
  unsure (1)..(473): unsure at all n locations
ggggccganntttgccttttgtgggtcattntaggcttggaagtcaaagcctttgcacttggattntgggatgcaaaattgagctctactttgtgtaattagcttaattagattgattagatgggcctaatcaaggcccacccttttccttctgattagtcacaatatatattagtatagttagttagttagtgagttatatantttcattttgtacaaaacaaaatttagaaacttgttgtgcaagtttttagatcactctctntttctctcaattgtttttcatttttcttcctctcttaaactatgttcttctcctttcttgcacanaatttgttgctcttccaatggtaaagatcatggaaggctaaataatcaattaattcaaggatctagtccaagcaatgaggaatttgagttctggtttagtatttcaaattatgcgtgaatgttcatcttcttcttcaatccta

SEQ ID NO: 10157 - DNA, 439 bp, Glycine max
agcttgcctcaaagaggtccaagaaggataaggcggccgaagggactagttccgctcctgagtatgacagtcaccgctttaggagcgctgtacaccagtagcgcttcgaggccatcaagggatggtcgtttcgacgggagcgacgcgtccaactcagggacgacgagtatactgatttccaggaggagatagggcaccggcggtggacatcactggttacccccatggccaagttcgatccagaaatagtccttgagttttatgccaatgcttggccaacagaggagggcgtgcgtgacatgaggtcctgtgtaaggggtcagtggatcccgtttgatgccgacgctatcggccagctcctaagatatccgttggtgttggaagaaggccaagagtgtgagtatggccagaggaggaaccggtctgatgggttcgatga

SEQ ID NO: 10158 - DNA, 423 bp, Glycine max
tcaacctagaggagacgaaccattccaagtgttggagaagatcaacgacaatgcctacaagattgacttgcctagtgagtataatgtaagtgccactttcaatgtgtctgatctatctctttttgatgcagatggaggagccttggatttgaggacaaatccttttcaaggagggagtgatgaggacataaccaagggcaaggaccatgaagcacttgaaggtcccatgaccagaggcagacttaaacaagcccaacacatcatagagacaaggctggtcatttgtatagctgtcattgatgatgattgaaggcccaagtggagaaagatgaaggcccagaggcagatgcactaccaagactactaattgttgctgaaggcccaaactaacttgaaggcccaagttaaataagtttttagtta

SEQ ID NO: 10159 - DNA, 422 bp, Glycine max
  unsure (1)..(422): unsure at all n locations
agcttgcacttgaggagggaaggatgtttgcagattatgaacaactttcttaactacttgtccttcagacattcctggttctttttgttaatatgtacatcacaatagtataagctatggcgtaaaaacatggtctatattgacttctaagattgttaggggtcaaaaagaccatgtccataagtcatagccttatactatttatatttacatattaccaaaagaaacagtcaaatctgagcgacaaatagttaagaaagttgttcattagctgcaaatatgcttccctcattaagtgcaagcttcttgcgtacccgctattggtgctcatataatcccaaacacaaatccctcttattactagctattttgaattctntagttcctgaatgtcaaccttcaaattgtgctcgttcccctat

SEQ ID NO: 10160 - DNA, 427 bp, Glycine max
  unsure (1)..(427): unsure at all n locations
gcctctcgttagtggtaccttaagtttcatgggataatttcttcatttggttgtgatgaaaaccccatggatcaatgcatatacctcaaggtcaatgggagtaaaatatgttttcttgttttatatgtagatgatattttacttgcagccaatgatcgaggtttgctacatgaggtgaaacaatttctctctaagaattttgatatgaaggatatgggtgatgcatcttatgtcatcggcattaagattcatagagatagacctcggggtattttaggtttatcataggaaacctatattaacaaaattttagagagatttcaaatgaaagattgttcactaagtgtcgctccccttgtgaagggtgatatgtttaattngaaacaatgcccatagaatgactatgagagggaaaaaatgaataaca

SEQ ID NO: 10161 - DNA, 448 bp, Glycine max
  unsure (1)..(448): unsure at all n locations
agctngttntaaaccatatatagatttattaagcttgcaaaccaaatgctcaccactatcagaggagaaacctttaggttgtttcatataaacctcctcctctaaatcaccattaagaaaagttgttttaacatcaatttgttgcaactcaaggtcaaaatgagcaactaatgccaagattatacgaagagaatctttcttagatactggagaaaaagtctctttgtaatctattccttccttttgagtaaatcctttagcaacaagtcttgccttgtatctctcgatgttgcctaatgaatcccttttggtcttaaaggcccatttatatccaatgacctttgccccattaggcaactctacaaggttccaaactttgttactctgcatagaattcatctcatccttcatggcatcataccataaatntgactctttacaactcatg

SEQ ID NO: 10162 - DNA, 437 bp, Glycine max
  unsure (1)..(437): unsure at all n locations
cactatgaaactcagcttcataggcatcatcccttctactacccttgtaggaagtctattttaaaagtagacaactatgtttacaggttctacgtacccaaaaagaccttgacaatttcttctaaaaaatcatgcatctagccacctcaaggactaatatatttttcctctctgtcatatgcattttgttatagggtgaatataactcattaattataagttggtgcttaactcccaaaaaaaaggctttaagcttcaacaagggctttaaacttctttaaaaagaacttcaattntttgtttaagaaagtaaatacaagtcattcttgtaagatcatctatgaagaggataaaatacttgtcattgagtgatgcagttttcattaagataaagagtngaaatanaaggagagaaaattagggatagaaagatagtg

SEQ ID NO: 10163 - DNA, 436 bp, Glycine max
agcttatgacttgtgcaagtttaatttttcaatatatacttgtcaaaatataaaagaaaaaagataaacatataccagttaaataaaataatttaattagaaagatgcttacgtttagtttccaatgtcttaaatatgattgccttatatagtacatacacgtggcgaaaccaaaaaaagaaaaagaatatagttaatgttgaatcataattgataactagtatagaacataggaacgttcttgaccttaaaagaggcttgactttttattcttttcaaagtatgaaaaaaaaaacattgaaaaggtcaattatgatcaaacgaccttttctaatccacactacactgaaacataatctgttaaaaacttaaaatagttaagacgactatcagaataatggtactttactatctgattatttgttgtacgtaatta

SEQ ID NO: 10164 - DNA, 473 bp, Glycine max
cgcaaattatttcactaagactcttactagttgctcagtttcgtgttcgcatctccaagttggaatatttgagggtttacatgacagctcaactatatgtatatttgttaaacaattaattgtcaaatctctgtatatgtaatgtcatgacttcatgcatatgtagaattgatatatgtaaatatccattatggtgactagttaaacaatttgtcaaagaatgggaacttcgcagcaatgccaacagacgatgcactggtcaaacctgtctatagagtacttaagaatcaaacacccaatagcatcgaattactttaaacgacctttagcctgttcttgcccctccttcaagacttcaacattatttggtgcatattaagtagtcctactaaacggaattgctgtggtggcgggttcaggaccccaaatggtagtggaggcaaagaaacttacttgcagctagaactattgac

SEQ ID NO: 10165 - DNA, 373 bp, Glycine max
agcttatgcgcatatttccctacgaacgttcacttgcacaagacatcctattaactaagaaaaatgcacccatatacaatcaaggtagcttcattacctagattatttacatgtacttccaaggtgtatttgttatttacatcacacacgcctccttggctaaatttacatacatgcatactcaaagcatttcggggtaccaaaaattgcacatgcgctcatcttggtatttctaatacctatacatatacaaacttcatgatgaatcttgactacctacgcaataaggtgctacatttcatgcttttttttttttttttttttttcggttttggctacctaaagccacttgcaatttcaacctttttttctt

SEQ ID NO: 10166 - DNA, 475 bp, Glycine max
  unsure (1)..(475): unsure at all n locations
cgcttctacactttgttctagcattattaattgtctcacacaattcaattntaactgattctatttctatacagtgttttggttaggttaccatgtgtgtagtttttaacttatggaatctgcatttgcgatttcagtgcaattgccatgtggtgtggacagggaggctttgatgtgctgacaaattccacaatgtagatctagagattaagtaatgtcccagttgatcttcttagaagagtcttcgaatgcaaaaccaagttggtggctacactcacttggaggtttgctaccaacaatggaaacacccttgctactaatgatatggtacttcttcatgtttttcattatttctccttnttttatgtcttcacatcatcattactagtangggaaaaatgtttgagtattagtataaataagtaagttatgaatccttatagttgcctatacatatnggatatatactcttatg

SEQ ID NO: 10167 - DNA, 440 bp, Glycine max
  unsure (1)..(440): unsure at all n locations
agcttgtaccaaaaacaaaatattnttttataaaatattacatgacaatgaaatcgctatataagatactacaaagatcacattttaaaaaaaattcatatttaaatacccatttttggcgttttttttttcgtgggtgtggcagtgccgtgagacaatggagggtggccatttctcatgtttggacgtcaaagaacccaaaaacattattcccgttctccggttctgtcaaataacagctaaaaacaaagccagaaaatccaaaaaaaataggaaagtgaccttttttcatgttcaagtacccatgtttgggaattttttccgtaggtgtggcagtgccgtgagacaatggagggcggccatttctcatgtttggacgtcaaagaacctaataaaattatttccgttccccggttccgtcaaataacagctaanaacaa

SEQ ID NO: 10168 - DNA, 434 bp, Glycine max
  unsure (1)..(434): unsure at all n locations
cttggagtntccaagtgccaattcgtcttcttctntagtccagtcttcttctggcttcaattcatcagtgggctttccttctgtgtccagcatcttgggatgttcccagcctttgatgacagctttccaggttctgctatccagtgatttgagaaaggccaccatccttgctttccagtattcatagttggtcccatccagaattggtggtctgttcactggtcctccttctttctccatgttcatcagaatttatctccctagatctcactcagtgatttcgagtgcctgctctgataccaattgaaattctgatactgtggacagatgtcgtacaggatgtcacgacatcatgcttcagaacatgctgattatatttgagcgtatgaacaggttaaacaagtaaataacacaagagaattgtatacccagtc

SEQ ID NO: 10169 - DNA, 364 bp, Glycine max
  unsure (1)..(364): unsure at all n locations
agctttaggttntggttttggcgtccgtattgatttttttattttattcaaagatattttgattattttattattattttgcctcttttggttttaaacgtggttacggtatgaaagatcgattggatttttcttaattgaattgactaataaccaaagtgaaaataaggctaaaatcaacccacaaatcaagctttgttctgaaaaatcaactaaaatccgttttaaggtccaacgccttaaacggtcctctttgctattattggttaacgtggactatcaaaagcctagagtcaacatgctactatgtaactactttcaaaaccatgagatcattatggtccatgcctaatgttctttcttt

SEQ ID NO: 10170 - DNA, 435 bp, Glycine max
  unsure (1)..(435): unsure at all n locations
tcatgatgaatcaagatngattcaaggagtntcgatgattacaaatatgatgacatatagctcaaaagtcaagatcacttaatgataacaaagatgatgacattcaagattaagttcaagattgagtcaagaacacttcaaggatcaagaggaaatttgatttcaagaatcaaaaatcaagattcaagattcaaagattcaagaataatcaagatcaagattcaagactcaaagattcaagaatcaagagaagacttaatcaagagaagtattaaaaagtttctaaagcattgagtagcacaagaagttntcacaaaatcattaccaaagagttgtactctctggtaatttattaccaggttatagtaatcgattaccagtggtttaaaaccgttagattttcaaaattcataatgaagagtcacatctgttgat

SEQ ID NO: 10171 - DNA, 403 bp, Glycine max
  unsure (1)..(403): unsure at all n locations
gagaatnnaacaatcactttgtaagtccttcaactatttaaaaacttataactggtccttaaactttttttttcaagtgagttcttaaacatatttattttttaattagatctctacgattaattccattaaagaaatataacaaaagagatctaattaaaaataaattgaatttaaatgacccaattgaaaaaaaaaagaagcaagaacataattaaaaattatcaaatagatccaaagaatgccggttaacgcaactgttattataatgtgatattataatcgtgaattcaagagcttctgggcaggacgttggtcttggctgttataaattagaaaaatgacaataatgttaggattctgaggtatgcatgccagatcagagttctataaaaggataact

SEQ ID NO: 10172 - DNA, 463 bp, Glycine max
  unsure (1)..(463): unsure at all n locations
ngctttccattgtgcgtccatagtattggctttgcagtttcatcagtatgcatattgactatgtttcaacctatctttgtaattttatagatttgctgtgttttcatttgtcttatcagacctcaattttcgtcatgttttttgttacaaattggctcaattctaccttgtcttgtatcaaaatcgacttcattntaactcatccaaatatgtagnttggtgttatgtttgattctatatgtaatttgtctccgcctcttattcacaaatatagttcggcctcatctttaagccagatatgatgttgacttcatgctttccattatgtgttttaattttagtttgtttctcttgatatgtttaattttaacaagctataccagagtgatagaatatcacaagtgtgtacatcataatactatctaatattattatatcttattatatatagcgtttaagtatc

SEQ ID NO: 10173 - DNA, 499 bp, Glycine max
  unsure (1)..(499): unsure at all n locations
agcttganncttatttgttaaacaagaaattcatcttcaatgtctttatgttgtcactnntttctttcaaaatgaaaattttttagcttctagctggcactttnaactggggtttgagccttaacgcacagtttcgaccttaattctatatcaaacccaactattccatctctctaaattcttggcttttaaggtctcttccaaacccaataatcaacccatgttctattttcataaccaaatcaatactagtaccaatacataaccacaacaatggtagcattaatcaatatttcaaatgcaatatcaacatcaaacaattacatgcataatttgaaacttatttcattattctttcgtattctacttcaacctacaaccctcaaaactaaccctaaatcctaataacaaacatttttcataaataaaaacctatttggcatttttttttaaattaaaataaggtaatacggatcaagttgatccgtatgaagcacta

SEQ ID NO: 10174 - DNA, 316 bp, Glycine max
  unsure (1)..(316): unsure at all n locations
atcggaacactcgggtgcttacacaaggtgcaaagactccaactttaaacacttggaaacccccaaaagncccacatcgctaacctgaaccttctctaaatgaatctcaaccaacccggaattcaactttccaacactttccagagtcacatcccaatcccctgaacaccgaatcaacttgagcgtttcaagcttcttcgagttaattattaacggcgcgaaactgtggcctgtaacgagctccttgaggcaaatcgatttcaacgaagaagaggaagtaacggaaagaggcaccgattccgcgccgccaccgtta

SEQ ID NO: 10175 - DNA, 441 bp, Glycine max
  unsure (1)..(441): unsure at all n locations
ntanacggtatataattatttatgttttagtgtttntatgccaaatgttattgactaatgaggggttagggttacttcactctgtangatttatggttacgtgactaattaggatttagttttacttgaccatctatggtttatggttactngattaatggcgaatttatgctaccttactaagtagggattatgattgcttaactaattanggtttaaggttagcttactagtcaaggttcactaattgtggtttagtgttacataacaaattacgatggtttcactaattagtgccattaaaggtttaacatgataatatcaattggtgattaatttataatacacatacaacatacatgataataattaaaaatcttatcaaataacattaaataataaacattngttaatgatattgcatacataattcatattaaa

SEQ ID NO: 10176 - DNA, 438 bp, Glycine max
agcttgacttatttgttaaacaagatttatttcatgttttatggtcacttttctttcaaatgaattttttgttctagtgcctttactgatttgagcttagcaagtttgacttatctattaaacaacattccatttctattcttggcttaaggttttccaaaccaatatcaacatgttcatgttcaaacaaatcaaacagtacaatacaaaccaaacaatgtagcataatcaaatttcaaagcaatatcaacatcaaacaattacagcataatttgaaacttatttcattattctttcgtattctacttcaacctacaaccctcaaaactaaccctaaatcctaataacaaacagttttcataaataaaaacctatttcggcattttttttaaattaaaataaggtaatacggatcaagttgatccgtatgaagcacta

SEQ ID NO: 10177 - DNA, 475 bp, Glycine max
  unsure (1)..(475): unsure at all n locations
cgaagttaataaccggatataaaaaagttgtttttatgctagtttaatgttngatgtaaaaaaagtcttacattccacactagtgggatcttcattggtcacgtaaccaacgtaaaatcctcattctaaccaatcacactttctatatgcccttatatatatacttgtattttaattntagttgaagtactttatcaagctgcatcatgatatattttaacactcatgagtactttaccaatgacaccttttcttcgtaaaaaaaaaaaaaagagaaagaaaactctagaatacacttttctaataagtacttgttcgcaaaatgttatccttattcacaagtattccggcctctattcctcatgtttccacatgatcgttaaaatatggtctaggactcaagggaatatgataatatctacagttggggtgtgaacactggtggcttatcaaagaaactggatacatgaagctg

SEQ ID NO: 10178 - DNA, 437 bp, Glycine max
agcttctacatgtctagagatttctagatagagaattgtccaagttccagagagtttgagagattttgctatgcgaagacctgcagagaccgaagcttgaagaggaaaccgtcctgagagcttgagatgagtttgtgagtgattgtgaggtcctagaggtggaggagacatccccactacttgtattttttcaattcttcatctttctctcctctttgttttaaaggaagcttcccagttatggagagctaaatcctctgttggttcttccttgtaggtacttgatgtaaatatctgtatatctatttaatgatgttttgtgtgttcactatgctatcagaacttcattctaccatgcttttgacttgatcatgtagatgcatgtgtttttagaatcattcaacagtggaaaatggtctgattcttagaacttgata

SEQ ID NO: 10179 - DNA, 488 bp, Glycine max
  unsure (1)..(488): unsure at all n locations
ntgagccaaaatcctggctcaccataaaccttaccctcggaagcaaaaaaaggttataaggaaaggaaatttccaatcaaagagaaagcaaaaaaggaaggaaaggaaattcccaatcaaagagtgggagaaagagaaaaaaagaaacgaaaggaaattcccaatcaaagagtgggagaaagaaaaaagaaaagaaagaaaattcccaaccaaagaatgggagaaagtaaaaaagaaggaaaccatgacctaaaagtggtcttctccctttgattaccaaccaaaatcctgtgcgctagcgacttttcgtcccgcactaaacaaaaacagaaaaggaaaaaagccaaccaaaaatcaaaagccaaaaacacacaaaagccaaaaaaaaccatcaaaagaacccattcccaatggaagtcttattgatccatgatcacgcatgtaatntttgatttggtaggaaaataatttgcaagtcaattcatgac

SEQ ID NO: 10180 - DNA, 444 bp, Glycine max
  unsure (1)..(444): unsure at all n locations
agcttgaggactatacctccgaccaaactccgtcgtatttctgtcttggcccaagtttattgcaggctgtagcaccggttccgcttccctagctgtattggaggcagccttcgtggcattatcttctatagttttctgaagctttagcatggcctccgtgatagaagccatttgatcttttaaggccgataggtcggccttcatctgttcttgcactccctcttcattatccatttttctggatcgagtgttataggggcgcctttgcgctttcttagttatggtgagttccctaaagaaacaaacaatggtgagtatgccaccaaaacatgaatatgctaatgaatgatcagagcacttggatccacctcaaggccctttnttagacaacgtgatgagttgcagaacttctcgttctataaaaaggaacaaagcttttatcta

SEQ ID NO: 10181 - DNA, 426 bp, Glycine max
  unsure (1)..(426): unsure at all n locations
tctagccaaatggacttaccttgaattaattcctttgatagcccctttgagcctatgttcccctttctttgttntgaagctcattacaagccttaagtgaaaaaccatgatatcaccttacccttaaggaattttggagctttggaattgttttgggaataagctatgaaaaagtgtgggggggtatctttcattggaagatatgatttttggccatgcttaatgttatattttggtaatgcttgatgtatctgtatattgcctagttcttgctttaatcttcaaattcgttcttcacaaaaaaatttgaaaaaagaacattcaattgtcgcaaattcgcactgttcaaaaaaaaaaagtgaagttgaataaatgaggtcttgttatgaggacttcgattgggagccttgattgaatttgttgata

SEQ ID NO: 10182 - DNA, 419 bp, Glycine max
  unsure (1)..(419): unsure at all n locations
agctntaacaaagaaaaagagggagtcttattgtttcttatctcanngacaccatctttaagttttgacaagtgagaaaattgttcattttgttctgaaataatcaattaaacaacagttatatatataaataattcacttaagtaacacaatatcaagttattagttctcatagaaaaatctgttaaacaatgttacttaattttaagcactcatttaagtattcgcattggagatactctatggtttttgactaccttgagaaaagtgcaagatagcatccctcccaaacaatgggaaatacatgatgggattgaactcatagttaaagaatattagaatctagaataatgcaattttcatcccttcattttctaagagaatatttggttttgattccaaggtttatgcactgcacg

SEQ ID NO: 10183 - DNA, 431 bp, Glycine max
  unsure (1)..(431): unsure at all n locations
tgtaagacaagaaagtgcaactgagatatgatatgccctaccactgtttggttatcctgaagatggcacatttgtggagcaagatttcgttattaaaggacaattatgtcttgccatacaatagatttgacccagcaggcctgtttgaaattatttaacttactgcaatgaatcctagcttggtaaataattcttcaccgactcatcccagatggagaaaagtagcttatggtggtatgcaacctggttatgatgacaatcatacagatgaatctttccttgaaggaatggtcatgaatgccagtgttgtaaaacgggacatgctaaaggtgatgctgganctcggttccatttctgaaatattatgtattggtgctcttgatgcttggtctggacctgtacacttgcatcaactattgatgaaaattctc

SEQ ID NO: 10184 - DNA, 381 bp, Glycine max
agctataactgtctggtaatctatgaacatatgatgactggatctccagtgggcagatacgtgatagaacagctataaaaatttgaattcgaaattttaaaagctgtaatcgattacacaattgtggtaatcgattaccagcagttagtaaacgttttaattcaaattttaaaagctgtaatcgattacacaattgctgtaatcgattaccagacaggaatttcagaaaaataatttcaagagtcacaacttttcaaaggctttactcatgaccaccaatggtctatatatatgtgacttaaacatgaaattgctcagagattttcagaacaacaaagtgtttatcctctcaaaaagcaatttcattttatcctcttaaag

SEQ ID NO: 10185 - DNA, 442 bp, Glycine max
  unsure (1)..(442): unsure at all n locations
tatgcgcatatntccttacgaacattcactcgcacaagatattcttctaactaagaaaaatgcacccatgcacaatcaaggcactttcgttacctacattatttgtatgtacttccaaggtgtactacctacaccacatgcatttccttggctaaatttacatacatgcatgctcaaagcctcttggctaccaaaagttgcacacatgcaaaccttatgatgaatcttggctatctacacaataaggtgctacatttcatgctntattcaagtgtttntactacctaaagccgcatgcaaattcaagtatattttctttngccgactcaaaatgtattcaaaataaaaggtgtttttgtaaggtattttctttacataacatgcaacatnattatatatttttgggagacattntgactaccaaaaaatatatgtacataca

SEQ ID NO: 10186 - DNA, 428 bp, Glycine max
agctaggttcatacaacacattctccttcttgagggggagtgcgagtttatgttgtgatattattcctgatattatatttattattagaatattctatttcctattaatcactaattgattgatcttgtaatcaatactgattcccttttccatattacaaatagcatgaggtgcggtccacattgacacacaacttacagtaaataattcttatacatacttacaaaattgcaagaccaaagtatgacacctaaaaaagcaaaaagcaaaaatcaaatcttgatgccttggttaaatagtagcatcaactttattccattccacaggcttaacaaaaaaggtttctgaatcaaagaattacttactgagattaggtttgcttcaagaatacagccaaacacctccaatggaatgcctccaaagtgac

SEQ ID NO: 10187 - DNA, 467 bp, Glycine max
  unsure (1)..(467): unsure at all n locations
tccccttattcacttccctacttaaaccccacatgtttctttactatttcatttaaggaagagctagtgtgctaaagtctttgataaagcacctatagaaactagctaacacatggaaaatcctcgcctcacccacattcttaggggtaggccaatctctaaatagctttcactttatcctcatcgacttgcatgcccttagagctcacaacanattctaggaacactacttgattagtgcaaaatgtgcattagccttatttgcattcaagctctctcttttaagcacttccaaaacactcctaatatggtccaagtggtcatcaaatgtcaaactatagatcgagatatcaccaaagtacacaaccacaaatttaataatgaagtgtttcaaaatatgggtcattaatctcatgaaagtggttggtgcattggttacgccaaaaggcatgaccaaccactcatat

SEQ ID NO: 10188 - DNA, 434 bp, Glycine max
  unsure (1)..(434): unsure at all n locations
agcttgtgattgttgaaaaaaaaatatattaaaggaaaaagagaatctcaaggtttcacacttgcacatttgagaagaaaactcattcgaccaggagctcgtgggaaatgcccaaagacaattgtgatagtagggtaacatctgatgttagtcgctcatgcggactcctttggattccttttgaatccaatgatggccttttagtagtataaattctttcgggatcagcccatgtcatcaagtttcagcgggattgacaaacccttgccatcactctatgacttcaaatcaggaaagtttcacttggtcacatgcctttatctttcataggacttaaagtcctctgtctttatgctttcataggattcanagtcctctgacttttacatttcaaacacttcaatgtcttatgtcttttacactntataagactt

SEQ ID NO: 10189 - DNA, 459 bp, Glycine max
  unsure (1)..(459): unsure at all n locations
cttctatttaaatntcgagcatctcgatatattacgggactcaatttcacatccgagtaaaaggttattgtcgtttgaatntgctcagagcttcannatttcaattgcagtgtctcaatatgttacgggactcaatcggacatccgagtaagatgttattgtcgtttggaattgctcaaagtttcttttttaaatttcgagcgtctcgatatattatgggactcaattggacatcggagtaaaaagttattgtcgtttgaatttgcttagagcttctattttaaattctgagcgtttcgatatattacaggactcaataggacatctgagaaaaatgttaatgccgtttgaatntgctcggagcttctatttttcaatttgagtgtcccgatattntaaaggactcaatcggacatccgagtaaaatggtattggtcgtagaagttgctcagagcttct

SEQ ID NO: 10190 - DNA, 438 bp, Glycine max
agcttgttgagtatgcagtgaaaaatggccctgactttgaagctatgatatgtgaaaaacaacgggataatccttcctatagcttcctctttggtggggaaggtcatggttactaccgttataagctttggttatcaactcgtcccccgggtggtccattcaacccgtcttttccatcatcttccatgcccatgatgcttcctccaaatccaatgatgaatctgtctcctgtaaatgtttctccgatgaaccctgcaggaattggttcttcaccttcgatgctaggtccacctcctttccaacagttctatgatcaacaacaccaccatcaacatcctcagtcttttggacttcctggtcggcctgagtatgatccgtcatccaagtctttcaaagggatctctgggccacttccatctgatgttgcaatggagctca

SEQ ID NO: 10191 - DNA, 461 bp, Glycine max
  unsure (1)..(461): unsure at all n locations
nggcatgctngaaatacatgctccagtctgcaggtggttcttagctccctagctaccaaaaacctggatatatccttcccccaccccctgcaattatatattcttttaagaatagaaatctaccttattgtcacattatattaatgaataagatgatattgtaaagtggtcaaatcttataggatgtctgtataaaatttctacattaacagtttatataaattgaaattggtctcttaattaacgtaaacttagttacaaactgcaagtgttagttgccatacagttgaaccctaaaagaatcctgtcttacagtgtacataaacagtaacactgaagcactacgaactatcttagaagttcattttctccaaaacctcatttattaccaaggcttactctggatacaaagtaacaaagtcaataaaatcttcagaacaatgcggaagaaggaagcttct

SEQ ID NO: 10192 - DNA, 442 bp, Glycine max
tagctagagaagaataatgtgtttatctatagagaatttaaaaatcactttgtaagtccttcaactatttaaaaacttataactggtccttaaactttttttttcaagtgagttcttaaacatatttattttttaattagatctctacgattaattccattaaagaaatataacaaaagagatctaattaaaaataaatcgaatttaaatgacccaattgaaaaaaaaaagaagcaagaacataattaaaaattatcaaatagatccaaagaatgccggttaacgcaactgttattataatgtgatattataatcgtgaattcaagagcttctgggcaggacgttggtcttggctgttagaaattagaaaaatgacaataatgttaggattctgaggtatgcatgccagatcagagttctataaaaggataacttggaaata

SEQ ID NO: 10193 - DNA, 434 bp, Glycine max
  unsure (1)..(434): unsure at all n locations
tgctttccattgtgcgtacatagtatggcttntgctgtttatctttatgcatattgactatgntncaacctatctttgtaaatttatagatccgctgtgttttcatttgtcttatcagacctcaattttcgtcatgtgttttgttacaaattggctcaattctaccttgtcttgtatcaaaatcgactccattttaactcatccaaatatgtagctcggcgttatgtttgattctatatgtaatttgtctccgcctcttattcacaaatatagttcggcctcatctataacccagatatgacgttgacttcatgctctccattatgtgttctaactttatgctagtttctcttgatatgtntaattttaacaagctccacaagagtgatacaatatcataagtgtatacatcataatactatcaattattatta

SEQ ID NO: 10194 - DNA, 437 bp, Glycine max
  unsure (1)..(437): unsure at all n locations
agcttcacaatacccaatttatacattatccaaacatcatgaactatcaaaaccaagaaaacagggcaaaggcagaaaactctgcccaaaaacacaaaccaataccacagctttccttactcaaataccccagtaacattctcttcgttccaattcgttaaccgttggatcgactcgaaaattttactggaggtccctagtacataaatctacattgtggccattgggatctgctagaaaacgtccagaacccaatctgtactactctttccacaaccagcaaatacacatcattttctgcacaaagccaaaattctgctgcacatttcaccagcaaaattctgcataatagtgaagattttcgaaatcacacttgccctcgtccaattntgcccaaattgaatcctacaagtcctaaatcatgtataaatcatgtc

SEQ ID NO: 10195 - DNA, 308 bp, Glycine max
  unsure (1)..(308): unsure at all n locations
ngctctanattacattgatgtttgtatttatgggaggaggttgtatgccatttttgttttaagagtagtgtcccactggtaaaactaactttccaaatttttgccttcgcaggaaatggccccgaggaagcttgcctcanagaggtccaggaaggacaaggcagccgaaggagctagttccgctctggagtatgacagtcaccgctttatgagcgctgtacaccagcagcgcttcgaggccatcaagggatggtcgtttctccgggagtggcgcgtccagctcanggacgacgagtatactgatttct

SEQ ID NO: 10196 - DNA, 334 bp, Glycine max
tcaacattctttgtcatccgctacatctccatggcggaagaccagcattaaacgaccttattgaagctcaaagatccacccttcatagaagctccacacgcaagcatccatctcaagtaaagccacactaataagaaactgagatagtaaaaacttgggtgttggcgaacaaagaaaagaggtcatggttggctcgggcatgaccacacatatccaggatgaattggtagttctgctgtgagactaccaaaacatttgtgtttgtcataccaagatatgcccgtcttgagtcccgacattgtgcaacatatattacctctgaatctcgagtgtt

SEQ ID NO: 10197 - DNA, 412 bp, Glycine max
  unsure (1)..(412): unsure at all n locations
gacactatgaatactaagcttagaataactnnttgaggaagagaagaatgatgtttaataccattctaatccttagaataaggtggcaacaattgataaaggtgatcagtttgctctgaatgaagatgttggagctcaaaaagcagaagctcaaaatgagactatccacacttctccattctattaccttatttcctttatgagtcagttattgtagaaccttcaaaggttcaaggggaggttcctaatgtacatattccttctcctccacctgatgttgaaccttctactaggtcagtagaaaatatgtgttcggcatctaacaagtgcgtcggattgcacaagtagtataaaactgttagaaccgagtatcgaacactcggagaacttgtgttatttggtaagctatttc

SEQ ID NO: 10198 - DNA, 446 bp, Glycine max
  unsure (1)..(446): unsure at all n locations
gccaagaagggtgactgactgaacctgaancnngnacctaaataccctgtgcagcatccagaggtttggctataacttttcgacacacacctctccgatagactgacttcttattacataatgatgatacttataacgttttgattcattcctatcacttttatgaagaattacttgataaatccctatcgaaggattgaaactatgtaattaacatcgatactttataataacagccaagggttacattctctttaagcatgtagaatatacaattcacattcaagtgttatgtgagtgtgcgtgaggaataaactgtggtcctataaacaacaccagcgaataagatagaggatggactcactataacaaccataaaatattattgtgctcatgataaacagagtgctggatggatataatgcggtgcgctatagtttaagact

SEQ ID NO: 10199 - DNA, 242 bp, Glycine max
ctaacctcatcgtctctcacagtctatatatgtgggagccaattctatccttgtgtacggactctcagccacttatgatagccgtcgatgctcccattactgcttcccctaaactctctgtcctttctgcacaccgcatcacatgccttgtgaactccttagagtaccctagcattgtggtcactgaaaccccgtgagatgaaaggcgtgatgctttctcctggtggcactcctctcatggg

SEQ ID NO: 10200 - DNA, 217 bp, Glycine max
agcttgctatgaagaagggtcgataggtgaaacttcctgcttttattgctgaccaccgagcggttcctgaaaatatgtcctgggggtcatgagaccatggggacgtcatgtggggtgctattgcccaaaaccaagcttgaccaatcccgacccaacccgggcatagtcggtaagtgataacctgtgatgtacctaaacaggcgatcttctggcagtc

SEQ ID NO: 10201 - DNA, 396 bp, Glycine max
  unsure (1)..(396): unsure at all n locations
tcctgactcaccatanaccttgacccggngtgagaatgtctatccttaccctcggaagcngaaaanaagagaaggataatttccaatcaaaggacacaagganagaaggaagatttccaatcaaagagaaagggaaataaggaaagaaggaagatttccaatcaaagagaaagcaaaataagaaaagaagganaattcccaatcaaagagtgggagatagcataaagaaaagaaagaaaattcccaatcaaagaatgggagaaagtaaaaaaggaagaagaagaaggaaagaaagctcctgatcatggatcgaagganaacagaagaaatgtgcagaaaggtctttggaccggacaatatctgaacaatacagaattgtcaccaaatgaacaaaaa

SEQ ID NO: 10202 - DNA, 227 bp, Glycine max
agcttcctatatccgatcatggaaggacttggcaactgccttcattaggcagtaccagtacaatacggacatgactcccgatcggaaccagcttcagggtatgactaaacgagagcatgagtccatcaaggaatatgcccagagatggagagatctcgcagcccaagtcgtactgcccatgacggagagggagatgatcaccattatggtagatacgttacccacgt

SEQ ID NO: 10203 - DNA, 446 bp, Glycine max
  unsure (1)..(446): unsure at all n locations
gagggagagaaanagagagtggggagcatganattcanagaagaaaaaagggagagaagttgaactttgagttgtgtctcacaagactctcattcatcaaagttacaacaagtgttacacatgcttctatttatagactaggtagcttccttgagaatctttcttgagaaaacatccttgagaagcttctntgagaaaacttccttgggaagctagagcttagctacacacacccctctcataactaagctcacctctttgaggagcttccttgagaagattcctaaagaagctagagcttagctacacacacctttctaatagctaagctcacctccttgagatgagaagctagagcttaactacaaacccnctataatagcgaagctcacccncatgaaanaatacattgaaatacaaaanagtcactacttacaagactactc

SEQ ID NO: 10204 - DNA, 226 bp, Glycine max
agctttgttggtgtaaagaagaaatcacatgtttgtcatcatcaaaaagggggagaatgtgaatgtatctatacatgattttgatgatgccaaagaagaatcaaacaaggctgcttcaaatgataagcatttgcttcaagaataattcaagagtgcttcaacaaacaaagccttgtttcaagattcactaaagaccaagccttgccttaaaacaaagtgctttcaa

SEQ ID NO: 10205 - DNA, 449 bp, Glycine max
  unsure (1)..(449): unsure at all n locations
tctcatttcatattagcttctaggtgggtntagagcaganaaacttcttcagtatcttgaggaatggtctagaaaccttgaagcctagtgttagttgtcttatacgactaaactttgtatagaanaacctttttcaaaacatgtatagtttccccaatttatagttctcttgtaggaatttgtaaataaatcttgatatgttctggtacctatcattagagtacctttaattggaattaatgagaaaatctgtacaatttcatgtcaaaagagtctaatatcttgaagtcctaagaggatcagttgtgctaagcggaccttgtgggctcagcgcgcatccactgctaagcgcagctntagcatgctntgcgtgacaagggaatctggaagagcacaagaatcaatgccatgcgctaagtgcgagatcagctngctaagcgagacatttg

SEQ ID NO: 10206 - DNA, 227 bp, Glycine max
agctttgttaatatgatatcttaacttctaaaatacccattttctctccccctttggcagcatcaaaaaggccaaagtgcgtaaaacaaaacatacatgaataattctaaaacatacacacagtacaataccaaatgtaagtacataccactagacatatatatcataaaaaataattaagtttaacacacataaccataaacaaccaaaagcaagtaaatataatc

SEQ ID NO: 10207 - DNA, 518 bp, Glycine max
  unsure (1)..(518): unsure at all n locations
gctcttcntgattttctagttctttacaagcttagaacaatatacttgtcgcttcatttaactatcttgngcttggcggccacgatcaacaaagtactttcgacacctactatatgttgatttgaccaacgctgttatcggtatgttgcggcaatccttcaataccttatttatacattctgagaggttcgttgtcatgtgaccatatcgacgtccttctctatcataagccatggtccacttttcctttgaaatgcgatcaatccatgttgctatggctggactcagttgacnggaattttcttaaatttgataaaaaaaaatatgcttgcaaggagtgtagcctgcatganattagttagcaacaataatttgaagtatacatgacagttaaattaaggtaaccatgataaatgaaatcttacccaatatcttcaatatttctttttggttggcattattgaatntgcgattgaaaatacttgctatgtgtcggacacagtatacatgataaccgt

SEQ ID NO: 10208 - DNA, 231 bp, Glycine max
agcttcgatggatatgagcgttgcaaggctaaagaaggacgagatccagaggctgaagaaggagatcaattagctccgacgtccggcgacagagctgcatgactcagagacaagcgcgacgctgaagaacctcctcgaagagggagaaagaatggtgacattcctagagacgagcgcgccagcaccaccatcaccatcgctgatgttattcaaaccctaaccctcctcacc

SEQ ID NO: 10209 - DNA, 358 bp, Glycine max
  unsure (1)..(358): unsure at all n locations
gcctcacgtcagtggtaccttaagtntcatgggataatntcttcattnggttntgatgaanaccacatggatcaatgcatataccacaaggtcagtgggagtaaaatatgttntcttgttntatatgtagatgatattntacttgcaaccaatgatcaaggtttgctacatgaggtgaaacaatttctctctaagaatntggacatgaaggatatgggtgatgcatcttatgtcatcggcattaagattcatagagatagacctcgaggtattttaggtctatcataggagacctatattaacaaaantttattagtgatttggatgaaaattgttcaccaagtgttgctcccatcgt

SEQ ID NO: 10210 - DNA, 227 bp, Glycine max
tagctttagatttggatccataggactatcaacaggtctacaattctgcatacctgtctcctccaaaatatcaagagcatacttcctctgtgagatcacgacatcatcttctgattgagcaacctcaataccaagaaaatacttcagatatcccaaatctttggtctggaagtgactaaacaagtgttctttaagttgggcaatcttagtagtatcatttcctgtta

SEQ ID NO: 10211 - DNA, 377 bp, Glycine max
  unsure (1)..(377): unsure at all n locations
ctagctctgaccactgtccttccttgccgcggtgcttcttttcatgtgcgcctgagtgggcttatagcctaaaccatacttcccacgatttccttggggttttatcaggctagttatgccgccattgtctttgcctaaacccatcccgggttcataaccgttccncaacataactcgggccatcattaccgncgcatcggacagacaagggtgcccaaagagggagtccacggaggagatgctgaccacctcaaaagactggaaagcggnttctaacgattcttctgcggcttccacataaggcatggaggatgggcagcttaccaagatatcttcctcgcctgatacgatgaccaagtgcccctccactacgaatt

SEQ ID NO: 10212 - DNA, 227 bp, Glycine max
tgcttttcaaatgggtaaaaggctcacattcactttcttctacatcacattcaaacttgtccaaataaataataaagtcatctcgactcaaagaaagtcatataagtctcatacaattaatatagaacctatatcctaatgtcacatcctatcagagcgtggtgttcccgtgtcctctagcatgaggttcttcatagtcatccacctattcatctgttcccccgaac

SEQ ID NO: 10213 - DNA, 432 bp, Glycine max
  unsure (1)..(432): unsure at all n locations
ggtatgtatataacattgtatagggttatgggtgatgagaggtgcacagtgcctgagtgggtagcatgaacatgatgaccattatggagcttcactgtaactgggttaatgcgttcatatgaatggagattattcatggaacaagatacgtgatctgtagctcctgaatctagtatccaggagctagtaaaaggttgagacatacctgcgttggaacggttatcaatggtgcaggatgagaatgacgcaactcgtttggtttgctccgatgccgcgtttacggccgatggccgctggattaaagcaagtanggccttgtacttctcacgcgagaatcgcacgagatctgngactcatgatgctgagtttgatcatncagcggtttattatccaccgtcatcacgtcatttactgtaggtcttcttccattat

SEQ ID NO: 10214 - DNA, 226 bp, Glycine max
agcttgtgttgttataagaacttttatgacagtaatgccactgctgcaccaatgaatacaatctttaaaggggtgtcattgtgcaaccattgatgtacttaattaacatataaccacgggcaatttgggaattgcaaaggcttcaacgttggggttggggtccgttgaaagcaaaatccacaattatgtcccctcttcctcatctgtccaaggaacaaccacttct

SEQ ID NO: 10215 - DNA, 377 bp, Glycine max
ctgactcgggatggagttggattagcgaacctataccgacttcaaatgctgatacattcccataagttggattactggagcctataaatgcaactgctgataaaagcgactacttgtggtactggctaacgtatatagtataccttctaggatcatatagctgtcttctgactctcaattcgctgcccatgtgaacacttcatttctattctcaacattgatcttgaagacatgctggatctatactgctcttatattgaaaccttggcatgcccttatgctttctacatggaagctgtacgaaataaattaaatatacatctatatatgtctgttgatactatttgatccctattgacttgctaatactgcatatt

SEQ ID NO: 10216 - DNA, 223 bp, Glycine max
agcttctgcttattagtgcacacctctttcaagaatttagcatatcttggaatttgctttattgcactagcaagggtatgtttacctctacttttctaaatgtttccaagatctccttctctgcctcttccatttttttgatggaaattgctcttagagggaatggaagagggatatgctgcttctcttcagattcacctgcagagaaatttttaggtaactt

SEQ ID NO: 10217 - DNA, 449 bp, Glycine max
  unsure (1)..(449): unsure at all n locations
gcagccattgagagagctcgagtgccactgtcactagacaccatataattcaataatggcccatataagcacacaagaatatactgaacatttggcagactttagctagcatcggatataacatggtttgagcttctcttccctaattaaaaattgaagtttctacatggatatacaacatattattaattacccggatagagaagatgataaaagagagaaagatgtacatgtgatgataagtaatatatatatgatttgtttcttgctaccataagtatgatatcatatgataaaatgaacaggtcaatgaaaagacataagagtatcattgtgagtgttacattatgcatatatgtccaacaattataactctanacttttagacagctctattgtttgtatagatatatcatgataagacactagctactttataagaactatat

SEQ ID NO: 10218 - DNA, 229 bp, Glycine max
tagcttctgcttattactgcacacctctttcaaaaatttagcatatcttggaatttgctttattgcactagcaagggtatgtttacctctacttttctaaatgtttccaagatctccttctctgcctcttccatttttttgatggaaattgctcttacagggaatggaagagggatatgctgcttctcttcagattcacctgcagagaaatttttaggtaacttactct

SEQ ID NO: 10219 - DNA, 372 bp, Glycine max
  unsure (1)..(372): unsure at all n locations
cttactatcatgatgtccttgctacatccctctgttctgtgattaccctactaacatcacacaataatctattagacacaattgcttcatgtttctatttctcattcaatgtttttttacaatggcataacaatgacattgtgccactttntacagtttacattgactgtgtgatgctattacaatccctgtacatagatagctacaagcactcccccaaatttgaaccanatatcttttctaggacaatgttttcctacaacctacgacaaggtgtgcaaggcaatcatgtcattcagttagggttaaaaataaattcagttatgttaggctcacagaggtgcaaggggttccttcatttattgatacata

SEQ ID NO: 10220 - DNA, 220 bp, Glycine max
tttgcaagcttaacgaacaaagaggtaaaaactcgacataactatacgaaagaaaaaaacaggacaccttcaaccgcaagctaaaccaacaggcccgacttggagctgggaccatatagctacccctaattcatatatactgatttgggaattgacaaataatagccagtgctaacaaaaaaaaattatagataaaatgataatttggatcaattcgtca

SEQ ID NO: 10221 - DNA, 235 bp, Glycine max
tattctatttgctgcaagacattaatcctgttcgaaatatatatatatttgaagagatgtctatcttatacaatcaaggacttctatacacccatggtcagcatgtttaaagaatacatttattatgtattatgtattagagacgaattttaatagaacaattctaatattcactcaatgttttaattgactatgtttcatatacatttacttataggaccaataaaacacatac

SEQ ID NO: 10222 - DNA, 219 bp, Glycine max
ttagcttgggtgatgttgcgcgtactgatgggtaccatgaggtgtttgctgggttttgacccacgcaggtgttgaatagacggcatgggcatctccctccttcctttttgcccctgttgccccgattcttttggcattcgcgtttgtggaggaaatgtaatcaaactttcctcttttcaatccaacctcgattctttccccggcaaacaccatatccgc

SEQ ID NO: 10223 - DNA, 353 bp, Glycine max
  unsure (1)..(353): unsure at all n locations
ctggaggaatcttctggagggcccaagtgtgccataatgctatttgcacccccatctttactaaatgcacccttttctatttgtgtgcaatangttttttccgtaacggtacgaatacttacgaatttcgtaacgatacctatattccttccgcaaggttacgaatcctcacggattatatattttactctcttttacctttcgaagaagccacggaaactcacggattgcgcaaaaacacttcttttcgacttccgccacattacggaattacacggatcgcataagcctgctttcttttaatgtctgagacgtctcggaacttcatctatggcatggtatcaagtaataat

SEQ ID NO: 10224 - DNA, 229 bp, Glycine max
agcttagacgcagtctcaccaaggcagcaagcctctacaagtcttccttaaagaagacgcctgcatgcgtcagtatcttcaagacctttgatcacttggtaagcgtgcaattccattgttccccatcattctgcttccatggattggggtttttggattgaactctacagcgtcatttttgtgattagttctgcgtggtttttggtttaataggtaaggagctagaaga

SEQ ID NO: 10225 - DNA, 492 bp, Glycine max
  unsure (1)..(492): unsure at all n locations
gctttgtagttntgagaataatctcattctagcatgtccaagctntntgtgccacaccaagtgaatttcctttatggatagtcggcaggttacattntgttcataaggatcaccaaggtgccacaatagttccttacgacacaccctttctagttgaaggaaacattgtgtccatagaaaccatgcatgagagtcaggcattggaacatacacatttctcttgtcatgtgtcatgagtagagtagccactatctgggtaccatggtggcatgtctttttccggttaaagatatatgccacaagaattatttatccttangacccaaatttntttgggttctttcttgttagtcttgaaagcattggacaactcaatcttaggtagatttctacacttgaatgtcatatgtccaatctttccacataaatatcatgtaatggttntcttattatgaagaataagcattccgttatatccatgtctagacctat

SEQ ID NO: 10226 - DNA, 229 bp, Glycine max
agcttgccgccacggagttttccgactatgctcttgtgtggtggaacaagctacaaaaggagagagcaagaaatgaagagccaatggttgatacatggacagagatgaaaaagatcatgaggaagcggtatgtgccggctagttactcaagggacttgaaatttaagctccaaaaactaacccaaggcaacaagggggttgaggagtatttcaaggaaatggatgtgct

SEQ ID NO: 10227 - DNA, 408 bp, Glycine max
  unsure (1)..(408): unsure at all n locations
ctcaccatataccttgacccanggtgagaatgtcaatccttaccctcggaagcanaaaagaagagaaggagaatntccaatcaaagaatacaaagagaaggataatttccaatcaaagagaaagcanaaaaaggagagaaggataatntccaatcaaaggaaaaaagagaggaaaggaaattcccaatcaaagagtgggagaaagagaaaagagaagaaagatcattcccaaccaaagagtgcgagaaagtaaaaggaaggaaagaaagctcctgatcaaggatcgaaagatatcagaagaaatgtgcaaaaaggtctntggaccggacaatatctgtacaatacagaattgtcaccaaatgaacaaaatataaagggaaaggaaaccacgacttgaaagtggtcttc

SEQ ID NO: 10228 - DNA, 228 bp, Glycine max
agcttgccaaggctgagctaagcccaattcaatttgatctgaattcggctaagcgatggcctgctcgctaagcacatcatattcaatagctaagcgtgacatgtcgccgctaagcccaattccttgcggcctaaattggggttcattgagctaagcgctactcatgccagctaagcccaattccttgcggccatagcagcgctaagcgatccatcatccgctaagcac

SEQ ID NO: 10229 - DNA, 343 bp, Glycine max
  unsure (1)..(343): unsure at all n locations
gctgactgcggcgagtcgtgtcatggcggcctcgaagcggtccaagctgttggccgtattttccgcatcatcatccaccatcgaagaggccaaacaagagcaagtcggaccaaatcgttacgaatgctactctactgctaacgaactaacaggcccaactaagtgagataatagaactaatatatcccatgcataccactcatctacatatttataatacattgcttctaacaacatataatntttttgtaacacaatatgctgacatcctactcacctaatatgcggaatcgttataactgcctaatgtagtggatagctacaaccaactagtgctttatgc

SEQ ID NO: 10230 - DNA, 229 bp, Glycine max
agctttaatgttaacgtcttttcaaatcttataaatctataaaaaaaaatttaaaatcttttaaatttatactattaattaagggaatacctccatctggtgtccataaatgttagataattttatcttttttcaatttttttaacttttactactcttttttaataactatccaccactctcatcttgttaattattttttattagtcttattttttattttttaact

SEQ ID NO: 10231 - DNA, 424 bp, Glycine max
  unsure (1)..(424): unsure at all n locations
tgcgaagacttcagcatataattgctcttctacagtttgctctttcatcaaactnggtctcaaactcanatcaaagtctctaatagccaactaactcgggaaagcattccattttattgtattttttccanaatcagataacctatctaagattacattcagagttatgcacttataagcccgtggaatttcgagcactgacttgatcagagctaagaatcaacactaattataaaaaaaaaggatttaaacttagaaactctaattacgttcgacttgaacactaaagatctaccggcaccgttcatctaatgttcattcaaccaattcatttcccctctcanattaanagcataagataaacacgccaattaatcagagcttcggaataaaaaacacaactcacaacantaaacgcgagatc

SEQ ID NO: 10232 - DNA, 232 bp, Glycine max
agcttatcatttaagattttcacagaccttttatgtgtctcactttcttcaaaaagatcatttttactattttccaaatcttcgtaatctttttgtagaaaaacatggtttgtctgaagatcatacctttcttcattaagctaatcttgcaactctttaagtactttcaacttattttgaactacctcaatttttgtttctaaatcatgaaagttctataataagatatcct

SEQ ID NO: 10233 - DNA, 504 bp, Glycine max
  unsure (1)..(504): unsure at all n locations
gctgtcacctctgtntctctacctntcatcacanaccctggtggttgagtgacanaaacttcttcttctagtgagccattaagaaatgcagaatttacatccatttggtgtacttcccagcaattgaagctagccattgctattacaagtttcactgtttccaacctagcaacaggggcaaatacttcatcataaaccagaccttgcttttgcaaaaatcccttngcaaccagtctggctttgaactntgttacttctcctctaggattcaacttagttntgtagacccattntactgctatggctttctttcctattagtagctttgtgagactccatgtcttgtttctctcaatagacctcaactcttcttccattgcttcaacccaatgtgagtgcttcanagcttcttccacgccaataggttccatctcagcaagtaaggccatatggacaaagtcaccatcaactgtaatcgaggaatctgggaatatctcatagtca

SEQ ID NO: 10234 - DNA, 226 bp, Glycine max
tttctttatgatcatatgtaggctaaaaagggtgttgaaaaggtctttttggcaagtgtaaaaattgatgaggttaccttgattgtcatatctttgcaatcttatatgtgtatttaacaatgcatggtagtgggattggaagagtaagagagcgagtgagggaaaatgtaattgttagaaaattaactcgatggggctttatggtggcaagaatggggtctgaggt

SEQ ID NO: 10235 - DNA, 359 bp, Glycine max
  unsure (1)..(359): unsure at all n locations
ttctatactatctccgatccgaccagacacatgtaagaattgttgctntagattatcagcttctttctgttatgacaatgtaatattgttttatttcttatttacaaagggtattgtggttcaaagatctgacttaactgggcttataatgcggcgaaatgaactagcaagtgatcttcttaaggcattaactntgcaacaactgcctccaatgttacaggtatgggcttttccataatttatataatgtatttttaacaacttcattggattgccattacgagccttcattntctgattgtagagtcctagcatttgcaaaggttgtcgccatcttaatgtgtgtagcatttatcata

SEQ ID NO: 10236 - DNA, 228 bp, Glycine max
ttgcttctcccccattttcctataaataggggaagaggtgaagggaaaaaatgttcagccctcctggtaattcgagaatcacttgaaattagtgaaaaaaattgtttccgtgaagaaaatccaagccgaggcgcttccgtaacatttccataacgtttccgtgggtgatttcgcgaagattttcaaccgttcctcaacgttcttcgttcgttcttcatcgttcttcgg

SEQ ID NO: 10237 - DNA, 352 bp, Glycine max
  unsure (1)..(352): unsure at all n locations
gcttagctaaacacacctctctaatagctaagctcacctccttgagatgagaagctagagcttatctacacacccnctataatagctaactcatccccatgacaaaatacatgaaaataaaaaaaattctctactacaaagactactcagaatgtctcgaaatacaaggctaanaccttatactactagaatgaccaaaatacaacgcccaaacgaagcagaaacctattctaatatttacaaagataagcgggctcatacttagcccatgggctcgaaatctatcataaggctcatgagaaccctagggccttcccttggatctctggtccaatctacttggattcttcta

SEQ ID NO: 10238 - DNA, 227 bp, Glycine max
ttgcttggtatctcagcaaaagttcgtttcatcagttagatttcttgttagttagttagaattagttctcgagtgtaactgattaaaaactaccagcgctttctctttcttctgctactctgcaaagatataaatacgtaataaatgcatcagtaaaaaggcatgcagtatttggtcactttgcacatgatttacgcttatctttctctctctatggcacaatacct

SEQ ID NO: 10239 - DNA, 395 bp, Glycine max
  unsure (1)..(395): unsure at all n locations
tctcgaacctggaacacactgtcaccacttatctcccttcatcttcctcggccaacccccaccacacaaacagcatcatcacccctcccaaaatgaaactagatgttccttgtttcgatggctcggacccttcannggtggattttaaaatttcccaattntttgcttaccactcaaccccagaatccgagagactcaccatagcctccttctacatggaagggccagctntagcctggttccaatggctttcccgcaaccaccaactcacaacctgngctagttntctcgaagccattgaggcttcgctttctcactccccatatgaagacccaactgggattctcttcaaattaacccagaagggcaccgtctctcagtaccttcagcaattc

SEQ ID NO: 10240 - DNA, 225 bp, Glycine max
ttgcttgtttatcaacttgatccgcaagaagcttacagatcaacctattctccttgcggaacaacttgatctgtaagttcaacacctactggggatcatctattcctattgcagatcaagttgatccgcaggttcaacacctactacggatcatctattcctattgcggatcaactacgtctctactgcggatgacctaaatccttaagcggatcaactacatac

SEQ ID NO: 10241 - DNA, 456 bp, Glycine max
  unsure (1)..(456): unsure at all n locations
tagcatctaggagacaccatangaacacatgagcattgttagatagaatatattcttntagcatcaggcacctattangaagaaccaatgcgtttctacttgtttntacacatcatttctctcgcgtgattntcctttntgcatagatagtttacatacctgttcatattcacactgatattgtcacaccagacatttattcactgaaatagcttaccaagtaacacaagttcctcgagagttcgatactcagttcttaaccatttatactacttgtgccatccgatgcacttgccggaagcgaacacgcatcatccacgctaagcccactgattaaggttcaattatagtgaagatgttaggcttagcacaatgatgtgcgcttagctgaactattcatccatatagtcaagggtctgtgcgcttagcgcaagcaagctcaggcttatcacgtga

SEQ ID NO: 10242 - DNA, 247 bp, Glycine max
ctacctgcatgcatgtcttgcttgtggatcaacttgatccgcatgaagcttacagatcaacctattctccttgcggatcaacttgatctgtaagttcaacacctactgtggatcatctattcctattgcagatcaagttgatccgcaagttcaacacctactacggatcatctattcctattgcggatcaactacgtctctactgcggatgacctaaatccttaagcggatcaactacatacctaca

SEQ ID NO: 10243 - DNA, 430 bp, Glycine max
  unsure (1)..(430): unsure at all n locations
aatgtctatgaatctcgccagatggcagtccttatctatgttggacggtaccacgggatatggaacttccgcacccttatctgaagctgtctctatcctctcttctctttgttttgcactgctactctattcttcatctttattattnttttaactntctctttttctgctttatctttttctttatctacctctatatatacttctgggactgttatgttgatctctccgaccattattgtgtttcccccctctgactcattgcgtcagttacctcattnttctatgtaacagtagtgtccttgagagcaaattgctgcttcagagcaacaacgtnctcatcctcagccgccacaagcattccgcttcttgtacaacaacttacactctttttgggatttttcatatttcccaaagtgtggatgactct

SEQ ID NO: 10244 - DNA, 214 bp, Glycine max
gcggattccggatcttacgaccgagtgaaagggatcaagacatggggtctgtgaaagcaccgtacagtgctgattcataccaggcatcaataaaatgacgagagaacaggtgcgtctatgagggaggaataaaacctgaggcgaggagaacccttgctatcgatttgccatatcctacatggtgcgaaagattccccatcaacaccaacaaatg

SEQ ID NO: 10245 - DNA, 240 bp, Glycine max
acattatgttcatgacacacatgcacaaatgatgattcggatattctatgcaaaactggtcatgcatgcacctatgtggacgctcaagtgtcatatcattatgggcatgtgatgctagggctcaagattcattacctctatattactcaacccaacgattgcaaaatatggtcttatatttatatgtgcatacattcgagaacattttgtggcgtctgggataatcttcacagcattcac

SEQ ID NO: 10246 - DNA, 226 bp, Glycine max
tttgcaagcttattaggagaagaataagaagaagcaagagatcactgagaaattcttcaagatgtaactgaaggagaaggaagaaagtcaaggaaatgagagaagtcaacgaggtcgaggcagaggtcgaggacagcttgggctgatcaactctgtgaagggtgtttacttggcaaacaaattagaacgagttttccaaagtagtcaaactcaagagctaagaaga

SEQ ID NO: 10247 - DNA, 397 bp, Glycine max
  unsure (1)..(397): unsure at all n locations
atgcattctatcagaagcatngcattgcattcaaatatgtcttntatgcgttcaacagcatccaaaggatagacctacaatgtcaactgttgttgtgatgttgattagtgagagtgccattccccaacctaaggaacccgctttccttatggacaataacgttntttgtgatgcaggttcttcttccatgcatcagttttcaaccaattgactaagtactaccatgttagagcctcagtagtggatcatttacctgcattggatcttttaagatgggtaaaacttcagcctcggtgagtcggtttgtattcactatactgtatacatatttcttcacatgtgttggttaagcctagtgcatttcctttaccattgcattgagcctattcaaattcac

SEQ ID NO: 10248 - DNA, 229 bp, Glycine max
agcttttatcacactccagatattttctcaaagatcccaacggttaaatcatggtaaagtgtcttgtgaagttgaaaaccaaatttcgagaggatccaacacttaacgaaggctgggcagcgtttctaccgaggcagcttcatgtagttttctctagaagcttcattaagaggcttcctccagaagcttcattaagaggcttctagcacactccagacatcttctcaaa

SEQ ID NO: 10249 - DNA, 81 bp, Glycine max
ggtgtcggtcgttatatggcctcgactgatatctttcagccgacattgcgcaatttcttttacaaacgctggccgataatg

SEQ ID NO: 10250 - DNA, 227 bp, Glycine max
agcttcttgcgtagccgctcttggtgcttagaaaatcccaaaaacaaatccctcttattactagctattttgaattctttagttcctgaatgtacaaccttcaaattgttgctcgttcccctctttcttttctgcaaaaaagaaaatcaaatgttgtcaaaacatggatgaagtcctaagaaaatcaatatcaaagaaaacatggatgaaatcacaattaaaaagca

SEQ ID NO: 10251 - DNA, 390 bp, Glycine max
  unsure (1)..(390): unsure at all n locations
tagaagatctatctatgggctaaaacaagcatgccgccaatggtatatatagtttcataatgtggtctccanatatggattggaggaaaatgttgtaagccaatgcatgtatcttatagtgtgtgggagtaagtatattttcttagtcctatatgtatatgatattatacttgcaagtagtgacttgcgtcttctgcatgataccaaaaatttcctctcacaaaactttgatatgaacgatatgggtgaagccttctatgtcattagaatagacattcatagagatagatctctaagaacatcgagattatctcaaaaggcttacatagaacaagttgtgataagatataatatgcacaattgtcatcaattgctacaactatagttaaa

SEQ ID NO: 10252 - DNA, 229 bp, Glycine max
agctttagtgaataaattcacccgttgggagacaacatacactttgactatgaacctacacataaacattcattttctttttgtaaaaaactctttataaatgtctatataactccgcaaaataacttgattatcttaagagaaatgactaagggctaagattgtatatttgtttgtaagacaattaagagccggtcattgtgcacacaaacaacaaatgtgtttgatt

SEQ ID NO: 10253 - DNA, 439 bp, Glycine max
  unsure (1)..(439): unsure at all n locations
gctggaactacttcacatggacttgatggngcctatgctagttgaaagccttggaggaaagaggtatgcctatgttgttgtggatgatttctccagatntacctgngtcaactntatcagagagaaatcagacacctttgaagtattcaaggagttgagtctaagacttcaaagagaaaaagactgtgtcatcaagagaatcangagtgaccatggcagagagtttgaaaacagcaagtttactgaattctgcacatctgaaggcatcactcatgagttctctgcagccattacaccataacaaaatggcatagttgaaaggaanaacaggactntgcaagaagctgctagggtcatgcttcatgccanagaacttccctataatctctgggctgaagccatgaacacagcatgctacatccacaacagagtcacactt

SEQ ID NO: 10254 - DNA, 227 bp, Glycine max
  unsure (1)..(227): unsure at all n locations
agctttgtttgaggnaaaactttaaaaccttgtcatttttttttttcgcatcttcttattcctttaacattttttatttcatcttctttttaccttctcttttccatgcatataggatttaaaaaagactatcagggcagactaggctttttaaaaaggccagaccgagccaaaataaaagtctttgataggctataggccaggttgaaacctaaaaaattcatcat

SEQ ID NO: 10255 - DNA, 378 bp, Glycine max
  unsure (1)..(378): unsure at all n locations
gcacaagttctgacaggagaagttcatctacatacattgagagcttcttcttggacactattaactntctgcaatatgcacagaaaaacttgagaagttggtaacaaattcctagcaaatatcctcaatggatgttatccctactttctctttaatgcattccttacaaatcctaccttatatgttccctcacacatcgtaacattatgtgcaacactaagctntntcttctgtttactctttagcacctaacatttagtaccatacagtatcacatgtcttatgactgcaataaaattttccttttacgttaatgaacatagcatcatttggacatttgaacacaaagaatatgctatcttataaaactgttgtcat

SEQ ID NO: 10256 - DNA, 232 bp, Glycine max
agcttttgttttcaattacgagcgtctccatatattacgggcctcaatccgacatcggagtaaaaagttattgtcgttagaatttgctcagagcttctgttctgaattttgagagtctcgatatactacggaacacaatcggacatctcagtaaaaagttattgtcgtttgaatttgctcagagcttctgttcttaattacgagagtctcgatatattacgggattcattcg

SEQ ID NO: 10257 - DNA, 361 bp, Glycine max
  unsure (1)..(361): unsure at all n locations
gttcttcctcanaactgtcctaagcaaagttcccttattcctattaacaacttccgtttgcccatcggtttgtgggtgacaagtggttgaaaataacaatntagtgcccaacttgctccacaaagtcctccaaaaatggcttaagaacttagagtccctatcactaacaatgctccttggcaaaccatggagtctcacaatctcctttgaaaacanatcagccacatgggaagcatcatcaactnttttacatggaataaaatgagccattttagaaaacctatcaacaaccacaaaaatggaatctctaccattgctttgttttggcagccccaaaacanaatccatggataaatcaatc

SEQ ID NO: 10258 - DNA, 210 bp, Glycine max
ggctggaactttgagcttaaatgagggccttcaatggtgattttctaccatggagatgcagcggaagataaaggagaaaaggtgagaggaggcaccatccactagggaataagccatggaaggaggagcttaaccaccaagagagtgccttggataagaagcttaaagaggaagcttcaatggaggaaaagaatgagagagagggggggc

SEQ ID NO: 10259 - DNA, 418 bp, Glycine max
  unsure (1)..(418): unsure at all n locations
aacagggcaaaggcagaaaactctgtccaaaacaccaaccaanatcacagcttttctcacttatagaccccagtaacaattccttcgttccaattcgttaactgttggatcgactcgaanattttactggaagtctctagtacataaacctcacatttgaccgttgtgatctactagcatacatgcagaactcattctgcactgctctntccacaaccagcaaatgcatagcattattctgcacttgtgcaaaattctgctgcacaatttcacagcaaaattctgcacanagtgcagatntcgaanaccacactgtccctcatccaatcttgcccatatcaaatcctacaagtgccaaatcatgtatcaatcatgtctaaaccacagtcaagattcataacacagcaacacagaatct

SEQ ID NO: 10260 - DNA, 227 bp, Glycine max
tagcttcacttaagagttcattttattgctttatgtgttgtattttcacatgtttattattattatagcaagaagctacatatatagagacacccagtcactaactagcaacaacaaaatatttacaataataacgttaagaaacagaatataaaaatcgaacaaacttcctaacattaaatatttgtaacgttcacaaaggaaattgacgaagtaaaacattgctt

SEQ ID NO: 10261 - DNA, 423 bp, Glycine max
  unsure (1)..(423): unsure at all n locations
atcctgtctggatagaggcaatgaatgcanatattaatgctttatatcttaatgatactnngcgtttgactgatctgcctcaacataagaatgttgttaattggaaatgggtgtataagataaagaacaaatcatatgggtcagtggaaatacataaggcaaggttagtggcctacgactacacttaagtggaagggcaagattacttacacatcctttctacagtggccaagctaaccacaataagagttttattggccttagtctgtatcgatcagtggtatcttaagtgattagatgctaatgatgttttcttacatggtgatttgaatgaagaggtgtacattatgcttcctcaaggtatgtaggtagctaagcctaggcaagtctacaagctgcagaggtccctatatggactgaaac

SEQ ID NO: 10262 - DNA, 225 bp, Glycine max
tttcttcccagatatggagagctaaatcctctgttggttcttccttgtaggtacttgatgtaaatacttgtatatctatttaataatgttttatgtgttctctatgctatcagtacttcattttagtgtgtttttgccttgatcacatagatgcatgctttgttaggatcattcaacaatggaaattggtttgtttcttagacttcataggatttggctagttta

SEQ ID NO: 10263 - DNA, 364 bp, Glycine max
  unsure (1)..(364): unsure at all n locations
tagaatattatcaacacagataagttaactgtactttatattctatgcattatgcatgtgaactgtgaaatctcttcatagcttanataacttacataaaatcttattggaatctgattcgaaccagagcaactacaaaagtcttgctttataaattcatatataatataatagaatccattcaactattaaatttaatttcaacagataactntataatatacattcacaatccaagtcaacggttattttgtgcattcagttctacacaataacatctttgaacttatctattacttcaatgacttagaatgagtactcatttaaaaaactatacaaggacatcagataatgaactaataat

SEQ ID NO: 10264 - DNA, 226 bp, Glycine max
tttcttattttcgacagggtgagctttctcaattttaaaccaaccatctactatgttgttgtactcagcacgtttaacagcgggtccttcaggtaaaccatccacaataccccaatcaccagtaaaagggatacaagacggcataactggaaaaaaaccgaacgaaatgctcaaaggatggccttcggcgataacaacgactcgtaatggggatgaaataattgtt

SEQ ID NO: 10265 - DNA, 114 bp, Glycine max
taacatcatctatatgctttgtctcaatcttggatagtagcgctatgtgcttgagacaatttcttgtcaagaatttgtgcttatgatcaccaatgatttgtgactctggatgat

SEQ ID NO: 10266 - DNA, 292 bp, Glycine max
ctgcctataagccttcttatactagtgcttgtagtgcattcaccaattgagctagagtaatgctcgacaaatcccttgagttctctatagatacaattgtggcttcaaatatttcatgcactgtgactagaatgctttgaacaattctatcatctgataaattagtaccaatgagtcttacattgttgactatgtgaagaagcctgtcaaggaatgcatacgggtgtgtaattccttattctctacatctcaattctggacaaggtcagcactcgcatcgcttcacctttca

SEQ ID NO: 10267 - DNA, 223 bp, Glycine max
tagtttgagaagaggaagtgttgaagggtgaaacttcctgcttttattgttgaccacagagtggtacctggagatatgtcgtgggggtcaggagaccttggggacgtcaggtggggtgctattgcccaaaaccaagcttgaccaatcccgacccaacccgggcatagtcggtcagtgagaacctgtgatgtacctaaacaggcgagctcctggcagtcaacag

SEQ ID NO: 10268 - DNA, 325 bp, Glycine max
  unsure (1)..(325): unsure at all n locations
acctggagatantgtcgcggggtcaggagaccttgtggacgtcangtggngtgctattgcccanaaccaagcttgaccaatcccgacccaatccgggcatagtcagtcagtgcgaacctgtgatgtacctaaacaggcgagctcctggcagtcaaccgattaaagaacatagaccacatagcaaggaggcttgtgtggtggctggccagctatggatcttgagtgatatntgggatatggcctctggtaatcgattaccaagggtgggtaatcgattacaaggcttattagtgaagacaaaaagttaagatggtctctggtaatc

SEQ ID NO: 10269 - DNA, 222 bp, Glycine max
agcttaagctccttcaactgcacaaggctcttaatatttgaagagtatccttgtggaaccttcacccgacaaagacactgacaaaaacttatcttctcctttttggacaaagtatggcaaactgggggcaagtaaattttcttcccatcagaccttggatgcaactgtgatcgtatgcccatatcagctagatcttgacgggtattcaagccatccttcgtc

SEQ ID NO: 10270 - DNA, 342 bp, Glycine max
  unsure (1)..(342): unsure at all n locations
gataccttatacaatattgctcactgttaagctaatgcacatttacctactactctaccttgcactanacttatgtgtccttctagtatatgtgccaagttcatactcttcagatgattgagaactagcaaagatcaagacgagagattatatatgtcctatacctcattacggaatggttctggggtcctagaaatgtgactgtgcatgtgttgccttttccatgtatccattcttgagcatcaatgagatagaaacaaagatgattatgcttattatgtataancaaagatgattatgctcgatcttggactgtcaattagatatatacataatctattc

SEQ ID NO: 10271 - DNA, 138 bp, Glycine max
agcttttttgatttggaacgaaagaattttacatattaattttagaaataaaacacaaaaacttacatgggtaaaagttctatttctatcgggctatatatatatatatatatatatgtggagatatatatccatatc

SEQ ID NO: 10272 - DNA, 508 bp, Glycine max
  unsure (1)..(508): unsure at all n locations
agtctggatctgacctctntagcanacaggcgtgctaattgtttatttntatatttaatgaaccaaaaagaaaaagatgtctggtccctatctgtgctggttgtaagttaaactagcaaagtagaaaagtagagacaaattatgtttgggtacccatttagttntatatatcctcttcatatgatagtttgccaaataccttatgactntgttatataccttctatcgngcttggagacatcactntaaatataatggtaagatcgaatttaatgtaaggatcaatgtgccagccaatcatcaggcaaactaaagtatcaaacatatatatatagtggccccattntaaggtatatcatgacaattgcaaatactttgttgttccaatagcacttgactagaaacttgcatggtggttcaatttagtttgtcgcacttgttntattggtcttttggatataactacagttcttgaatcattaatatacttatgctntgtcgtctaatt

SEQ ID NO: 10273 - DNA, 228 bp, Glycine max
agcttaattgtgatcaggcttaagcgtggattgaactaggcgtatgcttgagtaagctcaagcataagttaagccagacttaagcgagattaagcttaagcattggttgaatcatgcttaagcgccagtatgaaaatatacaaaatgtgttatgcatgcttttcgaatgactttcaattggaattccattattgtataagccttatgaatttttttgctaagaaaatt

SEQ ID NO: 10274 - DNA, 421 bp, Glycine max
  unsure (1)..(421): unsure at all n locations
tcaaactcaagttctcttcacaaacttagtgtgtgttgtcaattgagatacacccatggatcaatttgttcttctaggcttgaatatgtttttatacctataatatatcattcttaagtttactaccttttttttgttactatctagcattcccaaaattttgctttcgatacctattggtattatcgatgtcgtaagtgataagctgacaaaataacaaaatatcacatcatcggttaagtaaagtgatgatatgataagttaatagaatgtcatatcatcacttacaagacttatactaaacgtaattatcaaanagtanaattntaaaaatgtcagataataaaatacaaataggtagcacactggaaaagaatgagtatattataactatgaataatcagatcttgattataaatca

SEQ ID NO: 10275 - DNA, 230 bp, Glycine max
agctttatgtgttcaatcataacccacaaaatgaaaaatgaaaaaaaaaacgagtaaaatcctaacagcattgaggaaccaatatgagaataaagccacaagatgatgaaaaattaaagatatgaccgatttcagaattttttttatcataaaaatatcttttttgttttagtttttgttttcaaatatttacattgaaaataaagaagataacttttttattccaaaaa

SEQ ID NO: 10276 - DNA, 415 bp, Glycine max
  unsure (1)..(415): unsure at all n locations
taattattntttattttattatcatatntattattntattaaattattaatttggtaaatccttgattaaaatgagagatttattatcatgatagagattatgataatgagaaacaagtcttttataattntaatctaaattattntttatcgtaggaatattgtgaatagaatatcaataattcagatagatcaatatatgtgtaatgatctttattgaataaagattaataaatatcatttattaaattgtatatatagatgatatatatgtggatatcataattgaatngatntaattaagaattcttaatagttaatattacctcgatatgtcaatagaaagttctcaagaaaaattataatagtttcctttgacatgagatgcatagtaataacaagttattgtatattt

SEQ ID NO: 10277 - DNA, 95 bp, Glycine max
gagatgtcttgggccacatgggcctcgttcaaaaccttcactagcacagcccgatgaggctcggagctcatgagtgactccaacagcgagaccct

SEQ ID NO: 10278 - DNA, 241 bp, Glycine max
tgaaggcatgcaagcttggacttcctgtgttttgggaccctctccttcctcaggtgtacccaaacccaatcacctggttcaagcacgactttctttctgcttttgttggcttgccttgcatagctcgcatttttcttttcaatttgaaccttcacttgctcatgcaacttcttcacatactcagctttagcctgtgcatccttatgcttaaacatagcaatgttaggcataggcaacaaat

SEQ ID NO: 10279 - DNA, 290 bp, Glycine max
  unsure (1)..(290): unsure at all n locations
cgatgctctntctcggcgtcatgcattactttctatgcttgaaacaaaattgattggtcttgaatgttngaaaagcatgtatganaatgatgaaactgttggagaaacttttaaaaatcgtgaaaaattntcagaacatggtttctttagacatgaaagcttttcttttaaagaaaacaaattgtgtgtgcctaaatgttctactagaaatttgcttgtttgtgaagcacatgaaggaggtttaatggnngcatttggggtccaaaagactctataaacattacaagaac

SEQ ID NO: 10280 - DNA, 304 bp, Glycine max
  unsure (1)..(304): unsure at all n locations
agttatttacctgaatctcagaatgcaagagacccaacctctaagatctcatcaatgttgatgactcaggcttcagtgattggcggaatttcctaccactctccttttccagcatcattttcttcctacattntaacatataagacctcaatttcatctcggagcaacactgtagtggtgcccaaggtcgagtggcgccctacacctactgtgagctctggatttggaaatggtggtgagtagttcatgtaatctatcttcacacccacgattaatatatgagtcatctggtgacaccccaagc

SEQ ID NO: 10281 - DNA, 226 bp, Glycine max
ttttttgtaaaaaggaatgtacagactataggaactagatggccaagcaattccaagaacatggaacaccacccacctaaagttctacttaagttgatctaatgcaagaccagatgttgtactctttttactacttaagtcttttatcccaaaagagaaaaattagggttttagcttgagaggttttaatgaggcacatctaggataacgaagagaatttgtactc

SEQ ID NO: 10282 - DNA, 260 bp, Glycine max
tagtgctaactgacatcggtcacaaacatatcttgctgatagacttgaccacacgtagatcaataatcgcctagtcgatgtcgaccaaaaaaatagacatggccggtgttgtcgaaccaaatcatatccgacatcgatcaaaatatagcgtcgaccgatgccaaccagagaaaccttagccgatgtcaaccaaacaagagtcctatctaatgttgatcgaccaaccctaacttatgtcaacataaaaatagcgctctgat

SEQ ID NO: 10283 - DNA, 228 bp, Glycine max
tagcttttcaaggaagttttctcaagaaaacttcttaaggaagccagctagtctataaatagaaacatgtgtaacacttgttgtaagtttgatgaatgagagtcttgtgagacacaactcaaagttcaacttctctccctttttcttccttcaatttcatgctccccgctctctctttctctccctctttcttttcctcgattgaagcatcctctccaagcttcttat

SEQ ID NO: 10284 - DNA, 376 bp, Glycine max
  unsure (1)..(376): unsure at all n locations
gcttgtatgcnnctctccctcggcggngatntcttcttctgtataggcgtatatagtgncggcagngatattattgaccagccctccgaaaccttctaccgagatgtcttgngccacatgggcctcgttcaaaaccttcactagcagagcccgatgaggctcggagctcatgagtaactccaacagcgagaccctggccggnggtttgttgagctgttcgataaccttgaatntgctctgctgaatatacggaggaactcgctggcttcctctagtgacacctcctttataaccatctttttctccggaagacctttcgccggaatatctttattcgaagtgaggggtgcttcgtcatcttgttcctccaccactt

SEQ ID NO: 10285 - DNA, 227 bp, Glycine max
  unsure (1)..(227): unsure at all n locations
tagcttttatatattaangaataaaattatcgatgcatgtgccatgttatttttgccctctcacacgcagttctgaacctccttagggttttgactaatgtccactttgttcttctttttaaattcctatacaaaatgggtcaccattctgttttcaaagtcatgtccaccttaagtgagtgtttccagcaatagccttatcttggaatagcttatccttgatcgtt

SEQ ID NO: 10286 - DNA, 435 bp, Glycine max
  unsure (1)..(435): unsure at all n locations
gcctcccatggaagcacctgatctgagtgattctgaagcaaccaaggttnttcanaagtccctagatgagtaccttactgctaagtgcattatcttggcatcaatgagttcaaaactccaaaggtaacatcaagacatggacccatatgagatcgtcaaacatcttaagaagatgcatggtggtcaaagcaggacgaactagatttagttatctaagaccctgtttagatcctcacttgctacaaatganaaggttggaccccatgttcttaagatgattgatctcatagaacaacttgagaaagttgggtgcactcttgggaaagagctntctcaagaattgattctacaatcactttctgattcattntcataatttattgtgaatntcaacatgaataagatgagttgtgactngcatgagatgcttaatct

SEQ ID NO: 10287 - DNA, 225 bp, Glycine max
ttgcttttatctataaatgaataaaataatctatgcatgtgccatgtcatctttgccctctgacacacacttttgaacctccttagggttttgactaatgtccactttgatcttctttttaaattcctatacaaaatgggtcaccattctgttttcaaagtcatgtccaccttaaatgagtgtttccagcaatagccttatcttggaatagcttatccttgatcg

SEQ ID NO: 10288 - DNA, 262 bp, Glycine max
  unsure (1)..(262): unsure at all n locations
ataacatttaacacacaagtctgattctggcgcatcacatatagagaagctcagaactgaataacgacagctatcgatatattcaacggtcataactattaactcgaaagtctgagntaggcgcatcacatatagagactctcaaaatggaacaacaaaagctctcgagaaataagaatagtcgtatcttntaactcggacgtccaattcatgcgcataatacatcgagacgctcgaaattgaacaacgaaagctctggaga

SEQ ID NO: 10289 - DNA, 225 bp, Glycine max
ttgtttgcttgaaggcatgtaacccaccatcttctcatagggcaataccggtaacgtgtcttctatcattgctatcatctccttctacatcctttggggcgctgcttgagctgatatatccctccatccttgggcgaattctttaaaagattcatgctccttcttacgcatgttctatagaggcattctatctggagccatatgataattatactaaaactacct

SEQ ID NO: 10290 - DNA, 377 bp, Glycine max
  unsure (1)..(377): unsure at all n locations
ctaagctatgcgcatacttttacgaacgttcacttgcactatacattcttattactaagaaaaatgcacccatatacaatcaaggcaccttcgttacctagattatntacatgtacttccaaggtgtatttgttacctacatcacacacattttcttngctaaattcacatacattcatactctaagcactntggctatcaaaaattgcattcgtgcacatcttggtatttctaatacctatacatacacaaacttcatgacgaatcttgactatctacacaataaggtgctacatttcatgcgctttttttttcaagttnntttttttactacctaaagccgcatgcaaattcaagtatattatcttttgctcact

SEQ ID NO: 10291 - DNA, 223 bp, Glycine max
agcttccacaaaaagctcaaaggaacaagggctcaaattttgaagtctcaagctttaaagaatgaaaaagaaattttggaacaaaaaataagaactttgcacgaaaatgatggagaaataagaagaaaagagaggtttaagagcttcttgccaaagctttgagagaagaagtcacaagaacactagtataaagcttggaagaagaagaaaatagtggtatctc

SEQ ID NO: 10292 - DNA, 384 bp, Glycine max
  unsure (1)..(384): unsure at all n locations
cactatntagccacctttctagtgacaaactaaatcactacttcatctattnttctcaccacctgtaatgcaagtttgaataaaatgaaattgaataccatgaattcaatgaaaatttaaatacaaaggtataaaaatatttaaacatgaaagttaatgtaataaggcataactatntcatttaattgtgactggctcctgccaaanacctaagcaatggaacatcttatctaaaggaaaaaataaaatcatggatgttttgctcagacaatcaaagcatatttcgaaggatcttcaatcaactntgttgtgtactaccttagcataccttaatcttaagtttcatcccgttataatacaatctctgtacctattgatgcaatc

SEQ ID NO: 10293 - DNA, 228 bp, Glycine max
agcttaattgaatggaaagaattagcatgggcagaaatgtctccgcattgattggtaaatctgttccccaaatccctaaaaaatgtaaagatccaggtacattcagcataccttgtattataaggaacaataagtttgacaatgccatgctagatttaggagcttctgttagtgttatgcctctgtctatttttaattctctatctcttggtcctttacagtcaactg

SEQ ID NO: 10294 - DNA, 483 bp, Glycine max
  unsure (1)..(483): unsure at all n locations
gctatgcgcatacttctntacaacgttcacttgcacaagacattctattatctaagataaatgcacccatatacaatcaaggcaccttcgttacctagattatttacatgtacttccaaggtgtatntgttacctacatcacacgcatttcctttgctaaatntacatacatgcatactcaaagcactttggctatcaaaaattgcatacgtgcacattctggtatttctaatacctatacatacacaaacttcatgatgaatcttgactatctacacaataaggtgctacatttcatgctctgttcaagtgtttntttttactacctaaagccgcatgcaaattcaagtataatttcttttgccgactaanaatgtattcaaattaaaaggtatttctgtaaggtattttctttacataacatgcaacatatatatatgntttgtgagaacatttgactaccanannatatatgtacataca

SEQ ID NO: 10295 - DNA, 228 bp, Glycine max
agctttaagtgtattcaatcctttatcttttattctttagattgtggtctttggtttgggttactagggatgttagataattgattacgtttcaattctagatctttccttataggattcaagagaatgatttgatttctattagagaattgagtgtgcatagtgtttgtacttatgttctctatataatggaagctctaagaggacttataataacaagatgtaggg

SEQ ID NO: 10296 - DNA, 205 bp, Glycine max
  unsure (1)..(205): unsure at all n locations
ccactcgtcacggttggctctgtctggaaacacaccataactaaacgcgccacacaggcatgctctgatcgcacacaggatccanatctancaacgcatgggtgatcaccgaggatacactggatcagacgaaagccctcatgttggctctgaatgaacacacggcttccatgacgcaggacctgttacgaatgaggccgatcat

SEQ ID NO: 10297 - DNA, 229 bp, Glycine max
agcttttgtttctttactaaagcatgttcacattttagtgaaagaacgcccagactattttttagtctcgcaccttttgtcatccagagacggcgagtccgatgacatgcgtgggtaccttatggttatctgaaccttttgtcatccagagacggcgagtctgatgacatgcgggggtaccttatggttatccgcaccttttgtcattaagagacggcgagtccgatgg

SEQ ID NO: 10298 - DNA, 406 bp, Glycine max
  unsure (1)..(406): unsure at all n locations
ctactgcgaattgcttactataatctttgcataatattattaggatatatgtttcactcacttatgaacagggattacaaattcattcaatgaatcactacaaaagtaatagcttgcaaattatattctaaaattatatcatctcaccaaangtggtaaatagaacgtaatntataaacactccctcttcaatccaccaatacgtcttttaaaaggaaaacaaccatgaaagttcgtgaaagccacatcagagacctcatatgtatgagcctaacaatgcaatagacatatgcagaacatgaaccctagaatntataactgaaccgtaaccacacattaggctgtaagaccctctggtcccttagcctccattgagaggctattccattccacanaaaatctcaca

SEQ ID NO: 10299 - DNA, 229 bp, Glycine max
agctttatgcacaagctcaagtaaaaatttctatcagtttagagataatcgacacttgaagatgaagacctatatatactagaaactttgaagaattgagacatgaacctgcgctctgacattcaaaatctttatgtaaaaggatgtatgtatatttcctgtaaagttattctcaaaacaccttgaacattttgagagaaatgactacatacatgcttagtttctatat

SEQ ID NO: 10300 - DNA, 522 bp, Glycine max
  unsure (1)..(522): unsure at all n locations
cttgtgtgcctacacatgatcctcataattgcgtgatgtctataccattccttgttcgggctcatatggaatgaacatccagagtccaagatccattctttatgagagttttgatttgtaattgacaaagcttcaacactacatttcccatgtgcttgttttgctcatttgagcgatctttgttgtttggacaatccttcttgaagtttccttccttatcacaaatgaagaagcacctaattntcttgcctctggacttcgatcttaatgatctctagcgctngaaatccttcttctcttgtctacctcgtgtgaatagaccttcatcaatcttgtctctctttgagtcaccgtttctttggatttccttcaagtttattgataccttaacttctgtcatcgtaagagatgtntcccatacaacattgtgtaaaacaaatgctaaatctattggcaagaactaacaagatgatgatggtctcatcatctgtttcatttacactcttcaatcatatgatttat

SEQ ID NO: 10301 - DNA, 231 bp, Glycine max
agcttgttataaccttagatagaagtgagagatttagttcctgagtggactccctcttctgaggagaaaacctatcatctatgcagttgcatcacaaaccttttttctgtaaagttcaacagtggctggcaatgacgaaatccagtggtatagttggtctagcaaaggctaggttgaagtccaatggggaattggcaggttgttgaaatctagtgatttgttggtccaatt

SEQ ID NO: 10302 - DNA, 436 bp, Glycine max
  unsure (1)..(436): unsure at all n locations
gcgcgggtctgggagacgaaggtcaagtggttgcgatatactaatatgatgttctgagtacatnnggattggtacgaccatgccctcctgatttccagctgggaaattggcgattggaggaacgccccggcatttacgcaacgagcataatgtaaacctttacggttntaaaagctctatagttgggcctaggctntagagttttttccttttgttaaggctttgtggtctttggttttgaaattataatacaaggatctttcttcatctgttcctacgtctctacccattctcattcatttgcatgttcacttctttntctganatggcagatccgatgacgagtccctcgaaggtactaatacctgtgacccacctatcgacttcgagcaagaaatgaatcanacggaagatgaatganacgaggatgtgggac

SEQ ID NO: 10303 - DNA, 226 bp, Glycine max
tttcttgtatggaggctggaactttgagcttcaatgaggtccttcaatggtgattattctaccatggagatgcagcggaagataaaggagaaaaggtgagaggaggcaccatccactagggaataagccatggaaggaggagcttaaccaccaagagagtgccttggataacaagcttacagaggaagcttcaatggaggaaaagaatgaaagagagggggggcac

SEQ ID NO: 10304 - DNA, 410 bp, Glycine max
  unsure (1)..(410): unsure at all n locations
acagggcaaaggcagagaactctgcccacaacaccaaccaatatcacagctnttctcacttaaagaccccagcaacaattccttcgttccaattcgataactgtcggatcgactcgaaaantttactggaagtctctagtacataaacctacattntgaccgttgggatctactagcaaacatgcagaactcattctgcactgctctttccacaaccagcaaatgcatagcattgttctgcacttgtgcaaaattctgctgcacaatntcacagcanaattctgcacatagtgcagatntcgaataccacacttcccctcatccaatcttgcccagatcagatcctacaagtcccanatcatgtatcaatcatgtctaatccacagtcaagagtcataacacagcaacac

SEQ ID NO: 10305 - DNA, 225 bp, Glycine max
tttcttcattgttgagccgatgagcttttctcttaaggaactagcattcaaactcattttagaaaggacataatcaaaattaaacaggagatggaatccttgagggcttgtacaaactcaaccttttgtgctcgtttcttaaacttgcataatcaacttaattctctccttcaccataaagaggtcttttggagacaacatgaaaagcttcattggctttgtgat

SEQ ID NO: 10306 - DNA, 367 bp, Glycine max
  unsure (1)..(367): unsure at all n locations
acgccacagtcgtatatgcccgatagaatgacaagactagagtctatccaagggagggactgagaacatgtacgtcaatcaagaatgtagaggaatcgaagcagctcgagggagagaaaagaaagacccattgaccaaccgagacaggtcataaacaccatcgctagaggtttcattgaggttggggccactgcctccgcatgataaagacacattcaacaagttcgatccatcaacatggtctcccggcatcgagtacccaacatgtcacccataaccttcacaaaagatgactntaacgcaatcgacctatgcaggatgaccccatggttatcagtgctgagataactagcatagtcaagaagat

SEQ ID NO: 10307 - DNA, 227 bp, Glycine max
tttcttagatggcaagagatcagaggagacattgcttaaggttaggagaatacttagggttgttgagaaaacgtgcttcgacccttgggaggcaattgaaaacacgctgttaatgtttttgacgtggatttctgtctttgctgtgaagctaataagtgcaatttctgccttgagatggatttttccgacgctaataagggtagcttttacgttttcttctactaaac

SEQ ID NO: 10308 - DNA, 388 bp, Glycine max
  unsure (1)..(388): unsure at all n locations
tatcttccttgggtataactatatctctattggctaccgngtctacaacttgcaaactaaganactcgtcatcagtcgagatgttgaagttgatgagtacacttcttggaattgggatgaagaanaagtggagaagaacattcttatactcgcccaactacctcaagaagaagctgaggaagaagatccaggtgaaccaccttcatctccaccacaacaacaagatcatgaactatcatcatcagagtctactccaagacgagtaagatctttggtggacatatatgaaacctgtaacttggccatacttgaacctggaagctntgaagaagcgtcaaagcaggaagtatgggtcaaggcaatggaagaagagatacagatgatcgag

SEQ ID NO: 10309 - DNA, 227 bp, Glycine max
tatcttggttttgggcaatagcaccccacctgacgtccccaaggtctcctgacccccgcgacatatctccaggtaccactctgtggtcaacaataaaagcaggaagtttcacccttctacacttcctcatctcaagcttgtaggattatggggtacccatcacatgtggtactaggtggcggtcgggcgatggtgcacaacaagttttccatatccacaaagcgcgc

SEQ ID NO: 10310 - DNA, 436 bp, Glycine max
  unsure (1)..(436): unsure at all n locations
cagcttcatcagccttgaaacaaaggtaaaagaaactatggttgaaactatccaaataaacactaaaagaggtgtgaaagataaggtaaaaaaactaattggtaaaatgcaagctatctangcggttntaccttatctactagaatggccaaaatacaaggcctagacgaaggaaaaacctattctaatatttacaaagataagcgagctcatacttagcccatgggctcgaaatctaccctaaggctcatgagaaccctagggcctttccttggatctctagcccaatctactnggagtcttctagccaatgcccttgcggngtaggattgcatcattccctccaccttggaaaggaattgacctcaaatcccgaggttcttcatactctgngctccttccctcaacacctgtaaaaagaacaacaacacatgta

SEQ ID NO: 10311 - DNA, 231 bp, Glycine max
ttgcttggttttgggcaatagcaccccacctgacgtccccaaggtctcctgacccccgcgacatatctccaggtaccactctgtggtcaacaataaaagcaggaagtttcacccttctacacttcctcatctcaagcttgtaggattatggggtacccatcacatgtggtactaggtggcggtcgggcgatggtgcacaacaagttttccatatccacaaagcgcgcataa

SEQ ID NO: 10312 - DNA, 350 bp, Glycine max
  unsure (1)..(350): unsure at all n locations
tcatcagagttccatagctcgtacatgcatgcttcatatagcatacaatactatctgatcatactatgcaacttgactttctttgggtgtctgacagatatactctatacgaagcactcctgctatagtctggcactaaattccaatcctgtttttcttgtatagagacctagagtacagtgcatagacgctggtcaccatactcgtgctctatatatntacgcgtatccgccaacccatggcgatgattgagctctgtttccttccacactgctgcacccttgtcccgttttggtggtgtacaatggatcaaagaatacagacattgatgtcacatggaaccactgagg

SEQ ID NO: 10313 - DNA, 220 bp, Glycine max
agcttgaagacaagactatacgaggtatcttccttgggtatagcaatatctctaagggctaccgtgtctacaacttgcaaactaagaaactcgtcattagtcgagatgttgaagttgatgagtacgcttcttggaattgggatgaagaaaaagtggagaagaacgttcttatacccgctcaactacctcaagaagaagctgaggaagaaaacccaggtga

SEQ ID NO: 10314 - DNA, 414 bp, Glycine max
  unsure (1)..(414): unsure at all n locations
agagactatgtcgacctacatgttgactgaacatgtattgtttatctaatagtattcattatgcgatataatatgttgtaagtcattaaaggataattattaagtactcgttgcgttaagagaaaaattagttggtgcaaccaanatcgattatgcatgtacgatacatcgttgtcataattgacaacacatgacgatatgcatgcatattaaagtttgagcgtgacacgacattgacttattaggaaacatacacacgaaacatgttcacgcctgttcttttgtaaaanaaaagtgaagcaatctatcggtgagaaccatgtatatatatgagacgtggcaaacgctaataaatcacacattatcttgctttcacatactctcccaattgatacacagagtatgacgatttta

SEQ ID NO: 10315 - DNA, 229 bp, Glycine max
tttgctagcttaagcgaaatttatcaacatgcaggcctaaaatggtagtcctgggatctcgggagcaactttgcattcatgatgaagtgaagttacttcggggaaaaacacaaacaaatgcttgccgattactctgtcgaaggcgtgggaagcgtcattgtaaccattttaaaaaagttcctggcaattttgtaaaaattttccatgcatacaatatgggcgcttatat

SEQ ID NO: 10316 - DNA, 351 bp, Glycine max
  unsure (1)..(351): unsure at all n locations
cttcaccttcaagatcaccaaagcggtctgtgtactatgttcatagtccttcaatggatgctcatgatggtgacaagtcatcttcaatgcaggcaactccaatatcaaacagtcctatgtgagtctgcctcacacccttcatactggcgtcactcatggaactcttccgcgagccgcttntcggggattttcaggtcatcttctggaaggaaacggagttagaataggaatgataaggggtggcctgagtgtgatgtgattctggaagaagggtcttatcatgagtttcacgacaagggtttcatgaacgcgctgtcaggccttgaatacctttgcggatgtcttcgctgt

SEQ ID NO: 10317 - DNA, 228 bp, Glycine max
agctttttttggtcctcgaacaagcaattaactcctctttcagaaccatgctatgtgctcgcgactggtctctttcttcccttcgcaacttgagttcactattgctaccccatagagctccgcgaaatttgttccggccatactcctccttgcgagccctcttggtctcttgttcaagggctcttgcggtaattgcattctcttcccgtaacccggcacactccttcc

SEQ ID NO: 10318 - DNA, 431 bp, Glycine max
  unsure (1)..(431): unsure at all n locations
gcttagttactacttaagtagtgcacgatctgcttctagaggaaaacactttgcctattagttactatcangccaagaagatactgtgcccgatgggtatggagtatcagaagattcatgcttgccctaatgattgcatacaatacatgcatgaatttaaagaaatgtccaaatgccttaagtgtggngtatcacggtagaaagtgaaggatgatgaggactgcagttctaatgaaaactcatagaacggccctccagagaaggtgttctggtatcttccaatcattccaaggtgtaagtgtctttntgctaatgcagatgatgcanaagaccttacctgacatgcaaatgggagaaactctgatggaatggtccatcatccgactgactgctcccagtggaagaagatngatcgttngtatctggatttc

SEQ ID NO: 10319 - DNA, 229 bp, Glycine max
agcttatttttacaaaattgcctaaatcatttccaaatatgcatgtgaattaggaagcatcaacgagaattaagccaaggctattgtgcaagcaatcaatggggcaaaacacaccaaaagattatgatgatggatggctcaaattctcacaaaggtcttatcactttcaaattgagctttcaaaactatcatgacatgtaaaggaaaaaaaaggatttcaagtcacaaa

SEQ ID NO: 10320 - DNA, 422 bp, Glycine max
  unsure (1)..(422): unsure at all n locations
gataagcctagcagtgactcatgagcgaaggctagaggacgagtacaccaaggtattagtcctgcatgcgaaaagggatgcaagggaaagggtgatcaattcattgcacacagaagcaatgatgtggatggacaagatcacatttactttgaatgggagtcaagagcttccccgaatgctatccaacgccaaggcaatggcggatgtgcagttagctcccgaggaggttcaagggctcctcaattattgccaacacatgaatgatttgatggcccacataattaggagctgctaacgtaattgtattgtcactttcgatttgactagataaaccctntntgttccctaataaaatgaggttgatntaatcctacatgtntacttangaattctgggtgaatccaatacttcgacaacttatc

SEQ ID NO: 10321 - DNA, 230 bp, Glycine max
agcttgcatttggaattgcgaaagccccactccatcattaggatttgttcctgccatctcaaacaaacaaatcaaacataacaagacaattatagttgctgtttgaatacctgactcactcaagtttatcacacaattatggcttttctctaatgaaaacactcttgccttttaccactctaattccccttgagttcttaggcaattcaagagattatggccacaacaaa

SEQ ID NO: 10322 - DNA, 395 bp, Glycine max
  unsure (1)..(395): unsure at all n locations
tctcgacatttcttccatctgaatgancttcttggctctctctcgtaactcgtccatgctgctggaaagcttcttgcacaatctgttagcaagtttgccaagttgtatggctagcaacatagaatgcaacgccacctcaggattaaggttcctaatttggacaacaagctgaccaaatctgcccaaaanttgtagagtggctcttcgtctacctggcttagactagcaagggcggcagaagtcacatggtgcgatcagcttgtcgcatattgagagctgaaatgaccgacaaaggtatcanaactatcaaaaggtcggggaacgagtgctctataccacgtcaatgcagctcccttaagggacgtanggaagaataacataagactgtgtttcat

SEQ ID NO: 10323 - DNA, 230 bp, Glycine max
agcttaatctacttcaactgcacaaggtgttggatcaagtggcctcggaataattaagaaggggagttgaattaattattagtgaacctttactaattaaaaatttatccttcttaatgttactagattcagttaggcttttactacaaagttaagaaagtaaagaatagaaatagaaacttaaccaaaagtaaaagtgataattaaagtgcacaacggaaattaaagag

SEQ ID NO: 10324 - DNA, 396 bp, Glycine max
  unsure (1)..(396): unsure at all n locations
aagatgagcaataagagaggtgatttcaaaagaagaagagttggtgaagattatatcatcaacatacaccaacacataggttntagaggtaggtgtaaatcacatgaaaagagaagtatcactcttggctgaattaaatcccaaggacctcatagtcaaactgagtntgtgaaaccaagacctgnaggcctgtttcaagccataaagagctttgagcagtttgcatactttgtgtttgtcggatgaaacanagcttggtggttgagtcatatatacagtttcttgaaggtctccatgcanaaaggcattgttgatatccacttgatgaataggccaatgtngagaaaccacaaaggacagaaacagttctaatcgtgctggcttaatcactggact

SEQ ID NO: 10325 - DNA, 233 bp, Glycine max
agcttgatagcatacatcaacagtcactttctcaggcagcaatcgatcgtttctgtcacccaatcccaagtttccatatcggccccagccccatccatacaaattcccatctttagtgattgctacactatgttcagcaccagcagcaaccattttgataggtatttcctgcaaaaatacaaagttcatgtctccaagtagttaagggaataataatctgtttgatacatata

SEQ ID NO: 10326 - DNA, 414 bp, Glycine max
  unsure (1)..(414): unsure at all n locations
gctcttagcanagcacttacagtggcagtgcttatgttggtcctgaaccatcaaggaanataaggcctttctccacagcttgatccataacctatgccatggtaaaaatatcagataaaattcacattattaaatgcttgcaaatggctagtgatggtgaaaacttgaactaaaaactangatagtggagattggactaatcanatntaagtcatcttttgtagcacaaattcccagtggaaagttcagtgtgcagcagcaatccttgatttcatgttntataatcacagtgcattgaaccagaagtaaagcatgcatcaagtggaagtaattgataaaagtaatgacaaagcacataacanattcaacaagtaaataattcttatgatgtaacatntttaatgganatacaac

SEQ ID NO: 10327 - DNA, 227 bp, Glycine max
tatctttgagacgtatgtgaaactttggcatcatcaaaacattcagcttgatcctttgtctacaatctccccctttttgatgatgacaatcgctgaaatcaagacaagctatatacaagatgataatacgttcacacaacccttactccccctatcttttggcatgtatgcctaactttacttaatgatgaatttctaattgataattgatttctaaccaaagttct

SEQ ID NO: 10328 - DNA, 391 bp, Glycine max
  unsure (1)..(391): unsure at all n locations
gtaatcgattacgatcggtctatagttgcttaagatatagagctataaacacataggagactttcttagttcagaacctttcgtcttactcctacatgatgatgcatgatgcacatatgaaatgatgaagactaagatgcaacacacaatacaacaatgaatacaaatttcactcaagagagttggacacactataaganaaatgacctatacctatggacaaaaatcgtcactataaataacaaattcgtacgtaaatatatgatagactatgtcctacagacgtatcttgccgcaactgtgatggagcgtgtcatgacggctaattgtctatccctataggttntacctactatgtgtagtatgtatgaagnagcattaacttctactt

SEQ ID NO: 10329 - DNA, 227 bp, Glycine max
ttttttaaattactgtcaattcaattttctcagagcttcggattaaaattttgcgcgtctcgatatattacgggactcattcagacatccgagtaaaaagttattgtcgttagaatttgatacgagcttccgttttcaatttggagcatctctcgataaattgccacactctgtcgggtatccgagaaaaaagttattgtcatttgatatttctaagagtttccatt

SEQ ID NO: 10330 - DNA, 415 bp, Glycine max
  unsure (1)..(415): unsure at all n locations
gcaaacattgaaagttagtttactcatgaatgctactcttaaaacacacatggcatacaacctcctgcaataaatacaaacatcaatgtaaatgtagagcaagcttatgcgcatacttctttacgaacgttcactggcacaagacattctcataactaagaaaaatgcacccatgtacaatcaaggcaccttcgatacctagaatatgtatatgtacttccaaggtgtatttgttacctacatctcatgcacttacttggctaaatttacatacatgcatactcacaagcattgtggtaccaaaaattgcacatgtgcacattccggtatttctaatacttatgcatatacacactntgtgatgaatcttggctatctacacaagaaggtgatacatttcatgctgtactcaagt

SEQ ID NO: 10331 - DNA, 228 bp, Glycine max
ttgctttacagcagattttagtaatgacccactaacctagaattaaaataacttaatgccattaacctagggaattaaaaaaaaacttaatggctgagtgtaactgaaattgtggcaaccaaaagtcacccccaacagccaataagtcagccaccatttggtctcccaaaaggctgatgcctaggttgccaattgggcccttattacaacttgaactaaacctaacta

SEQ ID NO: 10332 - DNA, 291 bp, Glycine max
  unsure (1)..(291): unsure at all n locations
gtgtattaatagcttctcatccttagagtgggcgcccatcttacggcagtacatcttgagatggtttttgggacaagtcgttcctttatacttgtcgaagtccggcactttgaacttcggnggaataacaacatcgggtactaagcaaagatccgtcatgtctgcgaacggatagtccccanatacttccacggccctcaatctttcctcaaggagatcgagcttcctcctttcttcagttgctgggggcggtccttccgtggacaaaactattggtggtgccgcgatgtt

SEQ ID NO: 10333 - DNA, 227 bp, Glycine max
agcttttctcaaaacttacggggaaatctgggacctagccatgatagaagtctccacagaggccatttcctccctcgcccagtattatgatcgaccgttgagatgctttacctttggggacttccagctgtcacccatggtggaagaatttgaagagatcctaggatgtcctctagggggaaggagaccatacctcttctcagggttctatccctcattagctagaa

SEQ ID NO: 10334 - DNA, 369 bp, Glycine max
  unsure (1)..(369): unsure at all n locations
cctggttgctatctacacccacatatttactaaatacacccnctgcctttatattggtgattctttntccgtaacgttacggaattttacgaatttcgtgacgatacttattttccttccgcaaggttacgaatccttatggattatgtatttactctttcttagctttcgaagaagttacggaaacccacggattgcgcaaaaacacctctttttgacttccaccacattacggaatttcacggatcgcgcanacctgcttccttttgatttctgagacgtctcaggacttcatttactgtgcaacanaggacgccaagtatctcaaagcggctaaccacagggtgcatgtcatcaagtaataatacc

SEQ ID NO: 10335 - DNA, 230 bp, Glycine max
tagcttttcgcaaaacttacggtaaaatctgggacctagccatgatagaagtctccacagaggccatttcctccctcgcccagtattatgatcgaccgttgagatgctttacctttggggacttccagctgtcacccatggtggaagaatttgaagagatcctaggatgtcctctagggggaaggagaccatacctcttctcagggttctatccctcattagctagaatt

SEQ ID NO: 10336 - DNA, 368 bp, Glycine max
  unsure (1)..(368): unsure at all n locations
gaaatctatcaagttcaaggaattgagagacaagttatgagtgacatccttgacaaatcanaattaaggagggatgttgatgtatgctgtaattcagttagttagttaggagttaggagttagttagtttgacaactatgaaggttgttatagctacatgtgcagtgtataaaaatattagtgatcatgaatgagatgatgagagtgcagaaagttttaatttagaattctaagttccctctattntctcaatcaattcttttatcttctcttattctcttattctcaatcaatttaatactaactatatntagttattctcnaatttatntaatctaatatgtttatntaatatcaatggagacaat

SEQ ID NO: 10337 - DNA, 179 bp, Glycine max
ttaaaaacttgcgcgaattgaattattacaggacgaacctagaccgcggaaaagagagctatagtaactcgaatgtgtatcaatgctagcgactggagatgggccaaaattcgattgatagactccctttgttgggccatcgagagagaaagaattgactgaggatggaaggaagaatt

SEQ ID NO: 10338 - DNA, 294 bp, Glycine max
gatgacagaaagctcataggtcaatctaagaatgagttcaagatgttcaagatagaatcacgaacacttcaagattcaagaggaaagttgaattcaagaatcaagattcaagattcaagagatcaaggttcaagactcaagattcaagaatcaagactaggctattcaagaatcaagataaagcttaatcaagataagtatgaagagggtttttcaacaactgagtagcacatggattgttctcataacatgtataccaaagagtttttactctctggtaatcgattaccagta

SEQ ID NO: 10339 - DNA, 228 bp, Glycine max
tttgcttgcttgaagaagatttgtctttttacatgcccaattcattgagtgacatttgtatttattgttgcatcttagtctttatctttccatatgtacatcatgtatcataatgtagaggtaggaagattgtttctaaagttagaaacttcttcagagccttaaactctctgttttaatcgattaccaagatatacgtaatcgattgcacaagtcttttgagaagct

SEQ ID NO: 10340 - DNA, 607 bp, Glycine max
  unsure (1)..(607): unsure at all n locations
ntgcnccttattgtctcctttgtangcgcactatgatactcagcttgaagctatacggtggannataagttttctatttgatgttatcagttatactagcannngatgtgtgtttgtaatccgtgtctttccaaagtagccaatggggacatcattatacatttagtacattacccactttntatttggtgtacattcttttaattntaaattgggtccagatgtggataagaacaactaaactaagtcatttaatgtattgcttttatttaatgtatnntaaatattagttattgatttgagaaaaaatattatatcttactaacaaatntaatatgtggatagcatagactgccagtttaaaagtttttacattgtcaatgatcaattaanaatattcttttgcatgactttcaaggtagttatcatcaaaacacacaaacttatatatatatatatatatatatatatatatatatatatatatatatatatatatatgtgtattgatgactctatatnagagatntgcactccttgtaatacatatatactcttctgttagtcatactcaatgatcactataagatacacttgatataataag

SEQ ID NO: 10341 - DNA, 195 bp, Glycine max
agcttgattttataaacaaacgtaatgcatggagaacaatggaacatctggcggacatttcagcgaaaaagaacgccccataatggcaaaagaagagggcacgcttgaaataagggaagaacaagaggggcggcataggcgcagggaggaagatactagaacatccatcaacggcaaaatctaaaaagaaataac

SEQ ID NO: 10342 - DNA, 472 bp, Glycine max
  unsure (1)..(472): unsure at all n locations
tactcgattcctaaaaaagctgaatcggattacattcttattactatatttatccgcattgacttaacaattgtccttttttaaaataattgaatataaacttatattttatccttagtaatagtgtagaatttcactgttctcattaaaatatcttttaatagaagcgaaccaataatttgataattacaaaataatgattaatgtctataagccagctactacgttcaataattaaataacgattaacgaatagtgttcacgagtcaaaatcaagagaggtttattcaacctccaacattaaagaatgaaaaagacaatcagatatctacatgaatgcagcatcagatctatttagaggacaattgtggatcctggtccccttcttgagaatacacttattataatacataaaatattaattntatgcaacanagtgtgtaatttaagagagataaaaacttaaaagaga

SEQ ID NO: 10343 - DNA, 228 bp, Glycine max
agcttaatacctcttgttcattaccaaacaagctgaaattaatcataatcacaagcaagatatcctaattacatgcaagagataagaatgaaaaatagaaaagggaaagaaaagttgggttgcctcccagtaagcatttttttaacgtcactagcttgacgcatcgtcctgctatccaagatccaagagagtttctacttcaaggaccttcttctcaggtctcttttc

SEQ ID NO: 10344 - DNA, 479 bp, Glycine max
  unsure (1)..(479): unsure at all n locations
tctnntgggacctgaacaagcaactaactcctctntcagaaccatgctatgtgctcgttactggtccctctcttcccttcgcagctggagttcactattgctaccccacagagctccacgaaatttattccggccatactcttccttgcgagccctcttggtctcttgttcaagggctcttgcgatagttgccttctcttcccgtaacccggcacactccttccgaatgtgtgtagcggccaactngaacttctccttggcaagtttcgcctttcctaactcgcttttgagagcttggacttcttcgtcctcttctggtgcttcanaactntcttcgctgacgactnttaacttggtgagccaatctaaacctcgtatatgaactnntaaccattcatggtacccaccaatgatgccattangaatgcccctaagttcttgatctttccttaacggggtttcccatgccttatggattc

SEQ ID NO: 10345 - DNA, 229 bp, Glycine max
agcttttttcccgcgggactgaaaaacacaggccatgcgttaactatttgcgatataaaactatttgcaaaaagcagataatacccaacggatattgccgtcaaccatcaaaagacattgacgaggatcacagccggaattattaataacggaatcatactgtatcacgtaaactacaacctgacaatcccgtaggaccttgacaccaaatgggcttataaccttatct

SEQ ID NO: 10346 - DNA, 89 bp, Glycine max
  unsure (1)..(89): unsure at all n locations
aacgctcttaacagctcctttgacatcatctctcatacgcctctcaacgctcatgtccagctntctagccatatttgactcacatctct

SEQ ID NO: 10347 - DNA, 230 bp, Glycine max
agctttctaagttttctagattccaaactgtgttctttcacagaaaacaaaagtgtgctattcatctttttcattatcttctcctttttccaaaaagaattcgccaaggactaaccgcctgaattctttttgtgtctctcttctccctttttcaaaagaacaaaggactaaccgcctgaattcttttgtgtctcccttcttccttgtcaaagaattcaaaacgacacagt

SEQ ID NO: 10348 - DNA, 435 bp, Glycine max
  unsure (1)..(435): unsure at all n locations
ggtgtacccttgatcatagttgtctatagagacctttgttntacctctaggttntgggagagtttacaagaagccatatagactaaagtggaacttagttcatcctatcaccctcaaatagatagttaaaccgagagaactatctaatccttagaagaccttcttagagcttgtgcgatggaacanaaaggtagttggaacgagtgtntagcccttgtagagtttacctataataataatttccatgccagtacagggatggcaccatttgaagccctgtttgggcagaagtgtaaaacactctttgtgttgtatgagatagatgaacctcttctgttaggtctcagcgtgttgtgaaagcacactaagcaagtggaaaccattagaganaagatcagggtggcatangatacgccananagttactatgacaag

SEQ ID NO: 10349 - DNA, 205 bp, Glycine max
agcttgatatgaggaagtgttaaagggtgaaacttcctgctttcattcgctgaccacacagtgggacctggagatatgtcgcgggggtcatgagaccttggggacatcctgtggggtgctattgtcccaaaccaagcttgaccagtcccaacccgaccagggcctaggatgtcctttagagcctgtgatgtccctaatctggcga

SEQ ID NO: 10350 - DNA, 414 bp, Glycine max
  unsure (1)..(414): unsure at all n locations
actaagcttctcgggccnttcctgcgaaggcaacattgaaagtagttttctattgtgacactactcttaaaacannaaatgcatacaacctccccccgtanatacaaacatcaatgtaaatntagagcaagcatatgcgcatatttccttacgaacgttcacttgcacaagacattctattaactaagaaaaaatgcacccatatacaatcaaggcagcttcgttatctagaatatntacatgtacttccaggtgtatntgttacttacatcacacacacctncttggctaaatntacatacatgcatactcaaagcattntgnggtaccaaanattgcacatgtgcacatnctggtatttctaatacctatacatatacaaacttcatgatgaatcttgtctatctacacaat

SEQ ID NO: 10351 - DNA, 228 bp, Glycine max
tttcttgtaagcccaaagtattcttatccaaaaaaaagaaaaaaatttgcaaataaaagcagaaaaaaagaggcgccataagtgctaaagttaaaaaaaaactttgaaataagggcagaaaaagagaggtgtcataagtgccaagaagaaaagtgttgttagaggaataaaggagtgaataggcaatttagtccatgatagtcctttgatgccacatggcatgacaca

SEQ ID NO: 10352 - DNA, 320 bp, Glycine max
  unsure (1)..(320): unsure at all n locations
gaattacctgaatacacatntcaatattcatcagagtaaatcttttaatgcatcaacaatgttatgcagaacttcaattccttattgtatctagtgtgacatgtggtgtacctcggcctcagataaaggcagcatgtagtcatcctctggtacttcttcaacaggcaaacgataaagccactaaaaccaagaatcacatgattaaaattgtgaaagccatactgtgcacataattcattaacgttattttagtagaatacaaccttctgttcaaaaaatactacaggaattggatctcgtatgcaagatagcaataaccc

SEQ ID NO: 10353 - DNA, 227 bp, Glycine max
ttgcttccattagttgaagaggcagttgacaacatctccggtgttaattttgcccgaccttaagaggccatttgaagtgtattgcgatgcaagcgggcaaggcttggggtgtgtgttaatgcaagagggaagagtagtggcttatgcttcacgccaattgcatcctcatgaagttaactatccgacccatgatttggaactggcagctgtggtctttgccttaaaga

SEQ ID NO: 10354 - DNA, 426 bp, Glycine max
  unsure (1)..(426): unsure at all n locations
tctacttatgtggcagggcgggcttccttcactttcttgtctccaatgttagctgtgaccaccgctcttccttcccgcgatgcttctcttcatatccgcctgagtgggcttatagcctaaaccatatgtcgcaacctacccttcggcgggagggcgacgcgtgactcgcgggatgcgtgttccacgaaaggaatacgcgcggagtcgccaccaacgtttatttgaggaaaacgtcgganaaaccgganaagacgcgatctacgaacttttaagtgaaaggttcgggagttgtatntacgcacggngaaggtattagcaccccacacgtccgccccaaaggacggcagcctttaatcgaatgtgcaaacatgactnntgattttatgttcccttttatggctctattccttatacccttttatattt

SEQ ID NO: 10355 - DNA, 229 bp, Glycine max
ttttcttgacgagattaatatacaacaggctcatatcttttatattgttcatttatatgcctttttatttagttagaaaatgatcgagtactatttttattgacaaatcagcatgttatgatacagttaaaaaatagcatgttcgtttatctctagtctttttataagaaacaagcactttgtaaatataattgataaataaaatgtccatttatttttggtctttttt

SEQ ID NO: 10356 - DNA, 437 bp, Glycine max
  unsure (1)..(437): unsure at all n locations
gctctgcgtgccgctgttgggctcagaaaatcccaaaacttatccctcttattactagctanntttgaattttttagttcctgaatgtacaaccttcaaattgttgctcgtttccctctttcttttctgcaaaaaagaaaatcaatatcaaagaaaacatggatgaagtcctaaggatgccatgtacatgtgtatttttgaagatatagtatttatattccatcaaacatacattgattgttgattacatgtaatagactntntataacatggttgccccanatcacaattaanaagcacaactaccaatctttcagagtcctttggttaatttgtcttgtctccttatgtggtggggttntgtttaataatattattgttttgccttccanaaataacttatgactgatccttgatcttntcattaatcctaattt

SEQ ID NO: 10357 - DNA, 232 bp, Glycine max
tttcttaattttacactcaacgatcaaattgagaggaaaaataaaagctctgctaaacacttccatcaaagggtataaagaaggttgttattccaacccggaaattgggttcggctgcacatgagaaaagaaaggtttccggaccccatgtaatcaacgcttcaaccacggggagatggaccattttaagggcttcatagaatcaatgacaatgcttacaaagctgacctgc

SEQ ID NO: 10358 - DNA, 410 bp, Glycine max
  unsure (1)..(410): unsure at all n locations
attggtcttcgccagtgaaaggatcgaagcggatctganattatgcttatntaatcatcctgcttagacgaatgagagnaactgggcacataaagagggtgaggatgagggagaaacccatgctgtgactgccattcctatacggccaagtttcccaccaaacccaacaatgtcattactcagtcaataacaaaccacctccttacccaccacccagttatccacaaaggccatccctanatcaaccacaaagcctgtctaccgcacttccaatgacgaagaccacctttagcacaaaccatataaaacaccaaccaagaaaatgaatttgcagcgaatagcctgtaggattcaccccanattccggtgtcatatgctaactngctcccatatctacttgataacgcaat

SEQ ID NO: 10359 - DNA, 447 bp, Glycine max
  unsure (1)..(447): unsure at all n locations
tgtgcctcttcctattgtcactctanagatcattccaatactctactggaggatccncatgaatccttcgttccctaacaagggaagtccaccaatagagggcatacccttgaaagctagggtagtcaatggaacttttctctcttcgctaatatgatgacaaacaaagagttgttcaaccttcatttcccaatctaagtaggcctcaacattatcttttccatggaaatatgggaggctaatgttaacctcttgaggccttctatccttttctcttctatgggagtgatctttagtatgtgaactatggcaccctntataatagtcactaagttcttcacttanactcttgcaagagtcatgactactataggagacatanttttctcttttcatttctttcattaattntcttctttcttcctctcttaatttctctctntcatc

SEQ ID NO: 10360 - DNA, 223 bp, Glycine max
tagcttgaaggtaaactagatgccttggttaacctggtcacccacctggccatgaatcaaaaatctgcacctgtcaccagactctgcggtttatgctcctctgccgaccaccacacatacctttgtccttttgtgcaacaatctgaagcaattgaacagcctgaagcttatgctgcaaacatctacaacagacctcctcaacctcagcagcaaaatcagccac

SEQ ID NO: 10361 - DNA, 406 bp, Glycine max
gtcagcatcagaagtatagtgctacctcacctgtatgattgctgcaacctcttcctattccggaacaggtctgggaggatgtatcagttgattctatcacagggttgccttgttcgagaggctatgaagctattctggttgttgtggacaggctgaccaaatatagccattttgttgcattgaaacacccttatactgccaagggaattgttgagatcttcgtaaaggaagtagtgaggctacatggagttccaaaatctctcgtgagtgatagagatcctttatttatgagattgttttggaaggaattctttaagttacaggggacaatgctcaagatgagtacaacttaccttccgcagacggatggacagaccatagtcacaaataggtgtcttgaaaccta

SEQ ID NO: 10362 - DNA, 223 bp, Glycine max
agctttaacctcatcgtctctcacagtctttagatttgggagccaatccagtccttgtgttcggactcttagccacttatgatagccgccgatgatctcattactgcttcccctaagctctctgtcctttcttcacgccgcatcccatgccttgcgaactccttggagtaccctcgcgttgtggtcactgaaacctcgtgcgatgaaaggcgtgatgctttcg

SEQ ID NO: 10363 - DNA, 496 bp, Glycine max
  unsure (1)..(496): unsure at all n locations
tatcctgatgagggtgttccatatgttctcaagactgtactaatacatttgctgcccaagtttcatggtcttgcatgtgaagatcctcataagcatcttaaggagttccatattgtttgttccaccatgnaatcccctgatgtccaagaagatcatatctttctaaaggcttttccttattctctggagggagtggcaaaaaattggctctactaccttgctcgcangtcccatttcagctgggatgaccttaagagggtgttcttggagaaattcttccctgcatctaggaccactgccatcagaaaagacatttcangcatcangcaacttagtggagagagcttgtatgagtactgngaaagattcaaaaatgtgtgcaacttcctcaccccagattctgacaactcttcttaatattttatganggactacaacatgagaggagatgattgatctgcagtggtggatttgatgagagatactttcactccac

SEQ ID NO: 10364 - DNA, 110 bp, Glycine max
tccttgcacccgtggcggatattcaacatgctacaagtccgtgacatacagctgaggcagcctctgcctttaggctaattcgttcagggcagaagaggaacagacctgaa

SEQ ID NO: 10365 - DNA, 431 bp, Glycine max
caggaatcattaccactgcctaattatagatgtatgaacaaattaacactaaagacatctaattagatcctttatctatattttaaacttttcattgtatggaaaatataatgtgatattctttcctgatgagcacatgtacaacagtaaaagattacatcaaatggttggaagatcgattttatgcattacacccattgtaaagattatataagattaaatgctgtagttctcaattccaatacaaaagtgattaaacatttaacattattgagttcatgaagaaacaagtgagaacaacaatatctctaatggcatccaatagaacataagcattgtcatgttcaatgaaatcaagtgcttaataaataaatacgagactcagatcatttagtgataatcattacacagaaagtgtaatcacaattcac

SEQ ID NO: 10366 - DNA, 226 bp, Glycine max
ttgtttttaaggttaaagtatcacgattgtcacgtgctcatgcaacaattggtagccgtggctatacgagacatcatgccaaacaaaattcaggttagcaataactcgcatgtgcttttttttccatgctatatgaagccaaggcattgatccactcaagtttgatgagttggaaaatgaggccggaattattctgggccaattatagatggattttccccctgct

SEQ ID NO: 10367 - DNA, 481 bp, Glycine max
  unsure (1)..(481): unsure at all n locations
gactctgaagagaatatggaattgaggattcatttcaagttttcttcacattaatggataggtgttctacacaccattcttgagacacttatggacatggttgggtcttacaccagcaacaaagaanaatgttatctccctgttagcatctggccatagttgacatttaatacctggtggagtgcaagaagcatttcacatgcagcatggcactgaggtgtattgctnttcattcctcttactcaatgcttatgtgatatatttattcttttgactaaatgaatctatgtttattctcctctacatatacgatcgttattgatgccaagtttaataatacaacagctggtgcagagaactttcccagctattgtatcaatgccgctcaactaagaactgtgtgtgtttcaatntttcaatagtatattagttatggtttcctattatcttccatatctaanttcaatatagtcttgatgga

SEQ ID NO: 10368 - DNA, 233 bp, Glycine max
agcttgcctaattttaggcccagtaaggacaaggcggtctaaggaactgggcccgccccggagttcgagagtcaccgtatttaggagcgtagtacaccagcagagcttctaagcgattaagggatggtctttgttcttggagcgacccgtataccttagtggacgaaaattatactgattcccaggaggaaatatggctccagccttgggcacacatgggtactactatggcc

SEQ ID NO: 10369 - DNA, 445 bp, Glycine max
  unsure (1)..(445): unsure at all n locations
gatgttaatattgatcatcttgaatttcatgccatggtcacatatttatagccatttgatggctcttgaagaaaccaagttaaaagttgtgtcttttggcaatttcttcaaaaccagtcactttaaaaaagttgtgacttcttggtaattttcaaaacctgtcacttctaatcgattaccataatggtgtaatcgattacacagtttattttatcaagagttgtgactcttcatgttgaggtttgaaatccaacgttaaaaaaccattggtaatcgattacaaatattgtgtaatcgattacacttatttgaaaatattgttgaacgttacaagacaatggtaatcgattacatgcccatggtaatcgattactactntataaatcagttataaaatggtttgngcttctggtaatcgattactaccttatggtaatcgattact

SEQ ID NO: 10370 - DNA, 231 bp, Glycine max
agcttctactagtgcaaaccctatttatttttttccttcattagcccttcatttaaatacagatcagcataatgacaaaatttacatttcttccaaaaaatcatgattctatctccttactatcaaatgagacaaattaactcaagcctagcatgaagcaaagaacctttttatagatattgttggtactcaatttcaattaactactagaacaatatgccaccacggatt

SEQ ID NO: 10371 - DNA, 499 bp, Glycine max
  unsure (1)..(499): unsure at all n locations
tatacattntatacgcgtctntatttcacttttacaaattgagctcagatccattatgataactattacataggcccagaaaaaatggggatcatttaagaaaaagggagataaaagaaaataatagcaaatcgtgtatggtacctaatagagcttcttccttcatcaaactcttctttcattatacaaatattctcanaattatgtcaccaaaaaattcatttccttcttttctctttcaaatcaattnttaaaattatntaatgtaaagaaaaaatgggcatcatcttggaaaaaagggtgagaaaagaaaataataacaaggaaattcatgttatgaacatgtaatcatcagtntaaattcaatgtacgtaacaagttacacggtaattcttttcttttggtcanagtacatggtagtctaaacgaagagtgaaaattcttccataatcgacaagagaaaaaagtactacatgataatacaaggcatacatcatct

SEQ ID NO: 10372 - DNA, 269 bp, Glycine max
cccgcacgcatgcttatcttttctcacaacgttacggggtcaattctgggacgttagccattgatctaaggcactaacggggaaatgatgccctgcctttcccctttctttatgagacgagccggtagagagcgctttacctcttggggcacttggcagcatcacccctcttggccggtattaagcttggaaaacaacctaagaacggcctgtatggtggaaggaagaccatacctatcatcagggtgttactcctcttacacgggaag

SEQ ID NO: 10373 - DNA, 370 bp, Glycine max
  unsure (1)..(370): unsure at all n locations
tagcttcagaagagccgactgaatgggctaanattaaagcttcgtacgcttcaatagcttgcatctgtgaagcttgcacatgcataaatagtataaaagcaaagttntgtgtaagaaggatgcacatgctagtcaaagttcttatctcgtgaaacatgcttatagggtctcttacatgaaatgatcatacctgtggaatcttgccagagataaagctagtcaataaaaacttgtatcacagaccactaaaaaattataagttgtgtatattggactccaagtgatgcattaatattatacaagttaagatatcagaaggtgacactttggcannaaaccaatacttgtgtcaaccattaccttacaccac

SEQ ID NO: 10374 - DNA, 226 bp, Glycine max
agcttgtagggttaaagtctcacgattgtcacgtgctcatgcaacaattgttagccgtggctatacgagacatcatgccaaacaaattcaggttagcaataactcgcatgtgctttttcttccatgctatatgtagcaaagtcattgatccagtcaagtttgatgagttggaaaatgaggccgcaattattctgtgccagttagagatgtattttccccctgcttt

SEQ ID NO: 10375 - DNA, 484 bp, Glycine max
  unsure (1)..(484): unsure at all n locations
atatgtctatatgattttagtctactatatgattaatgagctatgatgtagaaattatgaaaaattgttatgttttgagttgtaagaccaattaagtgtgtgaccacttggcaatgaatgttgcatgattatgactataagctntattaataacaaaaattgttgtgatttgggattggtgtatgctagtgaaccacacgtggcagttacgtaggttatgcatagaaatgtgaagtcggataccatgagtggtgtatgctagtgaaccacacgtggcagttacgtaggttatgcataggacttaaggtttgtgtttgtggcttttgaggggatgaagtactcactcnctttgttaccatttanggatctgatgccacgtgtgatgttgactctctagctttngattaagaagatgacttgcaatangagcacgatgatgcatgcacatncatgtgatggttctactactacntactccatcatt

SEQ ID NO: 10376 - DNA, 367 bp, Glycine max
  unsure (1)..(367): unsure at all n locations
ctgaccatccctaagatgagcataatatcaccaacatcgtcaagcagcgtaagccgcctaaacaactttaatttccttagcttttgttntcagtaaactgcttctctccacaccaaatggttgttgtaactgcaattatcatgcctatgttattgcagatgaggaatcccattatgaggtggcattgcatgttacaatntattgccgcattccacaacgacaaggtgatattcgacttctcttttactcatatngttttttcccctgattcttgttacctgatacataacacttaccattaccacattntctgggcagggctatataataataccagcattccatcatgaacagtgngcaccacact

SEQ ID NO: 10377 - DNA, 229 bp, Glycine max
tttcttgaagaggatgctttaatggaggaaaagaaagagaaaaggggggagcacgaaattgaaggaaaaaaaagagggagagaagtggaactttgaagtgtgtctcataagactttcattcatcaaagttacaacaagtgttacacatgcttctatttatagactaggtagcttccttgagaagctttcttgagaaaacttccttgagaagctagagcttagctacgca

SEQ ID NO: 10378 - DNA, 275 bp, Glycine max
  unsure (1)..(275): unsure at all n locations
atgggtttaatttaatttttattntggatttttntactgcattcactgttatgaagtatcatgggaagcacagtaaaccttctagggtgaattacttaattataatataactgctattctctttgattttatggtttatgtttttagggtgtgaaaaaaaaattgtctgcttgctcgttaatctcccgaatagtctgtttctatcgagcttgatttaaggtgttngattctcttatatttataaactgattatagttttcaaaagacaactacac

SEQ ID NO: 10379 - DNA, 229 bp, Glycine max
ttgctttgctagacctgattctaaagatcaaagagaaagaagatcaatgtgaattaagggctgcacctaattgggtcactctcttacaaattgatgaagatgctttgagcccaacttgaagaatcactttgggaagcctaatttacaagacaagaagcatccatgggttgagttgatcaattttggtgggctattaatattgttggacaagtgacctcaataacttaag

SEQ ID NO: 10380 - DNA, 390 bp, Glycine max
  unsure (1)..(390): unsure at all n locations
gagggagagtatgagagatgttgtagcancgaaatgaaggaagaaaaagggagagaagttgaactctgatatgtgtctcacaagactctcattcatcanagttacaacaagtgttacacatgcttctatgtatagactaggtagcttccttgagaagctntattgagaaaacttccttgagaagcttctttgagaaaacttccttgagaagctagagcttagctacacacacccctctcataactaagctcacctccttgagaagcttccttaagaatattccttaagaagctagagcttagctacacatacctctctaatagctaagctcacctccttgagatgagaagctagagcttagctacacaccctctataatagctaagctca

SEQ ID NO: 10381 - DNA, 237 bp, Glycine max
cgaccggcaggtctttgcaagcttagcacgacccgatcccaaagagcaaagacaaagaacatcagtgcgaaccaacggctgcacctaatcgggtcactcgctcacaaatagaggaagatgcttcgagcccaaccagaagaatcactctgggaagcctaattaacaagacaagaagcatccatgggctgagccgatcaatgtcggagggctacaaatatggttggacaagcgacctca

SEQ ID NO: 10382 - DNA, 461 bp, Glycine max
  unsure (1)..(461): unsure at all n locations
gagagagaccgatcacgagcacatattatggttntanattatgagttagccattggctctaggtccanaagagacttatcttagtgtttatgtgagacagagaccaacatgttagctatcatcaccaagtaccaagaagaactaagtctagccacggcccacgagcatagggtggcggacgagtatgcccaagtttacgcggaaaaggaggctagaggaagggttgatcgacttgtacaccaagaggcaaccatgtggatggaccgattttctcttaccttgaacgggagtcaagaacttccccgatggctaaccaaggccaaggcaatggcggacacctactccgcccncgaggagatccacggacttctcgactatggtcagcatatgatagatntaatggctcatataattaggaaccgctagggaacttgtattgcactcagaatcttgactagtat

SEQ ID NO: 10383 - DNA, 237 bp, Glycine max
cgacctgcaggtttgcaagcttagacatgaaataatttacctcactcaaaatgacaccttgggagcaaaaacctaatccttgcaggagcacgacttccacaaaccaactccttgcagcacacataaacaaacatccttgcagtgagcagaagttccccaaacaaagaaacaaagaaaaagaagaagaagaagaagacaacaaagactaaggtccttgcggttacaaagaagaagaag

SEQ ID NO: 10384 - DNA, 284 bp, Glycine max
  unsure (1)..(284): unsure at all n locations
tactatgacttgagaaacaaaagtgatcaaataacaagcagagatctaaaaggtactaggttgcctcctagtagcgcttctttaacgtcttgagctggacgcatgatggcttgtcggtcacggacctagtactttccttacctttgactntggacttggatgcctattggtcggccatgggtcgtaagcaacgctctaacctttgtgtggatgagctgaggtgaactctataagtgatggcggtgcgtctgttgcccgctgttggccatccccaggctgctgcg

SEQ ID NO: 10385 - DNA, 225 bp, Glycine max
tagcttaaacaaatgcctctgtaatcaaccgaccttaatacgtgacatatatatggtattcacccatcattgagttccgtgctgaatatggtgctaagcttaggagaattttatttggcgtgaacatttttgctgatgctgaaaaggctctgatgataagcaatttcactgcaataaaatttgaatcacagaatatagggtgtggaaaattcgtacccctcttgc

SEQ ID NO: 10386 - DNA, 443 bp, Glycine max
  unsure (1)..(443): unsure at all n locations
gacacctntntgacaatgaggtgcaagcggcagtctgtttcttggatgatatctcgtggagtcatattgatcgttggacatcagactgctggttgtggaaacgagaacctaatggccagttttctacaaggagcgcatactgtatgctactagaaggagcagcagatcagactgtggatgagactctataaccaacaacatttgcttggtgattgatcaaagatagaatcccaactaaagggaatttgcggagaagacagctggagaaaggctttgcccagccctacaactattggtctagtaatttatcaacaacattntttgattagggtagcagtgcacggttattgtattctatntagataggcacctgattcgtangacctatggttctgctagtctgcacagttctacctagtatatttagtacctctggtactcac

SEQ ID NO: 10387 - DNA, 455 bp, Glycine max
  unsure (1)..(455): unsure at all n locations
tatgttccctgtaggacattgagcgaccgcngctgcagctgtggtatttacgaattaatggtagataagatataaattatcatcgataactttttttgcaccaaatatgatgtaaatattgtcatttgtaatgttaacgataattgtcaagaacttcatgacatattaggaaattttttaatactttttattcctagatcaattggattattaaaaataattatacatggcagctgacatctaatgtaaaaagagaggaattttatgctacttattatgaagtcatggactctttcaattaagaagtgacctaaaatatgctataacaattaattnatttattaaaatcaacgtcagactctatattaactgaataacactcctttatattatactgaataatcactgacgtgtgcactcttttctgcagataggctaaggcattgtgacacgca

SEQ ID NO: 10388 - DNA, 357 bp, Glycine max
  unsure (1)..(357): unsure at all n locations
agcaccctgtagtatgcacttgtaactgctctgtatctgtagaataaaccaattatatattattagggcagactgcaatcagtattcagtgtaaagaatgaagtatagactcaatctaaagataaacacacattaacagtacagcacagtaataaaggaattagaattgtcaatagctatgacanagagttattgagtactacatacttttcaagtttcaaacacacccaacaatgacaatgataaacattaacagtacagcacagtaataaaggaattagatntgtcaatagctatgacaaagagttattgagtactacatactntcaagtntcanacacacccaacaatgacaat

SEQ ID NO: 10389 - DNA, 78 bp, Glycine max
ctgcagctggcaatcatactctacttatccagcggctttttcttccctctcggggtttaggaaacactacaaccccga

SEQ ID NO: 10390 - DNA, 111 bp, Glycine max
caaccctcacaattgctctacctatcggttcctgaactcgtgcgtcagctttaatgactagttcggaatgagacgttgcaccacatatcattataaatggggaggacgagc

SEQ ID NO: 10391 - DNA, 235 bp, Glycine max
  unsure (1)..(235): unsure at all n locations
atttgctcttaatctctatcatgcccaggtatactcttctgttacctctctctctcatacattgagattctatatgatgcctcttgcttctgacatttatctgccttgcagtttgctntatctgcccccacaaaataaataacacttgaagtactgtgacctatgttgattatgattaaatatgaaacacttcctgtataaatattatcatcttatacatctgtatatgttgtat

SEQ ID NO: 10392 - DNA, 473 bp, Glycine max
  unsure (1)..(473): unsure at all n locations
tgcctctggcagcacctaatgtctatttctgtcgagtatcccaatctanaggcaccctatcctctcctctattgcctgacatttgcagaaagcagaatggcttgtacacgcaaggacagtgtataaatgtagtcgtgtaatgtactataatagcattntcaagacanattatgtatttatcatagttgaatcttgacttcttatgcagaacagaagatattgtgtgtaaggtacactaagagtgagaaatagcaagatgtttttaactatggaggcattaaagctatacaagcactcaaatattgataaggcacagaagtatcaacatatntactttcctcctgagtgaggctcctctgaagtacagagatgtctaaagtaacaataagaaaagtaacgatgtattcactggtgatttgaaacgagttaactctacgatatactctaattataacaatggaataccttacttc

SEQ ID NO: 10393 - DNA, 574 bp, Glycine max
  unsure (1)..(574): unsure at all n locations
tgagtagcactctactcggatctctgagtcaccctgnnggcatgcaagctagtgcananantgtnggatccttanactcagcnnccattccctattataggagaaaaggggaggtagttgccgcctagaggcttccaaaggaagatntctgagcgcacccnctcagtngataatttcaacccatctctagaggcttcgtgaggaagtttcctgagcgcatcccgcaattgataagttcacccccatctagaatgttctggatgaagttttctgagcgcaccctctcaattgatgagtacacccccctttatgtggttagtgataaaagttctgagtgccaccaattgatgaggcactcccgtttgtgtttttgtgattcttttcaacgtccggattgcgcgatggggtancatccgaacgatcatagtcaatgccatacatgtctaataaataggatacattattccctcattgtaatcacctattcatgtttgctttttccaactacgattacgttgctgttatgtccaagacacangctgtgcataatatgtctgacaataggatacgtgct

SEQ ID NO: 10394 - DNA, 335 bp, Glycine max
  unsure (1)..(335): unsure at all n locations
accgagttngagctngtagcgaatgttgctagaaatngcaatntatgggcaagcctataatataatatactgcaagcagggaattttgcttttttgtctagtttgcttcaactcgattntaggtgtggtgcattttccgtttgaactatacatatcgcanataaattgaccaagactcattattgtaaaggttntttcacaataattatggtggagaaaatgccaattcanatagaatgtccatgattntgactatngctaacaagtttgacagggaatcaagtcctgttattgtaatgaaatgaacttgcagaaatttgaacctctcaacagat

SEQ ID NO: 10395 - DNA, 229 bp, Glycine max
tatcacacggtgctatcatacacacttagactgaagtagctattgttatcatacgactatacataccgtgtgaagaacggtatagagttgctaaaaactttttctagtgtgaggaccacactatatactacttatataatgctggattcaggtggaacctacatctaaactattttttgatacatcgtaatatcattggatattttttatacctggtcttcacaaacat

SEQ ID NO: 10396 - DNA, 266 bp, Glycine max
  unsure (1)..(266): unsure at all n locations
acttcttcaatgtctatcactacgaaatcagctggaaagatcaaatgtttaaccctaaccaaaacgtcttcgaccactccatatagtcttgtgatggagcgatcagccaactggagggtcatacgtgtgggcattatctctatctctcncagtcgccagcacatggagagaggcattaaatagatactacgctcccagtcaatgagagctntacccacaacaacctcgccaatggaacacggtatagtgacactctcaggatcttt

SEQ ID NO: 10397 - DNA, 169 bp, Glycine max
  unsure (1)..(169): unsure at all n locations
tctacacctggtgcaagagtctatggtctatgttcttctgcaaatcaccatacagatctttgttcttctttgcagcaatctggagtcaatgagcaacctgaaacttatgatgtaaacatnntataatagacctctcagtagcanaaccaacaacaaccaaataattatg

SEQ ID NO: 10398 - DNA, 341 bp, Glycine max
  unsure (1)..(341): unsure at all n locations
aatggagatntatacaccggactcatgctactaataacatcaatcataggttgataatatgtcgagttaattgcattaaatggcactatagcatctatcatccattntgcaatggctntgtcacacttttctacaattntcttattntgcaagacactcttcaagctanggtgagccttangagttgttctaggcatgaaatagtcatctacatgaatagtgttctttcctttttgagacttggaagaaacaggtgactntggagttcttcttaattcctcaactattctcacagggtcttcatccatttcanatgtattattttcctcaaattgttccta

SEQ ID NO: 10399 - DNA, 185 bp, Glycine max
agtcacctgggctgcagctgttaatacatgggttgattatgggagagtattgcctttgcttaaagaagtccatgtaaatacttcaatgttgcttccagaatggccgagaagctgctcaagaggtcggaagacatgcggcgaagaactattcgtccgatacacagtaccgttagacatgtcacaca

SEQ ID NO: 10400 - DNA, 311 bp, Glycine max
  unsure (1)..(311): unsure at all n locations
atgatgataacaaaagatgatgacaaaggtgatgacaaanagctcaaagatcaatcaaagagcaactcaagtgaatcaaagatcaatcaaagaacaactcaagtgaatcaagaacaattcaagagttcaagataagaatcaagaagaattcaagactcatgaagaaagtctagagtcaagaatcaagaatcaagggtcatgatctctagaatcaagatcaagattcaagactcaagattcaagaatgaagagaaactcaatcaagattagtattaanaaagagtttttcagaactttgaatagcacatgag

SEQ ID NO: 10401 - DNA, 197 bp, Glycine max
  unsure (1)..(197): unsure at all n locations
cttcttgctctatcaatcatctctgatntctcctttgagcttagagattcagacatcctttcttctcctntaagagcttctgcaaagccatgttgaatcaagaatgcttccatcttgattctccataacccgaagtcattntcccttgaaaacttctcaatatcgtactttggtgttcccatctttcttgatcttga

SEQ ID NO: 10402 - DNA, 324 bp, Glycine max
  unsure (1)..(324): unsure at all n locations
gctgtgatagagttctattatannaaaatagcatctntgattaacactattattcaaccccttctagtgtgattgttgttattntagttggtatcagagttcagcctcacaggttgagtatntaaaaatactaaagaaaagatctagaaatcaaagaaagaaatggaagaaggatactctaccaacaaaccactcatgtntagaggtgtcaaatatgactactggaaggacatatgatagctcacttcgagtccattcacattgatctatangatatggtagaanaatggaaatcacattccatatgacgatgagtaaacaaaa

SEQ ID NO: 10403 - DNA, 259 bp, Glycine max
ctgaagaacttttgctggactgtcttatgatatgcctgaccaaataacttcacagtgaactactgcaatttgaaaagatttcctgtagctcttatgtaccctttacaacttagtttcgaccagtcccacaccttaaagtttgtgactagtaataaggttagtagaaataagggttgatgactatttctaacattgtagccatatgactttaacataaaatttacttattagtgacacccaaatagggttacagacgaac

SEQ ID NO: 10404 - DNA, 323 bp, Glycine max
  unsure (1)..(323): unsure at all n locations
tgatgcagatgggtgtgtagctacctcatgcactcctctaatgactatggcatcatttctggcactaaactgttgggaagtggagtccatcttctcaattaaatatctggcttcagcangagtcatgtctccaagggctccaccactggcagcatctatcatacttctctccatattactgagtccttcataaaagtattggagaagaagctgttctgaaatctgatggtggnggcaactggcacatagtttcttaaatctctcccagtactcatacaggctctctccactgagttgtctaatacctgagatatacttcctga

SEQ ID NO: 10405 - DNA, 140 bp, Glycine max
ctgcgctgacatcttgagaatttattattggaatcaaataactggaattcttcttcttttctgcatatactctctgagtctatggacctcatacccacgagtaatttagtgcagtgatgagaaaacaaatgtactttttt

SEQ ID NO: 10406 - DNA, 431 bp, Glycine max
  unsure (1)..(431): unsure at all n locations
cctgtaaagctatntaatgatgtgttatgtgttctctgtgctatcaatacatcatttcagtgtgctnttgccttgatcacgaagatgcatgctttgttangatcattcaacagtgggaattggactgattcttagaacttngatagatagcggctagttatcgtattatcacgaaggatcgaggtacggtaacctaagtttttgtatgtntgacttaatgtagttctggtcgagtttagtccaacaagacggatctgacgatgatgcttgatcatgatgtggctagactatcatgaggaatccgggtttagcattgcaggagacaccatagaacacatgcgcattgctaagtagagaatgtccttataacatcatgcacttaataggaagaccaacaagtcgctacttgctttcacatcatactacatgat

SEQ ID NO: 10407 - DNA, 111 bp, Glycine max
ctgcagctgactgttgatgactctctatgacatctactgatctatggtttctaatttaatgacttggtagatcttgaattcattgagggtttgtagctttgagaaaatact

SEQ ID NO: 10408 - DNA, 416 bp, Glycine max
  unsure (1)..(416): unsure at all n locations
gctttatctgaatgttagagggatcaatatgggtgaaaagagagcaatataatgcactcagagaatgaatccacatgtgntgactggaagtaaaaacatgttcaaacaatatccatgtgaggctcatgcactgtgctaccctnttagatattagttaaaatttacgtaaaacacgatgacaaattaagatgaaactgtcatataacttcttatataagaaatggctatgaccaaattacacatataggtgggatattaggtctgctattctaacttgcaataagatgtaatgtgtctgaactcggcatanatctcactccaataagatgtaatgtaagatgaaactgagatcatctggatctgcgctacatggtaattgtacacacatcatatgcaagtccaggctcattattctg

SEQ ID NO: 10409 - DNA, 153 bp, Glycine max
atgggtattaaacattggttctagtgacagagcagtcagggttgccctgcccgaaagtatgattagtaatatctgctgtaggttatgcagctggtatttattactcagactcttctatctacgtactttctctagtgtgactacctcttgcta

SEQ ID NO: 10410 - DNA, 431 bp, Glycine max
  unsure (1)..(431): unsure at all n locations
tgtgaagaagatgtgggatcttctggatgatgaggaactcttcattattggcatacatggaatgtggggagttggaaaaacattcatggcagctcatttcacgaatgagattataagataggcgactntcaaggatgtcttctgtgtcactgtttcccatgatctcaccatattcaaattgcaacatcacattgcagaaacaatgcaggttaagctctacggacatgagatgaccagagcaacaattntgacgtcagagatggagaacagacagaaaacactgcttatnttggatgatgtctgggaatatattgatctgcataatgtggggagtcctcttacagtgaatggcattaaattgatcatcacaactcgcttgtaacatgtgtggctacagatggattgcctaccacataatacaataacaatat

SEQ ID NO: 10411 - DNA, 159 bp, Glycine max
  unsure (1)..(159): unsure at all n locations
gcagcttgaccatcaacacaataactttactcgatgtctgatgtagtccgaacatatcgagacgctcgaanatgaatgttgaactcttgagctaattcaaacgacaataacatatttctcggatgtcgtgttgagtccccgtacatatcgagacgctcg

SEQ ID NO: 10412 - DNA, 172 bp, Glycine max
gctactgtcggtagaattcgctcacaggataaacattcaatttcgagcgtctcgatatgttaccggactcaatcagatatcctagtaacaacgaatcgtcgtttgaattgactgacagcttcaacattcaatgtgcgagcgtcctcgatatgttacaggactcaatgagaca

SEQ ID NO: 10413 - DNA, 628 bp, Glycine max
  unsure (1)..(628): unsure at all n locations
cgcttacccattctaggaccttaagcaccgctgctgcagcttgatcatanaacttaaanaggttacaaaannattacggaatataacaacagtcatatatgtggtgacataacgacaaagaaccaggcttaatgactttttagaccaaggctactcggccagagtgggaccctctactgntaaattagtcaacttggaatttcaatntgattttcgtaaaaggtaaagaagcattcagtgaggttctcgccctgacaatatagacattgctntccatgacagctagatccaacagtggaanaaagttttgcaccgtgcatgaccacacttgctttccaagctagaagcacaaagaatatatctagtcttttacctagttcgccactagacctctttnttacactatggatatttatatatntaagactctanagtgtcttcgatgacgaacatttaattgagacatctcaacttaagactntaaatacttcaatgacatttttatgtcaaatttgtgttggtacanaataaattgggatttcacatttatgatttcgaacttccgtcacagatatgagtagtataaatctcgaaattttgngatctttgtagagatattcatttntct

SEQ ID NO: 10414 - DNA, 286 bp, Glycine max
  unsure (1)..(286): unsure at all n locations
tgtgatanactggtctcaactagtggggatccctattatcatattctcaatcatagtaataataggcgacaatagtagcatcttcccttcgatccggggacgacgacatctccctaaagatctggtgatgatgacaacatatccacaaagatccagtgacaatgacaacttctgtgatctaagcaactttaacagcacattgtgtgagccgaagtttaagagtgaagttcgtgtcgtcgtagtcatggaggcgatagatgaagacgaactcaaagttgtgactgtc

SEQ ID NO: 10415 - DNA, 215 bp, Glycine max
agagaagttgaactttgagttgtgtctcacaagactcttattcattaaagttacaacaagtgttacacatgcttctatttatagactatgtagcttcgttgagaagctgtcttgagaaaacttccttgagaagcttctttgagaaaacttcctttgagagctagagcttagctacacacacccatctaagaactaagctcacctccttgagaagc

SEQ ID NO: 10416 - DNA, 475 bp, Glycine max
  unsure (1)..(475): unsure at all n locations
tgcgtgcacctgtgnaccttgacggctcttaagcacctgggctgcagctgcggatattctgccatatttcttagtgagacccttcgtgagtagggtctcaaaactcatctatacatanaatcattctgaattattaactagtcattcttgctagcctgatcttgtggtcacaacctacaggaagtctgaaagtagtgctaagtatgaggccgttgtcaacagtacgtaaaatagatctttgtgaagaacacacactattttgtgtgtacacacaactaataataaatgtgatattactactattaggatcttacatatgatgtgtnagaacacataagcgatacatcagaaagataattgacacgcaccaatgctgtaccgacttgtacaacaaacttctgcagctaccaataactctcctcaaacatcacgcaagactacccacagccttggaacctaactcagcatcatattt

SEQ ID NO: 10417 - DNA, 170 bp, Glycine max
  unsure (1)..(170): unsure at all n locations
tgtgtctgatgaataatngttgaacgtgagtgttgaataatgaatgtngtgtaagctcgcgagtattgcttatgtnntcttgctaaatgtgatatttggttcagcattggttctttctataatgaactcacccttgcaatttgtatcatgtgtgtgatacatgtgatgat

SEQ ID NO: 10418 - DNA, 381 bp, Glycine max
  unsure (1)..(381): unsure at all n locations
gtgatcggagactctctgcttctagactttggtggaatttgtgatttctaattgctcacatcattctctatatgctatatctttaccagcgagtctacctcatcatacactgcctttgaatgttcattttgtgcatcatcctttattgtcacaaatttgcagtcaattttttatgttccttaagcactctttgtagatgcttaagagtatctntgcacgctcatgaatgctattctatcctccatccttggagaggtcgtgtcttccatcacaagtgaagaatgcattactactactgaagcttttatgttctgcgcgntcaccataacaaagatccacgaaatgtggatcttatcatcctagagaatcaacattcctcat

SEQ ID NO: 10419 - DNA, 260 bp, Glycine max
  unsure (1)..(260): unsure at all n locations
tctgctgatttagaatataatatcgaattcctaaagaatttgcagtgtatagaatgaatattctcataatctgtaaaataggagtatgaatttattgaagcattagatgctaagaaaanataagtacctcctacacatgtatgattgtaaaaaagaatgttcgtatcactttcttagtcattcaatgagcagcatcacaatattntcaattgttgcttgtccttcgagaagaattgtatatcttacatagctctttgcat

SEQ ID NO: 10420 - DNA, 274 bp, Glycine max
  unsure (1)..(274): unsure at all n locations
tgcttctcatagacattcattgtgaataacctcttctccctctgtatggtatcttcgaagggcatgcttgatgcgtggatttggttctgcataattagaatgggagaggaatgactgttcctgttctattactaggtntgctctggaatggaatgatatttntatgtttcattctgctcttatcactttttgtgtggcaaagaaaatcaatataaaagtgaatcatatatatgactaaatgataataataatgggtgatgaaataaaacaacac

SEQ ID NO: 10421 - DNA, 258 bp, Glycine max
actgagtcactgtaatgctttgatagaactccctcgttaggtttggagagtggagttatctaatgccaggaacgttaacaaagaagtatcaggtgaaataatgtgcgtgtagtgaaaactagtttaggtggaggtatctgatttggtaatgagtgagattatcttctgaagtatttactggaaactgactgcttaaaaacaagacaaggataaacctctcggcattgggtgaagcaatttatcggaattaggtatcct

SEQ ID NO: 10422 - DNA, 201 bp, Glycine max
actatcatgtgtttgtacaccaatattggtaacaccaagatcttgtgtacagaatacaacatgttattctctctctagagtgacaatcatagtctccttaacatgtacaagataaacagaatttggtattgtatttgatcaattttatctacaacaattaagattatagtcatttgttttatattcatcatgtacttcatc

SEQ ID NO: 10423 - DNA, 577 bp, Glycine max
  unsure (1)..(577): unsure at all n locations
tgcgtgacaccattgtaagacanttttgattccccttgtaccgncanctctgagtcacctgcggcatgcangactatatatatcgatacgctcgtataataacattgtanactctctgttattcacatagtcataactacttacactgatcgtcgacttcggcgcataatatgtcgcgacgatcgaaattgtacaccgacgctcttgagagatccaactggtttactatatacaccgatgcgtgtttctgcaatcacatatcggagctctaaatgaacaacgatgcttctagatatcaatgggcctacatttacctgatgtcgataggccctcaatcatggcccttgaattgactcggaatcctcggaattaatggcttacatttcactgtgtccatctgttatacgtacgtaactcgaataacatcgactttttaaattaatggcttttatccacgattccattcggcgcttatattgcggtcaaataacacgaagtctgaaaatcaatgacacttttaccgatgcattacgcaatcatttaacctcaaatacacgagctcttataattattgctt

SEQ ID NO: 10424 - DNA, 160 bp, Glycine max
  unsure (1)..(160): unsure at all n locations
ctcgagagtttccgacgtctaattncgagcgtctcgatatattatcagcctgaataggacctccgtgcgaatagttatgaccatatgaatctctcgagagcttccggtgttcaatttcgagcgtctctatatgtgatgcgcctcaatcggacatccgagt

SEQ ID NO: 10425 - DNA, 175 bp, Glycine max
  unsure (1)..(175): unsure at all n locations
ctttcttatggatntaggtcacagtccaacatanattatggctagtctanaagccatgcaattatgatagttatcgggaatgattattacgttcttagaatacacgggtcgtccatgtatacatttaaatcataattattgatgatgcatttgttgaattatcgtacattacatt

SEQ ID NO: 10426 - DNA, 255 bp, Glycine max
  unsure (1)..(255): unsure at all n locations
ctttctctcatccatgatcaccatctcgattttgaattcttgcctactgaatccccttcccaggcactctggattcacacatgatggaggcccagtcccaacacattaaaggcgtgtgcttgtccttggaagaagaacccatagaggagttcatagtcaccacaacccactactgcaactgggacagtactgccaccagtacttatcangcacatgaccaggtcgtgtttggggaagaatctcacactcacacat

SEQ ID NO: 10427 - DNA, 58 bp, Glycine max
  unsure (1)..(58): unsure at all n locations
ctaattatgtgggccattaagtctatcatatgctgacnatagtcgagaagcccatgaa

SEQ ID NO: 10428 - DNA, 260 bp, Glycine max
gtgaaacatccgattgattatttcgctgtattatactaaaagatatcttctaattatattattatattatctctctatagtttccaacgtggctactgtacgacggaacggacggatttcattttagcataaattaatggatattacaaatcacaccatcggtggaaattattttattttttgataggagagaaatgacttagtaatgactgagcacgtaaattggtactatagttatgaacgagattaaagtcacgaac

SEQ ID NO: 10429 - DNA, 152 bp, Glycine max
  unsure (1)..(152): unsure at all n locations
gttatattnnttagtacatactcttntatacatataaatcaataatcgaatacattatcatgtacttaaaagataacattatctatccattaataataaaaaattatctatgcaagcatgtatatgttgacaagcttatagaagttctattc

SEQ ID NO: 10430 - DNA, 189 bp, Glycine max
tacacatctaagatcttgtctatcatgatagaactaatcatgcggacatcaagctacattttgttacagaagtcagagatgtaactatccaaaaagttactactgatgataatgcatctgacatgatcactacaatgttaccaattagcaagctctattattgttcggatcttattcaactcaagtgat

SEQ ID NO: 10431 - DNA, 274 bp, Glycine max
  unsure (1)..(274): unsure at all n locations
cagcgtgactctgactggtctctctatgaattacttagtgagagtgacctgatatactcattgtgtggtgtgtcttgttatgtactcctaagcgtcctagtgtgtgttttcactgatatggtaccacattgcatatagacttgagtcttagtataattggtgcataacgcttgtgtctgactntcattgagttagcaattggtggttgatattattttctggagtgtgtgaacttgaatggatgtgaataatgtgtgtgaatttatgaagtgat

SEQ ID NO: 10432 - DNA, 499 bp, Glycine max
  unsure (1)..(499): unsure at all n locations
tgaggatgcatgatgaanaaatactaacaatgattgtattgatgcttctacttaacatgattttntataaaataaaatagaagtatagcagtttattgaacaaggtatttttcttatggagaaaatgacagagaaattggaaccatattgttctcgaaacagttgagagattctaaggacatagtagaaacattctttgaatgtgtatttgacaaacatgtagttcacattatgaactactaattaactgcaattagattacatgcagttcanacttgaactgcattacccatgtaaatttgacacacatggttttgtaataacattgacaaacatgtaaatttgaactactaatcatactacgagtcanatggttttaaagacttctcaggacagtaacacgaatatgattctatcataccttatcagtcatttgatgcttatatcaccatcatcactcctgagaaatatgggtgcattacatgtaggctacattttg

SEQ ID NO: 10433 - DNA, 154 bp, Glycine max
  unsure (1)..(154): unsure at all n locations
cattatgcgatataatatgttgtaacctcttactaaccaattaatattatcaagtacttgtctggtaagcaaggaaatcgttggtccaacatanatcatntacacgtgcagcatacatcattgtcataattgacaacacataatgacatgcatg

SEQ ID NO: 10434 - DNA, 344 bp, Glycine max
  unsure (1)..(344): unsure at all n locations
tttcaacgtaattaacatgtatatacattaattttatcattatattaaaacataattntcctacatcanaatataaaaggactaattatatggagttcttcgataaaggtcatggacgatagtacgtgtaccatttagagatgatatgcttatgtacacaattcttacgtcatttgttgtaataagaaacatcattgggaaagatagaataatttaaatatttaattaattattgtttctttataattataatctttttggcctaaatataattctgattatcttagtgtggttaatccataattgtgatccctatcttaaaatagaaatacttgatctctata

SEQ ID NO: 10435 - DNA, 593 bp, Glycine max
  unsure (1)..(593): unsure at all n locations
atgtgtaccctatgatgccnnttgaccgngatctctgagtcacctgcggcatgcagctgaangangaagtgtcgaaggtganacttctgctntantgttgaccacagagtggtacctggagatatgtcgcggnggtcangagacctatgngacgtcaggtggngtgctattgctccaaaccaaacttgaccaatcccgacccaacccgggcatagtctgtcagtgagaacctgtgatgtacctaagcaggcgagctcctggcagtcaacagataaaaggaacaaagaccacaaagcaagganggcttgtggtagtggccagctgtgaaactgactgatatgtgagatatggtctctggtaatcgataccaagggtngggtatcgatacacggctanaatgaaacagaggctagatggctctgtatcgataccacggtgtatcataccagctgaaacaatcngagctatgaccttgtatcatacatctgtgtacatacacgaggatgtcctgtatnatacagcctgttatcattcacatgttatgaatttctgctagctctaatatcttctctgagctgcacctcctacaactt

SEQ ID NO: 10436 - DNA, 219 bp, Glycine max
  unsure (1)..(219): unsure at all n locations
cattntcgttcatctcctacaagtaagtaccatctcccttttgaatttggctttccattantggtatttgatgttctagttatcatgttctnttgtaaattcgtgagacaannttgtgtgaatccatgctttgattnngtttgatggggctacaagggatggccctangcctaccttggattctatttacgaatggcatatcatattatccccattcct

SEQ ID NO: 10437 - DNA, 594 bp, Glycine max
  unsure (1)..(594): unsure at all n locations
ntgaccccctgaagccgntgtanggccacatctatactaagctgtcttgaactgtcctcactcatgccttacacactattgtggagtcactaacaagtattgatatgctgcttcatcggaaaatatgttgatgagatactagattgatgtagatcctatggaggctagccatgtctaactcggagagccatggcgtcatgatacggatatattccataatggtgccacagacaaattatcattgggacataataggaacaaggtttccctcacacctttgtcctcatgtgatgtttgtgatgatcaactaataatgatgagtgaanagagaatgcgagagaaatgatgacagcaacacccttgatgaatagagagagtctgatatgagagaaatgagagaaacttgngagataaactacgagtgtactatagacanaaagatgaaatcttaggagagaaaccgcaagcttgtcatgatagaaaagagccatgagagtgatgctgctangcgacctatattactaatgcccatgatactgttggctctatgctgtgcttatgttatgtgacacgactaatgacaaggctgggagg

SEQ ID NO: 10438 - DNA, 338 bp, Glycine max
atgatgattcattaccaacactaatcataacaattttatggacaggatctgatcttttctcatgtttctacaactgtctctgtgattattgtgtctttcatattactcctaaatggtcctatcttaagttatcatttacacggaaaagcattgatggaactttattttcctataatacaaggttcaatcaatatgtgtataagagtatcctactatattaaccctcagttattaaaaaatactgttccttatgcacgtcatattataaaagactacaaacgtattattatatatataatatgtgtcttccgtacttaaaatatttgttcagtaaattt

SEQ ID NO: 10439 - DNA, 629 bp, Glycine max
  unsure (1)..(629): unsure at all n locations
cgcttggcacccttttgggaccttacgcgagctgctctcagtcacctgaggctgcagcttaggctgctcaatntctccagatngctgcatataacggcagatgtctgtatggttggtancanaggagcatataccacagacttttgcgacaggtacanatntataattcaaggccaactgtgttaccaggttaaccaacgcatctagtttaccttcaagcttcttagtttcagctgatgaagatgaattcgtgggtacttcatgcactcctctaatgacaatagcatcatatctggcactaaattgcttngagtnggaagccatcttctcaataaattcctggcttcgcangggtcatgtcttcangggctcaccactggcagcatctatcatgcttctcttcatgtactgagtccttttataaaatattggagagaagctgcttctaatcttgtggtgagggcactgggcacatagttttaatctctccagtattatatggctctctcactgagtgctcatgctgaatattctttgatggcgcgtctggagcnggatttttttaaaaacttctgagcattcactcggatgaccgggagaggtataacctgcttgcatccttatgatag

SEQ ID NO: 10440 - DNA, 357 bp, Glycine max
  unsure (1)..(357): unsure at all n locations
tatgaatctccggtaatatcctgctaagcccagaaaactcctaatctcanaaagaaatntaggactctcccactcaaaaacggcttctatcttanagggatctatagctataaccccttgagatatcacatgccctangaaactaactttctctaaccaaaactcacacttggacagcttagcatanactggtcggtccctaagggtatgcagcataatcctcatgtgttcttcatgttcttctctaatcttggagtataccaaaatatcatctatgaatactactacaaaactatcaagggtaaggtgaaagactctattcatgtagtccataaacacacctggagcatattcaca

SEQ ID NO: 10441 - DNA, 397 bp, Glycine max
aggctctaaccttgtcatgacggacgaacactcgctcactaatgtagtctctggcacttcaaggccttagacaaagatgctacagctaatgtctcactggagtgctacagcaatgctttcgcatgaacatttgaaaactatctctctggactctagttgatcaatgctatctgtaccacacatatgacatcctgtgagaaaaaatacactctactcttaaacttttctctgttctcgcaatctcacagcataaaataattgagtcatgattaaaaaccaaaaaataacttaaactctaaggatctatgcagacaaacaacatgtctgtgtgatgatttttgtaaaaaggagaccattattattcttttttcatcttatttcgccttatcttccctct

SEQ ID NO: 10442 - DNA, 535 bp, Glycine max
  unsure (1)..(535): unsure at all n locations
ntgangccgttgtatgttcgcttcgtctttaaggacgcttagaaactaagctgcaccatatgaganaagaaccgtgattataagatgactgacatgtttgtcagtgtcacatgattgcaaaaagccttgtcgatcctgggagaggtgatcctttaatttgagagaacgactatcattactacaattgttgttgaatctctgaagatggactgagtcatgaattgatgatgatgaatgcccatctctgattgtgataactacttgaccgaaaagctgaccttgngcttgaatgattataccttgacccaattgagtcgatgactattgattgatgacctgacctatacaggtatttcctctacctgtttaggttgagaagcatttcacagagagttgttcaagtaatatgcccaccttggggatattgccaggaaatggtccgtctcgggaattactggtaaagttaatggcaagttatccatcccctacaaaatctctaaacgaatctcagtgttatagggttttctaaaaatct

SEQ ID NO: 10443 - DNA, 201 bp, Glycine max
atgcctgatagaaagccagcctcacacccgcaacaccagttgaccgacgcattgtggctgaaggataatgtataacttgtacatacaaaacgtatctaatgactcacgcacggtttcgtctataatatataagattcaaacctttttcaagcttatctcaacatttattcctaataataacacttgatgttatataaaatg

SEQ ID NO: 10444 - DNA, 412 bp, Glycine max
  unsure (1)..(412): unsure at all n locations
tgttgcctgtggacctttgcancgtgctgcagcagaggcttttctctaattgactttttaaatattaggctgttgagcgatcactaatcctaccaaagataacggtagttgtctaaaaaggccagtgggctcttgatatttggacaccaaaacatggtgctatttgacctttaatctaagataatatgacgcaacaatctaagagatttattgtttcttgaggacatacttgttattagtgaaactatggattgtttttagcgaaagatgcataaacttctggccttagacagtttgcatttgagaccaagataagtaatttttctcccccacaaataatgtgtttaaagataggaagttacacttcttccaaatggtgattgaataacaggtatcctctaaacaacccccg

SEQ ID NO: 10445 - DNA, 638 bp, Glycine max
  unsure (1)..(638): unsure at all n locations
cgccacccacccncctctcnctttacatctgtantattttacattccgtcatttnctatattcnacnnnnatgaancnnnnattgaccccgtgtangtttcgattcatctctcaagcgcgcacgagcatgngaggaggggatcttcatcantgagagcaccaagnctattattatgactcacaacgtcgatgacggaggaccattagccacacgtgaagccttgtcatgtttcttgcttgagtcccaccaatggtctttgattcactgacacatattaaagagaatagaagcttagtctcacaattctgggacaggtcacttgattgaatggacccgctctccatttcttaaccgcgtatacaattggccgcgctcgatctttttgacatgatcatcacaagacatctgacctcatgaatgcgcattgattgcttgttgacccactacttagcacacagttgcattcccccacgctataacgtcacgttacgtcccgcacagagataccataccacatttctctcatagtgattcaagcaacgtcctgaaacgtcttcggattacagtcaatacaccggcaaatataactcactcactttcttcaatagatcgtgtgaaatacgttctgtcaaaaccn

SEQ ID NO: 10446 - DNA, 54 bp, Glycine max
atcttagtatcactctatcacctgcgatattcctaccacatgaaatctacacta

SEQ ID NO: 10447 - DNA, 312 bp, Glycine max
  unsure (1)..(312): unsure at all n locations
tgttatcaacaactcagaatacatttttttggcaatcctcgtctgttcgaactagccaatggaatgtcattataggtacatgacccactttctattcgatgtatgttctttcaatttgaaatagngttgagatctagagaaaaccaacaactaaactcacccatgtaacgtactccatgtaatttagtgcgctnagaatatcagttcttaagttgagatatagtattctatataatgattttcaaaaagtatattcgatgtctcaataaaataaaaagctataaatctatttctgattcctaataaatatct

SEQ ID NO: 10448 - DNA, 394 bp, Glycine max
  unsure (1)..(394): unsure at all n locations
catacgatgacatttcatntaattatgntgttgatcataatntntcatntatcanaatcctttgtagaatagttattttaagacatcaataatcgattctaactctaacaccatatgattactctcatgaataatgantattcctgcacattaacacacattttnttaatatatnntgtcttcactactcaggttgttttacaattcttaaatgatactacctctaccttatgatgttcangtcagtacattaacagtaaatctaaataatagctatcaacaaataatatatgtgtagtataataatatcacttaattttaatgacataatatattataaacatattacttgatatcttaaagtcttctatctatatggatcgtgaacgtacat

SEQ ID NO: 10449 - DNA, 476 bp, Glycine max
  unsure (1)..(476): unsure at all n locations
ctgagccctgtagtctcttcatctcgctgctcagctcctttatctgatgaccgatcggtacttcaccctataggtctaagtaaactatattttcctgggaacctgattttttttaaaaaaacaaacaaagtggctgaaacatactctgattggtttactaaagcgctttcaagacgtttatggggatgtttcgatttctgatttacatatctgaagaaacaacaactttaggtctcaaattctcacgtctcttcttattgattattaatggtntcaacacctgaagttagtaccaacgcgtataatttatggtctcaatttttcactttacattattgtttaacttattaatgagtaatgtttaaagatatgttaacttattattaatatattttaagagtaaggattgtttgtaatgaaaataattttaagttatttagaataacaactttacccaagttaactgttgaatcttc

SEQ ID NO: 10450 - DNA, 249 bp, Glycine max
  unsure (1)..(249): unsure at all n locations
ctctgatgttctatcttagccttctggcaaagtaaacatgcatacacaaactcactaacctctctcttcatgttgngccaccanaacatcaccttcanatcctgatacatcttggtagcaccagaatgtatgcttaagttattcctatgtccttcctctaggatcatcttcctaagctcgggcacattgtgaacacaaatcctatctttaagtctcaagactccatccgatccaacatttgaactacta

SEQ ID NO: 10451 - DNA, 203 bp, Glycine max
  unsure (1)..(203): unsure at all n locations
ttaaaaatgtctttgcacacttacggatcaactntatccgtgaatgacttacggatcaacttgatccgcangtgtgcgaggaaccaggagccatttttggcatttataggaatggtgggtgctccaccaatactactaggtgcacctagcaacacccttaanatgaacctctccaagagttcttcatcttagtctcaccactc

SEQ ID NO: 10452 - DNA, 443 bp, Glycine max
  unsure (1)..(443): unsure at all n locations
ccttcttagcagctctagcccaatcctcttggaggcttctatccaatacccttgnnggtaggatngaataaaaacataaggctttgggatcgatcttgcaccccattgaaggatggcaatggattgtcacactttggtatgtgaccaagtgaaactttcttganttanagtcatagagtgatctcaagggtctgtcgatcccagctaaaatgggttgatcccaaaagaattatacaacanaggccaccattggatcaaaaggaatcctaaggagtccacatgagcgactaacatcagatgtaccctactatcataattgtctttgggcattttccacgagctcctggttgaatgaagtttcttctcaaatgtgcaaatgcacaagcgtgtgcgggttccattctagaatccaaactttaaagcannaatagtcattccttgat

SEQ ID NO: 10453 - DNA, 622 bp, Glycine max
  unsure (1)..(622): unsure at all n locations
tgtgtaccctgtganncccttgaccgngatcttaagtcaccgcggctgcagcttgcgattggtcttgccgtgaaggataatgtggtctgaataanganaattantcatnctgcttggacgaatgagaaaactggggcanatgaagaaggtgaggatgaangagaagcccgtgctgtgactgccattccaatacagccaagtttcccaccaacccaacaatgtcattactcagccaataacaaaaccttctcttacccaccgtccagntatccacaaaggccatccctanatcaaccacaaagtctgtctactgcacttccaatgacgaacaccacccttagcacaaaccanaaacaccaaccaagaaatgaatntngcagcgagaaagcctgaaaaatcactccaatccagtgtctatgctgacttgctccatattactngataatcaatggagccataaccccaccaaggtcatcaccctcatttctcgagaatacgaatcaacgcacgtgtgctgtcacgaaagcacaggcgttcatgacattgaggctctgagcgtagggggggttaatgatgctgctgaattagggaatggtgaatctgcatacagaatcaacatggg

SEQ ID NO: 10454 - DNA, 526 bp, Glycine max
  unsure (1)..(526): unsure at all n locations
ttgcccctgangccctttagagctctatcatactacgctcgtgaggatcgctgaactagcgctaagaatgaaataatgtgttattgtgaatgcaacacacagccttgcttttatatactcttcatgtctggtcacgaacaccatcttgaagagttattacttgtccaagaactcactacctattcgaagaagtccaaccttttgaagagggcatgtatcgattattacaaacagtactggaatcgagtaccgaatctgtgtatcgatgcacaagctatatgtgaaagatgtgactttacattgaatttgatttcacgatatagcgctggtatcgatacaaacattgaatgattcagcttctgaataatcggacgttggaatcaattgaaacctttctacaatttgctctgtaaccataccaaagtaaactcttgtaactgntcggaaatatggctctcggtttacatacattttactattcgttaccatctgatctgatctgccgagcctgaaactggcttgattt

SEQ ID NO: 10455 - DNA, 430 bp, Glycine max
  unsure (1)..(430): unsure at all n locations
tcttctaacctctntgaccaggccgctgttgagagtcaaagcttcataataatctntactntccatcagaagtgctgcaagccttgcctcaactcgctgcctcagaaaggtacgctnttcagcacgagtccattgcatcatttctttgcatagtgtaatttgtagatcagaagtccctggtattttgcaacagtatcaattatgcccctcactatcnttgcagtttttgcctttaagaatcaaggaaaagataggcctcaactgtgtaagaaagctgtgcaaatcctctgccctattctgttccctgagatgctcagtgaggttngtgatggcctgctctttcatgcgcagagcatctggagaagaagaaagatcatcaagtacctgantaagaatggagatggactcagacgggtctttggcctcactg

SEQ ID NO: 10456 - DNA, 564 bp, Glycine max
  unsure (1)..(564): unsure at all n locations
acgcgttggctcccttgtgangcccnnttgancgnctactctgagtcacctgcggctgcacngctgtagccaaatcacacactcgtcttcgttcatctgantaatagtcttctggtagggatgcagcctatnggctcaacattgtctataacaaactntcgagcattcatttggtanagtctctgacattcatatcaaacatgccaagttacacatgacaaanattataaataatatagagtacaatgcagttgaattctgttccataattntctttaataaacatttagtggagaacacaaaagagttaaatgaaataaacttgcttatcagtaacatagcttatgttgagtaattatagaaatgttcattagttctcaaagataattacctgttagcagataattactgagaaataccatactttgctgaataaactaagaaaaaatatttattataataaataattcgctaatctatttttcgttattctcaagtaattaactgtagtatttactagaaaacgacatttacttttagcactactataacgattgtaatatg

SEQ ID NO: 10457 - DNA, 236 bp, Glycine max
  unsure (1)..(236): unsure at all n locations
cacacacttactttcgaatctcatacctaggagcttgcaaatacatgcttggtagcccatccctcttactatgggagacaaactacttcaaggtttaaccaacagttcacaacttctatngtatgtgcattaagtcgatctgtctgcaatttttcaacctagacaaaactgctactacaagtgctactgcactttaacaccttgatgtgcgacgtttgctctatgatgtaatattc

SEQ ID NO: 10458 - DNA, 220 bp, Glycine max
  unsure (1)..(220): unsure at all n locations
cttcattcctttgaagtgcatggacaaccaaagtcagctggtattccttcactattattattattacaattaatgttaactagttcttcttaataagaagtcagtgtnttatgtgannatactttcccnctctggattaaatgataccaataacctcgaagtcatggttntgttngcttcttaacatatatgactgccttanacgatgcatggatcttat

SEQ ID NO: 10459 - DNA, 366 bp, Glycine max
  unsure (1)..(366): unsure at all n locations
agctgaattggagcacgttgaagattgttgaacaacatgcctgngcttagcgcatgctgtcaggcctaatgcgagtggtctagcttatcactcaccttcagcatgaatttacgagagctagatgtaaataggccttattagaggcttagttatcctcttaagcctagttctataaatactcagaaactcttaattgtagaaacctttgacataattgaaattaagcttgtgcttatagaaagcttagcctcttctatnggtnttgactgagaaccaaattgattcttatcaaggaagctattcctttgtggcagattctctntcggcttatcaattcttcgtgggtcgtggtgtcgtctattcatc

SEQ ID NO: 10460 - DNA, 157 bp, Glycine max
atcatcaacttctatccattcagaaacatcagcaccttctctcgtaatcccaggtcgattattgcagcctggaccaagtatagtttcttcagctcagccttcacaagcacctcataaggatgttgaagtgcgtcaggtatcttcgacatcatcatct

SEQ ID NO: 10461 - DNA, 180 bp, Glycine max
  unsure (1)..(180): unsure at all n locations
tatgctgactngctcccatatctacttgataattcaatggtagccataaccctagccaaggttcatcaacctccatctctccgagaatacgactcgaacgcaacgtgtgcttgtcacggagaagccccggggcattccattgagcatggtacggctctgaagcgtaaagtgcaaggtcta

SEQ ID NO: 10462 - DNA, 158 bp, Glycine max
  unsure (1)..(158): unsure at all n locations
gagaggtgctgcctatgagctgacatcctgccaaatcagatataaacacttggtgagccatgaagactcctcacctccgtcacagacttacgtgttngccattcttgaatagccctaaccttcttctcatcaactagcactcctttngaactcacaac

SEQ ID NO: 10463 - DNA, 415 bp, Glycine max
  unsure (1)..(415): unsure at all n locations
cttcatctcgctctctgttctctccattgaaccacattttctcagcactttttgagaggtgctgccaatgtgctaaaatccttcacanatcgtctataagaactngctaagccatgaaaactcctcacctcggtcacagacttaggtgtaggccattcttgaatagccctaaccttctcctcatcaacttgcactccttttgaactcacaacaaaaccaagaaacacaacatgtgtagtacaaaagatgccattttcaagaatggcatacaattgttcttttctaagcacagtcaagacagatttanatgatcaatatgcaaatcaagtgaagtgctatagataagaatatcatcaaagtacaccacaacanactntcctatgaactctctcaagatatggttcattaatctcat

SEQ ID NO: 10464 - DNA, 527 bp, Glycine max
  unsure (1)..(527): unsure at all n locations
atngaagcgggtctgtatagagacacattttatcatctatacttgataagtgagaaagctggcgcaaatgaagaaggtgagaatgaaggagaaacccatgctgtgactactcattctatacggccaagtnttccaccaacccaataatgtcattactcagtcaataacaaccattcttcttacccaccacccagttattcacatagggtcatcctaaatcaaccaccagacccacctaccacacaaccaatgctaaacaccacctttatcatgaacataacactaccanagtctaattattgcggctgctganattgaggagaatcactatgattctgacatgatagggacacccacttgtgcaatttgaagctgtgtagatgttctatgactatacgatctaagttatccatatataanacattacatgtaataaatgataatngactnttgcctatcttacaaccgcttgtatcattctcgatgaggagcatgttatgtcacactgcttgggtactcacacgcat

SEQ ID NO: 10465 - DNA, 369 bp, Glycine max
  unsure (1)..(369): unsure at all n locations
tactggtaatgtgtctactatcattatcatntnttcttcgtcattgaggtgccacttgagttgccaggtctctccacctttgggcgtattctttgaaagagctgtgccccttattgcgcatgttctattgatgcatcctatccggaaccatatcanacatgtactgatagtgcctaatgaaggcaaccattatgtcctttcaagaatggactcgagaaggttccacgtaagtgtaccaggtaacagctaccncagtaagaatttcttagaacgaatgtatcatgagttcctcatcttttgcgcatgcccccatctttcgctaatacatctttagatggatcttgggcaagtagtcaccttgtacttgtc

SEQ ID NO: 10466 - DNA, 203 bp, Glycine max
  unsure (1)..(203): unsure at all n locations
ttggaccgtttctgggaatatctctgggatcggtccatagaagttccaccattgcaaanaccaattgggagaaatgtaaattgtgttggtcttganatatatcagccatgaatgcttgaagcgggtattttggtgccaaaacaccttantccaagcatttacgtaatcccaatacgtataacctaccggatcagatggaactg

SEQ ID NO: 10467 - DNA, 144 bp, Glycine max
ttgaatctcatcagactgaatgaatagtatatccccattggcatggcggtagacgtactgatcgtgagctggcttcatgagatgtgcaattcatattaattaattaattaattattctcatcacaattaagtatgaaccgaact

SEQ ID NO: 10468 - DNA, 182 bp, Glycine max
  unsure (1)..(182): unsure at all n locations
agactcagatatctcattattaagttgaatatattttcatttcttcacccctgcangttctggcagcttctgatatttgtttattcagctgcattatgnggttaacagtggtgcgacaaggttngctatatagaaacaagctgtcaacgaggctaattttcgatgccctgatgaaatgggat

SEQ ID NO: 10469 - DNA, 593 bp, Glycine max
  unsure (1)..(593): unsure at all n locations
ntgaccccgcttgaangcccattatangngactctagctagactggcgctaactatccaggatacatatgatccactctatacacatgctcatcantgttctccagcgtgcactctataatattaaccaatgcgagtgccatgactagctactgtgtagcgatgtgtatgttatgtactcagtaggcgactcgacgacgcatttcactgatactaagccgcgttgcatcattgaacgagtgctattgtaatagtcgcatagcgccagtgattagaactatatagccaatgtcgatgctattgagtataggctattgagtatgcgaacgtcttgaaacaaatgagaatttggtgatatgccgtgctcgacggtcattgataagcgtcttagtatgtacacctacactccaggatgtttaaccggcctattattatgaaccgagaacttactaccacggcgtggatgcgggtacatacgatactacactgacgttcgtgggaccagtgtaaccgatatcatacagaactgtttatggagacgctggaaccatatcttataggacggcttatgcactgcgtaacctattactacag

SEQ ID NO: 10470 - DNA, 211 bp, Glycine max
gctccggagtatgatagtcaccgctttaggagtgctgtacaccagcagcgcttcgaggccatcaagggatggtcgtttctccgggagcgacgcgtccagctcagggacgacgagtatactgtattccaggaggaaatagggcgccggcggtgggcatcactggttactcccatggctcaagttgatccagaaatagtccttgtagtttatg

SEQ ID NO: 10471 - DNA, 280 bp, Glycine max
gcttctcatccttagagtgtgcgcccatcttgcgacagtacatcttgagatggttcttgagacaagacgtccctctatacttgtcgaagtccggcactctgaacttcggtgggataacaacatcgggtactaagcaaagatgcgtcatgtctgcgaacggatagctcccagatccttccacggctctcaatctttcctcgaggagatcgagcttactcctttcttcagttgccgtgggcggtccttccgtggacaaaaccataggttgggtcgtgatgat

SEQ ID NO: 10472 - DNA, 550 bp, Glycine max
  unsure (1)..(550): unsure at all n locations
cgtgggccattttgttcccttgaccgngcatcttgagtcacctgcggcatgcagctntaacaatgtcttacanatatcatcacacagcgaacctatctagatacccatatatctcccaaacccatcccacgaaattaagagagaagaagtcacccaaacctgaattntcgaagtcccactcgtagccacgcacttcacgatcccgaaaatgctcttctttattgattgggcagaaacgcactaanggttgagctttgatggagcttaatggaaatanggagaaaaagcactgaggaagagaactgctgaaaaaggaggctgatgaaaagagaaagctttggtttaataaaaggtnntctctttctatatttatcaactctgcacatgtcctatttgatgagcaaaggcccacttctcttttgctggaccatctcatacaaaggaaaaactgacttaacctaatctgctcgtgcggcgtctcgatcagtctccgttttgctcgcggcagtttaagacatttattaacctaataacccacggtaagtgttct

SEQ ID NO: 10473 - DNA, 300 bp, Glycine max
  unsure (1)..(300): unsure at all n locations
ttgtttaagggtagcatttcttggtaaaactaactntccaaatgttngccttcgcaggaaatggccccgaggaagcttgtctcanagaggtccaggaaggacaaggcggccgaaggaactagttccgctcctgagtatgacagtcaccgctttaggagcgctgtacaccagcagcgcttcgaggccatcaatgtgtgggtcgttcttccggagcgacgcgtccagctcagggacgacgagtatactgatttcctggagganatanggcgccggcggtggacatcactggttactcccatg

SEQ ID NO: 10474 - DNA, 641 bp, Glycine max
  unsure (1)..(641): unsure at all n locations
acgcgtgacaccttgttannaccttgtcncgngatctctgagtcacctgcngcatgcaagctnngtaatggcatcaccatccacaaatccaatgatttctcaaaagagtcatgaagtgttctcagctttagaggcgangacacgcgaaacactttcactggccatcttaacgctgctttaaanaggtacgctattataacttacatagaccacaaccttaagagaggggacgaaatatcacacacccttcttaatgcaatcgagaaagccaatctctctgtcattgttntctccanaaaaacctttgccacttcanagtggtgctttggatgaagtgtcanaatactctagtgtaaagaaaaaaaaggtgcanattgtggtgccctatttctatcatgtagatccatctatctacgaaatctacatgaagttcggagaacatttgctgacacgagccacgttctattgtacatggagaagtgcaangtgagaaaggcttgctgatgcactaatcactcggtgngaatgctcctgacaggtattaatttgtccatttgtctattatanaaatatagagtcacaatattacaaactacaatttatagtaccgaaatttttatctataaataaatatattacag

SEQ ID NO: 10475 - DNA, 162 bp, Glycine max
gtgtgttaactaaactacactcattcatacaaataattatttattactactttagtattaacacgagaacagttttatgtaccacggcattgctggtggacacgcccttagcggaatcgtgctgctcggagacgcgccgctttctgctgatactgggtccga

SEQ ID NO: 10476 - DNA, 252 bp, Glycine max
  unsure (1)..(252): unsure at all n locations
tcattcaatcaagaatcaagaatcaagagaagactcatgatatgtaagaacctcaagaaaaacatcaagataagtataaaaagaacttttaaagaagagattgaatgacacaatntgtccaaaataatttttcaaagaaaaatcttntaccagaagttttactctctggtaagtcgataccatacagtaatcgattaccagaagtccaaaacgaatttataactggtttacaaagtagtaatcgaataccat

SEQ ID NO: 10477 - DNA, 205 bp, Glycine max
  unsure (1)..(205): unsure at all n locations
aagccccacaatcaagatcacatcagtgatcttgactgtgctacctatgatattacctagtgcgagagacttgactagctaatgtgtgcgtagtctagtcatggactcctangcgcgcgacgaggtctttcactgacatggagctccattgcatataggatggagtcttagagtatcatgagcataacgcatgggtattgttcta

SEQ ID NO: 10478 - DNA, 195 bp, Glycine max
  unsure (1)..(195): unsure at all n locations
attcattgaccacagagtggtacctggagatatgtcgtcggggtcangagaccttgtggacgtcangtgaggtgctattgcccanaaccaagcttgaccaatcccgacccaacccgagcatagtcagtcagtgagaacctgtgatgtacctaagcaggcgagctcatggcagtcaacagataanagaaacaaaac

SEQ ID NO: 10479 - DNA, 339 bp, Glycine max
  unsure (1)..(339): unsure at all n locations
tgatcttcttcatcaatggattccttgcttctntgaatatgaatgacagtggaatggagaaggaagagagagaggagatgccacttcaaggagaagatgagtctataagaagctcaccaccatatgaggccatggataagagcttggaggaagaaggagatgaatgaagggagaggaagagaagagcacanaattntgtactctataagcgctatgaaatctgatgtttaattttcanatgatcaaagttgaaaaaatgcacacacaagacttctatttatagcctaagtgtcacacanaattggaaggannattgaatntctatttcaaatttacttg

SEQ ID NO: 10480 - DNA, 133 bp, Glycine max
tgcacttaaatatcaatgagcctgtccctgtgaagggccaaattaaagggggggggtttatattcttttttattatagtgcggatcttaattgtaccctactcgtcccacaccctagggacgtttattttttt

SEQ ID NO: 10481 - DNA, 542 bp, Glycine max
  unsure (1)..(542): unsure at all n locations
nttgacnccctttgaangctcgtcgtcagcttctaagtcgcactctgaatactcaagcgttngccacaacataataagacccccgatgagttgaagatggtgaaganttgccacaatcaaactacatagcttagaatttagagatactcgtgaccaccagttgtctatatcccttaaggaataatgtccagatgcctgaacatcaagcgcataattcttagntcataggtgtagcttcgccaaatcctctgaggcacaccagataatgtcatgtcaacttatgtaaagagctcgaactatcctaatctgtaaaacagtttggtaatttgcgactctaggaataaatctgaactctctctcctctattcatgggctatgtacggtgtgcttccacaagacactgagtgtataacctaatgggcacatgacaatgagtcactatacatgtgaagacaaggatctgtcccttattgctttccccactatgattgctaggccactatgcgctctaaagctaaatatataccttttcggtcttctcg

SEQ ID NO: 10482 - DNA, 179 bp, Glycine max
  unsure (1)..(179): unsure at all n locations
tgaatcgagtcacatcactgcttcgtctactgccaaacatatataggatngtngatgtccttgttacttccagtttcaccttgacaaagatgtcatggaccatgttgaaaatctanatnngattcacctcatattctgcgtananattcgcaatacttcgactgtacatcattcgcatg

SEQ ID NO: 10483 - DNA, 241 bp, Glycine max
  unsure (1)..(241): unsure at all n locations
ctcttgaccttgactngatagaacctctatctaagcgaaggcgcctgactcgatcccatgttttactaaagtgaaacaaaacctagtgcgaatcaagactccgacatttatcatgggtggaatggatgaatgcatgaagaaatgcatatggcatatatgcgttttacgaatacatgagcccggaagattgtccccttcttagatacaacattcgggcagcatagcgcccgatgtatgcatt

SEQ ID NO: 10484 - DNA, 197 bp, Glycine max
  unsure (1)..(197): unsure at all n locations
acagacgtagaacataacctntcatatatggtgcttaggtaatcaccattctagacaacttgccttctatgtcggagttgacgtgaccaccatcatataaagctcgctgcccattgtgcggtgctaactgccttgagggctcttataacatagtgataattatggcaacaacaaccagtgtcaagaacaccatcaca

SEQ ID NO: 10485 - DNA, 549 bp, Glycine max
  unsure (1)..(549): unsure at all n locations
ctttttcccgtacggaccttaagtcacctgcngctgcagctgcctactaatgggtagtgacttactaaggagttaagcatgtacttagtggttgtgaagaaagttatattggtagaaatatgaccactcaagccttaaggagatcttcacatcaagcatatgaagaaagtaacaagtgtnattaattccaaatgccaatatgtcaagtgagcaactgaaccaatngtggttgacatggaacgaanatgaagagtcaaaatttcaagaaaaatgtgcggagattcttgaaatcttcacctaatgccctcacttgagagttaaggtggaggaataaagtgtcatttcgcatggtgctagctctccttcaattatctgttacagctgagatgaaaagtgtaaactcatgttggaactacttttaaaagaatttatcattttgctgtaagcctttgaggctttgtgggagtattatgtttaaaactacttttttcgatctaagttaaggggtagaaatgcccccttataaaataagaagtatttgtaagactg

SEQ ID NO: 10486 - DNA, 148 bp, Glycine max
atcgaggctgctaatgatagccggaaccttgtgcgctttgatacccccgaaacacttaaaagtaatggatgatcattctgactcataacataagtgcttagttttaaatgtgacaacgtgcagttgttgcaatactttgttttagatt

SEQ ID NO: 10487 - DNA, 153 bp, Glycine max
  unsure (1)..(153): unsure at all n locations
cttctcttcctattctccttcaatntccactccactctccattctctctctctctcattctcttctcgagcaagcctggttgatctactcaaaagcctctngacattctatctcccattngaatgtatcagaatctttcagcttcaacaatgg

SEQ ID NO: 10488 - DNA, 333 bp, Glycine max
gtgtatggcgcctgctctcacctctactactgtgacttgcgctacatctacgtggcggaagatcaccattaaaggacctcattgaagctcaaagatccagcctccatagaagcgctacaagcaatcttccatcaagtggtatcacagcacaagagcttcaagtacgtgctccatacacctctagttaatttttacattaccttgacttgcattgtagtgtcttcattgttctccatgtatatcctcacatgtcttgatctagatgttcgtaacatgattctatacagtgtccaccgattaaacttgctatacaagctagatatgatgttctat

SEQ ID NO: 10489 - DNA, 224 bp, Glycine max
  unsure (1)..(224): unsure at all n locations
caagacttcaacatcaagcatcaagaatccaatccaagattcaagaatcaagagaagaaatcaagaagaaacaagtcaagacttcatatagaataagtattanaagaattcttcaaaaaccaaatagcacagttgtggtttacaaaagaaatttctcanatgttctaaagttacagagtggatactctctggtaatcaattaccagttggtagtaatcaattac

SEQ ID NO: 10490 - DNA, 167 bp, Glycine max
catggtcagagttctattgtattattctccctctcataatacaggtcagagattaatcaattccttcaactttgggaatttctagttcatgaaccgaatattctatgacctcagtttatatgatcgaagaaaactacacgtctaattgtaatcattatattcaacta

SEQ ID NO: 10491 - DNA, 638 bp, Glycine max
  unsure (1)..(638): unsure at all n locations
cgatttgacnacanttgtgantaacattgtacgcgagctgctngatagcagagctggctgcnttagcactcattattcagtgctgaggtatgatatgacttttgtntaattatattattcgcacgagagatctatntatcaactctgtggatggctaatataaagatgatcggcactgtgactgagactctatccttccaagtatgtntctctctctatagaacttagatataaaatcttactctagaaaactcagtctaatgcctgctcgaccaacaactctatatgtatatatgtacatacataccacagccgctacgttatgggcttttccttaataagaaaactatattatatggttttgaggatcttgacaatctatacaacattttgcttcgttcgccttcatcacgtagactatatgtatacggagttcatgcatactctccacaatgcatgcaagacaaatctctgatgatacaatgtctctgatcttataaacatgcagacctttctcttggaatactaattgcaatataataataacacactgactacttatttgagattcangaatggtgaatatactcataagtagctcatctctacaatcattgacaaatactacatgtgaaatg

SEQ ID NO: 10492 - DNA, 310 bp, Glycine max
  unsure (1)..(310): unsure at all n locations
gctatcttatgctcgcacacatacaatcaatacactgataaagctaagctcatcatacattatagacaattngcgacgctatacgtanaatctcaaagtcaaaacaaatntatcatttcgtacatccacagaaatagatatataactttcaattcacaaaatatatcatgtgctatagtttttatttggtgagagatacatcatattcctctcgtgataaantaataatatcatgtgcgtttaagatagatcatgttcattaattcaacanagtataagaccatcacgctctttatctgctagaatatta

SEQ ID NO: 10493 - DNA, 568 bp, Glycine max
  unsure (1)..(568): unsure at all n locations
cactctatcaccaactatttatcctatcaatggaacataaactgatgaatntctagctactggcttttaccatcatgccactcaaggccaggaatgattaaggggacagtaaacactcgtgaaaaatcaaatcattctaaaagttgacatttatctctgcttaanatgatgtgagtgcagatttcangtgagcacaaaacagcacaacatacataaactacagccactactagctaggaattatgattcanaacaacgtaagaatgtgcttacacatatacatgtatatataagtatgggatngtatatgtgtatataaatacttggaanaangtcaaaacagtaatgtgtgataatatatatatatatatactcacacatacatacatactagtccgtatgtacgtacctggagttgtataatcaagagctaccacacangggcattatcatagtaatgatacctanaataaaagctatgcantatccatgctcatatgacagagggattgttacatttgttaaataacctttggactatgagtatggttagaacactctagctact

SEQ ID NO: 10494 - DNA, 599 bp, Glycine max
  unsure (1)..(599): unsure at all n locations
nttgaaaaccgttttganngtcgctctatangtgcatctatcgtatactcaagctntaccatcagctanatatagtagagatccactaacctttggagtgaattgaactaatggctgagtgtaactgaaattgtggcgaccaatagtgaccccaaggctgatgcctaaactgccaattgggaccttattaccacttgaacttaatgaaactacagtccctctagttgattaacccataacatattattggtcaaccaactctacatggagagggccattatctagacaaactaaacactcttaaattgagatgaagtggcgccagttagtcctcctccattggagccatgatacaactcataacctaggacttgttctcttcaaactgggctcgattcgatagtatgaacaacactgttgaaagcttccatagctttcttgctgtagaccatgcatagggcgtccagtcttcaagaggaccttgccctgctcttgacatgcctcatattctctcactctgagaaggattgtctcaattcgatgctcatttgctcaaaagagatggtcagatctatgaaggtgacgtacatatctcaccg

SEQ ID NO: 10495 - DNA, 114 bp, Glycine max
cggatcttaagcactgagctgcactcgtccaacttttattacacttagctgtttggagctaaaaaacgtattttttttttttttcaagcatttaagttcagccttttatactcg

SEQ ID NO: 10496 - DNA, 566 bp, Glycine max
  unsure (1)..(566): unsure at all n locations
ctagaatatacaataacactntntgcccaaccatgaagtccttcttaattatcatgctatcatggaacttcttggtctnttctttgtagaacttggaattctcgtaggcttctangcggatctcatctaactcactcagttgcaactntctttcctcaccagcttgatccatagagaagttgcaggtcttcactgcccagtanttcttgtgctcaatctccacttggagatgacatgccttntccanagacaacccgantangagacattcctatgggtgctntgtaggcagtcctatatgcccaaagagcatcatctagcctggtactccaatctttcctgcttggctgcacaatcttctctaannatttcttggatctccctgtagaaatatctgcctgtccatcggtttgggggtggtatggtgtggataccctctggaaaaccccatactntntaagcaaggcatgccatngattgtngcaaaaatgggttccttgatcactaacgattgcttatgtactccaacctgcaaacagatagatctgcnnaatctacactacttn

SEQ ID NO: 10497 - DNA, 659 bp, Glycine max
  unsure (1)..(659): unsure at all n locations
cgacttgcacccttttannaccctttagcgngatctctgagtcacctgcngcatgcangtcttgagccataaanaggagaagggaaattctcttcaagaggatgctataaaaggagagaaggataatttccaatcaaagggaaaaagagaggaaaggaaattcccaatcaaagagtgngagaaagcataaagaaaagaaaggaaattcccaatcaaagaatgggagaaagaaaaaagagaatgagaagaatgaaagaaagctcctgatcaatgatcgaaagaaaacagaagaaatgtgcagagaggtctctggaccagacaatatctgaacaaatacggaattgtcaccaaatgaacaaaagaaagaaaaggaaccataacctanaagttgtcttcttcctttgataccaaccanaatcctgtgcgtcggtgactttgtcgcctcgcgtcanaccaaaacagaanaagaaaaagcccacanaaaatcaatagccaaatacacaccatagccgaaaacccactataagacccattccaanggaagtctattgatcatgacacccatgtatttttgattgtangaataatngcanagtcagcatgactatctatgtctgatangatgaacactactgtgcagatgatcacttgatgatctn

SEQ ID NO: 10498 - DNA, 563 bp, Glycine max
  unsure (1)..(563): unsure at all n locations
ttgccccgttgangccttttngtgcctatcagtactgagcttncatcaagaagcactaagcnagtggcatctctggagctgagggttctatatgganggctactgctctcacgatctggagagtggagtgccctattgtagctagtgccaccgtcactattgttgtagctgagaatnctaaccaccaactgttttcaaggttggcagtattctaccctaattgttgcacacacatgtcggacggtgatgaactctttgagcgctacaacgatatgttgagagatgaatatgacttggctagcaggtgtatggtgatgcttccactcttctacactctaaagaccaggaatgctagacagtgttgggacacaagactacgtctactcttctatactgtaagaatatgcttgtaggccgtacagtctgtgttcatttacgcattgatcttgatcccattatataatattgcttggtcatatgatgcantggaacatttgtgcatgaaagtgaattgttagctctctcaatgatagaacttcttattgtggtaggataacaaaatn

SEQ ID NO: 10499 - DNA, 245 bp, Glycine max
  unsure (1)..(245): unsure at all n locations
cttctctctcanagatgtctcttctcactctaagaagtggattcactcttgtcttggatcgactcactctacggtggctcactcaagcttgaggatagagacttcccaagttatntatcttctctctcagagaggcttactcaagctngaggatagagacttcccaagctatttgtctctacttggatctattangaatgaaggctcctacccttatttatactactccacctccacaatgaatg

SEQ ID NO: 10500 - DNA, 267 bp, Glycine max
  unsure (1)..(267): unsure at all n locations
tctctcaatctaattcctaatctgatttagttcanatacaattatattgtctaagtacatatntgacaatccgatagtgacacacctaacagaaattgcccataacatcatcccctctctttggcattcatccgttacatctctcttaaaacacacactacaacaagacaaacattctcttaaatcaactccaacctactatgttaaagaagtgttgctcgataaggatctatattatcttcttttgtacacataccattaataaca

SEQ ID NO: 10501 - DNA, 234 bp, Glycine max
  unsure (1)..(234): unsure at all n locations
gttgcgcgtactgataggtaccatgagagggttgtggtggcttgacccatgcgggcgccgaagtgacgacatgggtatctccttccttcnncttttgccccagtgctccgattctcctagcattggtactttgtgaggagacgtaatcgaacttccctctcttcaactctacttcgattctttccgcggcgaataccaagtccgcgaagctggaaggcatgtagcctacctact

SEQ ID NO: 10502 - DNA, 325 bp, Glycine max
  unsure (1)..(325): unsure at all n locations
attccctcacaatctcaaataaaagaaataaaaacaaaagtaggtaccagagatagccatggcgaatccacaaccaccatcgtagacatccttctaagagtaaccagagggcggaaccctaacgagaacaagcgtcaataatggcatcctatgcggcagagctttgggaaggtaactgatgcaatcctacccagcaaaggcattggatagaagactccaagtagattgggccagagatccaagggaaggccctagggttctcatgatccttanggtagatntcgagtccatgggctaagtatgagcccgcttatctntgtaaata

SEQ ID NO: 10503 - DNA, 571 bp, Glycine max
  unsure (1)..(571): unsure at all n locations
cccccccccccctctcatattgctgtttgcactcgtaattactacaaactccacgcctgangcctgangtgattcgtgaagcacttaatccaacggatcatatcactttagaacaacttaatctattgtctgctccctcaatacaacctatagtactgagatctaatctggatctgcgagctattcagtttcattcagtctgtgagtctatcaaacatcatgcacattgtctatgctacgcgctatgtggaccaactttcaaatgtgaatatactcgcatcgagcatactctaatatgtgcagctnccagttgcataggggcgggacccagattgcactctgcaagtgactgaaatcggtacatctaaactactaagctcttactcgcggaccataaaatgagctaatatccttgaatatgcacgggacacattcctcaggacggagcgagatatcctattgattcgatctagcggcctttcaactcgatgatacggaatgacacatctcttcatcattcattcatatgagtaccataccaagacgtgttcatactgcgaatggccccccg

SEQ ID NO: 10504 - DNA, 174 bp, Glycine max
  unsure (1)..(174): unsure at all n locations
tcgtatccagtcaaggtctgagagaccatacaattntcctaacgaattctaattatgtgggccattaagtctatcatatgctgacaatagccgagaagcccatgaatctcttcggnggcggagtaggtgtctgccatcgtcctggccttggtaacaatcggggaagttcttgac

SEQ ID NO: 10505 - DNA, 65 bp, Glycine max
  unsure (1)..(65): unsure at all n locations
taaacacacataatggaagtactaagtatttggtacctatacttaacagaanataccttatacac

SEQ ID NO: 10506 - DNA, 149 bp, Glycine max
agcccatcatgttgttctcggcggtagtaataatgtgtctccatcagtctggacctttggcaagttgctgctggctccttcacgaagcctatattaaaccatgttaacattaatgatgtaactagggtgctgagtgagttggggaggag

SEQ ID NO: 10507 - DNA, 396 bp, Glycine max
  unsure (1)..(396): unsure at all n locations
tgacacatggagaaaacgtgttgaagctgaaatgattataaatgatgctaggtctggttcagttcagactgtcccctggccagccagaccacggctttctgaagttgctcaatgtgggaataaacattcgagtgggtcagctgatgttgccatgaagagctcatttcacagctctctgcatccaaaactgcctctgcacagatggtcccaggagagaatacaagatctacatctgcatcttcagcgtctacgaaatcagtgccttcacctgcacccgcaactgcaaactcgatagatggacagccctgtgttgccactgctagtggttcctttgatcttcctgtggcanatgcaagggatgagaaaagtatcagttctagttcatctcacaacagt

SEQ ID NO: 10508 - DNA, 202 bp, Glycine max
  unsure (1)..(202): unsure at all n locations
gcacttctctctctctcgaatatgctgagggaaagtatttgcgtgaagaanatccaagccgaggcgcttccgtaacgtgttcgtgagtaattacgcgaagactctcgaccgttcttcaagattcatcgttcgttcttcgttttcttcagtcttcaacgggtgagtacctcagaccatgcttttcaattcattctatgtaccc

SEQ ID NO: 10509 - DNA, 598 bp, Glycine max
  unsure (1)..(598): unsure at all n locations
ntgangacgtttgangcgctctatanagtactctagctacactcaggcgagatggaccatgtcacgtgctcganagaagtcatgactgtgcttacatagttgacctgaccggcgagtatcaatgaagttccaccttcacagtctctgattcatctctgtttgatgcagatggagaatcctatctgacgacaaatcctcctcacgagggagagaatgatgatgacatgttcaacagcaacgtccacgatccacttcgaggacttggtcgtcctatgacacgggctagagcatggaacgccaaagaaacttcttaacaggtgctgcccatctatctgaatgagagcacaagtttcatagacaccagtcctacgttgtgagctgcatcatggaccaaatggatgatgactacactacaccactgtgcttaatattaccacgttatctgtgcatcaatattgcccatccctgtaaagttgcctaccatgaagtgctttggcgtaattactgatatgtcttagtacggttatttcatttgtatancgtctaatggcacatngatcactccttgaagacaaatgtgctacttgtgcttagcgtg

SEQ ID NO: 10510 - DNA, 132 bp, Glycine max
attatgatcagccgctgagatgttctaccttctgggactaccagctgtcacccatggtggaagaatttgaagagattctaggatgtcctctatggggaacgagaccatacctcttctcacgatactatcgat

SEQ ID NO: 10511 - DNA, 267 bp, Glycine max
  unsure (1)..(267): unsure at all n locations
taacagtttacttgaaggctggaaatgataggatgtgtcatatgggcataaaaaattctttgacattaaggcaaaggtaccttacacttgtttcagtgagatgtgggatccataaaatgaagtataaagaccagagataagagagantactaattgtgatagagaagaaaatgatgagagaaagaagaaatatgaattgtaaaagagaaattagaagataattcatgtgacttgtgctcatactataagggtaatatttcatacaac

SEQ ID NO: 10512 - DNA, 286 bp, Glycine max
  unsure (1)..(286): unsure at all n locations
gttgggaactgttacaacccgaatgggttaggcaaagacaacggcggcataactagcctgataaatgccaaagganatcatgggaggtatgggttatgctataagcccactcaggaagatataaagagaagcatcgcgggaaggaagagcggtagtcaaagctcgcggttgagacaagaaggtgaatgaagctcactctgccacataagtaggagctatataagcgcgggtctggnggacgaaggtcaactggtcgcgatatacgaagatgatgttccgagtacat

SEQ ID NO: 10513 - DNA, 232 bp, Glycine max
  unsure (1)..(232): unsure at all n locations
cactaatatatagagtgactactnggaaggaaggatgagtctnngataggcccatcttatatacctaattaaactaattatacaaaacanagcccanactcccagcccaattattcaattgcaacggttctgacttctcaagcttaattgaccctcgatatggaaaatagacaacagcannnatttgacaaannatgaagtgatttttgtagctttccatggattactcaca

SEQ ID NO: 10514 - DNA, 224 bp, Glycine max
ctgcacgcacagacaggtccagggtgatgcaccacatgccgcggacgtgccgccacctcatcaagctggtccagccggatcatttaacacggagcagtatttgcggcatttggttcgccagcaggcggccaaccaccgggcacatgtacagactcatgattgtctttatcagatgagtctcaacctgcagagccagggctttacttctttttcgtgccctactc

SEQ ID NO: 10515 - DNA, 251 bp, Glycine max
  unsure (1)..(251): unsure at all n locations
tcaagaatcaagaacaatcaagatcaagaatcangaatcaagagaagactcaatcaagataagtacttaaaaaaagttttcanaacattgagtagcacaagaantttntcacaaaaatctttaccaaagaagtttactctctggtaatcgattactagaaggtagtaatcgattaccagtagtcaacantgttntcaaaacagaattacaaagcggtaatctgataccatagtcatgtaatcgattaccaa

SEQ ID NO: 10516 - DNA, 92 bp, Glycine max
  unsure (1)..(92): unsure at all n locations
attttcagctatccactngctcagcacgccctgtgcgctaagtgaatctttgttcatgcactgagcgagtcactactcgtgctaagcgcgtc

SEQ ID NO: 10517 - DNA, 294 bp, Glycine max
  unsure (1)..(294): unsure at all n locations
tatgaatatataggtgcatggactcgttgtaattgattacacaaatatggtaatcgattaccagagagcaacatatccagaaataactgcttgtaatcgattacactattatggtaatcgattaccagaggtcattntagccagaaaataaaaaacaaaaggctttctaggagagaagaaagtttgagttaatatcaaaatactttttcataagaaatatatttcagaatactttattgaatagtctcaatcaagtaattcacatatcatactatgcatgaacattaaaacatg

SEQ ID NO: 10518 - DNA, 524 bp, Glycine max
  unsure (1)..(524): unsure at all n locations
ataccacttggtagacaagtggcctcaaatatcttaagaagacgggcgttgaattaagatattccanactacttccctatataaagattatttcactttctattcangttataaattcccttaacagtgaacttcttanatatcgattcanataaaacaatntgaatatgaatatcaagcaatatataacaaatggagttaatgggaaacgaaagtgcaaactcataattatactggttcggccacactcttgtgcctacgtccagtccccaagcnnacccgctgggagagtccactatcttgtaaatctactttatcaggtctaaacacacanggacnnatcttccttgtgttagaattctttacacaagagacctngtctcttatcctagagatagaaaagaagagatgatcttctagaagagataattacagatgacactcataatcttatgaaatgcatgatgtcaggatctagagaaatgtatttcttgagataacctgtgctgaaacttgacatcggt

SEQ ID NO: 10519 - DNA, 531 bp, Glycine max
ttgacgttgtatacgctcttatgtacactatgaatactcaagctgaggatcaaagaatttctctctgtctctcaatggttcttcattcctcttcctctatcactttagccttacttcttcttgcacaattcatggcttgtccattggagatgatcatggaatgctgaacactttatcaatcctaggattcactctcagcaagactgaatttgagtgttggttagtatctctaatctgcggaatgacatattgttctcaaccctattttggatttcaatactatgaatatgcctaggactgaacacgacataagttattgattgcctttcttcatttcaactttaatcacagattgtatgatggtattccacctaattgtgatctatgaaatatggataatcattgaacactctattcatgatgacttacacatatcttcttcggactggatataattcattgttgtaatggagtgtattcaatatttaaacggtggcatatgtgtgcacataccttttagtaattaatttg

SEQ ID NO: 10520 - DNA, 526 bp, Glycine max
  unsure (1)..(526): unsure at all n locations
aattatattctgatntcttatctcttctattactaatacatatatgtgaggcgtagacggcgtcacaagcgcaatgactaaaaatcatctacatattcaaagttctgcgtatttgantgagcaatcattatggatctaggtattcctaatactctccctgataatctaatgtgatgtgattattggtattttataacgatcttcttaaattccaacanatatgtcattctcacataacacacatgtgctatattttattcatgggatatattcttattaatggagaacacgtcttactctactcattcgtggactccactggtttccatgcttagctctaaacaactccaatgagcctacatacgcagttgcttgggtataacattgcatttgcactacatatacgacggaataatatggctgacatgcttcttcacaacttgaagacatgacgtgccatacacattggagcaactaatctactatataaaacagaataggtattagttgattaacaatctcttcn

SEQ ID NO: 10521 - DNA, 643 bp, Glycine max
  unsure (1)..(643): unsure at all n locations
ccccccctctccttgtactatttatctctcntttcctactctctgtanggacccataaggcgacggacttaagcctttgagctgantacgtgattagcaccttgaatctcacgctgaggagacttgtcaacattggaagacatgtcgtatattatgtattcccctcgtaaggagaaactanactgtctaagattcattgtctgaccttattaacaatatgggaattaccagaactgatgtatttctacgatggaagacactcactagaatggccattgctcacactactaaatgtatatcattgtgacatgctgaaattgttacaactgtgcatcatagtggtgagtntcagatttataaaccctccttctacttaattgatcagcatgctggtttctcaatcgtaaaggtaccacaaaatttcctatctagtcttctataatgctgcgcgtcttatatgcataaatattaagaaatgctagcacaaacttttcgcatccctgctgaactaaacaatncnaagcacttcgaattatcggaccagcataaaaaaataccacagtctaatatctctacaatgcttacgagtgttggtctattcttaatataagataaacagatacacaacatctattgctattaa

SEQ ID NO: 10522 - DNA, 411 bp, Glycine max
  unsure (1)..(411): unsure at all n locations
ctggtgtgagggtgagagttgcttcacatntacctcattctcaatgtcacttttcanacctagagaacccattgaatggagggatgttggacacctagattctgtgttgctgtgtgttgaagcttggctntgggttatacatgactgatacatgatttgggactcgtaagaattgacttgggcaagaatggatgataggaagtgtgattatcaaaatctgcacttatgcacaagtttgctgtcanaatatgtgcagcaaaatttggctttgtgagataaacgcttgtgtgtggttggctgtggaaagagtactgcagaatgagttctggatgttcgctagtatatcccaacggtcacaatgtaggcttatgtactaaagacttccagtataagtttcgagtcgatccaacg

SEQ ID NO: 10523 - DNA, 485 bp, Glycine max
  unsure (1)..(485): unsure at all n locations
gctatctcggccaagcgagccagatgctagcgtgggtgagtataagtccatataattcttggaaatgacgcatttgccaccttccttatggcgtattgtttctggatctgacaaacaaccatcataccctgagcgacccctcggccttgcactgtaaccagtgccaaccaccgtaattcgattagcaatgatcaaaacatcatatctaaatgataacaggattatacctagatgacattatgatatgacaatttcccctctttacttatctgttattntttatctcttcttacacaaaaagataagtaaagataatgacactaatttcatttgagcgatcaggctattcataactggatgccagagaacaaaaaatagtgaaactgattaaacacaagactttgaagtctttgaaagcatataaatagaaggcattgatatcttgtatagcataaaacagaagacattgaagtcttntgaaaaca

SEQ ID NO: 10524 - DNA, 251 bp, Glycine max
  unsure (1)..(251): unsure at all n locations
gaccacagagtggtacctggagatatgtctgcggggtcaggagaccttgtggacgtcatggtgggtgctatngcccaaaaccaagcttgaccaatcccgacccaacccgggcatagtcggtcagtgagaacctgtgatgtacctaagcaggcgagctcctgtcagtcaacagataataggaacaaagaccacaaagcaaggaggcttgtggtggctggccagctgtgaaacttgatngatatgtgagatat

SEQ ID NO: 10525 - DNA, 331 bp, Glycine max
  unsure (1)..(331): unsure at all n locations
catctcagctctagttgttataccttcttcacaagtgttcattgtctctaaacagatgtgatctttcacttgagctcacctntgaagatagtgatcgttgaagaatctaatgcttgcatcaaatgcaagtactccttcatgctacataacaaccccatgagctctaatgttgatcatttcagcagagaaccacttgctttgagtgaaattgagtttgtcagaagcagtgcacatcttttaatggtgtttggcaatcttcatatcatgaactctttggtctctctattggtctattcctcaactttttagcttatgtgctcattagtcacac

SEQ ID NO: 10526 - DNA, 200 bp, Glycine max
  unsure (1)..(200): unsure at all n locations
cctgtagcttacctcaaggcactaatgctcanaggtgccctcgactntntctggcctgacaccncaacattgtcatctcacttcctcttggctaanacagaggaagaaacactgngagtgacctcagcagcactagcagcagggccaacctcaatagtaggttaaccctcttctataacagtaggggcaacaacagcgga

SEQ ID NO: 10527 - DNA, 241 bp, Glycine max
  unsure (1)..(241): unsure at all n locations
tttgttcacattcacattactcattnttggtgtgtgagtntctggagatgggcgacgtcaagaatattntgaaggatgatgaacaagcaattgcgtttgattggaataaaagggtggatgttgttaatggtgtagcaaatgctatatgctatatgcatcatgattgctcacctncaatcgttcatcgtgatatatcaagcaagaatgttcttttggattccgaatatgtagctcatgtctc

SEQ ID NO: 10528 - DNA, 239 bp, Glycine max
  unsure (1)..(239): unsure at all n locations
aaacttttcttattttgatattttagttctcctgcttattatgtgctggtggagctcaaggcttacgtctgttatatacaattgcattgctaaacttaaaaatcaatgatatagattccatatatcacaaaatacattcgttgttatatcatctacaccatanggatgactgtccatatcgcttatcaaaacttcgtcctttcaaaaaaaaaagcggcttcatattgaatatttttcat

SEQ ID NO: 10529 - DNA, 255 bp, Glycine max
  unsure (1)..(255): unsure at all n locations
aatgtcattcacgtggaccttctgctagtgattatgacttaccgcaaccgcctatctctcttccattcccacctagagcaattccaaacaaaacaatgcgagaggcggataatgagatcttggagaccttcaggaaagcagaggcgaacatacctgtgctagatgccatcacgcagattccaagatatgccaagttnctaaaggagttgtgcacccacgaaaggaagctcatgggcaatgaaaggattatcatga

SEQ ID NO: 10530 - DNA, 484 bp, Glycine max
gtgcacctgtgggccttgacggctcttagcactgggcgcactatccagtactgaatgtatatacttagatcattcaccctaaagcaaaatgcccctttatagtgacttattgcctcagctagaaaatattgctatgtagatctggactgtatgcgtagatctatcttcgtctggaaaagaagataaaaaagagttgagtggtagcctattacagctgtgtaaccttttgtaagacacacccaatgtaagaagacaaatttccctttacttggcacttttacttattctcaactatcaaagcttcctccattcaatctattactatagtccctggcatggatcctcttataatggattctgcatgtgttctattaacagtacaccaaaccgacaccgctctttttcgtatggtgctggctgtatatattaaatatccacatattccctaaggcaacatgtgaacacatgggaatactataaattt

SEQ ID NO: 10531 - DNA, 579 bp, Glycine max
  unsure (1)..(579): unsure at all n locations
nttgcccgttgangcgctcttaggacctgctgactgtgctatgtccgtgtagggacatgatcgcnatgtctctattcttttgacacttcattacgcaaaacacccatgccagtgtggatgtaggacatccctattctgtgacgaccgtgacagcatctacgtcatgtgattacaagattgatactctgatatgtgaccagtacgaatcgttgttggcgacattgtgagatatgtaaacagtgaactaatacctactctaatacgccaacttgcacgtcataaaagtgctaccatactctaggtttgcgcactataacactggagaagaggactctgtagaaagatgatcgcatgattgtctctgaataattgctattatatgccaatgacacatgtgttggcttgtagactaatgactatcaatntatgttctcactgntcctaacagctaatgtatcggaactacgcatgntcttgcgtcactagtgccaaatctgtttctgtcgcgatgtgctcagaatcagctcgctgtgcttatgggctggatgcttgtcttgataacgctattaacctcactgn

SEQ ID NO: 10532 - DNA, 154 bp, Glycine max
ctatagtctatttcattattaataaatctcaagatatactcacatcgtcatacattaagccactctacgatttgtcacttttttcatcatttatgctacatctaagcagtcatttgttttttgtactccatttcatttaagaacaattatttac

SEQ ID NO: 10533 - DNA, 418 bp, Glycine max
  unsure (1)..(418): unsure at all n locations
atcatgtggtatcaagagcatcttcatctangtgatgttcttttgcttnctctcatctttgttcggncaattcactttaattccttgctattcatcttattcttcgtatatatcctccattgtcttctggtttggtgctgcttagagtagattcacaanaataaaccgattaaatcttagaattacacttgttcttgcatttttatggttcaaaatttataaatctactctcgaatcnatgttttgtgttgaatttanggttctatcattttcagtcataatattcttgtgctgaacctttagatctagatcttattccanaatattgattagaagacaaacacanaaatctaagtgtaaatcacttaatctnatgtgtcttagagtcatgtctagtcatagtaattcgcacattatg

SEQ ID NO: 10534 - DNA, 248 bp, Glycine max
  unsure (1)..(248): unsure at all n locations
tatcatctgcaaaagccacatgagatagtngaatacctgcacacgtgggatgaaaattannaatggcatcatccttgaggctgctcatatctntggaaaagtactccaaacaaagcacaaacaaataaagggagagaggatccccttgtctaagaccccactgtccttttgaagtgccataaatggatccattgactgccacactaaaggaagtggaagaaacacattccatgatccangtacaaaac

SEQ ID NO: 10535 - DNA, 139 bp, Glycine max
  unsure (1)..(139): unsure at all n locations
tgaagaatcattcatgtttcctctgatgagtctaatgctatntctccaagagacgatatgctagatgatattgcagaatctgtacaaccaatgcgcattcattaacaagattctaatggataagaagaatgaagcaatg

SEQ ID NO: 10536 - DNA, 261 bp, Glycine max
  unsure (1)..(261): unsure at all n locations
cgctgtcatatgtgtatatgtgtatatgtgtatatgtgtatatgtatattatattcgttgttcttgtagttgtttgtatttttgtttgtgcagaagaaaaagagaaggagtagagactagagtcgtcatcacggagagggcaggacggacganatcagngtcctatctttgctttcctcttatctccgatgagaggcaagtaaagaggggcaactgtcataccctaatttctcccgggattattattgatgattacaacct

SEQ ID NO: 10537 - DNA, 278 bp, Glycine max
  unsure (1)..(278): unsure at all n locations
atctctagcatgcatnggatgttggtctcttcctgtgtcacgggaagccggaaggtccatatcaccttcttaattgtacacatggtgcactgcgcccccaaatgcgcaagtaagaagagataattgtccgggctctcgtgtccgtaaaatgcattcatatcatgcatcgcataagcatctcttcataacatcataatggacatnatctgcattngtccggtatcatattccagcctcacattttgcatgagtcatggcatcatcatgcatatgcgttc

SEQ ID NO: 10538 - DNA, 250 bp, Glycine max
  unsure (1)..(250): unsure at all n locations
atcgagtggaagtgatgaagataccaaaatgataaacaaactgagaaaagacaaaaacagaggaagtatggttagaatagttgaagcaatgctcgagaatgcatcccaacatgcatgaaannaaagaaattccaaggcagacaaactgaatgtcatacganaacaacagtgcannataattgatatagtcctaatctnagaataatttagacgtgtcgaatgaatgtcaactattanacataaaatatat

SEQ ID NO: 10539 - DNA, 372 bp, Glycine max
  unsure (1)..(372): unsure at all n locations
atagatcttagatatattgctatttcctaagtganatcttctcttatgaggagaaatctctctttgagcagtctacatacaaaaatcttttgttgttgaaagtccaacaagtggctggcaaaggttgtaatcaatggtgttgttggtctagtagtggcaaagtgtgaagtccagtgtggttgttggcaggttgttgaaatccagtggttggttggtccgacaatgactcattgtgttggtgaaatctcatcttgatcggtgtaagaactaaacgtagtccaagtttgtgatgaactaatataaaactcagtgtgcatcatcattcttctctctctccctctacatggntnttaaattgtaatcatgttactg

SEQ ID NO: 10540 - DNA, 145 bp, Glycine max
gtcacataattatgacagttaatatatataggaagtgggaaaacctaactaaagcatgtgaagtgagcttaagcgatacaccacactcctatatgatcaactagtggggccagtaattttcttatgctttctatttcaattatat

SEQ ID NO: 10541 - DNA, 84 bp, Glycine max
tatctactgaagtctggtcaacgtttgcttcgtgtttttttaggaatacttgatagaagcttagtggaccagtcatcttactta

SEQ ID NO: 10542 - DNA, 293 bp, Glycine max
  unsure (1)..(293): unsure at all n locations
tacttctacntgagctgagtntctaccctcctcctgtcctgacatagaatctctagtgcagctgaaggatgctatanggctcttgatccttcagaatcagtctttggttacttgtttgctcttcttctgggaattatctctcattaacaaaatatcaatgataaatatgatggattaacctggtttccttattctggtatcggagacaagataatgatcttcattgctctcattattcagtatttggattagtacattttttattggctattatctattcattcattatatta

SEQ ID NO: 10543 - DNA, 659 bp, Glycine max
  unsure (1)..(659): unsure at all n locations
agtgactggtcgcggtctttgagtcgactgcggcntgaactgtgagctgcttgctggtgcggatgctcattcgagantatgactgaggagtgatctagagatgtttgtgagcacganattgagggaagaggaagggagagaagtcgaactttgagttgtgtctcacaagactctcattcatcannnagtacacaagtggtacacatgcttctatntatagtatggtagcttncttgagaagatatcttgagaaaacttccttgagaagcttctttgagaagaacttcttgagaagctagagcttagctacacacaccccctctcatactaagctcaccttcttgagaagcttcttaagaagatcctaaagaactagagcttactacacatacctctcaatagctaactcacctcgtgagatgagagctagaactagctcacacccctatatagctaactcacccatgacaaaacatgaaatcanaaagggtctactcaanactctctnatgcccgantcaggtatacccttctctagatggcaatcaggccaacaggaagctactatattcaaatacgctctctaccgtgctcanctactatgtatggaccaggctcctgtcttccatactgacttacacgctgtggtgatgcttcttn

SEQ ID NO: 10544 - DNA, 618 bp, Glycine max
  unsure (1)..(618): unsure at all n locations
aangggtcnaagctgatctganaagatttcatattaatcatcttgcttggacgaatgagaaaactgangcatatgaagagggtgaggatgatggagaaacccatgttgtgactgccattcctataaggccaaggttcccagcaacccaacaatgtcattacttatccaatagcaacccttcttcttacctaccacccagttatccacatagatcatacctaaatcaaccacanaacccacctaccacacaaccaacacgaacaccacctttagcccanaccagaacaccaaccagaaatgaatntngcagcgaaaaagcttgtagaaatcaccccaatnctagtgtcctatgctgactngctcccatatctatttgataaatcaatggtagccatatccccagccanggttcatcaaccgtcatttntctgangatcngaatctaacacacatgtgctatcatgangagcccngtgcttcattgacatgttggcctgagcgagaagcnagctattatccgctgctgaatgagagatatntgatctacatgcaaccacctcatgggcattgaacatgtgaagttatacatagactattatctatgtacacatcacaaan

SEQ ID NO: 10545 - DNA, 117 bp, Glycine max
  unsure (1)..(117): unsure at all n locations
tactctatcgcattctatctctctgctgctcacatcataaccttatttcaattggatgtanagaatgctntctcgcatggtgacntacatgaagaggtgtatatagagcaatcacct

SEQ ID NO: 10546 - DNA, 149 bp, Glycine max
gttatggaacttaaggattctcaatcttagctacttaatgacttatcaaccttgttcatggctactgatgtcgcaactattccttcctcggtttctacgagaaatttgccgtttgcactcaacttcaaattgcctgctgtaactctcac

SEQ ID NO: 10547 - DNA, 574 bp, Glycine max
  unsure (1)..(574): unsure at all n locations
ccgtttatgcgtgggtattctcatnntcactatnangcgtcatgatatattacgggcctcaatcggacatgcgagtcagaactctatcctcgtcagatatcacactatgtcttcatgttaaactttgagcgacgcgataagttacttggcttattctcagatctcgaggagaagatatggccgcttgatttgcgatcggcttcatcttattctatgacatctcatatatatgagctcaattggaatccgagtcaacgtatagctgccgacattgtgtgtcagtccatcctacgtctggcgcatgagttataagcgcctcgatcgagcatcgatcagaacttaccccgctgatccacacatgtatcatgtacaattgagcgcgcgtaagtatttgcttatctgacatcacgaaaagtatggctctgtattggaggctcctctatccaaagctctctatattatcctagtctgcgcaattacgctggtgtctatatctgtgctctcttattnatgcatcacatatgcgtattgactaataacattctcttataccattctatactgttctccattg

SEQ ID NO: 10548 - DNA, 125 bp, Glycine max
  unsure (1)..(125): unsure at all n locations
ctatctntcaatcttttcaacatcatctctctccatctttcatatcttcaatcattctcttatctttcaaaagttttgtcaacacttctttccaganagttcttgtcaaaactttgctatcatct

SEQ ID NO: 10549 - DNA, 442 bp, Glycine max
  unsure (1)..(442): unsure at all n locations
gtgcttgacctgagacttgatacgggctcgttgcgccctctgatatcgctcctcttagcctgtttgcagcttggacatttttttatcgattcttgattaaacgtgtcacttttatgtggatgctaatgctaggcgcctttgttctcggctcctcacttacgtctaactgaccatcaacttgcgggttaaccttggaacccatgacatgtctgcctagtcttgtctttttgacacctcatgctgcgacctctaatgctcacctgttatgaaccttgatgangccactctcttacgtgccttctaagagcagtgctatcagacgatgactgtcaccttgccataggacatcgaacttctgatataccatctctttctgagacatacaactctttgtgtaagngccatgctctcttgcgacggactacgcactctccttaaagtt

SEQ ID NO: 10550 - DNA, 616 bp, Glycine max
  unsure (1)..(616): unsure at all n locations
atgatctngttgtcggccccgtagacgncgccatgctgtanagccgacctganggcatgcangctngancatctntcacttgtctgtgtaggcagcttctaggtcgagatatattantcattggacgtcgacatttgagatgcatagtctacgcattatgtaatatgctggcgatatagagcttacgcggattgaatgaatataacaataatctaatagactttagcgatatgatagttagatttgtagacataatacaactcttaacctaatgagcctagtattatacttaataatagatcgaatcgaacactaacacttagagagggtgagagaattgatagacaacatagatcggagtgagaaggagatatatcaaccaactatactgatacagatgcacattacagtacggtgtgactgtactacaagtagtatgaagtgctctacagatactactctgctacagattgacagactcactagataaattactgaggtgtctcttaccttcactataggggaaaactcacctcgctggccagataaagctgaatcttgcgatgctatgaccgaaacactttctgaaagaacatctgcttttatagangtgaat

SEQ ID NO: 10551 - DNA, 274 bp, Glycine max
  unsure (1)..(274): unsure at all n locations
aacttatttgatatttggcaactaattggntgaagtcacatgctcnactgattaacctcatgccaaggctgactagacgctagattaacttgtggaaatgcgaatgataaggaagatgaaattagggtattctggtttaataggtctgctaaatgataagatgaaatgngtatgtgtgcaaaataaaggatactactccggtcaatgagattaacaggaagtcttgagcatagctaatctattagcaaaggattgccaaattgcaggtttgatg

SEQ ID NO: 10552 - DNA, 163 bp, Glycine max
  unsure (1)..(163): unsure at all n locations
tctctttcaacatcagaaatcatcttcaatctctctctcacatcattcaacntttctatagaatttctgatcttttctcttcatcttctaaaagttttgtcananattctcttcttagaaaagtctttgtcaaaacctgtctattcatctttcagctctctcc

SEQ ID NO: 10553 - DNA, 700 bp, Glycine max
  unsure (1)..(700): unsure at all n locations
agatgtccctttgtcactcgtcgcgngatctctgagtcacctgcggcatgcangctntattttngccanatacncannaactgtnnttttttatcagcttatatanaactaagtgaactaacctcatagaataatcttgtaaccagttaaaaactggaaattgtgaagatctcgagatcttattgaagtaccaacagctctaattgaatagttacaaacaaaatgtaataaccatgaactttttacattattnttaaggtcaaatgacactattaattatataagagnaataatatgtttctttttttattaccgagtganaatgattntgacataaggatctaaattcttcacaaaatctatggtaggttcttagcanaccactgatgccaacttcggtgagaagtttgaatacaacaaccatcggatactgacattgaaagganntanattctcacacatctaacgttagttngctagcaaaacactgatagctacttccgtgangagtttgatancaatatcagcatatattgacatgaaaatcttctataatacatcttattttccaactagccagctggatggtggctaaggtatgatctnctcganatgatgtcgaaggtaccatntatatttctactttggtattcttggttaatagaacttacggtaatgacttatgtgtccactgactcag

SEQ ID NO: 10554 - DNA, 686 bp, Glycine max
  unsure (1)..(686): unsure at all n locations
ctatagccctttaccnacnattgacgtacactatgantactcangctnntntattncttnntntttntgttntacgaactntgaangtcgtagaaatcttttgtttttatataatattgtntaagtctaaaatnttnttaaaaaatttctttaattctttntaactgctattcttatnnttgntctctaatttttaaaaattatataaaatttattatttaacatataaataaataattattaatttacttattaaataatttatgtaatatggtgtatatttgttatggctntaattatctaanagttagataatttattaataaaactacatactctaatttaaaataacatactatattaatatanatcaacaatattaagtaaagacagacatacaatgtagaaactattttgtatgtatantgtatagaagtgaatgacaaaatcatattaantgtctattacaacacgtatacgaatattatgaagtcattaaaagcaaaaaatggtacaacttttaagcattaaaaaaataattgaagcgtaacttactattcattatnantatgaagcngaacgactctactatgagtatcactatacactatccatttgatatatttactaccatttgtatattaaactgcgnttggaaaacanaaaaagcctatcttttaaaatcg

SEQ ID NO: 10555 - DNA, 676 bp, Glycine max
  unsure (1)..(676): unsure at all n locations
tatgtccntttgtcaccattgngtgaccttagatactcagcttgactcgatatccgatgnggncaatatatatcatcgccctcgattatagatatggactgttcacgcanattcngaccagccataacgttgactcggattcncgattgaagctcataatatatggagatggtcttaggaaaaanatgaagcccatcgcanatacaaacgaccataacntttccaccggatctncgaatangccnagtnacctatcgcgatgctcanaattatcatggaagaactcggtgaattccgacggggctatacgtttactcggatgtccaatgaggccataatatatcatctgcctcgaatgtagaaatggactgaccacgcatattcggacangccatacgntntgactcgattcctgatcgaagctcatattatatggagatcgtcttaggatagatatgaagcccatcgcanatacaacngacatacttttctactgatctcgattancgaagtactttcgcacgctcaaattatcatgagactcggtgatttcgcnggcataattnntgctcgatgccattgaggccatatatttctcgcgtcaagtgaatgactgccttgcatcngcncgctacgtgctcgatccatgagctatattatgtatgcttgaaaatag

SEQ ID NO: 10556 - DNA, 534 bp, Glycine max
  unsure (1)..(534): unsure at all n locations
ngttgagcacctatgangtgcactatgatactcagcttgttactcgcatgccatctgaactngcttactcaacaattttcccccttaccaagattacagtattaatggtttntactttgagtaatgatatgtaacaaccatactagacttttacttacttgtacgactcgattctgccaatatttctcatcttatgcactattatatgttcttgccatattntctatgttttgctangcatacatgaagtgactatgtcacatccgctcgttggatatggttactttggcaaagttgtgggaactgtgtactttggtcatctaagataatgttcaatgtatctgtgatacaattatttgctagtgtgtgtgtgataccagtttgatactgtaacaactaatagtgagatgtaaaggattctgttaggtttatttatacaatgatgtgactgtcgcccctctcatgggatttctgatgaccttaacgataagtgccggatctttagttaaatcatgatttgttttccacccctct

SEQ ID NO: 10557 - DNA, 543 bp, Glycine max
  unsure (1)..(543): unsure at all n locations
attccctttatggccctttgcgcgacctctgagtcacctgaggcatgcnngctgtagaatcaccccanntnncagtgtctatgctgacttgatccatatcttacttgatantcantggtagccataacccctagccaggggtcatcaacctcatttctccgagaatacgactcgaacgcaacgtgtgcttgcacggagaagcccgggcgttcattgacattganggcttgaacgtagggcaggctagtgagcggctgctgaattgagaaatgctgtaatctgactgcaaaatcccactgggcatttaagtgtgtaggtctagacttaggtcagtatcctatgaacacctcatgtaagaatgtaagtgatttgtctatcttacaacctgttgtatcacttaccgatgtaggaccatgttgttgtaacactgctctatgtgactcaacgcatcaatctattgcgtgtggtcgaacacacagtaacatagtaataaataagttgtgtggtcaaattacttgactattgttaagagttaatgaggaa

SEQ ID NO: 10558 - DNA, 57 bp, Glycine max
tggaggaactccccttttggttcccatggccgtttaaaaaatgagttaataaatggt

SEQ ID NO: 10559 - DNA, 125 bp, Glycine max
  unsure (1)..(125): unsure at all n locations
tcttcatctttttacaaaatcatttaaatgttactcagattgcagtgtaccttccgaacaangatatttcaatttgaataccacatttaacctgtatgtgaacatgatacctcttgtaaaacatc

SEQ ID NO: 10560 - DNA, 64 bp, Glycine max
ctgactgatatggaagtagataatatattgaattaagataccagatagaaatgggtgcgttaat

SEQ ID NO: 10561 - DNA, 716 bp, Glycine max
  unsure (1)..(716): unsure at all n locations
ntctgtccattatncctcgtagcgngacctcagagtcacctgcngcatgcanngctatntanggannattgtancatagaatcaantatatgtatgactannggtatatatagtcanacacattgtctntgggttcttggtagtagatcaactgctttggaatgtgataggtttctttgcttgtgcaagcatatcaaccacttccctcatnggtggtctctccacactattgtcctgaacacatangcatgccacaaagtatacctactnttgcttatctaagggaatgtgacatagtctctcatcaagaatcttcaccaccttgtcattgctccaatatgtntgcaacgttggccatngaacaatgtctagaacatctccacanaattcgcactggccttctccctgtattagttctagcacaccactccaaactatagacatgactnnctcctgtaagctgataaaacataacataattcanataagaacttaatccataatctgatcgacaatgttatagtacanaatgatgctactcagtcgtatcacactcacataatatgtattagcttctcattctcctataaacatacacaaaagagagttcctgctgtgaatgatgacagcttgattctgncnacttattaaattctncctcacngaattgtgtctctagaaaagactctcatctaagcgcttantctataagatag

SEQ ID NO: 10562 - DNA, 198 bp, Glycine max
ttttttcatgtggaatattcgaaaacaccaggctcgacgtccgagatccaaattcacgctaaatctgtctttgtttagctcaggagactaacacttcatatttgcccggggccattgtatgatttattgtcatactttcccttgcgctaccttttaacattgttattaaaaaaattcacgcgtgatgtatcgtattgt

SEQ ID NO: 10563 - DNA, 721 bp, Glycine max
  unsure (1)..(721): unsure at all n locations
agatgccatcgatnacctgacacgngacctnanagtnatcctgaggcatgcaccctcagaaccanatagctttgactgcatcatgtacaanatatcatcacantatgttgcttcaacagttcaacccaacanaactcatagtcacaagacacaatcataattctattagagcacataacccaganagggagagataaactcattgcattgataattaagtattacaacaacacactaatntttttctaanatgtttctaagatcannattattcnctgagaagcctcattactcacaatagaatcatgtcaaatgtccaataactgcacagaatacacctctcacgttctatagccaacaaacttccattaactttagtacaataatagaacgcagagataaanaacaatattgttataanggggctanggtataactctttccttatgagccattcttgtacanggcaggggtgcatgtaacggagaaaaaaanactcttacttgtanggtgtacagcacagtttttcaacagagatagacagattggggggagagtgaacgacganaaaattcgtactgttctcatgttttgtttgaccacgtagtggcgcatcgtcatctctgttgtgacacnacctgaatatacaataataagagagcnagtgtcttccncttcnatctattacacgaaagatggaggcaatctcgttngatctcgn

SEQ ID NO: 10564 - DNA, 621 bp, Glycine max
  unsure (1)..(621): unsure at all n locations
tgtgcacattaggactttatctagcttatatgcctctccctcngcgagatntcttcttngcgaaggcgagatgnngtgtggcagtgatatatngaccagccctccganaccttctaccgagatgtcttngccacgtngcctcgttagaactttactatcagagcccgatgatgctcggaactcatgagtaactccaacagcgagaccctcggccggagtnntgtgagctgttcgataaccttgaattcgctcttgtgaattatacggaggaactcgctggctgtctctagcgacacactcttttttccatactttttcncggaaagccttttgcggaatatctntattcgtagcgtgaggtgcttcgcatctngtccctcaccactttcttttccttgacttccggntgactgtangtcngaggncgacacacactgtactgtacacactcgtccatatattgtacttaccgacacactgcgcggggctcttctctctcctcgagngttattcatgactgggactatttgatgaaagacagttactctacggtgcggatttcaactggcttggaaatatacaggatggctgcccgctcatctgatgtctatattgtttctt

SEQ ID NO: 10565 - DNA, 144 bp, Glycine max
  unsure (1)..(144): unsure at all n locations
atgactgactgtgatcaatttatacaactacaaattggtaggagacaaaagtgtgtactctcctactgctactatatatataagtatgaaatatgtctctanacaagtatgaatatatgtcagttattaatatgttaatatata

SEQ ID NO: 10566 - DNA, 66 bp, Glycine max
gctaaccagctctgtatcagccatttcgatacgtttttaagttgcgtgattccaactcgtcatcac

SEQ ID NO: 10567 - DNA, 73 bp, Glycine max
  unsure (1)..(73): unsure at all n locations
cataataatcatctatctttcaatctttgatcaacatcatctctcaacatctntcaatcgatctttcgatatc

SEQ ID NO: 10568 - DNA, 184 bp, Glycine max
actaataccgctcacaattgacgcgcgcagttctgtgtcacttgcgcaactttaaccctcgtaatcctgtagatagtatttaaacatctatcctctgttttacaatattcagtatcatgactcaacttgacatacatgttagcttgctattcttctgaagataacttcgtgtgtgtatgtatgt

SEQ ID NO: 10569 - DNA, 208 bp, Glycine max
  unsure (1)..(208): unsure at all n locations
ttagtatttttataatgttaatattattgttctgagnttgaattaattctagtcttatattgaagggattttagacttcaattatatttaatcttttagttaagagggttttaatctatatntgatataatatttttagccttatattaaatgatgtttaatctatcttaatttaatctctttagcctatatcgaaataataatatct

SEQ ID NO: 10570 - DNA, 645 bp, Glycine max
  unsure (1)..(645): unsure at all n locations
atgtgtctgttgnggacctactagcgactgcngcatgcaagcttctgggaccacttctttgagaagctctntgnannagcttcttgagattctngagctatcttcacacacccctctcatgactaagctcacctncttgtaagcttcttaagaagaattctanagaagctagagcttagctacacacacctctcttatagctaagctcacnctcttgagatgagaagctagagcttacctacacacnccctataatagctaagctcactctcatgacannaatacatgaaataccaaanagtccctactacanagactactcagaatggcctcgagatacaggctanaaccctatactacttgantgaccanatacagggccanacgaggaaaaccctatctgatattatcaagatagcaggctctacttaccatggctcaaactacctaggctagagacctagggcttcctgattctgccatctattgagctttatcatgcctgcggtatgatgatactatgaaacctcaagtcacttctccttttctctcttcatgcccctttatttttttttttctatgactcttcagctttcagacatgtggggactcttcatgtatctaagaggccctcctttcttgtcg

SEQ ID NO: 10571 - DNA, 214 bp, Glycine max
taactcagctttagctatctttctactatacatagattttttacttactaaaatccttttaaaaaactcttatagataactcgaatcatgttattaaacatttttttgtttagttgaggaaaaactgatataataattattactcgattgttatgctagggactgtagatgttcaagcatattttttttctgagataccccaaaagtatctcta

SEQ ID NO: 10572 - DNA, 473 bp, Glycine max
  unsure (1)..(473): unsure at all n locations
catttttatatatttgcttatcgatacccaccnnnccccatttgcttagccttgaccttaggacatactacgaagtcttcaaggcagatcttttttctatttactcacttctaccacanaaattacgactacatgtcatgctatgtaaacaatatattcttcaatttataaagataacaaataatctaaatcctgctcttcttatagatataaagagggctacttcaacataattatgcactgacatattacattcaatatctactcagccaaaaactaatattgagcaagaaaccatctaactggaggtaaccaaatacaattatattttataaattttttaaagaaattatctatatacgtctggcacatatataactatccctcaatacgtaatgtgtggtaccacatatccaccaactcataatatgtgtcattctacaaattcataaagtattaataacatcaataan

SEQ ID NO: 10573 - DNA, 578 bp, Glycine max
  unsure (1)..(578): unsure at all n locations
nagatggcatcgatganccgtgcacgngtcngttaagtagaatcgacgcatgcacgctactgngctgananacctanntactctntatggatattgctgagaggatatngaagtgcaactaantgagctagatgagatccgcttagntcctatganatccanattctacaaggagaagaccaagaagttcacgatatttgatactaagaagacttctggtgacaaaagtttatatataacttngctcgactcaagtgttggatcaaataatcacaattagcttaggtcatggcccactgaaccttctacaatcctctatggtgagggggagaacctttacttacctactttttcgctactaagagtttcttttgctcttttacttatgcactgcaattatgtntttatgtctgactatgatgcacatgagcatggtgttagtggagggggggggtncctnncnancntcctcntctctctcttccttattataattcatttatactcttaacaacttttacatttacttctctatattatctatttctattcttcttcttctacatatcattcttctg

SEQ ID NO: 10574 - DNA, 219 bp, Glycine max
  unsure (1)..(219): unsure at all n locations
ttgattaggcattggaggttagatttgctgtagacacaggttgccttaactgataacatagctacttctcctattataattgtttaacttgattgcacttgcngagtacttacttctgaaaattaatgtgatctaacaatggcgtggagtggaggaatgtatgcaaacaatcataaacttttggcagttgagaatatttgtaggcgggtactactttaa

SEQ ID NO: 10575 - DNA, 509 bp, Glycine max
  unsure (1)..(509): unsure at all n locations
ngtgtcttgtncccgtccgnatcttaagcacctgagctgcagcttgcaatngtctcgcaagaagatgaatggtctaaaaagcaattaacatctgctggcaatgaaaacgngcaataaaattgagatgaggaaaaccatgctggactgcattctatacgcagttccccaaccacatgcatactaccataacaaacttcttaccacaccatttcacaagcatctaataaccaagctgcaccgcttcatacaatcactntaccaaccaacccaccaaaaggatttcacaaaacctgagattaccccattgtgctatgcaaacacatgagcatagccacangtctcactcattctcagatcactcatcacatgtctatatcagatctgacttctgacctttactcacgtaggaagctatgtcgctgtaattagagacgtggatctactgcacaacccatggattgagtggtatgctatacacgatcagttctatgaccatcacgactgtatag

SEQ ID NO: 10576 - DNA, 61 bp, Glycine max
tatctacttctccttggctaatcaacatcttatcacattttatcttgtctgagcacttaat

SEQ ID NO: 10577 - DNA, 672 bp, Glycine max
  unsure (1)..(672): unsure at all n locations
tatgtctgttgagnatcctagcagcgacctcagagtcacctgaagctgcacgctgtgatacatatcctgtgacgatgtacacatgcttacatgactggtctctacattngctgcccaagtttcatggtcttgcaagtgaagagtctcatacgcatcttatggagttccatatagtctgttccaccatgataccgcctgatgtccaggaagagcatatctctctaaaggctcttcctcattctctggagggagtggcagaagattggttgtactacctctgctccaggtccattaccagctgtgatgacactaagagggtgttctcggagaatatcttccctgcatctangaccactaccatcagaaaaagacgtcacacgcatcagacnacttatgtgagagagctcgttcagtactgggaaaattcaccatttgtgagcagctgtctcaccacagattctgagaactcctctcactattcttgagggacttcacatganacagatgatgagctcaccgtgagcttggtgtataccatgcgcgtcgatagatatagaggtccactcctacattgcgagaatgtcttagcctaagagcatagtgcacgattactctcttagatatactgaggagactgagtcgtgacctagacacttgctataatattcttct

SEQ ID NO: 10578 - DNA, 498 bp, Glycine max
  unsure (1)..(498): unsure at all n locations
ttgccatttgagccttgttgagcccgtcatctaccnnacgccaacattgatatttatccaagagacccagcctatttattggacctgaacttctattctgcttacttaacattcatatcaaactcctcaatgtttattaaacgtgaataaaatgtgatgatcatttatacgttaatgacaaatctattactagatttttttataaatgccttattaatcgttaaactaccaagaaaaaattactcatatgtgtagttattaaacatatgtttacaaaagatgaaataattatatctactaatatcatttatattatgatagtatacacgttatacataagaatgtgatagtacgatcattatctatagtcactttcaaataatatgataattcagttcatatttcatatctctgttacatttacgctcaaagggaaaatgcccttttttttctgttcagttccattcccgcacactttacgtaatatcaaatatctcg

SEQ ID NO: 10579 - DNA, 77 bp, Glycine max
cttagactcagaagcatgattgccaattaattaatagagaatttctacttcctactttgaatgcatgtgctgctgga

SEQ ID NO: 10580 - DNA, 566 bp, Glycine max
  unsure (1)..(566): unsure at all n locations
ctagtctctctcttctatatcatcctatttgagatcaannatcaaaacaccaaatcctctaattcaagtttgcaccaagttttcctgagaaaatgtctggtcgtggaaagggtggaatgggtttgtgaaatggaggtgccaanaggcacacgaaggttcttcgcgacaacattcanggcattacgaaacctgcgtatcgtangctatcgagaagagggtggcgtgaanaaggatcacgtggtttgatctactangataccagangtgttctgaagatattcttgagaacgtgatcgcgatgctngactataccgacacgctcgngaaactgtactgcatgatgtgttatctctantaacacgancgccttcttggctagaggctagagttgtttctgttgcctgtctcattctgatctanacgtacgtcattcgacatagagctgtcagtcatctgtgaaaagtgacttgatgactcatgctatattgtgtgagatactgatgccacttgtgcngattgaatatgtgaatgaagtgctgaacgataattatatgctgtctcatccg

SEQ ID NO: 10581 - DNA, 122 bp, Glycine max
gtatacttgatttggactcagtaatcaggttatttatagcgatgctcgggaaattgcctgattcaagtcatgaatcgcgtattatgccatcaatcggaagttacttgttccaacttatgtga

SEQ ID NO: 10582 - DNA, 543 bp, Glycine max
  unsure (1)..(543): unsure at all n locations
ngattctgtcagatcttaagcacctgngctgcagctntcttcttagttctctctactatnggtctgatgtgtancatgtgtgtcaactgaaccctactaccttatatagagaaacttatagataagacgaaacccttcagtcagaatagtnaattattgtcattactttgcacgggcccgtnttacaataaagtttggagatagctcatgtctaatcatgcatagtgaagatcccgccttgatntgactgtattaggcangatgctttgtctttactcttggtgacttgtgacgaacatctcttcgcttgatatctaaacagagatgcgatagcttcattgaagtcgtaatggaaggagagtgtgtctgcttcgtgctataattctgcttnttctttgagatgaccgtgtgtgactacgaagatgaactccatgtacgagaagctggagattttttaacaactctgtattaagacaatacctgtgccctagcttgatggtactgcccactcttacgataagtgtttactctaaataatgtgtt

SEQ ID NO: 10583 - DNA, 553 bp, Glycine max
  unsure (1)..(553): unsure at all n locations
attggggactagtnttgantntgntgattatngtannttctcatanntattactaanagctgggtagaatgtattatatcagactaatactagtatttaagtaacttctgcgtgcaatatttattctgtcattccanactaataactagaaccaaatattntntntattctgtgcatagcatcatttgtgagcttggtntggttcataatacgaaagttatatagttgcaatactacatgatacagggaaatcaccatattgaaagaatattgcatctangagctgaaaatacatgtcacacatgatctactactatcagtgtggggttggttacacangagctcttccngataccannttttctctagatgatgangacagcaaggcttatctgttatacgatgtgcatgtaacctcagctgatcttgcacctatagcatatgctaagagggccaanatcaatagttgcaaatcatacatatatctagctatgcttcagctctgatatatatcgtgctaaatacttgaattattaatatgttacacactcat

SEQ ID NO: 10584 - DNA, 134 bp, Glycine max
tgacttctacttcttcgagctacctttctcttactgtctacttggactaatcaacctggttgacttaaccctatgaatactgagaccatactgctcctaactttgtcttcttgcgtacatacatgcctggactc

SEQ ID NO: 10585 - DNA, 470 bp, Glycine max
ttttgccctgagacattgataacttcatctcagctgagaacggaccatcaagggacttgagcggcggtatgggccatatttttcactcacgagccctaaaccacatcctgtgccacctcatgactacgactacacgtagcatatctagttttaaaccggtcacataatctccagttccaacatcaacaacgacttccaagacagcatcacagcaacaacaagcaagcgaaacttgcaccacaacaaaatacagttttattaaaccaagacatcctcatcatcgtacgtgatgactcaattatgaagtatggctagcactttacgtggacactgaaaaagactattgctctttccacaacaccacatttgtcagcaatcgtgatattgcaaaattgtaggcgatagaaatcctatcagtgcataacaagcaaatgtaatgtaccgtataacctacaaaggtaaccacatgt

SEQ ID NO: 10586 - DNA, 589 bp, Glycine max
  unsure (1)..(589): unsure at all n locations
tgatgtctgtctcagngcctctgagtcacctgcnggcatgcagctcgattcatgctatgtancacgcacacgcatagattcctaagcacattttacaccancaagagtggacacactgggtcactttgtggacgcataaatgatgatataagatnggctagtgggcgttattcttaatatgctggatcaaatggcacatagctagtgcactcggaaagtcaaacacacgctacaatccttattcataatacaataatagtctgttgactacatctagtgacacctctgtgaagactaaagagaatgtcatgatgatattgaacatctaatcctattaaagggggaagaaagatgacgagtgtaaagtgatatataaacataattctctatatacatcatacttataagcatatcttntggtttattctaacgattgcttacaatcaaacatttaagtatatattaaaacactctcactgatacgttcaggcatgcaggcgccgcttaccctcttctaaatattaattttaaaatttacactatgtgacgctcacatcgctctgaaattatataacatataatattgaat

SEQ ID NO: 10587 - DNA, 197 bp, Glycine max
ctgatattgatcaggtagattttacacttccgtaccacgattataatattgacagggtggaggacaacaacctcagaggcaatcccacctgcattattcactgttcaccactgtggatttcaaaagcatgagcctaatatcttagctacgctagttatggttttgcaagatgtaaatgacttctttggttactcaca

SEQ ID NO: 10588 - DNA, 633 bp, Glycine max
  unsure (1)..(633): unsure at all n locations
gctggaaactactcacatggatntgatggngcctatgcanngtgaaagcctgganganagangatgcctatgnntgtgtggatgatntctccagaattacctgcgtcaactntatcagagannaatcagacacctntgaagtattcaaggagttgagtctaagacttcaaagagaacaagactgtgtcatcaacagaatcacgagtgatcatggcagagagtttganaacagcagggttactgaattctgcacatctgaaggcatcactcatgagttctctgcacccattacaccacaacagaatggcagtagtgagaggagnaacaggactntgcatgaggctgctatggtcatgctcatgccaaagaactctcctatatctctgggctgaagccatgaacacagcatgctacatcccacacagagtcacactgagagatggactccaccacactgttgatatctgcaaggaggaagctactgtcacacttcacatctntgacgtcatgtatcttttgcgatnatagcaaggaaatgatgtccacagtgtcgggatatcctggtctctcaacaccagctttagttcactccaacagacgtgtgatcatatgtgtgtgtactactcacagaag

SEQ ID NO: 10589 - DNA, 180 bp, Glycine max
  unsure (1)..(180): unsure at all n locations
gtcaacactantcatcatcactgtgaaataaggagggcctatctatttgatccccatcggagtgataatctttactgtattattactattgtactagatgagtgtgctagctttccataactatatcactatgatatctcgatacaacaactttgcactatactgaaacaaatttgtgaa

SEQ ID NO: 10590 - DNA, 636 bp, Glycine max
  unsure (1)..(636): unsure at all n locations
gctggcatgacactctttccggatcttagagcacctgggctgcagctctntggagcttcttggagctgagcttactcacacacncctctattactaagctcaccctctcgagaagcttncttgagaaactntcttgagaagcttccttgagaaaattcctagagaagctagagcttagctacacacacctctctgataactaagctggcctnctttagatgagaagctagagcttagctacacacccnctataatatctaagctcacctccatgccacaatacatcataatattaaaaaagtccctactacaaagactagtcaaaatgccctaaatacaaggctanacctatatactgaatggcaaatacaacccaaagaaaaaaacctatctatattacaagagagtgacccatcttgccatggactcatattgagattcaacatgaggccgctcagaattgcaccttgtgccatatggaggccgaactgcganatcaaggagaagctaccatcatanatcctgatggcgaatgaggagttttacatcgtagttctactctcaagcaaaagagtatcatatcgaggctcgactgcgaggaatagttcgtcaatcgaattcgacgttggaagatct

SEQ ID NO: 10591 - DNA, 281 bp, Glycine max
atctcctggtcacttgctgtgatttgttatttgctgtgggttcctgagtattctgtttagatgatgtcttgttatggctggttcatgatacttgccaaaaaagctgggatcgtggttgttgaaatagaataagaagtctgttatctctacacctgattaaattgtttgtgtcatatggtggtgagatgttgtgtcaaggcatattgtctgttgcgtactactcatgctgcacagaaagtgcatctatgtttgaggtaagcgaacatggagctccgaatcac

SEQ ID NO: 10592 - DNA, 75 bp, Glycine max
tcaatttatgattactggtaacatgaacatttgaagtatataatctttgaacatactatattatatttactcagc

SEQ ID NO: 10593 - DNA, 631 bp, Glycine max
  unsure (1)..(631): unsure at all n locations
ncgatgtcctattgtnagccagtacacgngatctntagagtcgacctgaggcatgcanngcttgcagagatggcantctactctanattntgagagatatgtaacagggtttcatanatatattcatcaggaaaacatcatagtgggaggaaatngcagtgctgtgatccagatgaatccttcacccaagcatagagatcctgggagtgtgactatgccttgttcaattggggaagtcaatgtgggaaaagctcttattgacctgcgagcctgtatcaatntgatgccactctccatgtgtagaagatangagagtaggaataatgccactcnatgacttacaatngctgaccgctcataccagacatatggagaattgagatgtgtgacagagtaaacatctatctcccggacgcttgcgtatgatatcttgagaactgcattctgaatatggaagccttctgtgacccagctgtanttattgggagagaactgactagtttagacaatatgattgatgttgtatacagccgtcaaccatgttgtcacgatgaggagtagagtgaaagactactaacaccgggcaactatcttgctaaaccctcgacgccaatatctgtcttttcttatn

SEQ ID NO: 10594 - DNA, 433 bp, Glycine max
  unsure (1)..(433): unsure at all n locations
cttctctggtataaattcgtcgtattcattatttttnnttntgttcttaggactatacgcgtcacctcatttattctaatgctacaagtcattcttaactcgtgcatagtggggaaatgtaaaacattggccactctccaagctcaaaggtagaataaaccatatacatgtctgcaacatgggctacactctgaaaaatagcctggaactctacttttctgataagcctttaaacctccacccaatggattcatgtgttgcgccaacaactgtaatacagtccgatgatgagatcactagttcctaattctttatcagagtaaattgctctttatagcaaaagttgagttagttgacaagcataccttggttcaacatttaattgccattttgaaactgtaaaatcaattcataattcattttttcgttaaag

SEQ ID NO: 10595 - DNA, 140 bp, Glycine max
ttcttctcgaacacgctcggtatgttgtgtgatttaagttattcattacgtcatatcaacctcgtcataagatgcgaattttaacttttcattacgtatatcaatatcgctcgaaagatgcgaattgtaactctgtcata

SEQ ID NO: 10596 - DNA, 469 bp, Glycine max
  unsure (1)..(469): unsure at all n locations
ttgctgtcgcggcctgtaggactgagctcagctgacaaccatgctgtactgtgtgcagataacaacaccatatctttataacgatctctgttatacacacatcatgtacttcattcacttaagggacagtatggtaggactggngttcatttcactgtcccaacttgagcttaaaagctatttgcagcactatatatgcttttcagcctggagggagatgatcctatggaccatggtgaagtttgaggagttctgtggtttctaccactaacgcttaatatttcttttacacacctaagacatgactctgtcggtaagagaacaaacgactaggaggggaaagctaaaaaccacccggaaggagagatgtttgttgttcactccatgcgatgggaacagcacaccacccattgctactacatctaacagttacatgcctcgccaacatttgactctctttttaaacaag

SEQ ID NO: 10597 - DNA, 187 bp, Glycine max
ttttttaagtatacagctatctttttttcaggatgacagcagcctcccgtgatgtataacttttgacgactctttcggtgtgttaactctaatatagacttgacttattctggagcatttataaaggctaatgatatgatgactgccatatcgtctatctgtttactgtgtgaatctccttcaggct

SEQ ID NO: 10598 - DNA, 414 bp, Glycine max
  unsure (1)..(414): unsure at all n locations
ttccttgccatagacttaccacgattttaaggactctcaaggcactttcctattaactcctctccatgcttgtgaacacctgtggtttattgtttaaccttatgcactttcaactctactaatccctctttgataaaaatgtcatggagggatgagctaacggtagggatgacctaacacctcaaagggactctggtggttataaccccctgtgttgcanatctcatgagaaatctcttcaaactaggtgcttaaaatctaaggtgtagacattctcttgtgcctattgtcatgtaaaaattatctctactagttcaaggcagatacttgttgcatgctgcactgattactctaaaattgaatggacttcctggatgtaatgcttgtacccccccaaatctccttgttaagcag

SEQ ID NO: 10599 - DNA, 656 bp, Glycine max
  unsure (1)..(656): unsure at all n locations
ggtggcattgtgactcgtccgcgatcttaagcactgggctgcagctgatatagataggcantntanaagatatataaacanatccatataatgtattcatttattggtntaacaagtccaacaagcttgatccntttcagaaaattngtntggtcctttctatgaagcacggacacaccagcctcgtgtccggtgtccgacacgcgtncgtgtcagtgtccgacaccgacacaaacacccgactacattctatattntggacattacanggtgtccatgtgtctgtgtcgtgtccagtgtccgtgtcggggcttcatanagtnncttttataagaacattttctaatctctagaataaataattattgtttcttagtatactaaggtcatctctctccaacatctaaacattaatcaanagtatgtaggtgcacaaaagggatattntgcacngatctacaagtaatgcactgataactaaatactaatggantactacatgtatactggacataatggtatagacatacacaactatttagaacactcattacacaatacccattacacgccatcaacaaataacaccaccatacactgccatactatatatcatgaataatcaatcatctactgaaaactttgtaatgactatt

SEQ ID NO: 10600 - DNA, 570 bp, Glycine max
  unsure (1)..(570): unsure at all n locations
agatgccctttagtncctngngccgcgacctcagagtcacctgcggatgcagcttcactcatacattcatcactcngatttttttgtatatcttttataataaataatttaatgttaatgtgatccataatatatgagtgatctaaatgggtaacataaatgatttatatatactagtattttattgcaacctatctgctatatgaaagacaaaaanatgtccataccaataaatttattatttctataatttctatactttctatttaaaatagaatctattatgatatagattctttttcttacctttctagtatacgtaaagataaagaaaaaaatgaacgtcatgtctatgatngacaagctctaacctatgatagtcaatctatggagcaatcgtgcttattgcttaatcaattatcatgaaattgatcatgctatgtcatgacataaatgcacaanattatgtgactgncaagatatatatttgtctgctatgctggcaaacatgtcatgatatgatcaatcaaggtaccgtttctaacgcaagttaatgactgcaccctccag

SEQ ID NO: 10601 - DNA, 87 bp, Glycine max
  unsure (1)..(87): unsure at all n locations
ctgcactctgtcggttgggctgtataacacaatcttatatatatatangaaggtgttctcggcagatccggtacactattatactgc

SEQ ID NO: 10602 - DNA, 433 bp, Glycine max
  unsure (1)..(433): unsure at all n locations
atattaccctgttgncncntttggcaccattagtaccttgaactagcttcacaattatataccataccaaataatctatgcctactggaataaaactaggtgggtacgaatgggcacaagtactcacgcacagtaccacattggctccaaaagtgacctagtgccatggccttatacactgactaactactaacctttagtgataacaaactatttggagcacttcagatggcctattaacaacaaccttaatgaaaaggggcatatctctcttgccatacacacactgactttctaactgctgataaaatgacactgtgaactctgctctgttacctatagctcagctaggactgctgctactgctaattgacatatcttctacatcaagtagaagagatttcgctcataactcattacttttctcccagtn

SEQ ID NO: 10603 - DNA, 546 bp, Glycine max
  unsure (1)..(546): unsure at all n locations
tgtactgtcaggatcttagcacctgngctgcagcttgtgaggctntagaactgatctaccacatgcccgtcaaggtattatactacacactactcanattcanattgatagcagtgatagatagtatgggtgtttttttctcatacccatcaatattctaactatctactggatgagaaaangagtanggaccatctttaattcactaacattggcactgactaagttcatctaagctacacatggactgaggttcatacaatngataggttggaatttacactgctacaaggactctaagtagagacaattgtgctgaatgtctaacctatataaaaataggactacagagttattgtgatgcatgcctaaatataacatgaactggtaattgacttcaccaatacaacagattaacttatttggtctaaagaactaacatgtgactaacaaatgcacacaacttgctaaaaataatatatggtgtcgttcttctttgagacagatttctgattacacagcttgaactatttgatttgtacatct

SEQ ID NO: 10604 - DNA, 461 bp, Glycine max
  unsure (1)..(461): unsure at all n locations
tcccatgnccctttacacttaggacttatctactaggcctggcgattnttatattcacctatattcggacctttttcatattaacgcaagatcaaaaaaattatgcccatttatgacaccacttgaattgagacaaatgaaanatctacatttgaccctgcacaagctaagtccctgtctgattttttanatatgctacacatactatattatacacattttttgaattaatgtaagatccaaaaaattatgaatcagttcaacacccttaaatagaggaaaactatattgacttgacaactaatgcatgctgattttaatatgcaccatactatatgtccttttcanttaacgaaatcataattatgcacattagcactcttatgaacattaaatttatgcctgccactatcctgttgtttaatttcacctctatctgccattcgataacgaatcaaatt

SEQ ID NO: 10605 - DNA, 666 bp, Glycine max
  unsure (1)..(666): unsure at all n locations
ggtgccatgatgcccgtcgcggatctctgagcaccgcngctgctgcttatgtgatctatctagatacaatgntgatcttgattgtatctctatcagctgcaacctgagactctngcatcacactcgttntccatcattctacgaactctcgtcacatcactccaatgtctatgggaagcatatatgctagacatgactgcatagtatacattctactctggctctatggtgaagagctgctctgctgcccatnntaccactcctatacttgcacggagattgcgagatgcaacagactgctcctgacgtatntgattcagcgtccgattgcattgacctccacaatgcaaaagcctcatctattagactgtatggtccatgagggtcaacatggcacgtgtagtgacatgagtccgaacantctctcacacttggattatgtatagcgtaagaccgtatcccaggcactcgagacagcgagagacaccagaccgantccgtccgatcatcccatatagcattctcaacacccgttgctcttgccaactcgaatcatcactcttcatgacccatcacatacaagttctatcatctaccattcatgcctctatgtacatcttgttccactatcgaactggactataacttgtatgtgttgacncagct

SEQ ID NO: 10606 - DNA, 227 bp, Glycine max
ttaaaggcaacgaaacttggttcctggtatactgtgccctaattccgggcccctcccgaaaactctccagatattgctatgccccaacacacggctgttttataatacgtccaaactcttattttctaaacaacccccccctcttttttgtgattcacctaccactttgttataattctactttgatgttgagttcgccttttttcaaattttttaaacctcatttt

SEQ ID NO: 10607 - DNA, 110 bp, Glycine max
  unsure (1)..(110): unsure at all n locations
cctgactatctcaccaacttgcctgctgacgagtcgagtccacaccngagttgtcctttaggacactcatgtctttgttgtcaaacttcctctttgtcgccttaccgtcc

SEQ ID NO: 10608 - DNA, 53 bp, Glycine max
  unsure (1)..(53): unsure at all n locations
acatacttctaccangagtatatatatatatatatatatatatataanntatt

SEQ ID NO: 10609 - DNA, 607 bp, Glycine max
  unsure (1)..(607): unsure at all n locations
ntgatgactngtgacgngctctttagagtcgacctgcnggcntgcannngctatatannggctgggatctntgngcttcantganggtccncttcantggtnatttttcaaccatggtatgatgcagcanaangatanataagaagaaggtgagagggaggctgctatccattatnggaataagccatggaangggagaagcttcaccacccaagagaaatgctcttgtatanaaagctaagagaggaagctntatntgatgacaagaatgagaggaggggtgatgggacaatatggattgagaaaaganggagagaggttgactttgagtgtgtctacacgttcacatcataaagtatacaatgtacacatctttattataccaggcactaaccaagaagcttcttggagctgagttactaccacccatctatactaactacctctgtaaatcttaaataactactccaccctctaactagtccactgcaaactgtattactcccccttatactactccctccatctaatctaactctcacgttatctgacagtaacttctctatcaatcacaagagactttttacaagagacctgttgctaaact

SEQ ID NO: 10610 - DNA, 566 bp, Glycine max
  unsure (1)..(566): unsure at all n locations
tgtgtcctttgtcacctctcgcgngatctctgagtcacctgcggcatgcaagctggatgtgaganagcgtggaagagtcagtcttnctcttttttgttgtgccacagagtgggacctggagatatgtcgcggtggtcaggagaccttgggacgtcagtgggtgctattgcccaaacgaagcttgaccaatccacccaacccgtcataatagtcagtggaacctggacgaactaaacatgcactctgggtcaccataaaaacaagtcacaagcaggagcttggtggggtggcactatgatctggtggatataaatacctctgaatcataccttctggaatcatcaggctataagaacagaagaaaggcttgtatcatacaatgggtatcgataccaagtgccgcactgtatcatacaatgggaatatactgctctgcctgaacatacatatggaacatccaggattgaattctgcaaacttgatctgttggctgatcatctcttgatcttcagagaacatgaaacttgcatttcggttgacatgttgtctggtgactggtaaatacg

SEQ ID NO: 10611 - DNA, 260 bp, Glycine max
cgcctaaatgataactgttcgctgctaaatattgcttttgcaccataatggcaactcctctgtaagacccaaaaatggctaacttctaacctttgtatctcacttttttaaaatctgtcctataagtaactgagaatagtactcccacgtatagggcaattgtctctgaacaaataagaaatcagctctgatcaagcttgactcaaggtataaaaacttattaaaatctcatataactcacgagtgtaaatccgattcta

SEQ ID NO: 10612 - DNA, 497 bp, Glycine max
  unsure (1)..(497): unsure at all n locations
tatgtcctttatcaccatgagtaacttgaactaagctatagtgcgtctggaacaagcaaggtcgcaatggatatatgtcattcttngattgccgacatcctctgatttcactggaaatggcagtggangaacgcccgcattaccaacagcatatgtaaccttacngtttaaagctctatagtggctagcttaaagttcatttgtaaagcttgngctnnttgtttaattataaacaagatcttcttatctgtcctgtctctaccattctatcattgatgttactctttttgaacgcaatcatacagtcccgggtctatactggaccgtataattcacagattgacaacgagataagcatgagagggactctcgacataaaatggcgcatagacagatgggctatcaaaacaactttactagatgctgaaagagaaaatgcgcgtcccttccaaataacctgtaatcaaattgctgtcaattcgtattactgaccatgt

SEQ ID NO: 10613 - DNA, 498 bp, Glycine max
  unsure (1)..(498): unsure at all n locations
acgtggcanatgaagcccttacacgcgacntctgagtcaccgcggctgcagctgtgatgactgacttatgttagaacacatatgaaanaaatttcntgacanagtcatgtaaanataaagtcggattacattgaacttccatttntctaacaganatataaatgacttatttaaaatcaatgagtttaggaaagangaagtttttagttgataatagaagaatggttattataaaaatgttacgaataataatttgtctataataaaaagattttatcttgataggaaaaagtcttttaatataataaatattagtatatgacgaattcacttaatagctataccaatatttacaagtctcgttcttcttaatattctttcgtgccacttgtttccctctaaccgcataacttacaatatacgtgctcgaattgccgtaatttttactccgtggtgatagtgaaaaagctcctctttctccaatactgattacgctta

SEQ ID NO: 10614 - DNA, 525 bp, Glycine max
  unsure (1)..(525): unsure at all n locations
tgtgtgccatgtgagcactattatgtgcactatagaatactcagctcatgatgatgaacacagaaatntcgatgatgccaanagtccaagtgattgattcaagacttctagatcatgatccaagaatcaatccagattcagatttgaaagaatagaacacagcagacttttggataagataagaatttaaaacaatagccatttgtttacaaagatgtctcaattttaataccaaggatactttgtatcatacattattatatcatacaggacagttggttcaaagttcaatattatacgtccaatgattcaatatgatcatacacttatagtatcatacagtgattgacgtggatcaatcaatggagagctacttcataacacatggatcataccctgtgtatcgatcatgacacttaaaaaatanagttactttactgatttaaagctacctcatgttttgcaactgaagcataactactggccgtcaagggggaattcaaattttcaatttacatgctgttt

SEQ ID NO: 10615 - DNA, 625 bp, Glycine max
  unsure (1)..(625): unsure at all n locations
cgatgccccntattgattagctgtttgcacgngacccccagagncatccggagggcatgcacgctagtgcagagtgaacggatccactctctctgttcatatatctnattttnttgccagngcttataattnntctggctccgccactggttagaagggcctgagtgtnggtgaaaacttggntgcacaactngcattcttttgtgtctggngctgtatannagttaaagaattgcgcattgttataaaaggtgtggccatggtggtggtgcacanagaaatnggaaaggaatttangaacanttatggtcacaaaaggtgtgatgcannactatgtctagctctgaaacacttatnngatactcatatcaatcatatgtngtgtgtgtaggagagggagggggtnattactctacttatcctcaattactcatcttttgtataaactaatagttccccttcactgatcctctcttaatcctatcgacaactattagtaaactgtatcgtagttctaccactctcttacagattttaacaaatgactcttctcttaatctaatactctttcatcgtatatactctaaacctcctacttctactggtctgtagatctcatatcttc

SEQ ID NO: 10616 - DNA, 583 bp, Glycine max
  unsure (1)..(583): unsure at all n locations
ntgtgtcccctttgtcaccattatgtacactctgantctcagcttatgttccatctcacacgtagtgacacgacttgccatanaccatnttatatggcgatattcctatcggagtcttatatgcagctctatatgcccataaagcatcatccagtttgagtgaccaatccttcctagtagaggccatagtcttttctaaaatcttcttcaattccctatttgacacttccgcttatccattggtctaaaggtgataaggagatgctaccttgtgtgtacattatattgcttaacaccttctgaactgatatcgaganatggtgcctcatcactattacattctggaccccaatcggatagagttttttataactcatatgttggcatatatgtgggacccgctcaccattaacctagctgactcttataatttttcaagagaagaatggtcaaacatcctagagtaaactccctcataattttacgttctctatggagtccgcttactgtaatcaaacaagatggtntatattgcaagactattaacttatggtttttcctatgcacacggattacacttatt

SEQ ID NO: 10617 - DNA, 198 bp, Glycine max
ttcctaccttcccttcaaatgcactagggctatagagtatatatatcaactgaattttttttttatctcttcactggtagaacttatacatgctccttcaattttcgcatttaatggtaagaagccctctgccctaaaaaacgcaaattaatgagtttaaaacattagtttacgcatattcacgtcaaggcgggtact

SEQ ID NO: 10618 - DNA, 176 bp, Glycine max
  unsure (1)..(176): unsure at all n locations
atattatggatttgacaattactatctcctatttgatggtatgtntgaacaaatattaagtatgttattcgactatatgggtttatagataantatatatgatggtgcttctgatctgcttatggttggtgtagttctataatgtgatggtgtagttattgatttaaatgtaccct

SEQ ID NO: 10619 - DNA, 558 bp, Glycine max
  unsure (1)..(558): unsure at all n locations
tgacctttgggccnnagtgaccaccatgagtgactatgatctcagctctccttaatgggganggaggagacantatgtcacctcttgtgctaaaatcactaagtagtgaaaaatatttcgtgagaaatcaaactgagcgcttcgtacgcttcgnacgttccgtggtgatntgcgatgatttcgtcgtcttcggcttcacacggtagtccgaaatggactttcaatcattcatataccttagtggcctcatnntgttgcggctttattttattcatttactntcgtacccctnttgcgagttaataattattaagcatttctcgctaataaaataaataatttcaccgatcatcgtattgtacatctttaattctgtaaatgaaatcgacgtcggcatgcataccatgctataccaaagaggcaataataatatataaaaatattttgtaatataanaatcatggcgttttttgaatttcttctatcatgctatacaaggaataggtaatcatctatcaacttgctcctanaacatttaggcacgctaatgctttattg

SEQ ID NO: 10620 - DNA, 331 bp, Glycine max
ttctccttgatatgcatcctgctgattcaaacattttgggattaagtccactaatattttaatgctcaatcagtatttttgcaactatatcgaaaaaactaacatagaaagtattaaaatataaatatgtcctcatcattacataaattatataagataaaaataacggaaaaataaactaatctcatattttaaactaataaaccaaaagcaaataaactatatattttttaaaatatcaatgaggtatggaattttatgcgaaaaaaatattcattatactaaaacaatggagtaagaaatttaaatatactaactacaagttaatatt

SEQ ID NO: 10621 - DNA, 278 bp, Glycine max
tctgtatgacctgtgacaaataatataatttcgacgatttgataagcaacatgtgaacatgtaatgaaggatttgcaattatttatattaccatgagagcttcttttagagaagaagtactctgatactgtctactgtgaatatattattactaatattagcagatattactattagatgctttcagagttaatattcagtggtgagaagctgacacagcttaccgcacttatcacttgctcaagcgattgaaataattgatgacaatatatatgatg

SEQ ID NO: 10622 - DNA, 653 bp, Glycine max
  unsure (1)..(653): unsure at all n locations
tgatgacccgtatgatgtcctngttcgagatccctagagtcgacctgcggcatgcaagctcggacaatanggtgatgcatctanganacacaacaactaacaagtatgatattttgtaatatatatngggttntaagggtntacacancgaatggataanaataaattagttgtgttttacacatgcanggttgaagttgcacatcgtgccttanagagactactaccgaataccttgatacctatgtagtgtgtgagaagccatgaacaatatgatcactctacaacatattgtaataaggcatcgntngagaacactacacatgtggttgggcatgtntnntaagtaccttatacaagaaactatttggcatggtatcaatgtatgtgtaaaccagatcgttgtgagtttagcatgtaaatatgctagcatgatagtctcatatagaatatatgagactactccgtctcatgtgcctgactactgaatgtctgtacatacactaccaacctatgttgtcgagtaatttcgacatgttgttgaccactccatacangaatgatcattcacgattaacttttgaagattaaagaactggatgctcctataactattgctttaaagtaacaaggtcacaaaataacaccatacg

SEQ ID NO: 10623 - DNA, 600 bp, Glycine max
  unsure (1)..(600): unsure at all n locations
tatgcagcangttgtgnactnttantactcangctatccctatggctngcctncggacttcacncnncgtgccaccncgggaagattaagccaagtccctacattcgagggggcaactccaccttatgacgactatcccgggcaagacgatgaggaaggagatacccatcttggcctcctgctccacctcaatgatccgtccccccatgaactaccccaaacgaacataatccgccatatctcggcctcacccacaccccgtaaagaatctggtcccttcgcggaagataagggaaagattgaggcgctngaagagaggctaaaagcagtcagggccttggnttacccttctagattaacaattatgtctcgtgccacatcgcatcctctagtcaagtccgacttgcaatcaaggatgactgcaaaggctctcatgttgcaagatgggcgttccgacaaagtgtgtcattttcagacagtgcaacacagactgttacatctgagctcaatcatctgaggctgcatgctctagcatcatcatcgcatgtcgtcgacactcggtgatacaactagtcttgattgcaatgagatcgcatcgct

SEQ ID NO: 10624 - DNA, 544 bp, Glycine max
  unsure (1)..(544): unsure at all n locations
agagtcgtgaggcatatagcgacctgngctgagctctatcaggctatcttgtggtaagctcttctccatggctattcctatggatgcgcctctctacctatntactttgcttcgctgcattcatggggaaataccataaaggacncattgagctanagatcagcctcatagagctcacagcagcttcataggatgcttatgagtcccgaatatatcagacgctganattgatgttgacctctgagcatttccacgacaatagcgttactccgtgcggatgagtccgtctatccagacgctcgaagtgatgttgactcttcgcatcaaacgacatactttaatcgtggtgagggccgcaataatggacctgatttgatgtaccttaccgacgacaatacgttatggtgctgtgatcgaatacaactcgatgagtgacttggcatcacgattctttctcgtgtgtggccggattggactgaagatgaactgactcaacatacttactggtgtgtccattacgactagtagtatctgcatacactct

SEQ ID NO: 10625 - DNA, 571 bp, Glycine max
  unsure (1)..(571): unsure at all n locations
ctntatganaagagctctgataccatgtgatatgcatanatgctcatanaggagagagagaagatgancgctgttacaatcactcaatgtctncgctacctcaccctgcctcgacctcaactagtacttctcgccgctacattactttattntcatgagaatatatgtgagtaatttatttctaacctcacccgacattntatntnntacttttatttcatttattattttaanantntaaanatatntctaggaatggtaaaagtaatcaaattattttatatatgtcaaagataatattctcggctgtatattgtggagatatgattcttgaatgtagaatatttgtgaacaatattcctgaaaatngagtntttgtgctaatagtagagaactcttgtgatggnggatatgtgaatgancaacgtgtatatgatcaattagtgcatatatggtcttgtatcataaaatganatacattgaatgacgttgtgtcgtgtagangaagatatacttatttattttagatacggcggttaatttgttgcaanaattcacattatactctctn

SEQ ID NO: 10626 - DNA, 298 bp, Glycine max
  unsure (1)..(298): unsure at all n locations
tcttactcggcgcnttatctattgttttcatncatcaaaatgacatacaaaattaccttaataaatcagtgtattatttaaaggtagaaaataagaggatattattattaacatgtatattgtcttgaagagttcagatattatattctatcgcattccaattaataacaagtggttacataaagttgattatatgcaaatatatatattatactataacttaaatcattatctgctgcaaacataaaatagaaatgcgccatttataattatctcttaaatcgagcaatttttttta

SEQ ID NO: 10627 - DNA, 221 bp, Glycine max
  unsure (1)..(221): unsure at all n locations
aattttcatgttgtgcaggatgttattcacaaattcatagatgctactgatgatatgatgctttggattatctatgaattctacatgccangaatgactaataatctctgcttcttaatactcttgtgtgacagggagtgtcatgataatcaggattaacattttacgctctaccataacttacagattcaatagaccttcctggacactggttgctgact

SEQ ID NO: 10628 - DNA, 151 bp, Glycine max
taaatgatatgatatatgtaaacaactacaaaacaaatattggcactcccaccatcaagcctgacactgacctactttgcctatgtcaaaagcaaagttgtatactaggaaacatcatcctaatattattcgataacatcctcatatcata

SEQ ID NO: 10629 - DNA, 171 bp, Glycine max
ttttttttttggtatggggtcttatgggtaggatcgaatttatcccatcttttagactcaaaacctcaaaataaggtggaattagttaagaaccaaaaggggtgaaaaatagtctgttcaagcctttaacaactaatctgcgttcaacgaggctatggatccctaattcgc

SEQ ID NO: 10630 - DNA, 85 bp, Glycine max
catggacacaccatgtattaaacttcgtttgatagatcgagaatttatgcagtatgacactctcttgcatatattccatatgctt

SEQ ID NO: 10631 - DNA, 147 bp, Glycine max
ggctacccttctagcaggggggatgccatgaagtttactgactctaactggggatacactggatcactaagagccgccacgacatgctgcccctttgaaatgagagtcacatataactgattaccgttcagagtttagcttcagaag

SEQ ID NO: 10632 - DNA, 605 bp, Glycine max
  unsure (1)..(605): unsure at all n locations
atgatgtccgtcgcggacntctgagtcacctgcggcatgcagctgtgcgcgtatgggacactacanactggctcttcatcagaagatgtgttagagggatcacatttattggcnnntacctntgangaaatggtcatagaaacccatcaatctcaagaaaccncatagagcttaatgggactatgagcatgccactggtggatcgctgggacttggcttgaaccattcacccatgtcagagcaagatgtttangtattaacctaacgttgacanaggaacatggacaattaatgaagaattgcttcaataacactgtatgcttntccaatggacaatgctctccatgtttctataagcagattgcggctcctcactctcatcttctannattgatgtcgctgtgaggtcagttcaagaaaacgacgcactactcgcagcattatcatgtggactacatgatcttgctatcgatgaactgaaggccatgatgcagacatctctctgacaaacagaaagaagactgctggtatatcattgacagctactatatttctctctagtgcacgtagacacattgtaattgataaatgccattgttatgggg

SEQ ID NO: 10633 - DNA, 511 bp, Glycine max
  unsure (1)..(511): unsure at all n locations
tgtgcattatacctttgacggaccttaagcacctgggctgcagctgatatatgaactataactagtatgcagattactatctactcagttctcgncaggactgcacatacacactatcatttgctcaaaatatctctgtgttttacattcttanacgaacatcttctggtgtatatgacctcgagtttgatccatgaagacccactagtgtattatacttgcctgactagtgtctggcaaagaaggngaccaacctttgagatgttcaaaagacgttgcgagcctgtctaaggacttacgcttgagaaatacgctagaaaggatacatgcatcaacatattttcttcttggccaaccagtttacagatggagtcttctgtatattcatctatgatggactgtcatgtttgatgagcagtgttacctgtnttaactgagagacatacgcatacagactctacgcatgctttgatttttgtgtctaagaatacgactactggataactaattc

SEQ ID NO: 10634 - DNA, 490 bp, Glycine max
  unsure (1)..(490): unsure at all n locations
ttgcaccatttacctctatctagcttaagtatttatattgatcctgtggattataataagttttcttgatatttgcttatactantagcacttattattatttaataaattaatttataatcggctcgacaatagggagctggtctgctttaacgagtatatttaaggttctgtttacactgggaataatattagtaccaactcatgtcgatttctgctaaattgttaactatatatctgattcaacaaatatcaganaaataccacctaatgctacacaaatgctattacttaaaagtgtggtcagcctacagtggctgcatttcatgcacgaattctcctgtcgtagacgagaagtaaacactgtgactgtctacattcactaaccatttcatcattacttctttttatatctatgngccaaagtgcgtcatttactgtgaatcaaatggttgatcttatctcaataagctgattcctatatcgccac

SEQ ID NO: 10635 - DNA, 657 bp, Glycine max
  unsure (1)..(657): unsure at all n locations
tgattccattaatacccgtcacgngacctcagagtcacctgcngctagcaagctngcacttgggangganngatattgcgctatgatcactnntctactattttgtctnntcccaactgtccagacggacaatntaagactatatacaatgactaatgcacactgtccgcaagagtacatgcattcagtctcaaacggaaatctaatggtcactcaccatgaacaacaatngtttatgtagcacataacagtgatcacatacaacaacatacagaaggtcatattcactctcagacatatatatacatcagcagctgtttatgaactacattcaatgctgngcttaagggtgctatgcttattattgagntgagatatgtgtggagtatgtatatgaggatgtgagagtgttatatcaccatgagctcaccttgngcttgaaatttgatagtcatagacacacattggcatggaatgtgtcgtgaaatcatccacacctgtgtgtcctattgttcaggctgcgcagaantgatgtaaacgcgacgatcacttncatcctacacacaacatatcgctttctaactctctcctcttacttactcgtatataacactatcgagttaaccgtgtatacagatggtattactacgtgccctt

SEQ ID NO: 10636 - DNA, 495 bp, Glycine max
  unsure (1)..(495): unsure at all n locations
ttcgcctgaccgtgacgactctctattgttatgaggagggagagaaggtcacactaggtcttcctctttttattactgggaaataagtcgngagaaaatcaaccgaggnctttcgtacatttcgaatggttcggagtattacgcgaagatctcgatcttcttaagaatatcggcgtcttcgttcttcagtctcaacggaagacctaaccagctttaattatttatgacccgggggcccattgttctatatttatttcgttcatcctttatccccttgcggctagcttattagcatttcgtaactaaaaaataattcacgacgttgatgatatcgtaattggtaaatgatccgacgtcggcggcatacccagtgaatcaaaagagtnatatattatataaaaatctttgtaagagcgaataacgcgtttcttggattatctatgatgcatactaggactagtaacaccctacactgcccaatgttgagatctattt

SEQ ID NO: 10637 - DNA, 714 bp, Glycine max
  unsure (1)..(714): unsure at all n locations
agatgtcgttatgccnttgccgngatcttagagcaccgcngctgcaagcttgacatatactagtccttatataactggcgttgtgcttggcggcctctctcaacanagtactttcacacctactgtacgttgattgaccatgctgtatgggaatgttgcacaatccttcanaaccatatcgatacatnttgagagggtggntgtcatgtggccatatcgacatccttctctatcataagccatcgtccatttntcctttgaaatgcgatcaatccatgtngctgtggctggacttagatgacgaaattcttctatattatggtataaaatgtgctcgcgatgagtgtaggctgcactaaatgatgtatgaataacaactttaagtatattatatatatacgctaccatcnaatatgagatctcactcatcttcttcaacattctcttttagnctggcataattgaatatccgatagaatatgctcgctatgtgcacacgcagcagacatgataaccgagcggatgtngccaccatatgctctgtagcacaacaacttatacttgctgctatacatatatacagatacatattatctgggacggtcatcgagtgtgccataacctaacaacttgatatcctactctacaccgtgatgtgatgaggacacactcatcatttngagtgcgatacgagctcacggtatgccgcatcta

SEQ ID NO: 10638 - DNA, 247 bp, Glycine max
ttctaggcgccactactgttgttgtaaaccggagtgatcttagcagaacatctccatacctttgtcatgctatacctccttgttctttcgcgcactgcaatctcatattgtatggcaatgtaacttctgatgcataacacagctgtctgtcaggtacaaccttgattgcaccatattcttagaatgctcccggacgctttctctcgactactatgtgacccatgtctgatcttgcaatctctgggct

SEQ ID NO: 10639 - DNA, 540 bp, Glycine max
  unsure (1)..(540): unsure at all n locations
agattctgtgatggccgtctcgagatctctaagcaccgcggctgcagctaagtatattatagacggaaatatangctaagtataatcatgtacgtgaagtgcnagcaggttattgaagcggcacgaagtaagagtattgatagcaatctttcctacggacgattgtgaacatgtttgaatatgatagtatgtttcatgtgtggtaggaggttgttagtggtcagaggctcaacttcatgtgtggggaatactgtcgatatgtgaactagtctgatcaagtcggaaatggaactagtctgatatagacagagttcaagcatgctatgaacggcacataggataagttgttgtgatacgctgtgaagtaaagatggaattaaacaattgagatnactaggaatataacgtgtattatctaacctgacacaaaccttaatactgtcatgatccaagctactgtgtttatcctcatatggctttttatctaaaaataaacctacgtgcctcacgtaaagatgctttaacatataaacgtgaggt

SEQ ID NO: 10640 - DNA, 634 bp, Glycine max
  unsure (1)..(634): unsure at all n locations
tatgtcnntnttgtacgcttgtcgcgatctctgagtcacctgcggcatgcaagctnngtgtatctgcantnntctctnttgnaggatcaatgcatgtctngaagtttgagtntgtggannaataattcatgacntagcctgatgtggtgaatctccttatttcattcatcatannattgagttgctgtctggtttacacatattngngcttaacatgtacttgtntctctccagagaatactcatgtattctacgtngtatgttatacagcctgtcttgcattccttnngataattgtctgcttggttttgcanggatgataaccatngcaaaaaatcttcaactcatattcttgtctgaagtgtgaggaggctgcgtatcttcatattgctcatggtganttcagaaaatcactttcattcatgacatgtcctctgacagtcttgtgtgactgttttgatatataaaaaatgaaacataacaaaatgctacatatgctatgcatctaacaatatggtgatcctaagagattgtgcatctagatcttctgattatctggcagagaaggcgcttttgctactgatttttttatgtgtctgaccccaatatgaagatgtctgactcatgcactgat

SEQ ID NO: 10641 - DNA, 614 bp, Glycine max
  unsure (1)..(614): unsure at all n locations
ttgcagcattagaactttatctaagctcactatattatntatgtgtgtgacactaattgtaataacgttaatatctanatttcattatgtatntatgagtatagacannaaggaagcactgagtgtggctattacgtgatgctctggatgtnncactatatcttatgaactttcaggaatatttgnngaaacgatattgttatttcacacannattgattnngtatgaatttgtttattttatcatgcaatantntaatgatgttagaccattggaagcagagagattgaggtgcttcgcatcantggacacagtattatcttcaaagtagaaatcanacttnangatgtannggaacnnttgtattntagttacctaattagttactagcttcttacattnttacaatgatgttctttttacatgaantatcttatgaagtattaataatattattgaagtatcaatgatnttacaatgatagtactactgttctgtaaactattaagcaatcaatgatttgtggtggtggtgattgaatccgtattttgtatgaaacaacggttaaaatcatacctcgttttaaaaacagtataacacaacgtttcaatatt

SEQ ID NO: 10642 - DNA, 637 bp, Glycine max
  unsure (1)..(637): unsure at all n locations
ntgatgttgttgagnacanttagagcgactgcangcatgcagctgatgattacatctcccctntctaagccannnctcttgtatcatataantctcattattacaccnaccggnttccttanggtttgcatactctgtanagaatctgcaatatgacatagtncatccangaatcaatccacccatgtgtatatattaacacttaccatatnagattcataacatactaatgagatttgattacctctcttctcagccatttctggaacccaggggcagtcttcttcatgtgtccctcttcttgcaaaaaacacttagcacctcttaatatcactgagatggatgtaccattcccttctattagcatgagactcaatgcgttgtcttccatagcaagagtcagtatgactctcaccatctcataacagccttcttcttctgacaacatggtcatattcatgaagacattatcttatggtgtgatgaatctaacggcatatatgtgaggtgtcaaatgaatcttagacgctaacattcacttattctattgactgatatccactcatgagctaccacgctccctggacgcaagaaactctgaaggctcaagtattaggaaatgctaagctacatctct

SEQ ID NO: 10643 - DNA, 264 bp, Glycine max
  unsure (1)..(264): unsure at all n locations
tcaccatacttgcgttaaaaantacacccgctctgtactcatcgtggatgctgaattcatacacatctctcacatgatctctcacaacagatgatatcattattctgcgtatctcacttgctcctgtgttatattgcctgtgagacggagcataattgctctctgctcttaagcaactagtgatcatcacgaatgttatntaaatatatctatcctttagaatgcgattcgtcgcacccttctagttgttgaaagtgatagatg

SEQ ID NO: 10644 - DNA, 585 bp, Glycine max
  unsure (1)..(585): unsure at all n locations
agatactgtgacgaccttaagcaccgcngctgcagctatataatcatcgctcaaataacatcgaaactctcaaaaattatatggccgttacttttacacggatgtccgantccggcgcataatatgtcgagatgctcgaaaatgacaacagaagctcatgacatactcacatggtcataactcttcacacggatgtncgattcaggtanatacacatcagacgctcaaatagacaacggaactcttggagattcnatggcatacattgactcgatgtcaattangccatacataagtgcactcatattaacacggagctctctggaataaatggcatactttccactgcgtccactatgctatatattcatcgctgaattacatcgagcctcacaatcagtgcatactttaaccgtgtcattggccataatgcagagccgaatgacccgacgttgaacataatgcatacttccatgagccttagcgatcaataactcgatgaacgaccttggatgatgtcaattaccatgtattagcctcataggactgatgacacagctttattaagatatctaagtgtctctt

SEQ ID NO: 10645 - DNA, 401 bp, Glycine max
  unsure (1)..(401): unsure at all n locations
tattccttgtcccttagtaacttatctcgctgcaacacatgcatcacagcgctaaagaggtaacttaaatgtcatctcaagatgatggaacttgactgacacactngctgactacattgcatcacacttatcattctagtaaccatataccatcatgtgctgaggtgtagactaagcgctgcagctgttcagaacaaatcctctgatttattatgggtgtaatagagcatagttgtcttgactttatttgaataacaaacactaactctcagaatcagatttctgtgttacaatgtctatgtctacatcctatgcaacctgctttgataaatgttcatattacggtatagcacttgatacgctgtcaaacaaggctctgtcattcaacaatattcagtctc

SEQ ID NO: 10646 - DNA, 106 bp, Glycine max
  unsure (1)..(106): unsure at all n locations
ctcgtncattacttctgacccctttgacggcttcagcattattaagtcgttctcgctaactaaaataaaaaattccccgacattgagtgatcatcgtaattctgta

SEQ ID NO: 10647 - DNA, 415 bp, Glycine max
agtggctgagactaagcacgagatgacctgttccttgctctgtatgtggggcacacttactatgttgctgctctgactgcgggtgacgctaaactatgactgcttgatctatatcggtgatacctcgactttggtgtactcaagcgttgattggaatatttgctgggtattctggcgtcttatgctcggctgtatctgaatgctgcttacaacggcagactgctgtaatcttttatctaggctgacttggttaccatccggttccgatgtggctatgtttttagacaatggcccagtatctctaaataggatgctaggcgagtcaccatcttggagtcctgtgtatttgcctgcaatgtggggtcatgccttgcataacaaaatttcttgtgcttgctcagactctgtattcact

SEQ ID NO: 10648 - DNA, 694 bp, Glycine max
  unsure (1)..(694): unsure at all n locations
tgtgaccatttaggncnnntttgttccgctctaggacctcnanactcagctntcgaaatgttgtnttcacattctactaagctatttgctggctatcgagcgctcgctatctcacactcctgggctaagcgcgacgaagactctggcttatcgagcgtacacttcatctctctaagcgcactgcgttagttcatccactaagcaagaaaggcacnctaagccataaatcactaacgtgtgctanacggtgcatacgtgcgctaagtgcatgagcacgaacaaggccacctatntaagcctgaaatcagatattttgaagggagtgtggactgcgagttacagctctgcatgtctaagggttctagagagagaaaggtccacagtccagaaaagatttgagagaatnttgctgtgtgaagatctacagagaccacagctntgagcatggagccgattgagagctncagatgagctcgtgagtgagtatgatagtctacaggtgacagagacatnctcaccactcgattntctgcatctctcatcttgtgctctcttttgtgttagaagactcctggatggtatgctaaatctctgtcgatgctctgtgaggcctgacgaattattattatattaagaaggttggtgcgcttgcattactttcttcagatgcgcttcttgtacgagagctgttccg

SEQ ID NO: 10649 - DNA, 470 bp, Glycine max
  unsure (1)..(470): unsure at all n locations
tgtgctgtcaggacttagcaccgngctgcagctgangtatgggaccataatgtgactngtgcgcggctatgggccacagtttcacatccatgccgctaaccacatcctgtgccactcattgactacgactccactaccatatctattttctacaccggtccatcatctccaagctccacatcaaaaaaaacatcacagccacttccatcagctacaggcaagaagacttgtccacacaccaatcagttttacttaacccagacaatctcaccatcgtaccgtgacactaacattatgagtatgactagctacttgcgtgacactcaacacaactattactatttccacccaaactacatttgctggcaactggcattcaaaattgcaggcattaaaactctttcttgcatatctcagcaattgtattgaacacagtaacaaccattggcaacctatgttagtgagataat

SEQ ID NO: 10650 - DNA, 502 bp, Glycine max
  unsure (1)..(502): unsure at all n locations
ngtgccgttaggcctttagtactcagctgcacctgaaccggctgcgngagacatgtctaacacaagtctaaaataggcgctatattatatatagaagccaaggataatataaaatcttcctatatgacttttgaaagaagacgtttctttataagatcataactttgaccctacatcagggacggtcatatgtactcgaagctgacccttcactttgcgaaatatacaatgagagttagcactaccccaagcattccacatattgcacgaagggacttggagaaacagtactacacatttgcatggcgacatgcgaactaagtcatcaatcttcttgatcttctgctagcagcctctgactaactactcgaatgcatttctgctctcttattcagccacatgttgatttctcttgtacaaagtattcagcatgactagcacacatgatcaagtaagctcaactgagcacgcttatatctctctgtggacggacgcaatgacg

SEQ ID NO: 10651 - DNA, 618 bp, Glycine max
  unsure (1)..(618): unsure at all n locations
cgtgtcttgataccgtcacggacttgagcacctgggctgcagctanaccananacncactaaaagattcaatactctgatatanatatgctatcactcaatntgaatcataagattcctcattacacagaaaccacaatatatataaagagaaacatcaatctcgacatgcgatcaataaggcctttgagctttgacattcaccaagaattatatatgatgagatgtaagagatcgatgaaatcatagacactaatatatcactataatttctcagatactaatagaccannactaatgtactaaaatgaagtatgatgctaaattaaaggtctttcactcgtacgaaaattgaagccgagagagtgtaatcctgaactagtgagagattatataaacagtgttctttaatctccacaatgtacaacatcacatgcacanacagaacttgtattcgatatacgcgacttcattctttcattgtggaaatgcagaggacaaacacaaatctgcgcgttattcacagagaacactaaaaactcccatgtgacctcccaacagacagaaagaaacattgtacaaacaatcaatatgacagccctgtactcacgggtactcg

SEQ ID NO: 10652 - DNA, 599 bp, Glycine max
  unsure (1)..(599): unsure at all n locations
atggcagctttangtacactctgantactcaagctntntgaagangaacatgngacacactcattntatntcanaanggaaagtcgatctagtcaaggtctaagagaaccatacaagttnctaacgaattctaaatatgtgggccattaagtctatcatatgctgacaatagccgagaagccgtgaatctcttcggggcggagtangtgtctgcatcgctttggcttggtaacaatcggagaagtctttgactcccgtaanggaagagcaaccgatcatcacatggntgctctggtgaaagagtnatcacccttctctagctcttntccgcgatacttgacatactcgtccgcaatctatgctcatgggccgagctagactaactcttctggacttggcatgatactacatgtggtctccgtctgataacnctgaacaagctcttttgacttgacagcactactctcttcaaacatgttgtgtgcgatgtccttcttctccactgagtatatgtccataactcggaatgtcgcatcttcttgagctctgcttgtaggcctgagatgatcttcgaccgcatctcatgtgcgcactacttt

SEQ ID NO: 10653 - DNA, 629 bp, Glycine max
  unsure (1)..(629): unsure at all n locations
cgatggcattgtgactcgtaccgagatctctgagtcacctgcggatgcagctnggttgtnttctncangaggaggatgtgaatatagatgctntgcttatacagtacatcgtcnatatcattatggtctgggtanagaacacaatgatgtcctggtagatgganatgcaatctntcaacaacatgctttctaccatgtattggaggaccanagattctccagatagtttcatacggagaaatgtatctgccacgaagatccatgaattaaacaatattggcatatgaatataatagtacancataatggtacctacaatctagatattctttgatctcatcattctnggttggagcatggtagaatgcatcattgcatcatgaactatacaacaatgctctatatatccttgttatgtcttgataacattgatgaaggtttgtacacatcatattgtgtggttgtattttaagaattcgatggatgtcataatggtatcattgacaccatttgaatgctacatcgttcttganactgaaccatactcgttgggcgactttagtgacacaccctctttatctggtgtctcaatcatgctgacatgttgtatgtcactggcctccgaggtt

SEQ ID NO: 10654 - DNA, 208 bp, Glycine max
  unsure (1)..(208): unsure at all n locations
agtgatcanataacaagcagagaattaaagggactaggttgcctnctagtagcgcttctttaacatcttgagctggacgcgtgatgacttgtctgtcacggacctactacattgcttacctttggctttggacttggtcgcctattggtcggccatgtgtcgtaggcaacgctctaacctttntgtggatgagctaaggtgaactcta

SEQ ID NO: 10655 - DNA, 238 bp, Glycine max
  unsure (1)..(238): unsure at all n locations
atgattctcttgtcgcgcaaatcctatctcagatgttgacatgttacttttttctcngcatggatggatgcttacactttggcctactgtatatttgcgtaatccaattttttactcactaccgctagatatagggagacctgttagatactcaaagtgctctacgttagttaatgtaatggcctgtcatatactgattgaatcacatcgtgtctgcatggtgcacgattttatgggt

SEQ ID NO: 10656 - DNA, 489 bp, Glycine max
  unsure (1)..(489): unsure at all n locations
tgtgcgtgaggcctccggtcttaagcactgagctgcagcttgtcagactaccgcgagatcaacatatatcatgatacgtgaaacgtatccttgcaatcttcggaaacgtctgaacgttcgagccctcgctatatttcttccggagcgattntcaagcaattcaagagaagaatcccatggctacactttctttactcctcccttatacaaataggaggggtgcgccactgccagcagccagtgttctcaaacacacctctgagattttgangccagtggctgggctttgccccatttatanacaccccttgttgtgtgatttttcgaagtcgaactacatccgacacctgttcttctatgtcgactgcataaacatcctttgtacgagtcgaccctgattgccgtcttatgatcggtgccgcttcgtgctaaatttattcgctccggatcaactcaagagggcctctaggcacgggttattccgtggcg

SEQ ID NO: 10657 - DNA, 162 bp, Glycine max
atcatctagtaaacattatcatatctagtaaacaattatcagctaaaactatccaatcgagatacaatcgaatgtactaagctgcatccgtcataaaatgtataactaagggagaacaccaaatctcttacgggagcgtctctcacactcagatatgtacac

SEQ ID NO: 10658 - DNA, 525 bp, Glycine max
  unsure (1)..(525): unsure at all n locations
tgtaccctttagcacgatgngtgaccttganactcagcttatcactattgcatatacctanaagaaaagtgaatacattgaactcttatananattggtataacacccaatccttgatgtgcaacatgatggacaatcaccctatttgaaaccaataacaatttcatattcatgtaataagtaaaaatatataggtaattgttacgctaatataattattgtaaaagcaacttatatatgtactaattatacttaatgacaattagataatatttctattttatcataatcttcatattaaaatcctaaacttttttgaataatcctactttatatactattaaaagtcatctaagtattatatgttattactaatgcaggatatttaatttgatacccactaacacattagatacgtggctagtaaggagtttctcaaataaaattttttcatctacataagtatgctcaattcacaatggttcttctttgaaaaacactatcgcaatactattctctaaataa

SEQ ID NO: 10659 - DNA, 256 bp, Glycine max
  unsure (1)..(256): unsure at all n locations
acacgtagaaatatattgtcttaactccaacataattaataaaaatcaatagtcaaaatactctatgtctttcttttctcgtttactggttcttctaaaattaaataaacaaaccaatcagtatgcttagtgttcaaacatgatattacnaactacaagaagataacatggagatcatcaaatagttcttccattacancatcaataagttataattcacatgtatttagtcttaaatacgacacattaatttttt

SEQ ID NO: 10660 - DNA, 236 bp, Glycine max
  unsure (1)..(236): unsure at all n locations
tgcataattgcacattttttctaattngttgaactatatctattttagacaatattgtaaatgtctctagaataacaaaatcaatacgtgaattggtctttatattttatatacaggttgatatattgcattattctctatgctgaagatttttttcacaccttcttctataaatacaaacagaattaattctataggataataatatacatacatcactcgccattccaacaata

SEQ ID NO: 10661 - DNA, 648 bp, Glycine max
  unsure (1)..(648): unsure at all n locations
ngattctgtgatgaccgtaagcacctgcngctgcagcttgcgattgtctcgcagtaaggatcaagtgatctanaaatgcatattaatcatctgctatacgaatgagaaaactgggcanataagaaggtgangatgaaggagaaacccatgctgtgactaccattcctatatggccannagttccaccaaacccaacaatgtcattactcagtcaataacagatcctcttcttacncaccacctcagtatccacaaaggccatccctaaatcaaccacaaagcctgtctaccgcacttncaatgacgaagacnnctcttatgcacaaaccaaanaaacaccaacaaaaaggaatntgcagcagaaagctgtanggtcaccccannatccgttgcatatgctaaactgatccattctacttataatcaatgtagcataccctaccaagttatcacctcatttttcagatacactcgacgcacgtgtcttgtactgaaagcccngggcgntncatgacatgatgctcgaacgtaaggcaagcaatgatcngctgctgaatgagaaatgctgtatctgcatgcaaaatgccatgggcattgaacgtgtacttcngatcatatgcttttaccattangtatgatgtaagatcg

SEQ ID NO: 10662 - DNA, 613 bp, Glycine max
  unsure (1)..(613): unsure at all n locations
gattcccatgtcactcgtccgcgatcttaagcacctgggcatgcagctctataccacccattctctcctcctttggcacatgaacaagccanagtgtgtgttaataacaatacaatagcagtcatataattcaatataacatgagaacactaagatagaaataatccnacagtcatatgtaactaaatatccatacattctaaggtagatgataatccaacattataagtgaaacatatttatgctaacatatatactaaagtcacatacctaagatactaagtgcagaaatatacctaagatatagctataccggctatagaaaaggattataactaacactagaaggtgtgtggtgtggagatcaaactactacaatatatcacatctcttaagttggtgaacggtatcatcctgcaagcatatctaagataancagaccacatattggagaccctacttgaagactctcatatgctgatattgctagagaggaggatgctattgtgagagtcttttatancatgcatacacctacgacaaaaaggactgcaccattcaagacctgctgataagtctataaaggataattacgaacaatgccatgcgtagg

SEQ ID NO: 10663 - DNA, 457 bp, Glycine max
  unsure (1)..(457): unsure at all n locations
gttcgtaggacttagcacgcgctcactgacaaacaatagaataattaccttaaaacactatggctacttcgctcaaaaactacaccagtaactgagctgacatctcatggctaacaatatgtcacgttttgtatcttcttctgggagccatntctctcaatggtaaatgaataaatcacttaagcctcaaacaggacataacaaactgcaacccctctcttgctcagactcgctcccttgttttttttgctcttgcaagctgcatcaatatacatacacaaatgcacttggatgacatgactcatggtacctctaagaccctgactaagactaacacaactatctgaaaaccatcgtagtcaacatcattcctatactcaattctctctatgcttaacctatcttaacctaactactattcagaacttgattattatggacagaattctacttacca

SEQ ID NO: 10664 - DNA, 697 bp, Glycine max
  unsure (1)..(697): unsure at all n locations
cgtgccccttgtangccccnntattgatcaccattgagtgaactatgatactcagctagaagatcctctccacatgtgacatggcttcttcaatattntctgaagctcctgaatctttatatcttgcatgtcactcttctgctncaaaatttgattctatttgaaagaaaataacattcacaaatattattaatcgagacatngtattctctgtgaataaagaacatacatactagatctgaaagtggtaagaaatatgaatatactntgntnntgccatttgtaacttcttgattcanatgatcatttntcttccttaaattatcaataaggcttcttgaaaatccagggaggtagaacgcngtgggcttggtggtcttctacatatggtgacatggggtattgagtanctgatgctggtgggagnggaggtngacttggctgtataacnggtttgtaaacattctgcacagaactcaatgaaatnggaaatganacatctcttcaatngtaagtcgtaggaacttgagcagctcngactatggangcatgngtacttccanngctattagtcctaatctcaagggattaaccggtctatggaggaggangagactcttangacctactctcncngnanactttcttcatattgacttatgacacatgtctataaaatgaccttcaaccttacttt

SEQ ID NO: 10665 - DNA, 565 bp, Glycine max
  unsure (1)..(565): unsure at all n locations
tgttctgtcaggacttagcactgngctgcagctcagttaagganatattctaatatgaagttgcatgagctttgtatannttatgtcatacgaactatgaaattagttaatatataagatatacacatccaactcgagaaaagaatggtgaatgattgaatatataacacgaataacgagggagaccccttgtcaacattaatactagatgggtgaaataatggattatattcctaccttaatacaatgaccactaatttatatttacaattcatatgtagtttatttataatctgcacaagaatcgattctgttattgatacctaatatgtaaaaagatatataaataaagatgcatttgtacacttgttgtaatgtcaaattaatatagatctaatgtgaagttatataattgtgaaaactgtggaatccaaataaactaatgataatataataacatatgataagtgaatatgaagtatgcaattaatacttcaattctcgtttatatactatcgtattaatgctataactcgtctctcgctatatctagctatatgaatag

SEQ ID NO: 10666 - DNA, 548 bp, Glycine max
  unsure (1)..(548): unsure at all n locations
ctgcccctgtgnncccctgtgagcaccatgaagaacttganactaagcncaagagagatctcttgngagaagagaagcagatgtgtgttgtgaagtggtatatatacaaggtttggaagtctatactttctattccttttctgtccacacaactactaagtacacacctattacattgctaaagccactcactatcacaccacacatggttaagctaaacataatatatataatataccctgcaacatctctctaataataataatacaagactacataattaatactctacactaataaacacttatcacatatgacatacaggtatataattttgaaatacgctgacggataagagatgatnattcatgtgcttatataagcttagacatacccttatgctatgatacaagaggaatatcaatntgtcatatcatctctcaatccacgttatcttacataattagttgtatatctagaataacacaaagcataaaatatctttgtcccttagaaaagtccttctcagcatttataaaaatattaag

SEQ ID NO: 10667 - DNA, 620 bp, Glycine max
  unsure (1)..(620): unsure at all n locations
cgtggctgtgcggacttaagcgactcagctgcagctgaagactgcattctacacctgtcaggtatctctcgacactgacattacttgtccattgctaagggctngactagactcgcatcctcctacttggcaagggtactacccncgacacgggacaatctnncttgacactagatcatctctntcgctngcnagcctgctcagagctntggatgctnatgtatntgtcaaaggccacagaatacacatgtcatgctacgtgacacttcaagacacacgtcacactctatgtcagtctggatatgacacagacgctaaccgtatagttgctcccacaacggtactttacctttattattgagatatgcattcatattctggcggatcaaactcacatatattagagcaatattactgcatatcttagctcatgcaatgtaactactataacatgtgactatgctatcagacagccgcatatctgacgctgntcatactacagcccataccacgacgcagtgtcttcatataagccaggcctgactcttgcagtttaccacactgccaactatgttactatctcaaaactactgtcagactattgcgaccctcttcctacn

SEQ ID NO: 10668 - DNA, 92 bp, Glycine max
gtctgagactcgagcgagtactccatgcttgtgtgccccccggagaagcgactagctcgcccctattatactaactcccccatgcgaaaact

SEQ ID NO: 10669 - DNA, 357 bp, Glycine max
agcttcaagaattatggcctcatcaaactacttgtttcccgagggaaattctataaatagacctcccatctttaatggagtgggttaccactactggaaaacccgcatgcaaatctttatagaggcaatagatttaaatatttgggaagccatagaacaaggaccttatgttccctctataatagccggaagtccaacaatagaaaaacctagagcagattggactgaggaagaaagaagattagtacaatataatttaaaggccaaaaatattattacatctgccttaggaatagatgaatactttagggtttcaaattgtaaaagtgctaaggatatgtgggatacactacaagt

SEQ ID NO: 10670 - DNA, 350 bp, Glycine max
  unsure (1)..(350): unsure at all n locations
tcttgtccttcctttgcaccacatnccatgccttgcgaactccttatagtactctcacngtggggtcactgaaaccccgtgcgatgaaaggcgtgatactttcctccgagtgctcctctcatggggtagccaagttgtcttgtgacaatgaagagattataattaatacaaccccttgttcccatcaagggaacatttggaaatctttcacacaaggatagaatcccggttcttcctttcttctagcgagggaacccattaactgatgccccttccatgctatgcaagagnttgtcccaatttgcctttcctttcttcgtacacgagcagtgaccttgtaatggacaaat

SEQ ID NO: 10671 - DNA, 352 bp, Glycine max
agcttggttgagaaacttctatggaggttgaatctttgagcttcaatgaggtccttcaatggtgatttccagccatagagttgcagcggaagataaaggagaagaggtgagaggaggcgccatccactagagaataagccatggaagaagaggcttcaccaccaagaaagtgtcttggataagaagcttataggggaagcttcaatggaggaagagaatgagagagagagagagaatgagagaaagagagagagagagagagagagagagagagagagagaaagagaaagtggtgtgggaatgaaggaaagatagggaaagaagttgaactttaaagtttgtctcacaagac

SEQ ID NO: 10672 - DNA, 342 bp, Glycine max
  unsure (1)..(342): unsure at all n locations
accaccacacgcttacatatatatatatatatatatatatatatatatatatatatatatatatatatatatatatacacacgttatcaaccaccacccttaaaaaatttcattatttcatgtacaaattgcatggctaatatgaacaacattcaactagtattaatttaaataaaaaaataaatttaaataacaacagcttagaaactagtattaatttaaatatcaacagccctagaagtgttaatacaaaataaatttaaataacagcagcctagaagctagtattaatttaaatattaacagccctagaagtcttaatgcaaactaaatttaagttgn

SEQ ID NO: 10673 - DNA, 410 bp, Glycine max
  unsure (1)..(410): unsure at all n locations
gcttggcacttcanaaccttctggttgtgtcatataaatgtctttctctaaatccccatgctagaatgaaattttaacatctaattgctccaagtgaagattctctgtagctgcaatactcagaataactctgatggtagttatctttacaactagagagaagatctctatgaaatcaattccttgtttctgctaaaaccctttcaccacaagtctcgccttgtatcttcttctatcgttagattcttcctttagcctatagacccacttattctgtanagctttctttccttcttgcaatttaattaaagaccacgtattattcttctgaagggatgtcatctcatctttcattgctagctcccactcaatagagtcattcccctgcatagcctcactgaaacattctg

SEQ ID NO: 10674 - DNA, 340 bp, Glycine max
agcttgcttgtggagcttctatggaggctggatctttgagcttcaatgaggtccttcaatgctgatttttcaccatggagatgcagcggaaggcaaaggaaaagaggaaaggggaggcaccatccactaaggaataagccaaggaagaagggacttcaccaccaaaaattggctttcatagaaacttggaaaagaatctttaatggaagaaaaaaaaaaaaaaaggggaaaacaccaaattgaagggataaaaaaaggaaagaagtggaactttgaagtgtatcttataagactttcattcattaaagttaccaccagtgttacacatgcttctatttat

SEQ ID NO: 10675 - DNA, 404 bp, Glycine max
gatctgcctctatatcctcaacaatcccatcctccctccagataatgagtttctggtggagaatagatggcacagccccaactccatggatccattcccttcctaatagcaagttaaaattagccttggactgtatcaccaggaataaagttggtcgaactatactgcctacagcaacatctacttgaatggctcccaaagaatagccagttttgccctcataattagagagcacaatgttgtgggcagatagatcagtgtcatgtttcccgatcttgtagagcatagatcgaggcattaagttgacagccgctcctccatctatgagcactttgttgattccaacattctcaacttttgccctgatgaaaagaggtttaagatgacttttcatctgaaaatct

SEQ ID NO: 10676 - DNA, 345 bp, Glycine max
agctttcaaggctaagtcttcatgttctccccctatctttcacacttcctaggttatttgagtgaagatgaatatgtttgcattcctacttttttttttctattaaaaacaattttaaatttactatttgcaccacaaatcacactctgcaccccactttttgtgtagtccagatttacttacagcactctaatactgttattttcacccattatgcaccttattctatttttattttataaacccaaaaactaatatattcctattctaggcccaacatcataagcatatacataaaaaattacaaagttatgtaattgaaaatatgacaaatttacaataatt

SEQ ID NO: 10677 - DNA, 487 bp, Glycine max
  unsure (1)..(487): unsure at all n locations
tagagtgcgttagtgttcaataatacttggattcttagattcagggggagtctaagaaggtaccaaaagtgatgttaagaatacttgtaaagctaggaatgataggttaaaaacttgttttgtaatcaagttttgattagtagaatcctttactagtaagtaaaggagaactgaatgtagctcaggttgagtaaatcagtataaatcaagtgtttctacttttctccataataatttattaatcatttttataacactttctatcacctctntaacactaagtgtttattcgaaaaactatttcaagaattttatttgtcactagacaaccatactaatcttcattatatatttgatntatcctcggtagacgacttgtgtttaatacattactatctatattatcctntatatcacanaaagtttatatctntgatatacacactattcaaccncncncccctttagtgtgtttcttattggttca

SEQ ID NO: 10678 - DNA, 351 bp, Glycine max
agcttttgctgttctgatgcttggctatcaacaacaagacgcaaagcacagaagaagttatggctgttaccatcattaataataggtaagccctacaaaatatgaaatgaattgtttcaatattttgggtaggaaggaaaatcagtcgatcagaattatgtacatgccatttcaacatattataaccttggcttcgagtatctgcacagcaacataataacgtgcttccctggattcatttgcaacatttaacctatttgaaaaccttggaggtggaatccagacagaaacacaatcgccattctgtagcttgtcaactgtatctacatcatgctctacttttttgacaaa

SEQ ID NO: 10679 - DNA, 351 bp, Glycine max
agctttagtgagggttcaagctcgtgttcgagctaggcgtgtttgcatggcattggaaactcaagcatcacaacagaagcatcagcaaaaccttgcaaatgaagctcgagttcgagaaatagaagtaaggactaaggagtactgttcttaaaggaacattactttttttaattgtggaatattttcatctctttcactattatctccttgtaatccattttcatggaggatgggtattgagaaattgagcatgaatttgagatagctgtttgattgtctttttttttttttggtggaaagctgtttgattgttaagtttatgaaagagaatctaggtttttccttctcgct

SEQ ID NO: 10680 - DNA, 219 bp, Glycine max
  unsure (1)..(219): unsure at all n locations
ttatcatatttatattatggttccaattnttttaaaatattcgagtttaattttaatattttaattaatcatatatttgtaacttacacgttgaagttattttaaatattatacaattaaggtaaactaatattgatattatttgatgagaaaaatgattataatataaaaagtttaaaccgtttacacttattttaaagtaattcaaaatataaatta

SEQ ID NO: 10681 - DNA, 253 bp, Glycine max
agcttgccaagacaatgcacacgccctcttttttcaggtcctttgacttttaaatatatatcatttttctaattaataaaatcttgggtgctttgtaaattttgtgaactctctacttcaaccattttcttttttagttcatcctacataaatacaccaaataaattattacattgcatcaatatccttaatacttcaatgccactaaacaaaactcatctcctcattagacactccctctcacactatacct

SEQ ID NO: 10682 - DNA, 468 bp, Glycine max
  unsure (1)..(468): unsure at all n locations
cgttattaattaaccatatatgttatacccaatgtggtattgaaaatgtagaaactcaacccctccaaaaaacagggatcttaagtcaaaatatcaataaaactaanaaatcatccgaagaaaaagggaaatactaaaaaatatacaagaagaaagagcatgacgctacctgctntatacaattcanaacatctgcacaaatagaattatgcatacactgaatctgcaataaagttccacactgtggngcaatcaaaggtgatctgtganaatntaaaaatagagaacaaattgtagacttacagganacacattaacattctgattattcaaacttgaaaggatacatgaacatatcatatggcaacaatntaaaacaaaaatcaattaccataataacatgttccanactgctcaatgtannaattaaaccatctaacctataaaatccttaactagtagtaactc

SEQ ID NO: 10683 - DNA, 340 bp, Glycine max
agcttatccaaacaaggtccactatatattctgcaatctggtactgtgccatatatatggatggtggttttggacatttggatatgtgtagttgttgttaataacaatgatgcttatgcctttgggcatgggtttggactatttgtatcaaactatgtatgtgtattggtattttgggggaggatttccacttgcttactgcatttttacatgtatattatgtaactggtttcattttattgctacatgtgaggtataactattctgttttttaaagccattgcattccttttttatttttttgctaaaagtttaaagttggcactgacaggcatttgaa

SEQ ID NO: 10684 - DNA, 410 bp, Glycine max
  unsure (1)..(410): unsure at all n locations
tcctcagggccatttcctatgaagacaatacattggaaagttagtctataggataatgcttattttaacacanaaatgatatgctaatctttccgatttagaacgaactcatgggcacatttaatgtaacacatttatgaacatgcgtatgtgtaaaatatcctactatttatgtcaacatacaaggacatccaatacattctagttaccacatatatatacatctttgaaaagaacacacattcttgtgctcaaggcattgtgtcaaaatttacacctaatcacatcctanatatttttgctatgacaaactacctacacatatttgaagtatttatatgcacattggaaagataattacgtcatgcacatacttgcatttgaaaggaaattcctgccatcatatatta

SEQ ID NO: 10685 - DNA, 334 bp, Glycine max
agctttgatcttccaccaccgccaccaccatcatcttagacttatattttaatattagtactttgattttcagccttgttatttggctatattattatactatttgaacaatttactctttccctatttgcatggtatatttgaacaattattaagtatgttatttgactatgtggagtttataatttatctatgcatggttgtttgcttcatgatttcatggttcttgtttcttgcttcatgatttggttgatattttttatgaacattgtatggagttttaaattaaatttatttaatacgcactttggctttttgttgatgccaaaggggg

SEQ ID NO: 10686 - DNA, 462 bp, Glycine max
  unsure (1)..(462): unsure at all n locations
tctnntgctccgcctacgtcccaatggaggaaaaagaagacgatggtaatgcctcctttgcgccaaactttcttcttccagcaccgtcgagtccgccccaaaggaccttggcatcatggactgatttggcgcttgaggtggccatagtgtgatctgttcagaaagagaaagacaaagaaaatggtttgaaagaagtgcaaagaaagggacgaaagagggtgagcttggaattggacgaagctggggctatcgaagctgatttttgtttcatagaagtctttgttggtgaggaggcagaagaagaagttgaaggtggcggcatcaatgaaggtgtttaactggccttgctggaatttccaatgagcttgtcttcaagatcaatgaagtgttcaaagaggttgttgcgaaagagagggaggaatgtgtggtgtttggtggtagtagcacttggcggaaatgtgt

SEQ ID NO: 10687 - DNA, 341 bp, Glycine max
agcttgccctaaatttacattgatgtttgtatttatgggaggaggttgtatgccatttttgttttaagaatagtgtcccactggtaaaactaactttccaaatgtttgccttcgcaggaaatggccccgaggaagcttgcctcaaagaggtccaggaaggacaaggcagccgaaggaactagttccgctccggagtatgatagtcaccgctttaggagtgctgtacaccagcagcgcttcgaggccatcaagggatggtcgtttctccgggagcgacgcgtccagctcaaggacgacgagtatactgatttccaggaggaaatagggcgccggcggtgggc

SEQ ID NO: 10688 - DNA, 549 bp, Glycine max
  unsure (1)..(549): unsure at all n locations
cggcctatcnaatgatacgcatcattanctgcactctgtatctnnccttgataccgatgctattacgcgacctatanaatctcaagcttatgctgcatacatttataatagaccttctcagcagcaaaactctctagagcagaataattatgacctttccagccatatataccatccaggttggaggaatcatcccaatatgagatggacaagttcttcacaacaacaacagcctgcccctctttttcagaatgctgctggtccaagcaagtcatatgttcctcctccaatgcagcaacagcagcaacagtcacaacaaagacaacaagcaactgaggctcctnctcaacctttcatagaangaatagtaagggcaatgaccatccagaatatgcaattctagaagagacaagagctttcattccgagtctgacaaatcacatgggggtagttggatactcagatgaatcaagctcagtcccaaaatttacaagttgcttcaccaactggcagaatacaanangtgagtgcatcacctgaagctggaag

SEQ ID NO: 10689 - DNA, 337 bp, Glycine max
agcttctattgacaaccactcatgacacatgtcctcaggcttccctcctttgtgagttattgttgcaatggcatgtcggcatggcatccctacatcaaagttgtaaaatcagcacacatgtaggttaggaatgaaaaaaaaaactataaagaacacaacctgttagttgtcatactccacaagtgcatgttcattcagctaaattgacctcaaccttattcccccacatgtggacctcatatctcaggcccatgttatcaccacaccaaatgggagtccattgattagcaaaatgaagttctgtttctagtcttttatactgcactggacataatgg

SEQ ID NO: 10690 - DNA, 426 bp, Glycine max
  unsure (1)..(426): unsure at all n locations
tgtccgaactagttcagtagagaccaatgctgagtatagagcagttcgctgagaaagtggcctggccaggagcccccgaccttcttttgtgggggataatgataagtttacagcccaggcacctcaacagcatgagccagaaccagaaaatgatcactcatctgataccaccatctttggagctgttgattgtaaaaaagaagattagagacgagatccaatgaggctgctcatcatgaaccagtgctagcgtcaactgatgcaccatttccaagagtggatccatcttcacctctgcacgcagtagactcttccattcctgtcttagagatacatgagggccagaccataccagttctacctttggacacttctnctccagctactccagtatggcatctaacagataagaagaatgttcagata

SEQ ID NO: 10691 - DNA, 356 bp, Glycine max
agcttagattctaggagagcattcatccttagataacctttacttttcaatcattcccaccccaatacttgcctctttttaggcacttagtttcttttcattgatttgcagcacacacacttgaacacttttatttgtacttccagttttttttcctatttttttatatatatagaaaacagtgtgtatatgatgctctgttttaagcattttatttcttacctattgtctcccccaaatttgggacaaatttgctttgacatataactccaccaaatttggaatgattttgccttaaaccaagcttttctatggatgatgctctcctacaacctaagaaaatgtagaagaagata

SEQ ID NO: 10692 - DNA, 284 bp, Glycine max
  unsure (1)..(284): unsure at all n locations
gtcatcacagatataaatatgtgatcatggcatggtatttntaaaaaataacaatcaagaaatctatctttcaatcttctctctcaacatcattcaactctttcaacagattatttctgattcatcttctcttcatctttctaaaagttnttgttcaaaactttttctttcaagaaaagttctttgataaaaaacttgttctattaatctttttcattctcttctccctttgccaaaagaacaaaggactaaccgcctgaattcttttgtgtctctcttctctc

SEQ ID NO: 10693 - DNA, 357 bp, Glycine max
agcttgccacccagctcgcccaggcgagctaggttgcttcctttagaagtgtcgcaacctacccttcggcgggagggcgacgcgagactcgcgggatacgttttccacgaaaggaatacgcgcggagtcgccaccaacgtttatttgaggaaaacgtcggaaaaactggaaaagacgcgatctacgaacttttaagtgaaaggatcgggagttgtatttacgcacggggaaggtgttagcaccccacacgtccgtcacaagggacggcagcctttaatcgaatgtgcaaacatgactttgatttttttatgttccctttttatgtctttatatcctttataccctttttatattttt

SEQ ID NO: 10694 - DNA, 365 bp, Glycine max
  unsure (1)..(365): unsure at all n locations
tagtagagtatcgataatgtgtctaccatcacgatcatcgtcntcctttccatcattgggggtaccacctgggccgccagatcccttcaccttttgggcgtgttctttgaaaagatccgtccccttttttgcaatgttctgtagttgcatcctatccggaaccatatcaaaattgtactgatactggctaacaaaggcaaccattaggtccttccaagaatggactcgggaagattcaagttaatgaccaggtaacagctaccccagtaagactttcttggaaggaatgtnatagcaattcctcatcttttgcgtattcccccatcttctgacaatacatctttagatggttcttgggacaagta

SEQ ID NO: 10695 - DNA, 346 bp, Glycine max
agcttgtcagcatacttgatcttctttgaaacctgcatttagtttaataggtacattaagattttgagatgcaaacaaaaaacaacatattggggtcaagagcaatgctagcaacacactgtaacacatcctttctcacactctatattattggttaaaatttataggaaactacaaaattatgagtggaactcattaaatatggagtggcacacacaaaatattgtgatttccaaaaaaattcaactaatagtaaagagtgtgttgctagcatttctcttggggtcaaatacttggaaaaaaataggaagaaggcacaacacatatttgaatgagcatttttttt

SEQ ID NO: 10696 - DNA, 446 bp, Glycine max
  unsure (1)..(446): unsure at all n locations
ggagaatggtttgtgatgaaaaaatggaaggccaacgttcaccaatcactacaaacaggatatcgaaagatgtagagaggttaggcattggaaaagagaggtcaggtgcaagatttagagtagcantttaaaattaatctaagccattaatttaaaatgaaatagaagattcagattgagagtaatttgaaacctaacatgatgaggggtaaaaagaatcttaattgacctttagccttgatcaaccacccaaagtgatagcttcaccaagtctagaacatcgatctgagaaattataattactttatatataattgaacaaaagaaaatagtaggttcaatctcatccctccaaattcaagaataagagaaatgcagatacatgtgtgtgaatatatgtcatagaattgaatagaatggggtccattccattctatcctttcttt

SEQ ID NO: 10697 - DNA, 346 bp, Glycine max
agctttagatacacaactcaactcttaatacaaaaagaagagaacttcccttctatcaatgttaatgtagttcatgtcatctctagacctatattatcctcataatgtccttattcttgatcacttaaattttttatttagggaaaatgaggcatcacttgttgtcctacctgatttgttgatggagcttgatagtatggatgaggtatgccttactattactataatcctctgaatttaacatggtgggaggagtcaatatttgttccttttcgtgtagtacatgagatgctatatgcaactattacattattcctttttcaagtcaatatatgtaaagtcagta

SEQ ID NO: 10698 - DNA, 393 bp, Glycine max
  unsure (1)..(393): unsure at all n locations
tgatcaatgcatcaactccatgaggaggttagcatgataaataaacaggggatctatcaaaactagtgcaacgcaatcaatcttacaccaaagaatacttccaataggacaaatttttcccaaccaaaatgcgccattttattaaatcttggttaattntcacaataatccaagatcacttcctaccctaccaaaccgtcttcatattgatgcatttcatactttctcaaacaaggttaaatatcaaatatcactcaattaatttaaagacaaagaaaaaagtatcaatccattaataataaaaaagtaattagctgtatttcaacagttgacatgcatgtccagcggcagtggcggatctacgtatatgagtgattttaagttttatttgta

SEQ ID NO: 10699 - DNA, 347 bp, Glycine max
agcttatgctgcaaatatttacaatagacctcctcaacctcagcagcaaaatcaaccactgtagaacaattatgatctctccagcaacagatacaaccctggatggaagaatcaccctaatctcagatggtctagccctcaaaagcaacaacaacagcctgctccttccttccaaaatgttgttggcccaagcagaccatacattcctccaccaatccaacaacagcaacagcccctgaaacagccaacagttgaggctcctccgcaaccttccctcgaagaacttgtgaggcaaatgaccatgcagaacatgcagtttcaacaagagaccagagcctccatttaga

SEQ ID NO: 10700 - DNA, 498 bp, Glycine max
  unsure (1)..(498): unsure at all n locations
actaagcttgcttctcaatctccnnccttttgatgatgataaacctgaaatcaagaaacgcatacaagctctatcttttaatcaatcactcactcaattctccccctttatttttgagtttaagcttcacttgaagttaagttatttaattatatgagttcttgatttaatcccaattttctctccccttttggcatcaacaaaaagccaaagtgcgtatagagacataaaatcatacacaaactcataatcatccaagcattttaatccatacaacaagcaaggaggacattaattcatacataaactaagcaaggaagataataattcatccattaatcataataaaatgtcagataattagaaagtcatccaagataaccaaattaaaacaactaatttagaaagtaatatactaataagtgtatcanataagtcataagacatcaaaacataaaacaaatcatttggttaagtcactagaacagagtcaccttt

SEQ ID NO: 10701 - DNA, 349 bp, Glycine max
agcttgctctaaatttacattgatgtttgtatttatgggaggaggttatatgccatttttgctttaagagtagtgtcccactggtaaaattaactttccaaatgtttgccttcgcaggaatggccccgaggaagcttgcctcaaagaggtccaggaaggacaaggcggccgaaggaactagttccgctccggagtacgacagtcaccgctttaggagcgctgtacaccagcagcgcttcgaagccatcaagggatggtcgtttctccgggagcgacgcgtccagctcagggacgacgagtatactgattttcaggaggaaatagggcaccggcggtgggcaccactggt

SEQ ID NO: 10702 - DNA, 319 bp, Glycine max
aactctctaaaattatgttacactatcaatacatcaccatttttctctttaaattatgcttagttatacttagagattatcttaaaatacactaacaatataacttgctaacaatactcaaactaaaaaacaagagtatatatatatatatatatatatatatatatatatatatatatatatatatatatatatatatatatatatgagaaattaaataaaaccgatcgttaattcaacattatggagtctgtctgaacatggccatggtggcgtcgatatgtctattccaattattgcagtctccgttacaatgacg

SEQ ID NO: 10703 - DNA, 340 bp, Glycine max
agctttacatggagctacattaaatatgttaaatattttcattccattttgttttatatagaaggaaagtaacttatgtttgatagctgaagcctttttattagaatatattgatattagtcatttctatattcttgattggtaaacctgaaatgtctttaatatggcatccctcagaccttaaatgtcgttgaagtagcgttatcttcattgtttgttttcttattgggtttggcagaaccttctcatggtagtgatccttcgtgagctcctctacgaacaaaggtggaggtacctgcaaagacacttcgacgattaagtcaggaacatagaggtgaat

SEQ ID NO: 10704 - DNA, 533 bp, Glycine max
  unsure (1)..(533): unsure at all n locations
tggggntttgaaaccccatcgannnncttgattcccatgcattacgcgcactatagaatctcaagctctatggttgagtaattgactgtctatatacactataattctctcctcacaagtaagtgcaatataccctaggatatgtggctctccattgatgtgaacaggtgcttagagtgctcatcattcacagaattcgagacgcaatgcagatctgaatccatgcttgtgntgctgcactgacgtttagagtgagatagccttacgcctgtgctgtattctgaaccaatggggcatgcacacattgcccccgatctcttgcaatatacgtacaaacatgcgcccaccaagtgctcggtgatatgcccctacgacatatatatgtgattattgtaatagtgggacaatcgcaccgtattatatatatggtgacagcttgcgggatctgacttgggtgcccaagtgcaataccaagcccacaagagactgctcttagcttaatgcattgcgacatagctatgactaagaacccn

SEQ ID NO: 10705 - DNA, 340 bp, Glycine max
agcttttgagaaattcaaatggtctgaacttttcactcggagctctgattcaggcacatcacatatagagacgctcaaaattgaacaacggaagctctcgagatattcaaatggtcataacttttaactcggaggtccgattcaggcgcataatatatcgagacgctcgtaattgaacaacggaagctctcgagaaattcaaatggtcataacttttcactcggaggtccgattcagacgcataatatatctagacgctcgaaattgagcaacgaaagctctcgagaaattcaaatggtcataacttgtcactcggaggtccgattcaggtgcataatat

SEQ ID NO: 10706 - DNA, 353 bp, Glycine max
  unsure (1)..(353): unsure at all n locations
gcttaacatcagaccacttccgggtgctggaactacttcacatggacttgatggggcctatgcaagttgaaagccttggaggaaaaaggtatgcctatgttgttgtggatgatttctccagatttacctgngtcaactttatcagagagaaatcggacacctttgaagtattcaaggagttgagtctaagacttcaaagagaaaaagactgtgtcatcaagagaatcaggagtgaccatggcagagagtttgaaaacagcaagtttactgaattctgcacatctgaaggcatcactcatgagttctctgcagccattacaccacaacaaaatggcatagttgaaaggaaaaat

SEQ ID NO: 10707 - DNA, 338 bp, Glycine max
agcttctgcgtcttttgcaaaaacatgtgaaaaacttgaaattgtgtacgttttcaaattggaaccagacacgcacttgtccatctcggtaatctatagttcctgcctgatacttacatttataaatattaagaatttatactggtagttggaaatctttttatttacaaatctaaacagatacatacactgggagttttatatgggaaaaaattagagtgaaaacatgtcaactgtggatccacgagtgtagtttctataaatctgtgattataaacatggtataggtcagtccgtgcaatgtagtccattaaaaggaatcattcttctgtcattaa

SEQ ID NO: 10708 - DNA, 472 bp, Glycine max
  unsure (1)..(472): unsure at all n locations
tctctaganatatttatagganaagataataagaagaaaaaatacacaaaactttttccgttaaaatccctttatccaccgcaacttttttatgtttttttttttgtctaacttctcaaaaagttgagtgcataagttatttttaatttttacgagaagtttgggctcttattctaaatgattntttgaatatttagttnttgcttgaggctcaatggacattgtttgattaatatagctgtcctaattaacttaccaaccccctaattaaccaactaattaatataattgtcttaactcctaacaacataaagtattaatatggggaaaattntaagcaataactttctccaattattattttatgatcgggaattctaatatctaatattntatattttatcctatcatattaattctgcattcagagcatgtgacttgacagttctatatatgaaaatattacatcttt

SEQ ID NO: 10709 - DNA, 340 bp, Glycine max
agcttatattttatcaagttttattttgagtgtgggagggggtagaatatcatccacaccactcaatattcaagtgaaaagaccaagagaaaagaaaaaggaggcaaaagaacatttgagcctcttaaaattcttcaaattagttagaacatattgattagtgtttgaaggaaaaagttgagaattaggtcagcatcaacataggttgaatgcctcctgatactgcatcaaggatacttgacaacagacttagaaccataccacttaagcttcaactgtttccataacatgagttaataatcaagaaggtaaattaagttgagtggtgaaatgatgaaat

SEQ ID NO: 10710 - DNA, 204 bp, Glycine max
  unsure (1)..(204): unsure at all n locations
nttcaccactttctcaattccatccttgatcctcttgagactcttatgagtcctcttccaacttttctagtggttcttccagtttatgggtggccctgatagaatccaatacccactatgatgtagaactcgatcaacttcattcaaataaatcccctctgccaatcaccatttcaaaaccagaaacaaaattagtcatacaca

SEQ ID NO: 10711 - DNA, 335 bp, Glycine max
agcttccatgcaactccaaagtattggtggtgaattgtgaaagtataaaacagtaattatgagaaaaacatgagaaggttaggcagtgattttctacttcaatcaaaagatcaaaataactagagaaagaaacagatttgaggattacgaaccaagaaagaggtgaagacggcaaagaaagcaccaaaaccaagaatgacagagtaaccaacaccctgattaagcactggtttgccttcaaagaaactggtctgcctcacacacacacctccattttcagacacatgatagtacttgctagaaaattcaaatggtggacactctactaatgcaga

SEQ ID NO: 10712 - DNA, 382 bp, Glycine max
  unsure (1)..(382): unsure at all n locations
ctaattatatgggccattaaatctatcatgtgtngacagtaattgattagcccgtgaatttcctctanggctgaacacactttggcgatgacttttgctntggctagtagtcgcgagagatcttgacttccatttaaggtcaaggcgaacctatccatccacatggtcgcttcttgatgcaatgcatcaatcaccctccctcttgcttccttctcggcgtacgcttgtgcgaagtcctctactatgttttgttcatgggtcanagaccgacttaactcttctttgtactgccctattatagctagcatcctttgctccgtggcttctaagtgttgagccaaactcctcttggatcttgagcaagcaactaactccttcttta

SEQ ID NO: 10713 - DNA, 354 bp, Glycine max
agcttcgtctgcagatccctcttgtaagactaggcttaacttaaacagcattatcgtaacaacatatacaaaaaaccaaaaccccaacaatacatccttggtaaagtgattattcggtcctgcttctatcaagttctaaggcaatagtacatttcctaatgctaaagtcacttaactgtacacacaaataggtgatcagaccaagagcatgcagaaattaagcattgaaagaagcattgaacacataaaacacaattaattagatattaaagtaattacatcagctgttccttagaaatccccaacaagggtgtttagccagccattacagaaaaaccctaacacaaatgagat

SEQ ID NO: 10714 - DNA, 268 bp, Glycine max
ttccctagagaaactggtatgtgttactatcatgtcatcgtcttttgtattgagtgccactgaactgcaggttctcaccttgggcgtatttttgaagatccggcccctttttgccatgttctgttgtgctcctatccgaaccatataaaattgactgatactgctaatgaagcaccattagcattccagagggactcagaaggtccagtagtgtccaggtacaactacctagtagattccttggatgaatgatcacagtcctcatttt

SEQ ID NO: 10715 - DNA, 349 bp, Glycine max
  unsure (1)..(349): unsure at all n locations
agcttgcctaaggggtttntctttcctaccccctaatgtatccttatggcatttcttattctgctcagtatcctagaagttaattaacctgttgcaatatgttaggagccatttcagctgtttttggttatacccttcaaattcttatctgtattcagtgctatgaatctgtaaattctgttgcatggtactcttttggtgctttttaataacttatgtatacactgcaggaaggtgatgtaattgcttatcgattgattgagttaacagcatcttggactccggaactttcctcctttagggtacatatcaagtctgcttttggattacataattgaaaaaaaaattg

SEQ ID NO: 10716 - DNA, 348 bp, Glycine max
agcttgcatgcaagtgtgggtgattttattcatcagggtgcttgttgcttccctatagtcttctagtggcactatcctcaactagttgctaagatttgggatgtggtccttcctttggcccatcaagaacaaatcaactaattgggggtcctttggtttcgggcccactcaatcactttcaagttggctaataatttaatgcccaatcttcaataaccatgggctggaagaaggtctttatggcccccttttatatttacctccttcaaaacctttttttattggtggattccaaatttcctttaaatccaagaagtttgcttatgattttatgcgcaatcatcaatt

SEQ ID NO: 10717 - DNA, 408 bp, Glycine max
acaacatcttgtcttccatatgcaatcacaaaagatatccgacttatcagaagactgaggttgaagatatcacatattccatataaagccacatatactgagggctcatcagaagattgacgttgaagcatttccaaatgcaaccaagttgaaaactaaaattgtccatgaaaagatttgatgtgcaacatcaaaatggaagattgaagtcattatgtagtctaaccttggacaaaactcctatggaaaaattgcatcagtgtcactacttctcgtggatggtcatgcttccttcaacacgacccgtgctgacttagcttggcttgtgttagctcttatggaaaaatcaacaataacgtcactgcttctcaagaatggccatgcaaacttagcatgaccctttgtgac

SEQ ID NO: 10718 - DNA, 330 bp, Glycine max
agctttgtgtaattgattacactgatttggtaatcgattactagtggttgtttatgaataaatcaaaagatgtaactcttcaaatggtttttgactttttcaaattggttttaagtttttcttaaagttataactcttcaaaatggttctcttgaccagacatgaagagtctataaaagcaaggctttggtttatattttcaatcaatctttctaagtaatctttctatcaattcatctcaatcatttctttcaatattttctttcatctctttcaacacgtggtctaattcatcttctctttaactttctaaaaggttttggtcaaaac

SEQ ID NO: 10719 - DNA, 471 bp, Glycine max
  unsure (1)..(471): unsure at all n locations
tttaaaaaactgaagtatgaattcagaagaggtaaaaatactaactacaaaattagaaaacaagctaagagtaatgagaccactaatatgaaaactaaacatcaaagcatggcagggatatatgcttaattntgaaaagagataaagtacttttttctaaaaaagataatcatggagtgaaaaatgtgaacctcacgtagtagccaaaaagatgatgcttggtttatgtcttgtgcaagaacaccatcagatatcatttcattctccatagagccaagtagaaatgcttcaggcttttgcctggaggtatcaaaacaaaatgtgacatcatatgtgaagggacttaattacatgctcagaagtgataactaaaaaaaaggaaaataatntctatggactatcacatgactgaggcacaatgataattntctgttggatcaaacacatttatattgaaaatagcagcatagt

SEQ ID NO: 10720 - DNA, 344 bp, Glycine max
agcttgtctctctgcatcaaattttttattcaagtgtgcatgttggagggccccaccaatttcaatttttttcttctttctaatgggtaaaaagtaaggacatggaagacaaaagctttgatcaatcagtcagagatattcctccattttttttcaccagcgcccaacagagaaaactcacggtctttatgtcacactattatagggtgtgttagattgaggtaaatgaaaaaaagatgaaaatagtgagtacgtactgtatttactcattgtttcacgacacgacattgccaacacaaatacccgattaatttgcatgcggaacagaagaagccatcttattt

SEQ ID NO: 10721 - DNA, 381 bp, Glycine max
  unsure (1)..(381): unsure at all n locations
tgttggtcatacgggtcaggtgactataaaatggtcaattatcaatccacggtgcactgtcaagctaattttatcgctaagctngcaatatgtactgcttttgcaacctcatttcagatgttgatgggctatacggatctctggctccttatgatcaaccactagcataggagaactttctttaatgttggtgtattacatgctttgcttcatgtttaaccaacatagagtcgttacgaaagcgtcattccagtatgtgttctcaagttaaatattgacatttctaggtatcaacataaattcgctgcctgaggttgtattataagagattccaatggtacttctgttattggttacattgaaatctcgctttctgtatta

SEQ ID NO: 10722 - DNA, 100 bp, Glycine max
tggcgtggtgatcaacgatgacttctcatgagtgtacgacaattgtatagtggtgaacattacacgcttattgtagtaaaattcgattctgaatcgatgg

SEQ ID NO: 10723 - DNA, 90 bp, Glycine max
ccacagtgccacctgatgcgatgggctgagcggatttctctacgcattggcgtattacacgaatgagactctagacatcgttgagcgata

SEQ ID NO: 10724 - DNA, 346 bp, Glycine max
agcttgcaagtgtaatcgaattacttgacttaagcacgaaacacaaagaatatgttgcactagaatcaaaaggtacagtcaaaagagtattctttatgaaatatatctcgatatgagtcatagaactatagagtatcagcattgctaagaataagaaaccacaaacaaccatactatctatgcaataaagatagaacaccatactacaagcatacttagaataataaggttcctataacaagtatataacgtacatataagaagtaagaattaaatagtcactaaggatgtatttaatgaatcacaagtctcaacaatcacgttttttatcacacacaaagaaaag

SEQ ID NO: 10725 - DNA, 315 bp, Glycine max
  unsure (1)..(315): unsure at all n locations
tgatgaaagattttactctcagcactcttaagacatacataattttagcactaaatgctgggagtaaaccatctttaattaattttggcttcacagggtcatgtctcaagactccacactggcacattatatactctctcatgtactgagtcttcataaatatagagaagaactgctagaaattggtgggaggaaactggccatagtttttaatcttcccagattatatangcttctcactgagtgctaatgctgaatatcttttgatggcgggcctaaagcaggaatttttctagaatacttttgagcatccac

SEQ ID NO: 10726 - DNA, 340 bp, Glycine max
agcttcagttcaaagcattgaataattaaacatttggcatggagcttgtgcacaacacaaggaacttatgcctttgaagggaatggctatagctaaatgggaatccaaatttaatttatcaggtgctctacactagtgaaccaaatcttccacaatccctcaccaccagtgtgaacaaaacattacatcagcgtgtgatgattgttgatgattatgtcattgcctcgacaattgtagtatatacatgtgactcaatcggtagtgtttgattcttccatttcaatttacacgtttattgattttcttctttcataatgcgtgttaatcctaccttcttttt

SEQ ID NO: 10727 - DNA, 465 bp, Glycine max
  unsure (1)..(465): unsure at all n locations
gtgagatagataacaccttagtgtcatgtagcaaagctgggagctaggtcacgaaatgagggctttcaacgagtgagggctttcaagtttcaaacaaagatgaggaccatcatggcacgattagctcaacaatccagcacgacagcgatgacaacaaccaccacgacgcgagtagctcagcgagagtcattntagggggttagtagcttatacaaggtagagtaagtgagtagagagagtcgcgagtgccattttgtagggttgttgtatgacgccgtttcggattttcataaactcgtggatttgaagcagacttgcgagtctacccaaactcgtccgagtctacgcaaaatcggacgattctacttccaatttaactctccaaccttcaatagaatcgtgaaatcataagaatttacgatgtagatcgagtttaacaacaatgtctgttattatcaccatcat

SEQ ID NO: 10728 - DNA, 341 bp, Glycine max
agcttcgttttgggaaatagcaccccacctgacgtccccaaggtctcttgacccccgcgacatatctccaggtaccactctgtggtcaacgaataaaagtaggaagactgactcttccacactttctcacttcaagcttgtaggattatggggtacccgtcatatgtggtactaggtggcgatcaggcgatggtgcaagtcgactctccacatccacaaatcacacataaatccaccatccccagttgcccaccttcaactgagctcacgtactcccatgtagccctcatcctcgttcctctcaacaccgggtccccatcaatccctccaagcttccacaa

SEQ ID NO: 10729 - DNA, 438 bp, Glycine max
  unsure (1)..(438): unsure at all n locations
nntaaaaaaaaaaggaaattaagttagtattatatacgacaagttagtattttatatatatatatatatatatatatgaccttaatagccaaaaaagaaaaagcaaattaaccacttattttttggagcaagtgtgctacaaatccaagccgaaatagcttgcatcaatgccaaattaaccacttattttttgtgttcttatcaagtagactntacatgctntattangctggtaatagaatcacatatcccaacaattctacagttcaacacaaattcatccacttagaataatcgaaaacaaataatcttgagaactatttgaaatttggaagtattgaagtggaaggggcttacatatggtaaaatagtatattgatataagcataacctcgtatttatataattaaatngagctttacaacagtgtgaacaact

SEQ ID NO: 10730 - DNA, 337 bp, Glycine max
agctttagaatatgcgacactttgcctcgaggttttggatccacgaaaagcaatgagtgtatgagaatttgaaatcattggctttgacaggtccaacatggcttcttttttttttcccttccttttgaccgaagttttactcagacagagaggaaaccaaaaaaagaaagagatcagacaaagaactcttggatttgatgacaagtgcattcagcatgttgaacacctggcacattaaacgtaacttatatctcgaatctgtccatacccatattaaatagattctttaaacataagaaaattcaagtaaattgtaaatacgttctttaaaccttag

SEQ ID NO: 10731 - DNA, 317 bp, Glycine max
cggcgatgttggtcttgcaaggacttactagcatggaattaatcttcagacaacgaatgttgtgggaacactagggtacatggcccctgagctcacaaagactgggaaagcaagaacaagcacagatgtatatgggtacggcatactcattctggaggtagcatgtggaaagaagccaatagagccacagaaaaatcccgaggaactggtattggtagactgggttagagaactacatcaccaagggaaaatcatcagggctattgaccccaagatagatgagtatgacaaagatgaagctcggcttgtgcttagtc

SEQ ID NO: 10732 - DNA, 329 bp, Glycine max
agctttcttaagaaaacttccttgagaaacttctttgagaaaacttccttgagaagcttctttgagaaaacttccttgagaagcttctttgagaaaacttccttgagaagctagagcttagctacacacacccatctaaaaactaagctcacctccttgagaagcttccttaagaagctagagcttagctacacacacccatctaaaaactaagctcacctccttgacaaaatacatgaaaatacaaaaaaaagtccctactacaaagactactcaaaatgccctgaaatacaaggctaaaaccctatactaatagaatggccaaaata

SEQ ID NO: 10733 - DNA, 446 bp, Glycine max
  unsure (1)..(446): unsure at all n locations
ctatcgtatatgacactccttgcaccaccaagttcctaactcaatcacttttaaagtccttctgagtgaataaaaagtgacttgcagcagtttggtgagttacttagcacttctcttgctatcaaattttaaaatcatatacatatctaatatgaatttaattttaattctaggatgtgttgagtaccatgtactcatttatgaaagctgcaggattcacccatctaaatttggaaagggataccgagtgcangaatgtttataatcattggaggaagaacacaaanattagaaatggatgganggactttgcacaatcacaaaatttgcaagctgaaactanattatatttgagtcctagatgcaactctaaaacttgttatttgggattgctgtaataagacatatactatctatatcatctgtaatttgttataagtttgtgg

SEQ ID NO: 10734 - DNA, 331 bp, Glycine max
agcttggagtgttcaagaaatgttttaaggaagaatgttaaatttatggctataaaaattttcttatttattatttactattgtaatgatgtttaattgttaagcttttttacttacatcagaaagtaatgttcctattggtgagattatatttgtttctattttgggtaaaattgtactcttaagttagtggttgcatggcttttgatgacaacgtgtacgagtgtcatgataggttgtcatttctcatgtatttgcacttaaatatgaatggaaacatgaaaaatgatatgattttgcagcaaatacgaaaatttctctactctttcat

SEQ ID NO: 10735 - DNA, 436 bp, Glycine max
  unsure (1)..(436): unsure at all n locations
ctattacgtgacactatgaaactcagctgggaaatggaagatagaaggggggaatctgtgtactgcgtcctcatggncaatttccaccaactcaacaatgtcaacacttagctagtatcagtcattctcattacccaaccacccctactagtcaaagaacacttnaatcatncacaaaggccacccttaaatcagccacaaagtccacctgccgcacatccgatatcaaacaccacccttaacacanaccanaacactaaccagggaaggacattttcagaaaagaaggatgtagaattcaccccaattccagtgtcgtatgttaatttgctcccatgtntgctcaataatgcaatggtagccataaccccagctaatgttcctcaacctccattnttctgagtatacaactcgaacgcaacatgtgcttatcatg

SEQ ID NO: 10736 - DNA, 352 bp, Glycine max
agcttgtcattactatatgcatgtcatgctgtaagcatgactttgttggaaatttatcatggtaataaatcccgatcatatattcacaatgagaagttaactactttgtttagtgtaatgatattgtgggtcataattggcagaacatgtataggtgttacttttatgtcataatcacaatcttctttgtaattttttttttttttattacatcttctacattctttgtctgctagtaataatgtgtttaatgtacatagaaccaagtagagagtgcctctttaaaaaaaaagggggtttcaatgcatcttgtgatcaaatgagaaacaaccagctggttattaaattgaac

SEQ ID NO: 10737 - DNA, 353 bp, Glycine max
agcttaataagtccatctatggattgaaacaagcttcccgccaatggtatttaaaatttcatgaggtcatttcttcattcagctttgaagagaatgtcatggatcactgtatataccagaaggtcagtgggagtaagatttgtttccttgtattatacgtagatgatattctgcttgcgactaatgataagggtatgctatatgaggtgaaacaatttctctcaaagaactttgatatgaaggatatgggagaggcatcttatgtcataggcataaagatccatagagaaagatctcgaggcattttaggcttgtctcaagaaacctatatcaacaaagttttagagagattt

SEQ ID NO: 10738 - DNA, 523 bp, Glycine max
  unsure (1)..(523): unsure at all n locations
aggatgtggggaatgaacccatcgttangctgactccgtagactacgctcaacagtgcatcactgacagcnnttttctccatctgcaaantatttttgcagatccagtgattattaagccatgaaattgggccacatgaaaccaagaactaactcacttctgaatgaagaaacaaacaacacgttactcacctgatgcttttcaagcaaactgangacatcacttctggccttcatctgcttcttggttgctaaaatatccgattccattggcttgaccttttaaggtaaatagttgcactcaatattgatatatcttaacaaatttatgtcatgcaattcaagataagtaattaaaaagatttccgctttcctttctttctcaaatttctcccttgatgtattagtgactcttctagttcaacagttgttgacaccagcgatcgagttcatcattcattgtatctatctttggtgcaatttctattctctccatggtctataagtatttcactccagcattc

SEQ ID NO: 10739 - DNA, 346 bp, Glycine max
agcttgtggatggtgaccaatcccagaggacttttgtgtatattaaggatgctattgaagttgtcttattgatgattgtaggttcccatatccaatctttttatacaactttatatattttaagttctgattttctgattgtagaatttcatctttaaactattactcttgttggatggttcaactaaatgtgaacgataatttttaacaggaaaatcccgccagggccaatggacatatttttaatgtgggaaacccaaacaatgaggttatagttaggcagcttgctgaaatgatgactcaggttagaggattaagtttgattgtttgatcctattagaatttc

SEQ ID NO: 10740 - DNA, 446 bp, Glycine max
  unsure (1)..(446): unsure at all n locations
tccatcaactatggagtagttaacatcggttntggaaaaaccgatgttagtatcttgttgttaacatcggttntggaaaaaccgatgttatcgaattgatgttaacataggttttaagaaaaccaatgttacctagttgatgttaacatcggttattcttaanaaaccgatgttgttatcattatatattaaaaatatgaaattgcacaacccacgcgcttgaaccctgtcgttcttcttctttctccttctgcctgagttcgtctttgttgcaaacaggcctgtgcttccgtgactgcaaccacattgtggagttcgtctctgtcacttatcgattgaggtacgtcctttcattttaacattaggcattcctcgttttaacatctgctcattntcgtangtcgaagaanacaaggaaagaaaagtgtcccggaaagggtgggagt

SEQ ID NO: 10741 - DNA, 344 bp, Glycine max
agcttggcatagcgtgtgaagagatggcgcttagtgcaaggtttacgcttaacggataagcaatctgaaaatttttctaagtcattttctgcttatctcttcacacataatttaaaaaccatttttgttcattactaaacaagctgaaattaatcacaatcacaagcaagatgtcctaactacatgcaagaaataaaaatgaagatagagaagggaaagaaaaactgggttgcctcccagtaagcgcttctttaacgtcactagcttgacgcatcatcctgttatccaggatccaataatgttcccacttcaaggaccttcttctcaggtcttctttcctctat

SEQ ID NO: 10742 - DNA, 399 bp, Glycine max
  unsure (1)..(399): unsure at all n locations
tgagaaaacttccttgagaagcttctntgaganaacttccttgaaaagctagagcttatctacacacacccctcaaataactaagttcacctccttgagaagcttccttgaaaagattcctaaagaagctagagcttagctacacacacctctctaatagctaagctcatctccttgagatgagaagctggaacttagctacacacccnctataatagctaagctcacccccatgacaaaatacatgaaaatacaaagaaaagtccctactacaaagactactcaaaatgcctcgaaatacaaggctaaaaccctatactactggaatggccaaaatacaaggcctaaacgaaggaaaaatacctattctaatatttacaaagataagcgggctcatac

SEQ ID NO: 10743 - DNA, 340 bp, Glycine max
agcttgccacccagctctcccaggcgagctaggttgcttcctctagaaggcactgccttctggaggaacttgctggaaggcccaagtgggcctgattgctatttgcacccctgtttactaaatacaccccctgtctttttttgctgattcttttttcgtaaccttacgaaactttacgaattccgtaacgatacttggttttctttcataaaggtaccgaaccttaccgattacctaattattccttttttggctttcaaaatggtaccgaaccttatggattgggtaacaatgctttcttttgaatttcggcatggtaacggaacttaacaaatcgggc

SEQ ID NO: 10744 - DNA, 292 bp, Glycine max
  unsure (1)..(292): unsure at all n locations
cttccttgagaagcttctntgagaaaacttccttgagaagctagagcttagatacacacacccctctcataactaagctcacctccttgagaagcttccttaagaagattcctaaagaagttagagcttagctacacatacctctctaatagctaagctcacctncttgagatgagaagctagagcttagctacataccccctataataactaagcttacccccatgacananaacatganaatacaaaaaaaattccttagtacaaagactactcaaaatgccccaaaata

SEQ ID NO: 10745 - DNA, 347 bp, Glycine max
agcttggatttccttttagtagggaatctatccttcctaagatggagccaaacccagtcaccctcattaagaactagctcttttcttcctctattgcctttagttgaatatacctttgtttggttctctatttggttcttaaccctctcatgcaacttctttacaaatcctgacctagattccccttctttatgtataaaagaagtgtctagtgggaggggaatgaggtctaatggtgttaggggattgaacccatagacaacctcaaaaggggactgcttggtggttctgtgaacccctctgttgtaggcaaattctacatgaggaagatactcatcccaagactt

SEQ ID NO: 10746 - DNA, 480 bp, Glycine max
  unsure (1)..(480): unsure at all n locations
ataagaacccaaatgccttaatcattttcaaatatgcatgtgaattaggacgcatcaacaagaatcaagccaagggctattgtgccagccatcaatggggcaaaacacaccaaatgattattatgatggatggcttcaaatctcacaaaggtaaaatcatcactttcaaaatgagctttcanaactatcatgacatgtagagaagaatcaaggatttcaagtcacaaaatgtcaagaacttttattttcaaaacaattacccatntcttgaacatatnctataattcanagaaaaacatgcaaagtcgtacgtgcacacaaaattgaccccaaatatttaaactgaaatccgacgaaactaaccacattaaccaattaacacaacttacaanataaccaaacccaacaaactagccnaacccaagaacacttcccccccncccccatactaaacaacacattgtcctcatgtacacaatg

SEQ ID NO: 10747 - DNA, 342 bp, Glycine max
agcttgaagaggcccttgaaattcaatccctcaggcgcatcattagtgcttacctcaagtaattgttccttctctttttctgtttctcttcaattctttgtactatggaaatcaccattcaacaatctaagccaagatgaagtcttgtttttatttttattcaattcaggatgcccagatatatataaaaaaaaagtggaggagttttaattttttagttttgtttttactcctgtttttattttattttattttcttgtgttgagagaaaataaacatatacttgactctgatcatataaaaatatagttttttttttttttttttttaaatttgtgtgga

SEQ ID NO: 10748 - DNA, 452 bp, Glycine max
  unsure (1)..(452): unsure at all n locations
taaggctcacttgtgtagagagatagattagtgagacacagagagagacaatntcaatctctttgttatttagttactaaaaatggagagaggtcttaaatntgagtacatgttatatatntatagtgacaacaccatgattcacttcggccacatgtcatgttcctattttcatgtccacatgtaataccaactaagccatttatggattntcctattagactagttctaacaaaaattgacaaatttaagatgtccttaacaagtttagttaatatttatcccanaacaattaccctcaaatcaaccattnttcttagaggatcatttgctntacaagcgtttaagggtggttaatatataccccgaaacaaaatatattgtataataagcttttttctacattagtttgtgtgcatggattcaactatagcaacgttaaaaacaatagt

SEQ ID NO: 10749 - DNA, 340 bp, Glycine max
agcttgtctcagcgtctatgcgagacagaaaccaacatgttagctatcatcgccaagtaccaagaagagttgggtctagccacggcccacgagcatagaatcgcggatgagtatgcccaagtatatgcggaaaaagaggctagaggaagggtgatcgactctttacaccaagaggcaaccatgtggatggatcggtttgctcttaccttgaacgggagtcaagaacttccccgattgttagccaaggccaaggcgagggcaaacacctactccgcccccgaagagattcatgggcttctcggctattgtcagcatatgatagacttaatggcccacataa

SEQ ID NO: 10750 - DNA, 227 bp, Glycine max
  unsure (1)..(227): unsure at all n locations
nntaaaaagttgngtttctaagcttgtgattacatttgggcacctattttgactntcccatgctgtgtctacatacataaaacagccccactgatcgaggccgtacccgaatcanataaacatgaaaatgcagtaactaggaagtgatcctaggtcgtttcccaatgagcagtgacaagccaaatgttcataatatacttgcagtaacaataacgatgggggggggg

SEQ ID NO: 10751 - DNA, 338 bp, Glycine max
agctttaagccaattcatacgacaataactttttactcggatgtctgattgagtcccgtaatatatcgagacgcacaaagttgaatgtttaagctttaagccaattcatacgacaataactttttactcggatgtctgattgagtcccgtaatataacgaaacgctcgaaattgaatgttgaacctttgagccaattctaacgataataactttttactcggatgtccgattgagtctcgtaatatatcgacacgctcgaaattgaatgttgaagctctaagcctattcaaacgacaataactttttactcggatgtccgattgagtgacgtaatata

SEQ ID NO: 10752 - DNA, 414 bp, Glycine max
taaacattcaatttcgagcgtctcgttatattacgggactcaatcatacatccgagtaaaaagttattgtcgtttgaattggctcgtaggttcaacattcaatttcaagcgtctcgatatattaccggactcaatcagacatctgagtaaaaagttattatcgtttgaattggctcataggttcaacattcaacttcgaacgtctcgatatattacgggactcaatcagacatccgagtaaaaagttattgtcgtttgaattggctcatagggtcaacattcaatttcgagcgtctcgatatattacgggactcaatcagacatccgagtaaaaagttattgtcgtttgaattggctctgagcttcaacattcaatttcgagcgtctcgatatattacgggactcaatcagaca

SEQ ID NO: 10753 - DNA, 339 bp, Glycine max
agcttataaaagtccttctgattcaatttatgcattcctaactgtatgccatgagatgaagtgcaaaggttggacctcatgttagttgttaattattgattagtttaaacacttgagcttgagtgaaacagtgactatgaggcactggttaggcatccttccatgaaatctgtctgctgattagtttcattcagttgtgttgcttaataaaaatgctcttatctctcaaaatctgcatgtcttgtgaaaaaccattgattgagtcattgtatagatttcttatcatatgattaatgttttggaagcaaacaccctttgtaaataatcactgcattattt

SEQ ID NO: 10754 - DNA, 294 bp, Glycine max
atgtcttatgcgttatcagaacatgttccgcgaagtctgtgtttgatgttttagatgatagcaagatggaatcattatctgagacgacattaaagttgaatttgagacttcatttaacaatttgtgtttgaaatctaatttgtaaagacattctcctaggatttgtcaaatcttatgaagaataaatcaagtcaagttctgaaattcctcaatcgccattaaaagaagagttatgctacacaaacctgctctaacataaaagaaagtggctttctcttgtagtgctcaacacac

SEQ ID NO: 10755 - DNA, 286 bp, Glycine max
agcttcttccaaagctgaaaatttgtattcggatttcgttttcagctcaacaagaaactcataaactcaactgaactcaccagaaagtgaaaacacaagaacacaaagaaaaataaaaacacacaaaaaaaaaagaagaaaatgaaaaaaaagaacagtgtatatgttctggaaaattcaattcaagcaacttacatatttcaggaggtgaaaaaaaaaaaacccgttggctggttggttttccaaagcttgtggaatggaaagtggaaaaaaagagaaaaaggga

SEQ ID NO: 10756 - DNA, 361 bp, Glycine max
  unsure (1)..(361): unsure at all n locations
ctataatantgttatattaatatacatatatgtgatttctaattattcatattctttcaacattatagagagtaatatcccaaaaaatgctatgcctttaggtttatatacgaagaaccttcatattagttatatttatgtcaaaacatattcaaggtacatattatgttgatcaatgttttatttntctattaaaatttatactatngttttactaatttataaaaatggaaaataaaaaatatacatttaatattttaaaatacaaaaatactntaatagtagtaccttttatttagtaaatataaaattaattganaaattaagagtattctcctaatnttatgatatactatatggg

SEQ ID NO: 10757 - DNA, 353 bp, Glycine max
agctttgacaatgtacataaactaaatcatatcattttcctgtcaaagtcttattagcatgaactaaaaagataataacattagctcgtgtacttgtcatatcaatttcctcttcaatttggtcttctattttgtacttgtcatcttggttactcttccaaggtctaccattgatccaagtaagctccttcttcatcttattagtagtggtagcagttacatgcatgcatgagagaagcacttttctactacattattttaaaaagctccaaagaaggacatttacacattattgattaagcttgggttacaactttaaaaccaaaaaagaaaactaattttgcagaaaagta

SEQ ID NO: 10758 - DNA, 435 bp, Glycine max
  unsure (1)..(435): unsure at all n locations
ttctgatgtcatatgctaacttgctcccatataatgcaatggtagccataacccctgccaatgttcctcaacccccatttctttgaggatattgctcgaacgcaacatgtgcatatcatggaggagttcttggacattccattgagcacctgatgacctcgaagcgtaaggtgcaaagtctaactgatgcgggcttgctgaaatattacgagaatcgctagtgaatacttacattgacaagcaacaccacacatggggcaattttgaaagctgttcttagatgtctctaatgactcatctgggatttcaagtctatgccattattgtcaaccacagttacaatgctaaaataaatggantaatntgacatctttgtccatatactctcgtaattcatgtatgttccactggaatggngtgcaagcactgtttgtt

SEQ ID NO: 10759 - DNA, 353 bp, Glycine max
agcttatgctacaaacatctacaatagacctcctcaacctcagcaataaaatcagccacaacaaaacaattacgacctctgcagcaacaggtataatcccaggtggaggaatcgtcccaaccttagatggtcgaatccttcacaatagcagcaacaaccttattttcagaatgctgctggcccaagcagatcatatgttcctccaccaatccaacaacaacagcaacagccccagaaactgaaaacagttgaggctcctccgcaagcttcccttgaagaacttgtgagacaaatgactatgcaaaacatgcagtttcaacaagagaccagagcctccattcatagcttaacta

SEQ ID NO: 10760 - DNA, 229 bp, Glycine max
ctaagctctaccaatggactacctgaataattccttgatagcccctttaaagcctatttcccctttctttggtttggagctcattacaagccttaagtgaaaaaccatgatatcacgttacccttaaaagaattttggagctttggaataggtttgggaattagctgggaataagtctggggggggggggggtgtttatcaaaagtttgtattgtaaaaaatatattat

SEQ ID NO: 10761 - DNA, 347 bp, Glycine max
agcttgtaggattatggggtacccatcacatgtggtactaggtggcggtcgggcgatggtgcacaacaagttttccacatccacaaagcgcgcataaacccaccatcccctgttgcccacctccaattgagctcacgtactcccacgtagcccatatcctcgtttctctcaacaccgggtccccatcaatcctcccaagcttccacaacatccaagcaaaacaacattcaaacagcacaagctatcacagccaagcaaaacagagcaaaggcagaaaactttgccaaaacaccaaccaaatcacagcttttctcacttaaagaccccagtaacaattccttcgatcc

SEQ ID NO: 10762 - DNA, 369 bp, Glycine max
ggccattccaaatggtccctgacccctatgttatgaatttcagttatttttggtgaaaaaacgtgtttccgtgaagaaaatccaagccgaggtgcctccgtaacgctttcaagacgtttccgtgggtgattccgtgaagatttttcgtcgttcttcgttcttcaaccggtaagttttcgaatccgagactttcaattcatttcttgttttgttggctttcatcttcatttcgtttactttcggttttcttttctttcgtatttaacgagcttcaaccgatcgttcaagccgttatctcgcctaattaattgtaaaatgaactttaaccgatcatttgtgttgaatctcgttaatcactgtaaaataaaa

SEQ ID NO: 10763 - DNA, 311 bp, Glycine max
agctttcaccctataattcccccaaatttgggcaaatttgctttgaaccaaaatttcctttgatgaatgatgctctcctacaacctaagacaaggtagaaggagataaactgtacaggctcaaggttcaatcaaataatcatactttcagctcaaaatggatgcaagggataaatcaatcatgcacaaggtaagcgttttagctaagtggctatcttcaatcaaaacatggtcttcatcctcttcaaactcaagtattcatccatacttcaaaaattatgcaaaaaccattacttactactagtcgttctc

SEQ ID NO: 10764 - DNA, 476 bp, Glycine max
  unsure (1)..(476): unsure at all n locations
ctgctcaatngctccaggttgctgcatggaagggcaaatgtctgtatggtggtcagcataggagcacaaaccacaaacccttgcgacaggtacagatttctgattcaaggccagctgggttaccaagttaaccaatgcatccagtttgccttcaagcttcttagtttcagatgatgcagatgggtttgtagctacctcatgcactcctctaatgactatggcatcatttatggcgctaaactgctgagagttggaggccatcttctcaattaaatttctggcttcagcangagtcatgtctccaagggctccgccactggcagcatctatcatacttctctccatattactgagtccttcataaaaatatnggagaagaagctgttctgaaatctgatggtgagggcaacttggcacatagttcttaaatcgctcccagtactcatacangctctcntcactgagctatctaatac

SEQ ID NO: 10765 - DNA, 343 bp, Glycine max
agcttcgcaagtgacataattttggtgataatagtgataataaaaaaatattattattaaatgtaaaaaatatttgttgtttctaaattaaaaattatatttacaatttttttcttaattttaaaaatgagtataaaatattttaaaaataatttaaaaattatttcatctctatttttatcaaatatattttattttaaaaattatatttaaaattcataaattaaaaactcgcaaccactcctaacaaactacaaactgttgaatttttgttcataccattggcaaatgtcgtcacaagctaacactctttaagagacaaccaattagaccaatatctaac

SEQ ID NO: 10766 - DNA, 401 bp, Glycine max
  unsure (1)..(401): unsure at all n locations
ggcattgaagcattcaacctcagccttgttgaatgtctgtcttccccttcctctgcctctaaaagaccctatacttctccctcttcctttacctcttccacttttctcatcagccaccatctgcatgacctgctcctcttctgctggaaacatcattctctgctcgtgaaccaatagactactttgcagttcgtctgttgtcatagtatccctgttgttggattcttcaatggagcacaccatgtagttaaacttcgtcttcatagatcgcataatttttgcagttatgacactctcttgcatattttctccatatgctttcatacttttggcaattntcaacgtccgagcaaagtatgaatccactgactcttcctccttcatttgcagcatctcaaagt

SEQ ID NO: 10767 - DNA, 347 bp, Glycine max
agcttttatttatgaacaccatggacagaccagaatatgtttggcaacaaacatggcaatggatggcagatgatatcagattcaataatagaaaacaaggtaattctatatattctaaataattattgtttactcataatcattatgtttattattttactaatcacaggtatccaacttactgaaaaggaaacaattcatttatgcttgattgatattgagaatatgctacaagccaacagaagaagcttgcgagattttccatccatgccatacctaataggatatgcacccaaccaacaccattgactgattcacaatgaaatgacatatgacaaacaaatgct

SEQ ID NO: 10768 - DNA, 482 bp, Glycine max
  unsure (1)..(482): unsure at all n locations
aggagtgcnaatgaaccatgaaanctgatacatcattacggacctatgaatactcagcttgtttacttttatatctccagagcatgttcatggctggtttccaaatggtagaccataagactatatgaagttaccacacaaatattattcattaatgccttcctatggatggatctgggatctacctacatttatgactacactggccatggtactttaatggcaattcatatagtattctggtgaaaaggaaaaaaaaaaaagaaaacactgatctagcactatagaataagatgctttctttggttccttttctatcttcttagcacggtattatttttggtatgtaaatattgaagactttgccttataggggcgtttgagatgtgtgctataggctctacttggtgtgatgtgtggctcgcatcgactgtgatagcgttactgcagtctatgtcggtctcgtgagagtgtgagtctat

SEQ ID NO: 10769 - DNA, 348 bp, Glycine max
agcttgtaggattatggggtacccatcacatgtggtactaggtggcggtcgggcgatggtgcacaacaagttttccacatccacaatgcgcgcataaacccaccatcccctgttgcccacctccaactgagctcacgtactcccacgtagcccatatcctcgtttctctcaacaccgggtccccatcaatcctcccaagcttccacaacatccaagcaaaacaacattcacacagcacaagctatcacagccaagcaaaacaaagcaaaggcagaaaactctgccaaaacaccaaccaaaaatcacagcttttcccactcaaagaccccagtaacaattccttcgatc

SEQ ID NO: 10770 - DNA, 413 bp, Glycine max
  unsure (1)..(413): unsure at all n locations
ctgtgcctaggagatagagaaataatgtatcttcaacgttctgcatacacaaatataggcttcatgtaattcttgtttttaagtatttattttgaacttggatgtagctactagctacgattatagaattcatataacttgtcaatattggtggccataagtttgttgtgtgtgcctgatttatcaaaagttttgaattgtaaaaaatattatatatagggcaggtgcatcttcaatgtgtctaataaagtttatttattttctagtattatgactnntatttattaatactattaaaaaagctgacaaagaaattaaaagattgtgaaaattaactcatgagaacatcnttgttgaaagttgactggcatgacagtctacaaaccaataagtaatagatngataccttgata

SEQ ID NO: 10771 - DNA, 340 bp, Glycine max
agcttgacatagagccttgtctatcatttccttcttagtctcctgtagacataacatatctacttgttctttactcaccaattttctgactggagcccattttaacccccttatattgtaggtaacaatcttcatcaaacacctacactgcttcccttcctctgaattagacccttgtgcctttctaggttgaccaatttagatataattgttccctcctccttgctgatgtttactcccatactttttgccatttcccaattgcttgctgcctcttttaccatctcacagcttctgggtgttgaaactgagtttgctgatgttgtgccctgcattacct

SEQ ID NO: 10772 - DNA, 442 bp, Glycine max
  unsure (1)..(442): unsure at all n locations
cggaccgatnntgggccttcatttcttgagcgagcggcgttggcgcatataaacaacaatgccctagccgcgaatcactctgaggattctcaacagccggagagaggtcaattntgttaatctgtgatgatgccaaagtgttgtgatcataatggattntattttattgtttaatacttaagtgctgacaaatgatgtttgtagttaaaatatatagtaatataagaatttgtaaattgtaaacctaagaccgagcatgacattcgctattacactagtaagagtaaaaacgtgagaaacaaaatgaaactcaaagtcatcacgagaacatggaccaacatcactatattatggcacanaaatcatttcacctanngggaatagagtatatgagacatctaatcataaataaacaaccatgtgtgatataagttccttgact

SEQ ID NO: 10773 - DNA, 340 bp, Glycine max
agcttttcaggtaagcttgccccacccgtttccactgagcattctacatttgtttaatcttaaggtaccaagattttctagaaatccaatggattttggcaattccctgatatttccattgaccatgttcagtgtagtaagaaatgctaggtatccagtagattctagtaaatattcaagatttatgcaattcatcatctcaattttcctcaataatttcgtctctccaatctcatttggcaaatttgtgatggttgttccatctaactgaattcaatgttttaattgaattttccaatttgctgatccaactgataactccctcatgtaatataaagaa

SEQ ID NO: 10774 - DNA, 339 bp, Glycine max
agcttatccttatggcttgcctccggacttcactcctcgtgccactctggaagatttaagccaagcccttacttttgaggggcaactcccgccttatgacgactatcccgggcaagacgatgaggaaggagatacccatctcggccccctgctccacctcaaagatccgtccccacatgaactaccccaactgaacatagtccgccatatcccggcctcacccacacccgtaaaagaatttgttcccttcgcggaagataagggaaagattgaggcgctcgaagagaggttaagagtagtcgagggtcttggcaattacctattctcggatttagcggg

SEQ ID NO: 10775 - DNA, 359 bp, Glycine max
  unsure (1)..(359): unsure at all n locations
ttctataaatagggggagaagtgaagtagaaaatggttcatccncttaggcacttctctctctatcgaattgcttagaaaaatatttccgtgaagaaaatgcaagccgacggcgcttcgtaacgtttccgtgaggaatttcgcgaaggttttcgaccgttcttcgacgttcttcattcgttcttcatcgttcttcgtcttcaacgggtaagtacctcanaccaagcttttcaattcattctatgtacccgtggtggtccacacttggtttcatgtattttcttattctcgtttcattcactttttatacccccttttgacgtgcttaagccattttatttaagtcatttctcgcttaac

SEQ ID NO: 10776 - DNA, 338 bp, Glycine max
agcttggagaagatgcttcaatggaggaaaagaaagagggagagaaagagagaggggggagcacgaaattgaaggaataaaagaggtatagaagtggaactttgaagtatgtctcacaagactctcattcatcaaagttacaacaagtgttacacatgcttctatttatagactaggtagcttccttgagaagctttcttgagaaagcttctttgagaaaacttccttgagaagctagagcttagctacacacacccctctcataactaagctcacctccttgagaagcttccttaagaagattcctaaagaagctagagcttagctacacatacctc

SEQ ID NO: 10777 - DNA, 456 bp, Glycine max
  unsure (1)..(456): unsure at all n locations
ngagatgatgaagtggtngagggtgaaactttcttgctttattgttgaccacagaatggtacctggagatatgtcgcgggggtcacgagaccttggggacctcacgtggggtgctattgcccaaaaccaaacttgaccaattccgaaccaacccgggcatagtcggtcaatgagaacctgtgatgtacctaaacaggcgagctcctggcagtcaacagataataggaaaacaagaccacataagcaggacgcttgtggtggctggccagctgtgaattntgtgtaatatgtggatngtggcctctggtaatcgattaccaacggtgggtaatcgattacaaggcttanaaatgaagacaggacgctaagatggtctctggtaatcgattaccacggcgtgtaatcgattaccacgcttgaaaacgaagtcangaagctaatgaagcctctggtaan

SEQ ID NO: 10778 - DNA, 333 bp, Glycine max
agcttctcccccaattttctataaatagggggagaagtgaagtagaaaaaggttcagccctttaggcacttctctctctctcgaaatagttgaggaaaattagttccgtgaagaaaatccaagccgaggcgcttccgtaacgtttccgtaacgtttccgtgagtaattacgcgaagattctcgaccgttcttcaagattcatcgttcgttcttcgttttcttcagtcttcaaccggtaagtacctcaaaccaagcttttcaattcattctatgtacccgtggtggtcccacaattcgttcaatgaattttattctccgtttcaattacttttt

SEQ ID NO: 10779 - DNA, 352 bp, Glycine max
agcttataagaacaaaatttccttaatcatttccaaatatgcatgtgaattaggacgcatcaacaagaatcaagccaaggctattgtgcaagcaatcaatggggcaaaacacaccaaatgattataatgatggatggctcaaattctcacaaaggtaaaatcatcactttcaaattgagctttcaaaactatcatgacatgtagagaagaatcaaggatttcaagtcacaaaatgtcaagaacttttattttcaaaacaattacccatttcttgaacatatcctataattcaaagaaaaacatgcaaagtcgtacgtgcacatgaaattgacccaaaatattaaactgaaaa

SEQ ID NO: 10780 - DNA, 379 bp, Glycine max
  unsure (1)..(379): unsure at all n locations
tatccatcacatgtggtactaggtggcggtcgtgcgatggtgcacaacaaagtttccacatccacaatgcgcgcataaacccaccatccccttgtgcccaccttcaactgagctcacgtactcccacgtagcccatatcctcgtttctctcaataccgggtccccatcaatcctcccaagctttcacaacatccaagcaaaacaacatttaaacagcacaagctatcacagccaagcaaaacagggcaaaggcagaaaaactctgctcaacacactaaccaaaatcatagcttttctcacttaaagaccccagtaacaattccttcgatccaattcgttaaccgttggatcgactccaaaantttactggaagtctata

SEQ ID NO: 10781 - DNA, 345 bp, Glycine max
agcttcaaccgttttagaacgtatgtattcaaagacagttttttaccaccgtctttaactttaaagattcgaactaaataattagctagtgtatcgcccgcactcactatacttgaaccattcatcgtacgtcgggctcatcattgtgtttctttaatccctcaccctaggacatgcattgactttactcaacctcccgttgtgggctcaatgtaggtgccgtgggctcagtctagctgtcgccatgggctgaatgatgctcgcgctgtttattcactgtaggactcatatgtcagtgtcatatttcggacacgtatttttgctatctcctatttaacaataccc

SEQ ID NO: 10782 - DNA, 343 bp, Glycine max
agcttgcataataagaaatcctgagacaatctcaaaccctgatggatcagtttcagatccatggagccaatgcacagtggaacaggttgagtcactgaaatctatgctcagaatccttcctatgtggtccactggcatctttatgattactgcctcccaaacctcattctctatcatccaagctaatacaatggaccgaaggttatttggcaatttcgagatgcctgcaggatcctttagtcttatcagtgtaatcaccctaacaataatcattcccacatatgagcgcgtaatggtacctctactagcaaaatacacaggcttgcctagaggattcagttgc

SEQ ID NO: 10783 - DNA, 368 bp, Glycine max
  unsure (1)..(368): unsure at all n locations
tgtgaggattaagaatatagaaacgaagaaganaggataaaccatctaattcttctcatggagaagatgagtgaggaaggaggaatgaaagacatanggagagaagaaatcataaaagatatggaggtaggaaaagagaggaaaggattgagggagtgaaggtgaagatccctacttttaaagggacttgtgatccaaaagtgtatcttgagtgagagatgaatgttgagcaagtctttgcttgatacaactacaatgaagagaagaagatcaaattggcctccctggagtttgagggatatgccttagtgtggtggaaccaagtgaagagtgatgttgaaaggatgagaaggcctttgattaatact

SEQ ID NO: 10784 - DNA, 344 bp, Glycine max
agcttgagttcataagctcgatagaaaaagaaagaatagataaataaatgattgataatgtagtgtaataataaaagaaaaaaaatattgatccgatgtttgaaatttttggttgtcaaaatataatcccttttaattatatatgaattagacgaagaaaaaaagggatcttatttaatttttgaacacttatgtgaaattgttttaacttaattataagtgatcttaattgtgttaaatagttaaaaggataacttcatcacttatagtcatcttagttagtttgagcaaatttgcttctagtgagagatacatgtaatctatctacaaataaaataaatgaa

SEQ ID NO: 10785 - DNA, 347 bp, Glycine max
  unsure (1)..(347): unsure at all n locations
tagactgtagttctttttcttgatcctcatcacaaagcacattgttatatacccnccattcacttacaaacaccttgttgcaaaagcaatacaagtataattattagggtgatgttactttcacgtttcacataatcttctcttccatcattcacatagtatcaatcaacatcattcctttcctccctcctattccctccccctatttcatcaaaatcaacggttcaaaattctacaagtgagattatgagaacaaattattatgtgaagaaaaacaaaacagattcctaattattatgaattcaatgccaaaaagacacacaccttttcttctcttctaccaatct

SEQ ID NO: 10786 - DNA, 343 bp, Glycine max
agcttttatttgccatgtatttataaacatggattctctcttgacctttactgcaacatccaagaagtcgaaccagattcttgtgatgaacattacttataagcttgacttcactttcaaattgttcatccatcttcccggattggcctaagattaattttttgactgcaactaatttcccatttttcaaagtggcctggtccaacaaatggggcttaagaatataccaattttaaaaagtggtttatctttgtctcaagaagaatagctcaattaaatttggcccgggcttaccttaacctggttcaaattatggttggtttttaacctggacttccattaa

SEQ ID NO: 10787 - DNA, 480 bp, Glycine max
  unsure (1)..(480): unsure at all n locations
tccttcacactcttccgttccattgatgttaggaagcttatgtgctcctttatcagctaccaagattgttatctggtataaagtacatctcaagtgtaagaacaaacgatgcaaaacttttcccttttagattgttcaactttgacaagaaactattgttaaatgatacaaaatggagcatagaaggaagaaaatattgtggcactgaagcacnttgaaatttataatgcttgaattagcagtaaaatgaaagtttatgctggtacacaaacaaagttttaattaggaataatatatgcatagagagagcataccataccactatgtactcgtcaccaaactcgttgagaaagtttctcttcttcaatttttttgttccctctntaatccccttttgatcaaactgcaatagggctattatgtggtaaaactctattgctgtattagatgcannaatatgatttgcctaacagctgaaat

SEQ ID NO: 10788 - DNA, 346 bp, Glycine max
agcttttacctctcattttaacccttagaactttttggtcagcaatgtcatagataaggcagtgttgatatgcaaaggacaatttaaatcccttttcaagcaactgacctacacttagcaagttttggtcaatttcaggtacataaagaacatctgagataagttttgcacctgaaattgttgcaatcaatatagttccttttccttttgcttgaatataatcaccattcccaatcttgatatttaagacatcaataggcttcaaatccttgaaagcagacttgtcatatgtcatgcgatttgtacaaccgctatcaatcaaccaacactctgaactactcctcat

SEQ ID NO: 10789 - DNA, 471 bp, Glycine max
  unsure (1)..(471): unsure at all n locations
cgtggcaattcttctagactgggagtgattacatacaatccctcttgacccttagcctccactctcttgtcatgccgagacttcgaaacctcaaccaggtttgcctttttcatgttatcgaaacaaaactcaatagcttcatccacaatgtacctttcaataatagatgcttcaggatggtgtagattctttgtatacccatttaaagatcttcatgtatctctcaattgggtacatccaccacaaataaacgggatcacaacatctaatttccctcaccagatgaaccaataagtgaaccatgatgtcaaaaaatgaaggaggaaaatacatctncaactgacacaagataatagtagtcttggtttccagctcatccaacttgagagggatcaatgacttgctacatatgacattgagaanaaacatangcgacttatggcatgcctaaactttgtaggcaaaatgtcn

SEQ ID NO: 10790 - DNA, 343 bp, Glycine max
agcttgcaagaattggcccactagaggccaatcatgagtgtcaagcagttcattaagcaggtggcctggcccggagctcgacctttttttgttagtgataatggaagctctacagcccaggcacctcagcagaaaaagccagaagacaatcaatcatctgaagccactgttcctggagcttttgatgttgcagaaggtagatcacaaatgagatttgaggaggctgcttatcctgaaccagtaccagtaccagctgatccaccatctctagtggtggatccatcttctcccgcgccagaagcagctctcccatctacacctattattatatccgatgacccta

SEQ ID NO: 10791 - DNA, 412 bp, Glycine max
  unsure (1)..(412): unsure at all n locations
tatccttatggctggcctctgcacttcacccnccatgccaccctggaagatntaagccaagcccctactttcgaggggcaactcccaccttatgacaactatcccgggcaagacgatgaggaaggagatacccatcttggccccctgctccacctcaaagatccatccccacatgaactaccccaactgaacatagtccgccatatcccggcctcacccacacccgtaaaagaatctgttcccttcgcggaagataagggaaagattgaggcgcttgaagagaggttaagagcagtcgagggccttggcaattacccattctcggatntggcggatntgtgtctcgtgcccaacatcgtcatccctcccaagttcaaagtaccagactttgataagtacaaagggacgacat

SEQ ID NO: 10792 - DNA, 336 bp, Glycine max
agcttgccattttttgctagtgtagcatttgggggaattacttcttgacccttttgaggcatagattcttctgtgtcttgtgatggtgttgaagttgaaccctcatgacctacttgtattttactatcaacttttgttatagtatcttttgtgcaaatttcttcttgacccttttgagccttagactctggtgtgtcctgtgatgaggttgaagaagcctcatgagcaacttgttttttactatcaacttttgtaatagtatcttttgtgggaattccttcttgacccttagactcttgtgtgtcttttggtggggttgaagttgaagcctcttga

SEQ ID NO: 10793 - DNA, 341 bp, Glycine max
actcaagcttgaccagttggatcttaattcagcggtggctggtgttgatgagatagtggaggagaaggtaatgattatacattctccaaattgcacggcagcattgatgtggactcatctatttagtttttgaaggatggatgaggaggtttactgagaaacagtgataatatagttcaaacatctgtttgttgttttacaaacacaacaacaaaggtctttttccactgcgttggattggctacatggatcaaatgacaccattgtgttatgtttaaagccaagcttttagaatatctggttattattctacaatcgaaatcctttcctttcttttcatt

SEQ ID NO: 10794 - DNA, 335 bp, Glycine max
agcttcaaccaaggggagatggaccatttcaagtgcttgaaagaatcaatgacaatgcttacaaagttgagctgcccggtgagtataatgttagttccaccttcaatgtctcagacttatctctttttgatgcagatggagaatccgatttgaggacaaatccttctcaagagggagagaatgatgaggacatgaccaagaacaagggcaaggatccacttgaaggacttggaggacctatgacaagggctagaacaaggaaagccaaggaagctcttcaacaagtgttgtccatactatttgaatacaaacccaagtttcaaggagaaaagtcc

SEQ ID NO: 10795 - DNA, 441 bp, Glycine max
  unsure (1)..(441): unsure at all n locations
tcattgcctaacaagccaacttacaacagcaagccccaagagactcagcataaggatgcacagaccaaagttgcgtatgtaaaaaaattgtatgaccaagtgaaggtgcaaattgcaaagaagaatgaaagctatgccaagcaagcccaaaagaaaaggaaggaagtggtacttgaacccggtgatgatcttggacatttgaggacaaatgttttccaagaaggagggaatgatgagaatcatgaaacatgccanatacagtctaaaggcccaagtggagaatgacgaatgcccaagtggagaacgacaaagcccccgagtggagaaggatgaatgcccaagtggagaacgatgaatgcccagaggcagagacactatcaagactattaattgatgctgaaggccaagaaataattgaaggcccataataaatatgttcta

SEQ ID NO: 10796 - DNA, 334 bp, Glycine max
  unsure (1)..(334): unsure at all n locations
agcttggaggaagtaaggaaatgaattaagggggaggaagagaanagcacgaaattttgtgctctaaaagagctctgaaatctaaagtttaattttcaaatgatcaaagttgaaaaaatgcacacacatgacctctatttatagcctaagtgtcacacaaaatttcacatgaatttgaaattgaatttgtggagccaaaatttggagccaaaatttcactaattatgattagtgaatttcagttatggttcataccactaatccaagatcaattccaagattctccactaagtgtgcttaggtgtcatgagacatgtaaagcatgaaggacatg

SEQ ID NO: 10797 - DNA, 367 bp, Glycine max
  unsure (1)..(367): unsure at all n locations
tgtccataananatagggttttgaagtttgtcatttcaatttctcactaagtaaaatggatcatttttaaggtccaacaccttaaaatgatcaccacttaagtaaaaaagaatcatttgataagcaagaactacgtaggtctgatttcctcatcgcaattgaggatacgtaggagcaaaagccccgcttttgtcgaccaccccaagagatcgttaatggtccaatgccttaacgtttctctcctttcaaaaacaagagatcgttaatggtccaatgccttaacgtttctctcctttcaaaaacaagagatcgttaatggtccaatgccttaacgtttctctcctttcanaaacaagagatctttaat

SEQ ID NO: 10798 - DNA, 337 bp, Glycine max
agcttttgcatgtttagaaatttctagagaaagaaaggtccaagttccaaagagttctgagagattttgttgtgtgaagatctgcagagacgagagctcgaagcggaagccgttctgaaagcttgagatgagtttgtgagtgattgtgagatcctagaggtgaaggagacatcctcaccacttgtatttttgcaatctttcatcttgttcttctatgtgttgtaaaggaggttttcggactatggaaagctaaatcctctattggatcttccctgtaggtacctaatgtaaatatatttctatctatgtgatgatgttttgtgtgttctctgtgcta

SEQ ID NO: 10799 - DNA, 198 bp, Glycine max
  unsure (1)..(198): unsure at all n locations
aaactctatagttaggcctaggctttagagtttcttttggtaagggctntgtgtcttttgttttgaatntataatacaaggatctttcttcatctgttcctatgtctctacccattctcatccattntcatgtntacttctttactntttaaaacggcagatccgatgacgagtccctcgaaggtctaatacttggga

SEQ ID NO: 10800 - DNA, 331 bp, Glycine max
agcttgcagactataccttcgaccaaacacggccgtgtttctgtctcggcccggatttaaagcgggttgcaacaccggctccgcttccctaactgtactggaggcggttgccgtggctttgtcctctatggttttctggagttttaacatgacctccgagatggaagccatttgatcttttaaggccgatagatcgaccttcatctgttcctgctcgccctcttcattatccatttttctggattgagtgttataggggtgccttggtgttttcttagttatgatgaaattcctaaagaaataaacaacggtgagtatgccaccaaaacat

SEQ ID NO: 10801 - DNA, 411 bp, Glycine max
  unsure (1)..(411): unsure at all n locations
ntatataaaatnttggttggcctgacttctcctttcaaggaaaagagaaatcagaataacactaggccaaatgctacccaactcggtagactactagaaatggttttggtgtttntgttgatacatcgagttattttatcaaaaaaagaactaaacaaaacaaaaagggaataaattatntatgatttatattcaggttcttcgtctcttagctactacttcaggaattcgcatcactgtaagtaatcttcatgactatcatagtgctaggcttcaggatagagcaagaacattgtttgatagctggaaaggagttggaaatggtgatactgaatctcatgaagtggaggttgctaaggttgacaatgcaagtgacacgaatgtcagcgaggaaaggcagccatctgcttc

SEQ ID NO: 10802 - DNA, 347 bp, Glycine max
agcttgagacgactaacatggtgaacacctacacataaaatgaacccagttgatataacactcgttagaatttgactcatcaataatatgaagtgctaacattgtaaaaaatatttgcttatacatatcaatcttatcttattatcttattaggtgagggtagttatataaatcacacaatgtcatttagttcggtttaatttttcttttagcgaagttcgatttaaaattcattaaaatttgttttcataatttccaatcaaccattattacttggcaatttatgatacatccctccctagggaagctaactcctctcaataaatagtttaattcgatatttagtt

SEQ ID NO: 10803 - DNA, 444 bp, Glycine max
  unsure (1)..(444): unsure at all n locations
tcttacatgtntctaatcaattaaacaattcataacctcatataaggtccatcaattatcgtcaatctttcanaatatccaaacttccaagaactcaaatagccaagaacacatntctatgtgtatgcatcgtctgtgaacaactatattcatcccaataacaaaaacaatatagtataaggtggagttttccttacatattcaagttcaagtttctagcttttggaaagaagagagaaaaaataaagaagcttttttgcaaagaactaagctttgctccacccaaccagcaatctacactaatagagcacaaaatcaatcccaaaccaaactccaatttagattttgaatcanaactcagcataccatgggttatctcaatagggatgttaatgggagaaacaaatggataaataactggaaattatgtgtctgaatacacag

SEQ ID NO: 10804 - DNA, 347 bp, Glycine max
agctttgatgaagccattgaaggctgtaccggagttttccacgtggcaacccccatggattttgagtgcaatgaccctgaggtatgttgatcaatttcacacttattttttcccttgccatttatcaattttttttagtctaaatatgccacgagtactggcaaaatggtcattttaacatgatccagcactctggtgatactgatatgcaactaagaaacctatagggttccctaacatgaagtctagaacataagcataatgcgcataattgataaataaatttcttaaaaataagataaattaattggtagacaattctgttaattgtttcctcatatcttggt

SEQ ID NO: 10805 - DNA, 120 bp, Glycine max
ctacctgcttgatattctgctcctgccggggcaggccgtgatgatgattgagaataccttgcactgcttcctgagcatgtggaggcttctaaaatgacccttcatagaattgggaacact

SEQ ID NO: 10806 - DNA, 341 bp, Glycine max
agcttcacaagcaagcttccatcaagtggtaatcagagcacaagagcttcaagtaggtgctcctgaaacctccattaattttcagctttaccttctcctccattgttgtttcttcatttttgtccatgtatctcctctcatgtcttgtgctaaatgttgttaattctttagaatttccaccaattaaacttgctatagaagctagatttgattttctatggttcaaatttcttgttcttgttcttgaaccatgaattgtgttgagtttaggttcctttgagttttctcttgctactttttgtggctgaaacctacaccataaaattcttacaaaaacatta

SEQ ID NO: 10807 - DNA, 475 bp, Glycine max
  unsure (1)..(475): unsure at all n locations
tagtgacactatgatactaagctgcaactgtattacaacgtttcaattaatttcaaaatggtgtaatcgattacaagattttggtaatcgattaccagtgtgtttgaacattgaaattcaaattcaattgtgaagagtcacatcctttcacaaaaatgctgtgtgtaatcgattacaatgatttggtaatcgattaacagtgataagttttgaataaaaatcaaaagtagactcttccaatcggtttcaagtttttctaaaggttataactcttctaatggttttcttgaccagacatgaagagtctataaaagcaaaaccttgacttgcattntatttttcattcataacaattattacaatcttttacaatctttgaatctctttgaacatcatcttcttcttcttcctttgccaaaagctttctaaagttttcctgttttctaaaccctgaacacaaaagtgtgctagtcat

SEQ ID NO: 10808 - DNA, 346 bp, Glycine max
agcttgtttgatgtaaccatgaaagttacagccctcaagcaaaccaaccatgacatgatcgctcatgtgggtaaggctcgggctaccgtagaagagctgagaaagttccttgtagctgattcattggaaaaagtgaacaagaaacttgacaagttctacattcagactttgatcatgtgcgtgatcaagtacttgctggggaccaggttccatcaatgaattccctcatcactagacttctccgcgtgcctcatttattgaaggatgagaatcctgctgatggtgtggagaggtcagccatggttgcatctcaaggtagagaggcggccgcaactatagaggagat

SEQ ID NO: 10809 - DNA, 367 bp, Glycine max
  unsure (1)..(367): unsure at all n locations
ggagtnttccgactatgctcttgtgtggtggaacaagctacaaaaggagagagcaagaaatgaagagccaatggttgatacatgggtggagatgaaaaggatcatgacaaagcggtatgtgccggctagttactcaagggatttgaaattcaagcgccaaaaactaacccaaggcaacaagggggttgaggagtatttcaaggaaatggtgtgctcatgattcaagcaaagattgaagaagatgaggaggtaactatggctcgatttcttaatggtttgactaatgatatccgtgatattgttgagctgcacgagtttgttgaaatggatgatttgcttcacaaagcaatccaagtagagcaacaat

SEQ ID NO: 10810 - DNA, 341 bp, Glycine max
agcttatcgttgcaattttgtatcatgtgattggtacttgtgatgatcataaaccttcattcgtgggagtagatgaacaacagtaaatgacgaggaaggagattctttttgtgggagtcgtcaagccaatatgatgacgttgagattattttgggagagagttatgcttttttttatcaagtcctccataatggtcccgtgattttttttatctgggcatgtaaatctcagatttagatacatgtaaaaactaaattattttctgtcatgtgaatggtgtataatggtttaagatatacatatatatgtgtatattaagtgttttgtgtgctgtttggtga

SEQ ID NO: 10811 - DNA, 431 bp, Glycine max
  unsure (1)..(431): unsure at all n locations
gtatccgtacttggaaggatctgattaccgccttcctaaggcagtatcagtacaattctgatatggctcctgaccgtactcaactgtagaatatgttcaagaaagagggtgaaacctttaaagaatatgcgcagcgatggagggatttggcggcacaagtagctcctcccatggttgagagagagatgatcaccatgatggtagacactctgccagtgttctactatgagaagctagtgggttacatgccgtccagctntgcggatctggtgtttgccggggaaagaatcgaggttggattgaagagaggaaagtttgattacgtttcctccacaaacgtgaatgccaaaagaatcggggcgacaggggcaaaaaggaaagaatgagatgcccatgccgtctcttcacacccgcgtgggtcaaaccccagc

SEQ ID NO: 10812 - DNA, 344 bp, Glycine max
agctttcaacaaatgtcttcacaaataatcatcacacagcagaaaactaacaaaactacccctcatatctcccaaaaccccatacccacgaaaatcaagagggaaagaagtccacccaaacctgaaatttcgaagtcccactcgtagccacgcacttcacgactccaaaaatgctctcctttcacgatttggggcagaaatggtggccaaaggttgaagctttgcttgaaccttcaagggaaaaggaaaaaaaaaaaactacttgaggagagggagagaaaaggcttctgaatttctgctttggctgagtgaggaaagaaaaaagctttttggttttaaaaaaa

SEQ ID NO: 10813 - DNA, 353 bp, Glycine max
tgtgcattcaatatcctgatgagggtgttccatatgttctcaagactggactaatacatttgctggccaagtttcatggtcttgcaggtgaagaacctcataatcatcttaagaacttagtaacatggagaagaatatgattgatgttaccagtggtggagctcttggtgatatgacccttgctgaagctaggaatttgattgagaagatggcttccaactcccaacaattcagtgcaagaaatgatgctattgtctttagagaagtccatgaggtggccacagattcatcttcatctgctgaaaataaaaagcttgagggaaaacttgatgccttggtcaacctagtaacct

SEQ ID NO: 10814 - DNA, 340 bp, Glycine max
agcttttcgattcattctatgtacccatggtggtccacattgtgtttcgtgtatttttattctcatttcatttactttttatacccccttttgacgtgcttaagccattttacttaagtcatttctcgcttaacttaaaaataaaataaatttccaccgaacgtttgaattgtattatccgttaacttcggttaaaataaattccgaccattcggtcgtgccgtaaccacgttagaaatcaaaaagaggtaaaataataatataataatcaaaaaatatcttttagtaaaataaagcggaaaatcaatcggacgttttctctttgggatttctcattctt

SEQ ID NO: 10815 - DNA, 307 bp, Glycine max
tcaacctagaggagacggaccattccaagtgttggagaagatcaacgacaatgcctacaagaatgacttgcctagtgagtataatgtaagtgccactttcaatgtgtctgagctatctctttttgatgcagatggaggggccttggatttaggacaaatccttttcaagaagaagggagtgatgaggacataaccaagggcaaggaccatgaagcacttgaagggcccagaccagatgcagacttaaacaagcccaacacgtcatagagacaaggctggtcatttgtatagctgccattgatgatga

SEQ ID NO: 10816 - DNA, 306 bp, Glycine max
agcttgccacaccatcgcgattctaacccaaaccccttccgggctcgtacttgtgccctaacatcacgcgggctaccatcaaagcggcgctagacgagcgtggttgcaccggggagactcaacataggcgttgcttaccacttacaaagcttggaaggacgtctctaaggattcttcgacggcttccacatatggtgtagaagagggacaactcacaacgatgtcttcctccccggagactatgattagctccccttctcccaccaacttcataatttgggggacatggaagggactcccgactga

SEQ ID NO: 10817 - DNA, 352 bp, Glycine max
  unsure (1)..(352): unsure at all n locations
tcttatactaatgtcacgaggaatgtggtagttagattcataaataatgagtngatttgtcgatacggactccccaggaagatcattactgacaatggcaccaatctgaacaataagatgatgcatgagatgtgcgaaggcttcaagatccagcatcacaactctaccccttatcggccaaagatgaatggngctgtagaggctgtgaataagaatattaagaagattgttcaaaaaatgacagtgtcatacaaagattggcatgagatgttgcctttcgccctgcacggatatagaacctcggtacgaacttctactggggcaacaccgtattccttagtttatgggatgg

SEQ ID NO: 10818 - DNA, 304 bp, Glycine max
  unsure (1)..(304): unsure at all n locations
ggatctaattatatgagtgcttgatttaatcccaatattctctcggcctttggcatcaacaaatagccatagtgcgtgtatagacagaccatcatgcacagactcataatggtacaagcattataatccatacgacaagcaaggaggacattaatgcatacataaactaatcttggaagatgatcattcatccattaatcatctaaaaacgtcggagagatagaaagtcatgcaagataaccaatatagaacaactaatgnagaaagttatctactgatatgtgtatccaataagtcataagac

SEQ ID NO: 10819 - DNA, 334 bp, Glycine max
agctttgatttcctttgttccggaaacctttcttttctcatgtgcacccaaacccaatctccgggttcgaagacaaccttctttctccctttgttggcttgtttagcatagcttttatttttcctcttaatttgatctttgactctctcatgaagcttcttcacatagtccgcctttgcttgaccttctttatgcttaaaaacagaaacattaggcataggcaaaagatcaagaggagttagtgggttaaaaccataaacagcttcaaaaggagaacaattagtggtgctatgaacagctctattgtaagcaaattcaacatggggtaaacaag

SEQ ID NO: 10820 - DNA, 217 bp, Glycine max
  unsure (1)..(217): unsure at all n locations
ttcatcgttcggtcttcgttttcttcggtcttcaacgggtaagtacctcaaaccaagcttttcaattcattctatgtactcgtggtggtccacatnttgtttcatgtatttttattctcgttttcatttactttntatacccncttttgacgtgcttaagccatttatttaagtcatttctcgcttaatctaaaaataaaataaatttccaccgatc

SEQ ID NO: 10821 - DNA, 320 bp, Glycine max
agcttccaagattcataatctctagcagaaattaagtgatttggagaatcaagcttctcatagacttctatctgatagtgaagttataaccaagagagctttgcaacaagagctgtgggatatttcaaatgcttatgaatccttgttgaggcaaaaatctagggctaagtggatcaaggagggtgacagaaatacagcttacttccacagggtgataaatttcagaagaagctcaaatgcagttcatggtattctcattgatggtacttgggtccagcagcctgaccttgttaagaatgcagtggttaatttctttcttg

SEQ ID NO: 10822 - DNA, 428 bp, Glycine max
  unsure (1)..(428): unsure at all n locations
ngaccacgatcagttggaggctcatgtcagacgcccccagggtgacgagcactctgctcatacattactctgagtgcacctgatcagtagttctgttggcccggtcaatagaactttcagagttcaatatcagtataaacccctagccccataaagacacaattcatggaagacattctggtagaatttgttgggaatgaccaaaccaccacagactggtggaacctttatgttgacggcgcgtccaacatgaagggaagtagggtatgaatcatcctcgaaggacttgataatgtaaccctagagcaggccatcaagctcaacttcaaagcctcaaacaatcaggctaagtacgaggggctcattgcaagtctaaaactagcaagagaagtcggngccaagaagctatgatgctacatagactcgta

SEQ ID NO: 10823 - DNA, 105 bp, Glycine max
atatcgattattacaaatctttatctaatgattaacttacatgaactagtatatgctcacttaagcactttcctatccagtctgtcatatactcctcattatcac

SEQ ID NO: 10824 - DNA, 345 bp, Glycine max
agcttggagccatgcattgtgattgcttagtgcaattcgccatcctcaaccctttttcggagccccatgaatggcgttttcgttcatgcgtccttcacccacgagtttggagccatgcatagtgattgcttagtgcaattctccatcctcaacccttttttggagccccatgaattgcattttcgttcatgcgtcctccacccaggagcttggagccatgcgtagtgattgcttagtgcaattctccatcctcaaccctttttcggagccccatgaatggcgttttcgttcatgcgtccttcacccacgagtttggagccgtttgtagtgattgcttagtgcaat

SEQ ID NO: 10825 - DNA, 371 bp, Glycine max
  unsure (1)..(371): unsure at all n locations
agtgtgttctttgggcttctatgcgaaacanagtaggagaatgatcatgaacacccaaactattaatcaanaaaattaagctttgaaagaactacaaagaaaacacacctattgtgataaaaatcgttgtttttttttaaagataaaaatcaaagttttagtgtgttgttcgaccttcactgcgaaacanagaacatgcaagataagtttaagcaaagcaacatcataaagctttgaaggagcatcaatataaacacacccatacttataaaaataaaaaaattgaagctntagtgtgttcttcgagcttctctgcgaaaccaaaagcatgcaagagaactttaagcatcaaaaaccgcaacagatctgaa

SEQ ID NO: 10826 - DNA, 317 bp, Glycine max
agcttgtcaaaactctacaagtctgacctgtcatgtgcccccgtaggctccgttgtgactcacattatcaatactggcttgggctatctattaattcttatatatatatctgcgtctttaagcgaactcctgctgatgatcctttgtgtgagcgtattattgccctcccacatttcaagtaacctaaaatgatctttagcgctccttgtttattttctaaggctatgcttactcacctatcttcataatttcaaagtggactcgagagatatccttttgcctttaacgcacactcgaatgtcttccttattcttaac

SEQ ID NO: 10827 - DNA, 344 bp, Glycine max
agcttaagctccttcaactgcacaaggctcttaatatttgaagagtatccttgtggaacctttacccgatgaagacactgacaaaaacttatcttctccttcttggacaaagtatggcaggctgggggcaagtaaattttcttcccattagaccttggatgcaattgtgatcgtatacccatatcagctagatcttgacgggtattcaagccatccttcgtcttgccttaaatgttaaggagcgtcccaatcacactatcacaaacatttttctccacatgcataacatcaatacaatgtctaacgtcaagatcagaccagtacgaaagatcaaagaaaatgga

SEQ ID NO: 10828 - DNA, 524 bp, Glycine max
  unsure (1)..(524): unsure at all n locations
tgcgatggacgcatgttagtgatctcagtatctacgctngcatacttgatcccttttgaccctgcatgaaccatagaaaaatgcgcttcagacgaatctccatatatactattgacgcgtgcctgtagacgattgcttcaatgacatcacgatctattgcctgtaaacagtaattatttacctttaagaccttgaactcctgctcctcgagcaattagcatggcgcctncgcacgctctattccatctaccaccatcaatatngcatactcaatgagatcccaagacactacggagtggagaaaattctccatcaacattgtccagtggtcactatgaccactataccttggaatcgtaagctgcacaaactgctaactccaccttgctgtatgatatgaactacgtctactcgatagaatgatacactgcagtttcgttcattgactgcactcatttgtgctcgtacacacatactgctnttcatacgtgcactcaatatcgagcgcctacagatgatcattg

SEQ ID NO: 10829 - DNA, 331 bp, Glycine max
agcttgaagaatacatatgtgacatcaataccagaagagatacaaccagagttaaacaagatggtagcagccgcccaaatgaatctttctaccatgtctatgggacaaatccaccaatttactttgaaggtcgttgacaaattatgtaggcaacaccagtatttctctgacatcatgaacagaaaagccaaatataccagagcttgcaaaaaaccttacttggagatcaaatgcagagagaaaacttgtcattgctcaccaaagaaaaagaaagccttacaaactcaaacaaaggagaaaagaagaccattgaagtttttcaagagaagcc

SEQ ID NO: 10830 - DNA, 268 bp, Glycine max
cgtcaaacctgaagatttcttcctacatgtggaacccgggaacactgacaacccaaataatgcacaacttactcctgtgtctgttgatcaacttccagggcttaacacgcttggcatatctttggctcgcatagattctgcaccaaagggtataaacccttcccacactcacccttgagcctcggaaatccttatagtccttgacggtactctctatgttggatttgtcactcccaatcaagacggaaatcgtctctttaccaaagtg

SEQ ID NO: 10831 - DNA, 344 bp, Glycine max
agcttctatataagctgaaccattttatcaataaacacaagttgagttttattcagaaaattagagtttatctcttttatcttagtgagagtgattctcctaaattcttgagtgattcaagaacaccctggctgtatcaaaggactttcacaacctttgtgtgttgccctcgctggaaagagtgattctttccttccaatcatcttcacccttgttctttcaaaccacaattccagaaaatccacctctgcccagaattatctcgtggccataactcccattttacgcactcaaattaagtgattcttgagcctaaattgaatttcaaaacgagaactttcacc

SEQ ID NO: 10832 - DNA, 242 bp, Glycine max
  unsure (1)..(242): unsure at all n locations
gctttcgtaacgtttccgtgagtgatttcgcgaagggtttcgaccgttcttcggtgttcttcattcgttctacatcgntcttcagtcctcaacgggtaagtacctcanaccaagcttttcaattcattctatgtacccgtagtggtccacacttggtttcatgtatttntattctcgttttcatttaccttttatacccncttttgacgtgcttaagccattttatttaagtcatttctcgc

SEQ ID NO: 10833 - DNA, 341 bp, Glycine max
agcttgcctgtccgatgcagcagtaatgatggcccgggttatgttggggaatggttacgaacccggaataggtttaggcaaagacaacggcggcataactagcctgataaatgccaaaggaaatcgtgggaagtatggtttaggctataagcccactcaggcagatgtaaagagaagcatcgcgggaaggaagggcggtggtcaaagctcgcggttgagactagaaagtgaaggaagcccgccctgccacataagtagaagctttataagcgcgggtctgggagacgaaggtcaagtgttcgcaatatacgaagatgatgttccgagtacattggatttgg

SEQ ID NO: 10834 - DNA, 392 bp, Glycine max
  unsure (1)..(392): unsure at all n locations
gttgcggccgcgaaactatataacagcaccaaggttctagtataggctctctctgtctcttctctctctgctgccttcggctatagatataagctcatcttctcttagacactttttcgttatgcaattccaagtttgactgtcgttttagcaataaaagtttgttcttcaatctataattgtgctctctatcgattaatggaaggctaagtctccagcgttgatttctcttgaggatcaatcacaattctctttgaggttctattattattgataaatcttgtttgagttttcctcttcactaattactcttaatctgtagctattnattcatgcatgcttagtgcttgattaattgtctctgcgcttaacttacgttcatgcttaatgat

SEQ ID NO: 10835 - DNA, 340 bp, Glycine max
agcttcataagattcgatagatcctagaaaaatgtcttgaaacaaaattatcaatgaaaaaaaaagatgaaaaacataacattgctatataagaagactaaaaaggtatttaagaataaaaaatactcaaatatgtttttttttcttgaaataaagttatatattttacttttgatgcttaaatattttttgcttcacttttagtatcggtaaatctttttttttatccttgttatattgtcataaattcttttttgtttatattcaattcttacatataacaaattattctattatatctatttttgcattttaatttctttgatattttattcaattt

SEQ ID NO: 10836 - DNA, 339 bp, Glycine max
agcttctgacagtaggacaaataagaaagttctttagactgtcggcgagtggtggaggcagtttaaatctgatttgaccaggaaatgggcccttgcagccaacaaggacagtgtggacgacactatctgtgaaaaatacgacattagcaaggagaaatggacccagttttgtcaaacccgcagagatccctcgtgggaggtatttaattagtaatttgaattgttttccattaaaaattcagttcttataatagattgaagtaatcattttcaataattttttatttttgcaggatgtacagaaaaaaagcacaggccatccagaagcaaaacatcgcc

SEQ ID NO: 10837 - DNA, 458 bp, Glycine max
  unsure (1)..(458): unsure at all n locations
tctaattgattaaaccgatacgaganacttctttgcaagctacatacacttgtgtgatcgattacgatcggtctataattgattaaaatatagagttttaaacacataagagattttcttagtttagaacctttcttcttactcctacatgatgatgcatgatgcacatatgaaatgataaagactaagatgcaacacacaatacaacaatcaatacaaatttcactcaagagagttggacacactataaaaaaaatgacctatacctatggacaaaaattgtcactataaataaaaaattcgtaggtgaatatatgatagactttgtcctacggacgtttcttccgtcaactntgatggagcgtgtnatgacggctaattgtctatccctataggttntacctactatgtatagtatgtanggtaaagtcattaacttctacttacattctctaact

SEQ ID NO: 10838 - DNA, 329 bp, Glycine max
agcttgtacgcacatcgttcgcgtgtatgatatccactccacaaggtttgaagtagaggagagcttcaaccctataacgcaacgtggcagacaaaagtgggcagtaaacttgaatggtcgtcattgtcaatgcggaaggtattctgcgcttcactatccatgttcacacattattgcagcttgtggttacgtgagcatgaactactaccaatatatagatgttgtttatacaaacgagcacatcttaaaagcttactccgcacaatggtggcctcttgggaatgaagcggctattcctccttctgatgacgcatggacacttatccctg

SEQ ID NO: 10839 - DNA, 517 bp, Glycine max
  unsure (1)..(517): unsure at all n locations
ctgggtgaancccgttgaanncctgannnccnttgannncccttgatacccatgatattaccgacctatgaatactaagctctggtagtagatagctngatgttctatgcttcttgaaggtggtattccatgagaaatctccttgggaaagacantcttaatttcctggaataagggttaaacactaggagaaacataaatagttaactgaatagaattatcactctctctctctctcttctgtatcactccatctctcaagtgtatcactattcctttttttattcctctgaggcgccacactatgggctttctcttgcgctctcttttctcaatccgagatgggaatcacacacttctttcagggatagaggttaaagaataattctctggcatggcgctggagagatatcttggtgagaagccatacgcactgtttggtgcctctaaatgttggtcttataaaccatttcatttcttggctcacaataaactctctagaaaccttggattttgt

SEQ ID NO: 10840 - DNA, 335 bp, Glycine max
agcttctagaggaggcctcttaatgaagcttctagagaaagctacatgaagctgcctcggtaaaaacactgcccagccttcattaaccgttggatcttctctaaatttggtctacaactttgcaaaacaattttccaagatctgaccgttgggatctttgagaagatgtctggagtgtgctagaagcctcttaatgaagcttctggaggaagcctcttaatgaagcttctagagaaaactacctgtagctgcctcggtagaaacgctacccagcctttgttaaccgttggatcttctcgaaatctggtttgcaacttcacaagacactttaccat

SEQ ID NO: 10841 - DNA, 399 bp, Glycine max
  unsure (1)..(399): unsure at all n locations
cttccatttcaatntcgaccatctcgatatattacccgactcatcctgacatncatgtataaagntatngtcaattcaatttactcanggcttcngatcttaaatttgagcgtctcgatatattacangactcattcagacatccgagtaaaaagttattgtcgtttgaatttgatacgagcttncgttttcaatntggagcatctatcgataaattatgacactctgtcaggcatccgagtaaaaagttattgtcgtttgaattttctaagagtctccgtttatcaattggagcgtctcgctatattacgggactgaaacgaacattcgtgtataaagtattgtcatgtcaatttgctcagagcttctagtcatcaatttgagcgtctcgatatatta

SEQ ID NO: 10842 - DNA, 335 bp, Glycine max
agctttgcggatttggtcttcaccagtaaaaggatcgaaacgggtctaaaaaaggggaaaatctgatcatcatgctttgataaatgcaaaaataactagggcaactgaagaggatgagaatgagggagaaacccatgctgtgactgccattcctatatggccaagtttcccaccaacccaacaatgtcattactcagccaataacaacccatctccttacccaccacccatttatccacaaaggccatccctaaatcaaaccacaaaacccacctaccacacaaccaatgctaaacaccacctttagcacgaaccaaaacaccaaccaaaaagga

SEQ ID NO: 10843 - DNA, 267 bp, Glycine max
  unsure (1)..(267): unsure at all n locations
cttgaatcttgaaatcgaacttctcttgattcttgaatcttgttgactcaatctagacatcattctgtgggctatctgtcatcatctntgatatcatcgaaactacttgaatcaacttgattcatcatcatgaagctcgctgatacacctntaatggcctcaaatcgctgctggtgttcctcactccagaacctgtgtctatcacagtccacatctgcctgtggtgccgcactagaaccctttctagcaacatgcttcctggatctc

SEQ ID NO: 10844 - DNA, 483 bp, Glycine max
  unsure (1)..(483): unsure at all n locations
cacgcatgcacgcatgaggacggatgangagcgatctcacgcaatcaacccgaccggacgannnagagnnanatgagacatggaaaccccccgggaccncanagncgaccngcaggcangcaagccnggagcanggagagccattgccgccaaacccgcagaaggaacccgggccacgaaggacgaagacacccaccaacacaggaacgcaaaacaccaaccgcgcgaagacggccagaagggcaaaggacaacagcgggcgggacgcggccacaacaaggagaacgggggcaccgaacgcaaagaggaaagaaagcccccgcggcgggcaaccggacggacccccaaggccaaggacgacccaaacacagcccgggagcgaaacgccacggcaggcccacagcggagggnggaaggaaaagccaacccggggaggggggaggggggccccccaagcgaagccccacgcaaccccggaaaccc

SEQ ID NO: 10845 - DNA, 509 bp, Glycine max
  unsure (1)..(509): unsure at all n locations
cacacccgcgcactcatatagtcaccgaaggcggncgcgcaagaggacggatantccaacaccgacacaacgagcaagcgacncgcccgcgatgaagccatggatgacaccctgganancncanagcngancngcaggcangcaagcagggagcgcaaacccagtatcaccagacataccgacccagggcgagaacgacaagacgcacccccggcagcaaaacgaagaagagaaagaggaaaaccacccaccaagggaaaaaacaaacgaaaggaaacacgcaagcgaagagcgggagaacgcggacagaacggaacgaacacccccagacaaggaaggggagaaagaaaaacgagacaagcgcaacaacgacaaacagccccagaccgaagaccgaaacaaaacagaacaaacgggggaaaagggcgcgggcacaacgacaacggacaaaccggacgggacccccagcgacccaaggaccaagcggaaccccgccacaagggggaccg

SEQ ID NO: 10846 - DNA, 67 bp, Glycine max
tcactagtacggagaaaacggtacattactacgtgacgcggctgaggccctcggacggcgagacgca

SEQ ID NO: 10847 - DNA, 230 bp, Glycine max
  unsure (1)..(230): unsure at all n locations
caagcggggagccaaaacaccgataaaccanacaccacgacccagggggagacaggcaagccgcacccgcggccgcaaaaaacaaaagacgaaaaggaaacaccccaaccaggggaaaaaaaagacgaaaggaaangcccaaccaaagagggggagaaagcaacaaaacaagacagaaaacgccaaccaaagaacgggagaaggacaaaaagacaacaggagaagaagga

SEQ ID NO: 10848 - DNA, 291 bp, Glycine max
agcttcatgagagagtcaaattttaaattgttaggaaaaatattagctatgctaaacaagccaacaaagggagaaagaaggttgtcttcgaacccagagattgggtttgggtgcacatgagaaaagaaaggtttccagaacaaaggaaatcaaagcttcaaccaaggggagatggaccatttcaagtgcttgaaagaatcaatgacaatgcttacaaagttgagctgcccggtgagtataatgttagttccaccttcaatgtctctgatttatctcttttttgatgcagat

SEQ ID NO: 10849 - DNA, 424 bp, Glycine max
acttactctcgctgtaaccactctactgccatgatttcgactgaaacatagaaatgtcatcaatgaaacataaaagtttcaatgagacaaaaaagtcacaatgaaacagaaaaatcctcaacgaaatagattcaagcttgcacattcacatcattcacctggagagactctgatgcttctgtgcacaactgccttactctgccgctacaacaaaggaagcaacctcagcatttacaacactccaaagcttgtctgccctgacttgttgtgaagtgtaacatcacatttgtgatagaacctctggattcctttgattttttatgcagtctatgttaacatgtacaattttgtgaattgcctctcaacatgtcaatttgttctagtgtttacgctttaaccattttcttaacttttctatgcggcg

SEQ ID NO: 10850 - DNA, 190 bp, Glycine max
cggagggacccggtccgctcccgaaaagacacccaccgctctaagagagctgagcaccacccgcgcttctaggccaataagggaagggcaattctccgggagcgaagcgcccaaataaaggacgacaagaataccgactctcaggaggagaaaatcgccggcggcgggcaccgcgggtacccccccggcc

SEQ ID NO: 10851 - DNA, 348 bp, Glycine max
agctttgatattggtaagtatttgcctcaaattttctattatatttcctgtttctgaagtacgttttttctcactaacatctctttttataacattaatctctttaatcctctcatttgtactaattactttatcttacatttttcttccttttctattaaaaaagttgcccgattttgatatataaatgcaatttctcttttcattttaccaaactttatataaagatattttatttgattcaccaggacatatttgctgctggaactgatacttcagcatcaacactagagtgggctatggcagaaatgatgagaaatccaagagtgagggagaaagcacaagctg

SEQ ID NO: 10852 - DNA, 291 bp, Glycine max
agctttgagccaaaatcctgtttaccataaaccttgacccagggtgagaatgtcaatccttaccctcggaagcaaaaaaaaaaagaagaaaaggaaaatttccaatcaaaggaaaaaatagaggaaaggaatttcccaatcaaagagtgggagaaagctaaatgaaaagaaagaaaattcccaatcaaagaatgggagaaagacaaaaagagaaaaggagaataaggaaagaaagctcctgatcaaggatcgaaagaaaacagaataaatgtgcagagaggtctttggacc

SEQ ID NO: 10853 - DNA, 490 bp, Glycine max
  unsure (1)..(490): unsure at all n locations
ttctctgagtcnctacntcnttgactcatcagctgtgcgtagtctgtaacttcgctcctctttaacaaagctctcattttctatnaatattggtttgtattcaagagctttaccttattaaattgtggccgctctctttagagnagaatcaaaccctacccaatgcccactcgtactacaaatgtttggtttgtatcatgagcttatcaaaactacaaccaaagactattttatattcagtctatttactgtcttagatcctactgatatcttactctatctggtagatacagactttgcacgaagatgatgaactgattataggaggtagtgaacagataatgctagaagacatctcatactgcaattgtcttagcaaccaattgatacactagcagtaacatgttgtttataccttgttgactcttagtggaagccactcattttcaatatatttatccgcatctaattgaatttcatctatttcatg

SEQ ID NO: 10854 - DNA, 336 bp, Glycine max
agcttgaaccataatcagtgatagtgtgatccgaaactgcgagcgaacgacttgctttgagtaatagtctttccatcaatctctgaaatttagaatgaaatgtatgaatgaggacatgatgaatgccatgattgtatatacaagctaattgaccaaaaagcttaccttggattataattgtatcctttgcaccctttgtgagctaaattactatttcaaaattgaaccctaaacttgaattaatatctcctgataccttgcttggattctaggaaagcatatggttcaaggcaattcgccccaatttgggggaataaccaggatggaaagtaaaag

SEQ ID NO: 10855 - DNA, 246 bp, Glycine max
  unsure (1)..(246): unsure at all n locations
gagctgcatgcatgcaagctngagcttttataggattttggacttaccatcaacatcaagaccaaccatcaaaattcgcatttccttcttcgcgaaaagtcggctgaaaagctttgtgaatgtcagccccatttctccttcaactagtggatccctaatttcacaattcaaacaacttttcaattaaaaaaaatctccaaaacgaaatagagcttcttataaaattacttgtgcaaatgaggcttg

SEQ ID NO: 10856 - DNA, 124 bp, Glycine max
atatatatatatatatatatatatctatctctcaaatcgaatctcaacacacatacttaaagaacctatatatactcatcttgccactatctcacactatattaacgtatatattaaagaagtt

SEQ ID NO: 10857 - DNA, 307 bp, Glycine max
  unsure (1)..(307): unsure at all n locations
cgaccngcaagcangcaagcaggcagaagccgcaagaatagtacacaaatttggcaaaaaaagggaggaccaaaccgagncagggcacaccggagaaccaaggaaccacgaagccacgccgaacacaaagagaaaagccgaagccacaccgaaagacnccagaacagcaaacacccgaccaagaagggcgaaggangccaacaancnaagaaaaaaggacggcgaaaaaccacgaggcacnaccaaaaagaagcnaaacacacgcacaagcaacgcaggggggggacccacacaaaaaagaaacaaa

SEQ ID NO: 10858 - DNA, 210 bp, Glycine max
agcttgggaacaacgggaaggttcattcggcctataaggctccagagaacagtggcaaggctgctgacccgctgcccctattgacctccggcgaagaacatccgcatcatgggaaactcaccgcatacgaagccgctcttggtggaacatccaaaaacatcaatagcggggacccgcagccccccgaacggaagaacacgcgcaccaagg

SEQ ID NO: 10859 - DNA, 348 bp, Glycine max
agcttgagaatgatgggaaggttattttggcctataatccttcagagaacagtggcacagatgttgagatgcaatgaagatggacctgcaaggagaaatatctgcttcatggcaaacataatgcgaatgacagatgctaatatatcaataatggtcaattattcatctttagtcctttaaaagtgaaaatagcttaatataggaaataaagcgtgatgtccctcatacttataccaatcatatagatcctaatcgtctaacgcttgctggcttctaaactctatctaggtgtgagggtgcatatcaagaagaaatctgcgagtcggacttactgactttgggtgacat

SEQ ID NO: 10860 - DNA, 303 bp, Glycine max
  unsure (1)..(303): unsure at all n locations
agctttatagcagaaaataagtttgacccattatctncgaattaaaataacttaatgccattaacctagtgaattaaaagaacttaatggctgagtgtaactgaaattgtggcaaccaaaagtcaccccaacagtcactatttggtctcccaaaaggctgatgcctaggttgccaattgggcccttattacaacttgaactaaacctaactaaagcccttttagttgattaacctaaaacatattttggtcagccgactttacaggattgggccattatttagacaattgacactctaaattg

SEQ ID NO: 10861 - DNA, 243 bp, Glycine max
  unsure (1)..(243): unsure at all n locations
aaaaaagggagaaccaaacctagcctgggtacaanngagaaccaattaattttgaaggtacgtcggaatttaatgagaaaagccttatttataccgaaagactctattatatcaaatactcgatcaaaaatggttaatggtgttaacaatctaagaaaaaaggatggctaattaaccaatattaattttctaaaagaatctaaacatacgtacaagttactcattttgttttattccttaaaa

SEQ ID NO: 10862 - DNA, 323 bp, Glycine max
agcttcaagaattatggcctctacaaactacttttttcccgagggaaattctataaatagacctcccatctttaatggagtgggttaccactactggaaaacccgcatgcaaatctttatagaggcaatagatttaaatatttgggaagccatagaacaaggaccttatgttccctctataatagccggaagtgcaacaatagaaaaacctagagcagattggactgaggaagaaagaagattagtacaatataatttaaaggccaaaaatattattacatctgccttatgaatagatgaatactttaagggtttcaaattgt

SEQ ID NO: 10863 - DNA, 298 bp, Glycine max
agcttgggaataatgggaagttcatttggcctataattcttcagagaacagtggcaaggctgctgaaatgttgtttttattgacctctggtgaagaatatctgcatcatgggaaacttaatgcatatgaagttgctcttggtggaagattcaataacatcaatattggggacctgaagctttttgaaaggatgaatatgggtaagaaggtgggacctcaatcatactatgaccatccttatactccaacttcaccaatcggcgaactaaattgggtttattaccatgggtcttcttta

SEQ ID NO: 10864 - DNA, 284 bp, Glycine max
agcttaagcttgatccatcattcaatttttaactgtatcagctatttaaagcctacacaaatgttgagttgcaatgaagttgtaattgcaagttgagagatagactaagtaacaacgagttagtgatatacaaatgctaatatatcaattatggtcaattattcatctttagtcctttaaaagtgaaaatactataatatagtagatgtatcttgctggcccttaaatctatacaaatcaaaatgatcctaattgtctaattcttgctggtgtctaaactttat

SEQ ID NO: 10865 - DNA, 286 bp, Glycine max
  unsure (1)..(286): unsure at all n locations
ctagtacttgtatagcatatcangactcaaattttgtcatgatcttatattatcagaatngaattatatattgctttggtaacggtcatggacatataattattacggatacaatcaccatacgtaatattaatatagtaaatgtaaaagtaactctaacgagaaaacgagacaataggagccacagtgcctaggctatatgaatatcgactcgtaacaaccaacacaagtaacaacatccatgtcaaccgacctactgtttcacatttcaaccatgacagcgatt

SEQ ID NO: 10866 - DNA, 202 bp, Glycine max
  unsure (1)..(202): unsure at all n locations
agctnaaaatttagtctagtttttgnnaaaacataagcacttagacaatgaaggaaagctggagttgctgcacatgatgtccaacgttatgtcaaagaataagatcgggctgcacaatgcacaaggcaagatgaaatgtcaaatgaagaattgaagctgtacgattcacgatgttcgatacaatgtccaggacattcctctt

SEQ ID NO: 10867 - DNA, 535 bp, Glycine max
  unsure (1)..(535): unsure at all n locations
acccaactcgcacacccaaacgcagaccacgaacacgngaagcgcacacgtcgaaancggcaatcgaaaagcgcacaagctgacggacgaccgggacgatcngacggccgcattgaaaaccatacgagtgaccccctnggancaccaagagccgaccagcaggcaagcaagcaaaagcaggaaccagcagataagncccaactgcaccagcaaccgaaagccaacacaaacgacgacccgcaacgaagccgcaacggcaaggcgacagaaagacgaacccacaacgagagagcgaaacacaaacgccaanacaccacgcacggccaacgacgcaccacaagcccaccaaaagcgaaaacacgacaaaacagcagacgcaccacgcggccccacaaacccagacaaaacaaaacgaccccacacgtcaaacacgcgcgggcaactaaacacaacaccaagagggggcagcaaccagagaggaacaccgaagcggaccaaccgaacgcgcgcgacaacaaggaacgggaacaacccc

SEQ ID NO: 10868 - DNA, 362 bp, Glycine max
  unsure (1)..(362): unsure at all n locations
agcttagacagagaagaagagtgctttatagttttaagagagngcagatcgagaagaagagagcgcgagcaaataggactcgcgtctgatatattttaaaatgtaagtccaacatcggttttcaataaaaaaaacaccgatgttaacaaaatgatgttaacgttaacatcagttttctggaagaaaccgatgttaacttatcatacattaacatcggttttcaaggatttattttgggttttatttttatttgtagtttcaaatactttatatttaatatttatgaaggtgacgcgataaacaaaaaacatgccaccacaataagaatcataagtgacatgctgggacaagttgtaaaaaag

SEQ ID NO: 10869 - DNA, 281 bp, Glycine max
agcttagacagagaagaggagtgcttacatagttaagaagagagggcagatctagaagaagagagcgcgagcaaataggactcgcgtctgatatattttaaaatggtagtccaacatcggttgtcaataaaaaaaacaccgatgttacaaaatgatgtaaccgttacctcagttttctggaagaaaccgatggttacttattatacattaacatcggttttcaaggatttattttgggttttatttttatttggagtttcaaataccttatatttaatatt

SEQ ID NO: 10870 - DNA, 310 bp, Glycine max
  unsure (1)..(310): unsure at all n locations
agcttgctctaaattcacanattattttgcatttatgggaggaggttatatgccatttttgctttaagagtagtgtcccactggtaaaattaactttccaaatgtttgccttcgcaggaatggccccgaggaagcttgcctcaaagaggtccaggaaggacaaggcggccgaaggaactagttccgctccggagtacgacagtcaccgctttaggagcgctgtacaccagcagcgcttcgaagccatcaatggatggtcgtttctccgggagtgacgcgttcatctcatggacgacaagtatactgattt

SEQ ID NO: 10871 - DNA, 307 bp, Glycine max
  unsure (1)..(307): unsure at all n locations
agcttgctctaaaganacatataagtttgtatttatgggaggaggttatatgccatttttgctttaagagtagtgtcccactggtaaaattaactttccaaatgtttgccttcgcaggaatggccccgaggaagcttgcctcaaagaggtccaggaaggacaaggcggccgaaggaactaattccgctccggagtacgacagtcaccgctttaggagcgctgtacaccagcagcgcttcgaagccatcaagggatggtcgtttctccgggagtgacgcgtccagctcagggacgaccagtatactga

SEQ ID NO: 10872 - DNA, 225 bp, Glycine max
  unsure (1)..(225): unsure at all n locations
tataatttacggcatatgtttcttgtaaaactatctgctattggcattcttgataatgcgaacaatctctatgtaacacaacttgaagttgtattgaatanaattatggtcaattcattagtgcctgatgtttcaaaaactcgtgagtctgcgatctgtgtcatgatcgttggtaattgttctccaccgattatatgacgcttgctcgagaataggaaaccccta

SEQ ID NO: 10873 - DNA, 265 bp, Glycine max
  unsure (1)..(265): unsure at all n locations
agcttttggaaagagaggaagattttttggtgttatatcgagttaatcnagtatttcatttcgactcaatgactctaccattggctttgtttttctttattttttctctaagagcaaatactaattctcaaaaagtattaatagaacgatttgggtgatagcaaatatgataaaaaaatttgaaatgagttatttcgacggataattcgtgtttacctttttactcctttttctagtatcctgcacaaaaccatgagatttgatt

SEQ ID NO: 10874 - DNA, 364 bp, Glycine max
agcttagacagagaagaagagtgcttagatagagaagaagagagtgcagatcgagaagaagagagcgcgagcaaataggactcgcgtctgatatattttaaaatgtaagtccaacatcggttttcaataaaaaaaacaccgatgttaacaaaatgatgttaacgttaacatcagttttctggaagaaaccgatgttaacttatcatacattaacatcggttttcaaggatttattttgggttttatttttatttgtagtttcaaatactttatatttaatatttatgaaggtgacgcgataaacaaaaaacatgccaccacaataagaatcataagtgacatgctgggacaagtgtcaaaaaag

SEQ ID NO: 10875 - DNA, 280 bp, Glycine max
  unsure (1)..(280): unsure at all n locations
agcttgccagctntatggacctcattccaacattcatcttgaaggctntatgaggcatttttgaaggccatgaagacaagttgaagcattcgaaatcaacacacattaagatagatctcttggtgagaaatctgtatttttagcttcaaatctttctgtgagagttacccacttatgtcttgtgctttcaaagcttctaatattcttagatagaagtgtaaaacttagtttccgagtcaaattcctcttgtgaggagaggatctggcgtttgtgctattg

SEQ ID NO: 10876 - DNA, 358 bp, Glycine max
agcttgctctaaatttacatttttgtttgtatttatgggaggaggttatatgccatttttgctttaagagtagtgtcccactggtaaaattaactttccaaatgtttgccttcgcaggaatggccccgaggaagcttgcctcaaagaggtccaggaaggacaaggcggccgaaggaactagttccgctccggagtacgacagtcaccgctttaggagcgctgtacaccagcagcgcttcgaagccatcaagggatggtcgtttctccgggagtgacgcgtccagctcagggacgacgagtatactgatttccaggaggaaatagggcgccggcggtgggcaccactttttactcccat

SEQ ID NO: 10877 - DNA, 365 bp, Glycine max
  unsure (1)..(365): unsure at all n locations
agcttgtgaacatgaactagttgacaggccatggaggngacagagctcaagatggagagacagaaaaagaagctgcagatagaagagctggagaaaattgtgaggctgaaaaatgcagaggctgatatgttccaattgaaggctaatgaggctaaacgagaggccgagaggcttcagaggattgctcttgccaagcaagataaatcagaagaagaatttactagcaactacttgaaacaacgtttaaacgaggccgaggccgagaagcagtatctttatgagaagatcaaattgcaagagagttctcgcgcttcgcagagcagtagtggtggtgacccttctcagatgctgatctattccaaaat

SEQ ID NO: 10878 - DNA, 452 bp, Glycine max
  unsure (1)..(452): unsure at all n locations
tatcattgactcccctnnntcnctaactcactagcttgacaatgctatattcaatgcgatagtctacagacgcttttgcacacattggtacacaagattagtgtgtaatctcaagactatctcaatgcttcaattagctgaagagattngattagacaatgcaacttattcaacatccatttgactatcttatcagaactgcaggtctcccaatgccaattactaatcgaactacactacataccactacatacaacacaactgcacaacctcccctctacaactgctagtgcataagatacataactagaatgcatgaaacagagatgaaaacctattgggaagtgggagagttccctccctaagtcggagtacagctctactgtggcttacacgctggacttacaagcactctttcctgcctatcatctcccagtacagtagatgttgac

SEQ ID NO: 10879 - DNA, 270 bp, Glycine max
  unsure (1)..(270): unsure at all n locations
agcttgagattttttctaattttgacgangngcgcngaacctgactngngcgctaagcgcgttatcccttttaactttttcttcaaggttttttttcttcaagtttttgcatcaattttcttccaaagcacttgaaattttcttcttttgaatcctacttgtcaaaaattacaatggtattaaattctttattatttcattaaaaacaacagtatagtgaagaaattttaattcttttttaaccaaattggctatcaattaaactccaat

SEQ ID NO: 10880 - DNA, 362 bp, Glycine max
agcttttatctttttatctactgaagaatattacactgcattatcaataaaatatttaaacaatgacatttggttaaggaaaaacttaagatgaggatatattaggacaattgtttctactatgaccatgtcaccggcaaagtccacatttttttctacgtggtcgttcattttcgtcttcgtccatcttagtaagaatgcgagttgaaacgggacgaccctttgcagttctctttctctttggatcaagaccccattgatctccttcatattcttgccacattgattcgtgtggcaataaaccaaaggagttgtcgtaaatatgcaaaatgtgttgtaaggtgaataacatcggcacatgg

SEQ ID NO: 10881 - DNA, 515 bp, Glycine max
  unsure (1)..(515): unsure at all n locations
gtcgtgctgagncctnnncnttagtgacagcatgactcaacagctgcgtgacttcagcttattcttaatcaatcagctgtggtctaattgtctgtaataaataccattgagggcattatgctacagaatgactacaaaaaggccaatgttatagatgtcaaggatgaaactcatcttaaaaatgagaagacgtctcaatctgccaagaatctggatctctatctatgtacaaatggctgcgctatcgcatagggggaaaaatataaattttaaattgtaaaactataaaagactgtgctataatggactgtactagaatctttattatattacctcctgacgccatcggtcattctgctaatattggttcctacaatatctcacaccgggcctataatggataatcacatctgggagtgacccaacttatgcagtttttgctatgttctaaggcttcgcttatggccgtgatttgcctcgctggcnagtaaattcttaatattgggttctgtccg

SEQ ID NO: 10882 - DNA, 338 bp, Glycine max
agcttctttttttccgctctggtgctcagaaaatcccaaaaacaaatccctcttattactagctatttcgaatactttagttcctgaatgtacaaccttcaaattgttgctcgttcccctctttcttttctgcaaaaaagaaaatcaatatcaaagaaaacatggatgaaatcctaacaacatcaatatcaaagaaaacatggatgaaatgacaattaaaaagcacaactacctatctttcagagtcctttggataatttgtcttgactccttatgtgggggggttttgattaataatattatacttttgccttccagaaaaaacttatgactgatcc

SEQ ID NO: 10883 - DNA, 516 bp, Glycine max
  unsure (1)..(516): unsure at all n locations
atactgttgagnacntgatnccctttgttatgtagcgatgatctcatctagcttgttcttgtcgaacttcttctatggcccaaccatctcggtcgagacacttatctctngtgctgatacatacttattgtcttcattgacttgactttatgaactcttactagctgctttgtgactcttatgctaaacgaacatngctggcaagatcaagagtatggtaaacatacactcaatgaacatatgggttacagttatgacaatcactgggtacactccagtttagtctctaactgctacagtccagcatacactcgtgcctggtgtgtacgtgtaatacttatgccatgtcacagctcaatgtagactagccttcacagtctgcacagattcatctgaacttccctggatctttttctgaatagcttgaacttcaccatgattctgtttgaccaacactgtaatcagctgtgatgtcttctacgtcatctatcctagcaattactatcgcaactagct

SEQ ID NO: 10884 - DNA, 371 bp, Glycine max
  unsure (1)..(371): unsure at all n locations
agctttcttacaagccctaaatgatattnnattttaggatcaactcactntagcctccaattaccactaaccccaaatttagcttttcaaaccctcaaaatctcacacttttccactcacatcactaccattctcacatttaaccctaggttaactctccccatcatctctaccagttttctaccaacaatttcagcacacaaacatcacaaagcatcatcatgaaaccctaaaacagaatgggtagcgttactcacattaaacatgtcaagtttagcatgctttcaacaaattccttcacaaataactaccataaggcataaacctaatagaactacccatcatatctcccaaaaacccaatacccacga

SEQ ID NO: 10885 - DNA, 346 bp, Glycine max
agcttgcagacggaggccaaatgacattttaaactaggatcaactcactttagcctccaattaccactaaccccaaatttagcttttcaaaccctcaaaatctcacacttttccactcacatcactaccattctcacatttaaccctaggttaactctccccatcatctctaccaggtttctaccaacaatttcagcacacaaacatcacaaagcatcatcatgaaaccctaaaacagaatgggtagcgttactcacattaaacatgtcaagtttagcatgctttcaacatattccttcacaaataactaccatagggcataaacctagtagaactacccatcata

SEQ ID NO: 10886 - DNA, 295 bp, Glycine max
tctcccttggaggacttgatgtaaatacctgtatatctatttaatgatgttttgtatgttcactgtgctatcagaacttcattctaccatgttttttgccttgatcacgtagatgcatgtgttttaaatatcattcaacattggaaactggtctgattcttagaacttgataggacgaggctagtttatcgtattatcacgagggatcggggtacggtaatctagttgttgtatgtttgtcttaatgcggccttggtccagtttactcaacaagaggaatctgcggatgatgctt

SEQ ID NO: 10887 - DNA, 618 bp, Glycine max
  unsure (1)..(618): unsure at all n locations
atatcttganancgtgatancagactgacatctnnantacgcagcngatgantcgagtgtaggtngcagacaattcgtgctagacgatagttttcttatcgaatntaaactaatgctaaaatatacaagataaaacaaggagagaatcacagatgaattgtngctatataaaatatgcatcgataaagaagtacattatatggtagtngactaaatatnatattcaaagctatagagatacactagtagtagtacacatggtaatcaatanggctgaaatacagcataagctctaattgattggctcgatattacgatgattcaagatatgatagtacaatattgcactttatcagagttgtgtttgaccaatttcatagtattagaatgttattaaaaaatgtacttttgaaggttcttctaatactgtctaagactatcctacatgttgtaaattaacatattagataaggatactcttagattattcattgctcacacaagagtagtgtgagtgtaaatacttcctgctattaggcataagagtgatataggtatagataagtaattataaatccataaataatagaatgacttagagtggntcaatttattccg

SEQ ID NO: 10888 - DNA, 337 bp, Glycine max
agcttcccagctatggagagctaaattctctgcttggccttccttgcaggtacttgatgtaaatacctgtatatctatttaatgatgttttgtatgttcactgagctatcagaacttcattctaccatgttgtttgccttgatcacgtagatgcatgtgttttaaatatcattcaacattggaaactggtctgattcttagaacttgataggacgaggctacgttatcgtattatcacgagggatcggggtacggtaatctagttgtagcatgtgcgacttaatgcggatctggtcgagtctaatcaaacaagaggaatctgcgggtgatgcttgat

SEQ ID NO: 10889 - DNA, 466 bp, Glycine max
  unsure (1)..(466): unsure at all n locations
ttcatgactcatagctcaatgataactcaactgtgatcatacactttggatcatcacggccttttatcaattatacttgaatcagttgcactgtatcatcatcttgtatcatacanagtattgtgaaatctttactnaatctgcaacattgtctcatgactcctcattattcctttagacctaacgctgactcactgattttattttgctcataacttgacctgaacttgctataacatcctgtcttgtcattccctttgtagcatctgaacaacactttcaatatccgtccacctctccttttgctgtcaactctagatattatgcatgttaccatttatctccctgcctaaactcctatatcacgcactacatactctgtcacacagcatttatcntctctcaagctccgtacacttcttcaactttatcatgggggggaaatgagcctatgcttcgactcccg

SEQ ID NO: 10890 - DNA, 319 bp, Glycine max
  unsure (1)..(319): unsure at all n locations
agcttgtaggattatggggtatccttcacatgtggnactagttggcggtcaggcgatggtgcacaacaagtttttccacatccacaatgcgcgcataaacccaccatcccctgtagcccacctccaactgagctcacgtactcccacgtagcccatatcctcgtttctctcaacaccgggtccccatcaatcctcccaagcttccccaacatcaaattaatacaacattcaaacagcacaaactatcacagccaagaaaacagagcaaaggcagaaaactttgccaaaacaccaaccaaaatcacagcttttctcactt

SEQ ID NO: 10891 - DNA, 82 bp, Glycine max
  unsure (1)..(82): unsure at all n locations
gctgtagcaactcaaagtcactctctcttctntatccatcaattcgngctcccctcttcttctctccctcttctttctcatt

SEQ ID NO: 10892 - DNA, 370 bp, Glycine max
agctttcttacaagtcctaattgacattttaaactaggatcaactcactttagcctccaattaccactaaccccaaatttagcttttcaaaccctcaaaatctcacacttttccactcacatcactaccattctcacatttaaccctaggttaactctccccatcatctctaccagttttctaccaacaatttcagcacacaaacatcacaaagcatcatcatgaaaccctaaaacagaatgggtagcgttactcacattaaacatgtcaagtttagcatgctttcaacaaattccttcacaaataactaccataaggcataaacctagtagaactacccatcatatctcccaaaaacccaatacccacg

SEQ ID NO: 10893 - DNA, 334 bp, Glycine max
  unsure (1)..(334): unsure at all n locations
agcttggagaggangcttaatggatgaaaagtaagagagaaggggggagcacgaaattgaaggaataaaagaggaagagaagtggaactttgaagtgtgtctcataagactttcattcatcaaagttacaacaagtgttacacatgcttctatttataaactaggtagcttccttgagaagctttcttaagaaaacttccttgagaagcttctttgagaaaacttccttgagaagctagagcttagctacacacacccctctcataactaagctcacctccttgagaagcttccttaagaagattcctaaagaagctaggagcttagctacaca

SEQ ID NO: 10894 - DNA, 306 bp, Glycine max
  unsure (1)..(306): unsure at all n locations
agcttcccagttatggagagttattcctctgttggttcttccttgtaggtacttgatgtaaatacctgtatatctatttaatgatgttttgtatgttcactgtgctatcagaacttcattctaccatgttttttgccttgatcacgtagatgcatgtgttttaaatatcattcaacattggaaactggtctgattcttagaacttgataggacgaggctagtttatcgtattatcacgagggatcggggtacggtaatctagttgttgtatgtttgtcttaatgcggntttggtcgagtttagtcg

SEQ ID NO: 10895 - DNA, 195 bp, Glycine max
ctagattcaaaatccatgtcatattcaaaacttctattctcgacatcaagctatctcaacaattttacgtcaattacatctgctttatcatgttattatcatcaaccctgaaactcactgtactcccttacatcttcaatgtaacacaaaccctttgataccttgatatccacgtaaatcaaccatagcgttaat

SEQ ID NO: 10896 - DNA, 339 bp, Glycine max
agctttggaacgagaaaccattatgcccgaatggaagaacacgaccaaagcaaagttttgaggggctttatagggcagcaatagtgagctcaagctccgaagaggtgaaaggaatcatcacgggtcaaaggcatgatcttgaaggacgagctaaaggtttgccttaggtcgaaaagaaatttgtcccaacagttaagcgagactgaagggaatatgtgggccatcatcgataagtgcaaagagaagctaaatctagcggcgactcacgagcaaaggctagaggatgagtatgccaagatatcagcagaaagggaagcaagggaaagggtaattgattca

SEQ ID NO: 10897 - DNA, 321 bp, Glycine max
  unsure (1)..(321): unsure at all n locations
cggtacgtctcaggcttttctgtcgtttttacggatttgctcanagaccctttccgaatatctacttatatcttttgaactttgaattggtctgatgccatcagattaaacgatgttaaaccctcatgatattcgacatccggattgtcgaggactattcgatgagacaaactttgttttctacaaaatccggaaatctagcccgacatattactttaccttattcatccctcgttcagaaagtattgctcaagtttatattataatttgtggacaactaacgttaattacctttgtactattttatttgatatttttttt

SEQ ID NO: 10898 - DNA, 298 bp, Glycine max
  unsure (1)..(298): unsure at all n locations
gagaggaagcaacaatggaggaaaagatatagagaaggggggagcacgaaagagaaggaataaaagaggaagagaaggggaacnnacgaagagggccaacataagacncgacacacagcaaagacacaacaagcggaacacacgcagccagacagaaacgaggtagccaccaagagaagcccgcaaaagaaaaccgccaagagaagcagacgagagaaaacacccaagagaagcaagagccgagccacacacaccccgcacagaacaaagcccacccgcgcgagaagcgccccaaaga

SEQ ID NO: 10899 - DNA, 353 bp, Glycine max
  unsure (1)..(353): unsure at all n locations
agctttatgtctctttgnatatccctttttacttttgggatctttccaatatcttctagcatcaagtcaagacaatgtgcagcacatggagtccaaaatatttttggtctcgtgacttgtaaaattttacctaaaaagatcaaaatcaataaacttgtatgagtagtgtaacaattaaaagttataactataaaaaaaaaacttcattaagcatgattgaattctcatccgccaacacataattacttccattgtccgtcaccacttgaataacattcttttctccaatctcctcaacaaagctatccataagctcagagatctttcgaccagtcttcatgtgttcaaaagca

SEQ ID NO: 10900 - DNA, 494 bp, Glycine max
  unsure (1)..(494): unsure at all n locations
gcacgacatccacccgcactacgaaaggcatcggacgcaaacgaatntaacacacacccacgcgcgcacaccacagacccatgaaccatgatgacacctgcanaccncaaacnnacngaaaggaggaagcntgacgaacccaaggagtttccaacaacttttacaccccttgggaggggccacacgaggaaggccacgataaacccaggagccaccaggaccccacaacgagccaacaacaaacccgaagaaaactacattatccacacaaaaaggacactaccccatattagcatagagggtgcgctcccaaaggaccgaaagaactcgcctgagaggcccaaagtgaaaaaccaggcccccacgggcccaccaaaaacaacaaaaagaacaaccgcccaaccacccacgaagccccgtaagacaaaaagacaacccaaaaaagggggggcggcacaatggaccccaaagcgcccacgacccacacgacaacc

SEQ ID NO: 10901 - DNA, 355 bp, Glycine max
agcttgccaacccatggaagttcctactatctcccacactttttgggatgggccattcttggatggccttgattatctcaaggaccacttggaccccatttatgccaactacaaaccctacaaaaactatattatctacacaaaaagtacacttctctatatttgcatagatggtgttgttcctaaagactgaaagaacttgcctgagatgttctaagagataatctatgctcctactgtacactaaaatatcatcaaaataaacaactacaaatctactctcgtaactccgtaatacattatgcatacacctcataaaggtgcttgggcattagtgaacccaaaatgcatcact

SEQ ID NO: 10902 - DNA, 141 bp, Glycine max
ttatcaattaaagctgtcagttcggcacaataattcaatgttctccttgctcagcaagggttccacaactcgtcagataacgtcttctgatctagtacaacaactaccttactacgcaaaattttaccagacccaccccct

SEQ ID NO: 10903 - DNA, 497 bp, Glycine max
  unsure (1)..(497): unsure at all n locations
caccaccacactcccacggacataacgacaggcacgagaccacgacacaacaccaccagaccagcgcgacacgaccgacgccncntttgaagccctgaatgaccccntcgganccccnacagcnganctgnaggcacgcaagctcgcagacccacaggaagtatccccganactagatacaagccggccgaccccaagcgaggaacgggggaaacgccgagaacagacgacagaacggcgcaccgaaagaaacaagggaaacaccaagcaacaaccaaccaaagagcagccacagccacagcatgacacgagaacagcagaaccgcatagaccaaaccgccaaaagaaaaaggccacagggctggacagacaccgaaccacagcacaagacagcaccagcgaccccccaactgcacgagaaaaatcaagcaaacgacgcacaagaggacgcaacgaccaaggaaccaccgacagacgcaagaacgaaacgccccccc

SEQ ID NO: 10904 - DNA, 288 bp, Glycine max
cttattctctctctaataagctagatctttgaagtgaatgaaagataaacagaactccttttttcttataaattattattttacttcaacttccagtgattaatatctcatcacttctatcatctgctactattgcatgatgctatttctatacaatatactgctttatattcttacaacgttaaatcaattcaatgttgacgctggctttcgttaagccagctcacctaaatgcatcctatcttaaaaatatttcaatacactcctcaaaatgtaattccccatatt

SEQ ID NO: 10905 - DNA, 297 bp, Glycine max
agcttgtagaccgaacagattatttttctatactaaatacctgcctgcctcccccttgtgagtatcgggggtaacttctatatttgatgaattaattgtgcactgaaagtaacattagaaacaccaagcaataaccatctaatgatcagttacagctacattattacacttgaatatctgaattgtatattctaaacgcctaaagagaatgtccccatggctgtttatttatagtaatcaatgtttaattacagtaacaatctaatcctctaattgtagggatactaatcaagctaa

SEQ ID NO: 10906 - DNA, 304 bp, Glycine max
agcttgatgcaaatcatgttatctcatacttttatcaatggcatcaaaattttatgtttataaccatacctttgatactgttccaacttgtgttaatttcttgattattaatgaaatttcatagtcgatgtttacttaaaaaaggtgatattattaataaatattttttcactttaaaaaaaaatggatacactgaactcgttcatgtttacatcaacatgaacgagtaaaatggatacattaaatcgagttcatttaatatttatacttttgagaaatagtaatttatatttattcataaact

SEQ ID NO: 10907 - DNA, 492 bp, Glycine max
  unsure (1)..(492): unsure at all n locations
atctttgcacatgangncnttgatatcgtgccattgactcgcgcatgcacgtcagaggcttatctgtcntacatctagacagcactgngtgttgctgggcatcatgacaatcgaagaagacncgctgttactcctangtagagtcacgactgtgaatgactactcttgctcaagacgtgtgtcttagatggatcatgctagcgcatgtgcctctacgtgttcaatgccgtagcatttaagcattacgcatccgtgcatcgttcaatgcttttgccaaggtaagacgctacaattgtacacttacaatagctctctgatcgtagcttgctgtggaatgcaatcgcatgcgtgtgcgcgacattgctggtgcagtgttcgcataggcttacagctgtatgcaccagcatactgctctcgcatgtcagaacaggagacgtgacttgagtgacacacgctagctagtgactgactcttccgaagggcttggttctt

SEQ ID NO: 10908 - DNA, 367 bp, Glycine max
agcttgccaacccatggaagtttctaatatctcccacactttttgggatgggccattcttggatggccttgattttctcagggtccacttggaccccatttctgccaactacaaaccctaagaaaactatattatctacacaaaaagtacacttctctatatttgcatagagggtgtttttcctaaggactgaaagaacttgcctgagatgtcctaagtgataatctaggctcctactgtacactaaaatatcatcaaaataaacaactacaaatctacctatgaaatcccttaagacattatgcataagcctcataaaggtgcttggtgcattagtgagcccaaaaggcatcactagccattcata

SEQ ID NO: 10909 - DNA, 410 bp, Glycine max
ttcgtgactcctgaccctgactcatctactgcgcactgcgcacagtgtctcacacttctggactcgagtcatggctgtgatacacccttctatcccctcatttgaatcttctactcaactacattatacactttctccagtcatctcgtatttctcttacttaaaacgacacgtgcaaccatttgtcccctcaattagttcactctcttaattattcgatttatttacaataccgcatagtacctgattgatgtgatctatatacttgtgttatactcactggtttacaggaaaaatacaacttttaatttctagtaccaaacgaatgatatgaccaaaaatttctaaggatcaggttgaactatatcaaacttctactcatttattttcatttcatctctatatattct

SEQ ID NO: 10910 - DNA, 343 bp, Glycine max
agcttgtataatggctagacatgaacatgtctgtgcttggttaggttcagggataaaaggggtgccccacattatttccatgacacaaatgcaaaaaatgatgatttggatactttatgcagaactggacatgcatgcgcctatgctgacgctcaagtgtcaaatttttatgggcatgtgacgctagggctcaggattcatttcctctatgttaaatcaacccaatgattgcaaaatatgttcttttaacaatgtgtgcattcatccgagtccatttcggacggtcggtgaaatttcacagtatttacccttctagtgtatacacatttttttaaaaactact

SEQ ID NO: 10911 - DNA, 325 bp, Glycine max
agcttgtagacctaagtgatgttctttctataccagttacttgcctgcctcccccttgtgagtatcgggggtaacttctatatttgatgaattaattgtgcactgaaagtaacattagaaacaccaagcaataaccatctaatgatcagttacagctacattattacacttgaatatctgaattgtatattctaaatgcctaaagagaatgtccccatggctgtttatttatagtaatcaatgtttaattacagtaataatctaatcccttaattgtagggataataatcaagttaaatcaattacaagaagatagtaactaact

SEQ ID NO: 10912 - DNA, 444 bp, Glycine max
  unsure (1)..(444): unsure at all n locations
tcgttgattcatgcgccttntgactcatctagctgggattggaccataatggacaggcgcgctcgtgcaagttcctccatgcctaaccctcctggcactcatgctacgctcacagcattctgtcttacacggtccatatctcagttccactcaaaacactcacgcagcttcgcacaacagcagcgaattgcacctacaaacagtttataaaccgacatctctcatctacgtgacatcaatgctgacatggctactctgacgggaccacactaacttcgctactccacaccccactttgcacaatcgtgcatgcgatcgtatgcataatcctcttcatgtaaactagcaatgtacgtacagcactaccgccaatggaaccatagattgtgacataggatacactcccgctcattcgatgtaccatcaaatctacatctagttctg

SEQ ID NO: 10913 - DNA, 358 bp, Glycine max
agctttttctctgtacaccttctttcctatacttgaaaaactttttctgtatacacacacattaaaaactctttctctttatatcaacatggtctatataaaacctctattccttttcaaagatttcttcttcctttttcaacatacactcattgtttatacaaaaattttctttatatacactcattgctcacacacaagaatttcttttcacacattatttatacacacaaaatcttttcatacactttttatatacaaaaactcttttcttttcttcatatacagatatgacattttgttcacaacgcctcttttttttctaatcttggaatatcaagaggttgtcattttattt

SEQ ID NO: 10914 - DNA, 312 bp, Glycine max
aagtcacctgcagctgcagcttgagcttattcctgtttcaccataattcttgacccaaggtgagaatgccaatccttatcctcggaagcaaaaaaagaggagaagaaaatttccaatcaaaggaaaaaggagaagaaaatttccaatcaaagaacaagagaaagaaaatttccaatcaaaggaaaaaaaggaagcaaagaaattcccaatcaaagagtgggagaaagaaaaaaagaaaagaaagggaattccccacccaagaatgggagaaagtaaaaaaaagaaaagctcttgtccaaaaaaaaccaaaaa

SEQ ID NO: 10915 - DNA, 487 bp, Glycine max
  unsure (1)..(487): unsure at all n locations
tatccctgantacatgagncgattgacttatacanttatgcctctnctacaacgtcttgacacacattaccattaatgcccttcatcatgtttctattaatattcactactcagggattgtctattaacacattctgctaatacatcatctctaagattgggccaaatgacatgtcacttgcatttatccatctccaactatataattgaatcccatanggtcatatctttttagtttgtacaaccatcaatcactattcttgtacaatgataataaagaatttgatagtttactacacacatatttatttttgaaattctcaaatatttctctcatttgttctccaggcatgcagtttgtcttaacacattaagatctaattgttgaatttggcacgttgcaagactcatccctgtcttgaactgctctgatcgactatttacagtcaatgacatctgttctaaccatctgtaaattgcttgataa

SEQ ID NO: 10916 - DNA, 285 bp, Glycine max
agcttttgattacaggttatctctggcatcgcacttcctgttggatccgacaaactttattctggcagcactgatgggacagttaggatatgggactgccatactggtcaatgtgctaaagtcatcaatcttggtgctgaggctacctctttgatcagtgaggggtcatggatttttgttggtctgcaaaatgctgtcaaggtaagctcttatctgtcattgctttgttttgatgtatgataatgtctaatcataggagtagtacatgcaaactgattatgtggc

SEQ ID NO: 10917 - DNA, 341 bp, Glycine max
  unsure (1)..(341): unsure at all n locations
agctttctttctattcctgatggtggcatcttaaaaattttataggtaattgtttctgaaaacatgcctgtttgttggaccactcctcttggtcttccagctgtacaaccatactgtaaaactgaacggcatctggtaagattttatatagaaatgattttcccccttttcttttattttatagatattaatttactcaataatgccaagttaaaaccgacatactaaatgtacactgtatgatatccacctaaatgcttaaaagaatgacttctatagcaatcccattaaaataggtaaaattatgtgacgtgatgcantggattgatgtattaacatat

SEQ ID NO: 10918 - DNA, 389 bp, Glycine max
ctatctctgatctcgttatgctactcatggagtactgcaaacgctgattatattatatattaaatattaaggatgttcttaatatttgaaatcagtatatcatatagttatttatcatatgcaatagggtcaaattagatagtctatgaatagtgttaataacaacttacagtactgctgacttaatatatattttaataatttatatcatgcttaccttattgttatctaatgcattctcatgtatgtcatatagcatatctcatgcgaataaaggtatatgacttttgacattctaagactggaggtagatatccatgattaattacatttttatttacttcattatattcaaaataaatagatacatttaggccatttttaattta

SEQ ID NO: 10919 - DNA, 369 bp, Glycine max
agcttagatatagagatcaaatgttactgaatttctggcatatatagaacattctttaagaatagaaattgagaaaattacgttgtgcctgcatgagttgtagtgactgtatggccagtgggaagcttaacaactatgggatttatcttcttacaagaagaaaataagtgaagaaaagttgtgacatgaccagtggctcctgaatcgagtatccattcatctggacgtgccttgcttacactacaagtgatggataagacattacctctgtgtgcactgctggaactagtgattgtactaatttaaatcacatgtgaattgttgggacttgagctctagtgctgtagctgggcccttaaagccttatat

SEQ ID NO: 10920 - DNA, 367 bp, Glycine max
agcttagatatagagaccaaattagtctgaattctacggataaatagaacattcattaagaatagaaactgcgaaaactacgttgcgcctgcatgagttgtagagacatgatggccagagggaagcttaacaactatgggacttatcttctcacatgaagaaaccaagtgagcactagttgcgacatgaccagcggctacggagtccagtagccatacatctggacgtgccttgcttacactacgagtgatggataagacattacctataggggcactgctggaactagtgattgtactaattgacagcacaagggaattgtcgtgacttgagctctggtgctggaactgggctcttaaagccttat

SEQ ID NO: 10921 - DNA, 82 bp, Glycine max
  unsure (1)..(82): unsure at all n locations
accccaagcaccgcagcagcagctggcggaacaacgagttgaaannaaggtggaaggcaacgcaaggcagaagaaaccaaac

SEQ ID NO: 10922 - DNA, 427 bp, Glycine max
  unsure (1)..(427): unsure at all n locations
tacatgactcactacttatgtcacggggatctagcatcctgttcactacggaangttatgtccagctcttcttactttctacttttgctgacaaatatgctgagtgaactgttaataaacttgaaattaatgaaattcaatgtcttactagttttaaaacatgggccagtcctaatctgtgacctagagtatgcttggcaaacttaactcaacttttgctttaaagtgcaattgactctgttaagcacagacttgtgtcctcatcgttctgtattctgttgtggtcaatacagaatcttggtggtgtcaagctttccgaataactctgtatgtagatgaaccgtcagctgtatgctatcactttggcttgcatgcaatttacctgcccacggacattatgctactttaattgactatgattccttct

SEQ ID NO: 10923 - DNA, 121 bp, Glycine max
tgtgtactataatacgttagtatctttttagctagtttacgtctcaaatcctgagctacgtgtacttactaacatgattgcatagtgtcaggtgatatttatagctacatgtgacatctat

SEQ ID NO: 10924 - DNA, 225 bp, Glycine max
  unsure (1)..(225): unsure at all n locations
agcttctgacggaccttgaacttgtctgctattttcactncaaagaccaagacacgcgctcgtgaatgggacttccatcccctgtgaagcaacagctcataagcgtgccccgatcacgatggacggaattggccttgaacagaccctggcttgcaagcacatactggtttcttgttaaagggctcttgcagtaactgaaatgactgaaagcaactcggcacacat

SEQ ID NO: 10925 - DNA, 369 bp, Glycine max
agcttagatatagagatcaaattgaactgaaagctaggtatatatagaacatcctttaagaatagaaattgagaaaattacgttgtgcctgcatgagttgtagtgactgtatggccagtgggaagcttaacaactatgggatttatcttcttacaagaagaaaataagtgaagaaaagttgtgacatgaccagtggctcctgaatcgagtatccattcatctggacgtgccttgcttacactacaagtgatggataagacattacctctgtgtgcactgctggaactagtgattgtactaatttaaatcacatgtgaattgttgtgacttgagctctgttgctgtagctgggcccttaaagccttatat

SEQ ID NO: 10926 - DNA, 215 bp, Glycine max
acactctataatgctataagtctctatgggtgaatgggaccagcttatgatgcatgtgatgactcatgtgatatgtgaaatctttctatgatctacactagggatgatgaactggtgctagatagatgaatggcgtgtaacactacgccttcgaattagtcacatgcatatgtgatataacacataatgctaatgacagattagattcatcacaa

SEQ ID NO: 10927 - DNA, 358 bp, Glycine max
agctttcaacaaaggtcttattaataatcattatacagcagaaacctagcatgactacccatcatatctccccaaaccccatacccacgaaaattaaaggagaaagaagtccacccaaacctgaattttcgaagtcccactcgtagccacgcacttcacgactccaaaaatgctctcctttcgcgatttggagcagaaatgatggccaaaggttgaagctttgtgtggagcttcaatggtgaatgaagaagaagaaagctacgtgagagagggagagaaaaggcttctgaatttctttcttttggctgagtgaggaaagagaacagctttttggtttttaaatagaaagggttttcgt

SEQ ID NO: 10928 - DNA, 292 bp, Glycine max
agctttggattaatgagttatatttaatgtggaaggtaatgctatgcagttgaaaccaaacaattcatggcagcttttaatgggcagaatgaataattgaattaggcatgcagggggagacagccatttttcttggattccttctactcaaacttatccccttgtactctttcataatccccttttcttcctcgtcctgggtacttcctttcttttttatatgtttgttggaatgctattttgatatcttattttgatgttaaggacgtatgtgcaagattttgtgaatata

SEQ ID NO: 10929 - DNA, 318 bp, Glycine max
  unsure (1)..(318): unsure at all n locations
agcttctatagaaggttngtttctgatttctctacaatngcatcacctctcaatgagctggtgaagaagaatgtggcatttacctggggtgaaaaacaagagcaagcctttgctttgctcaaagaaaagcttactaaggcacctgttctagctcttcctgacttttctaaaacttttgagctagaatgtgatgcctctggagtgggagttggagctgtattgttacaaggtgggcaccctatttcttattttagtgaaaaacttcatagtgccaccctcaactaccccacctatgataaagagctttatgccttaata

SEQ ID NO: 10930 - DNA, 485 bp, Glycine max
  unsure (1)..(485): unsure at all n locations
tattntanaatctcagcgttgagtatacgttgacactgcagagggtgtctcaacacttcttagatcttgggttcattggctgtgttttgacacatttacaagacaccccctacctttttgtgatctttcgtagtacgaactacaattctacgatactgttctttcgtatgtacgacctgcgatcatatatncctttactacgatgtcgactatatggccagctcattactcggtgacgactacgtggctatattcttgttcgatgtcgattaaatgctatatgtgcacctacagacacaatgtgttacaagtccgcaattgttacatcctctctgttatgaaaagagaaaaacaatctcttgtgaagcgtactatcctcatactttcggacagcgaaatcactctctacttgtaataaagttcgacacgatcctacctatatacattgcgaatatttgaggttgcatagcatcatttttcgaatt

SEQ ID NO: 10931 - DNA, 205 bp, Glycine max
agcttgatatgttttgtgcatgtgctgctattgttggaggcactagaatttggttgccagacctcagggtgatggcactcacatttttcagattttgcacagtttgtgaaggcaatatgtcagaattttgggactgagcttggttgaactgagtagccatctgccccatctgattggtcagactctaaatggaggctcttgtctc

SEQ ID NO: 10932 - DNA, 354 bp, Glycine max
agcttctattcttatacatgtatgaagctctgataccacttgacagaccagtggccttacacatcccaagaacggggtagaattaagagatagcgaactattcccccacctgaattctatatcactcatctatgcacctcacacattaccttaacaatgaacctttacatactgaatcagatacaacaatgctgatctaaagatgacgcaataagtaatacaagagtgcagaggaaacaacagtgcacactcggatttatactggatcggccacacccttgtgcctacgtccaggccccaagcagcccgcttgagagttccactatcttggaaaatccttttacaagttctaaa

SEQ ID NO: 10933 - DNA, 169 bp, Glycine max
  unsure (1)..(169): unsure at all n locations
agctngtnataatttncgggttctgtaaaggaactaaaggacagacaaaatcgtttgtgacatggactacatttttcatatgacagtacagaagaaagagggtaaggagatttacctggattatatgctggctgctttgaggatagcaaatcgtattggtattcttaga

SEQ ID NO: 10934 - DNA, 510 bp, Glycine max
  unsure (1)..(510): unsure at all n locations
tatttcgatcctgaccactagtatacgtgattacggctaggtgtanaggcgaatatatgtaaatgtgtaaatacatgatgggctatataatagctagcgatagtgagttttagataagctttatacctatttaatccaaaaacacattcttgtagcagcacatacagccataatcgtgtgtcacaaggtactgtacttattgaatgatgcaaatgaacatatgtggcgtnatcaacctaccagacttggacgaggacactaactgtagaaggagaccactatgttatcactacattatcaatgttatcgtctgcgacatcaatgaaagcactacaattaatatgatgtgagtggacttcgccttatttgttgtcgcacagtttattgattgacctataggtctataaattaaatctaaattatccttttggttgtgagatttttggcgttaacggtataaatcatactctttgtttttgcttcgttcagttatgcgtgtagatcaaaccg

SEQ ID NO: 10935 - DNA, 259 bp, Glycine max
gcaagcttggagcaacaaattttactactaccagctcggaggaccggtcctggcgcataatatatcgccacgctccatactgaacggtggaagctcctgagccaaccacaaggccaacccttgtcactcggaggaccaatccgagcccatagaacatcgagacgcttgagctggaaccatggacaccatacctactcaccctcggccgtaacatcaccctcagcagaccagactatgacgcttactgcatcagagacgc

SEQ ID NO: 10936 - DNA, 554 bp, Glycine max
  unsure (1)..(554): unsure at all n locations
atatcttttgannntgctgaagctactgagnaccaangtnccgtacgactcgatcgcatatggcgntcattactgcgcgtacacgttgactganactgcgtaccactatcgctgagaatcccttcgcagtgctatacgagagccgacgacgcctccacagtgccagctgatgcaatgcgctgtgcgattctctaccattgtcngatcacaccgatatggacctcatcatctgtctgtgcgtagtagcagccgaaccgcacaccgtgaccgaacctgcgcgntnnattactnnntatgatgcttctagtatacgagactcgcttcttgtctactcgcatactaaatgaacataggcaatagtgatctgcattggtcttctctcttggataatataacttttatcaaaacctccctatcgcatcctattcaacactattccctaactgtactagaatatagataataactcatatcggtatgctctatatacggtaattcgatcccaataacacggatcttggtagcgttctgatctcattttgcttactatatct

SEQ ID NO: 10937 - DNA, 503 bp, Glycine max
  unsure (1)..(503): unsure at all n locations
ccccgcgaccaaccgaccgggacaacaacgaaatggcacatacacgacacnacaccaccaagcacacgcaagcagcaacccacgacagnttgaaaacatggatgacacctggaaccacacaccgaccgcacgccngcaagcctgcagccaaaagaagaaataaaacacgttatcacaagcacgagcggaaacgcgagccagacggccagaccgggcgccaaggaacgcacggaccggaccccggagagagngagagacccaaaccaggagagaaacgacgaacagcgaacaccgagaaacgcaagaacccccgaagaacggaccgaaagcacgaaaccgaggaagacgaagggccagaacgacagggacagccacacacccaaaaaaccgaccgcgcgcgagaaagacacaacccccgcccccaagtcgagcagaaagacacagcgacggactgaacccggacccaagcagggcaacgccccaacacccaggaccaggcgggc

SEQ ID NO: 10938 - DNA, 198 bp, Glycine max
acgacaacactcggaagaggcgcgttgcaaccgcactccagcgccgattcgacaacaaacggaaagaggcgggaaggcaaccactcaaaagcgcaagacgacaaaacacaaaaagacgcgggaagcagcaacgaacagcgccaagacggccaaacacaaaaaaggcaagggccaaacagaagcacacaatgacgccac

SEQ ID NO: 10939 - DNA, 309 bp, Glycine max
  unsure (1)..(309): unsure at all n locations
agctcgcaanccaaggaagaataatatcaggtttttacaagcangacgggaaattgcagacaggatggcacatcgattgagaacgaatgcattgactgtatcccggtgagagtgtgagccttaaattttgagagaaaccactatcatttaggactgatttttgcatgaatctctgaagtatggactgaatgcatgtaactgaggatgatgaacgccatgtttgattgtgatagccacttagccaaataactgaccacgtgcttgaatgatttatcccttgcccccatttgagctgaatgaattattgat

SEQ ID NO: 10940 - DNA, 194 bp, Glycine max
gagaaaactgacaccggatcgaagcgaagagaggagccaccaatcgacatcgaacaagaaaccacgaggcacacgaaacaaatcaacaagtgcgcgaaaaacaaagcagggaaaaagggcaacaagcacactcaaaccagcgctggacaccccggacacccgcacgggacccctcaaaggagaagaagccccga

SEQ ID NO: 10941 - DNA, 283 bp, Glycine max
  unsure (1)..(283): unsure at all n locations
agcttcttcctagcatgctctttctccagaatgntacccattttgtagctgcgcttccctttcgtattttctacttccaagatataaccattcaccatccaagtaagttccttgttttttattctcttttacttgtctaaactttagggtagaagactttacttggagttttagatttttagggttttaatgttttgttagaattagtttaagattaggattatatatacgtgtatatcgcattgagtatgttgcacacattgcatgtctgatatgcctttta

SEQ ID NO: 10942 - DNA, 358 bp, Glycine max
agctttgagcaatcaaattcattacttttaactcggaggtccgattcatgcgcataatatatcgagacgctcgatattgaacattggaagcttttgagcaattcaaatggtcataacttttcactcggaggtccgattcaggcgcataatatatcgagacgcttgaaattgaacaacggaagctctcgtgaaattcaaatggtcataactttcaactcggaggtccgattcaggcgcataatatatcgagatgcacgaaattgaacaacggaagttctcgagaaattcaaatgatcataacttttctcacgtaggttagatttaagcgcataatatatcgagacgcttgaaattgaac

SEQ ID NO: 10943 - DNA, 360 bp, Glycine max
  unsure (1)..(360): unsure at all n locations
agcttgaaggtaaactagatgtcttggttaatttgttaacccaactggccatgaatcagaaatctgcacctgtcgccagactctgtggtttatgctcctctgccgaccaccacacagacctttgcccttctgtgcaacaatctgaaacaattgaacagcttgaagcttatgctgcaaacatctacaacagacctcctcaacctcagcagcaaaatcagccacaacaaaataactatgacctttcctgcaacaggtacaatcctggatggaggaatcatcccaaccttagatggtcgaatccttcacaacatcaacaacaaccttantttcaaaatgttgctggcccaagcagaccatacg

SEQ ID NO: 10944 - DNA, 382 bp, Glycine max
  unsure (1)..(382): unsure at all n locations
catttnannattaccatgactcacactctaatatggcaattgatgaacatatataaactgttctatgactctaactaagaacgtaaatttaatctggcctattcagcatctactgacaaaatcaaatgtctgttcgaaattactcatttctgcttcacaacgtgtattgctaactaagaactcgtaattaatctcataaattaacgcacagcatcaatgcacgtatgtctcacagtcctctaagcatgaatagcagcacccaattattgtagcgcatgcttttattatgatgcacgtagcttttttctacacttgtgttagctgtaattgattcgccacaaatagactgtcattctgaggcacgctagccagaacgatgtcg

SEQ ID NO: 10945 - DNA, 294 bp, Glycine max
agcttgcatccattagaagattataacatgtgattagaagtatgactggaaatgttagtcagtttgtcagattgattgtgaaggaatgcattgactgtatcccggtgagagtgtgatccttaaattttgagagaaacgactatcatttagtactgatttttgcatgaatctctgaagtatggactgaatgcatgtaactgaggatgatgaaggccatgtttgattgtgatagccacttagccaaaaaactgaccacgtgctttgaatgattatcccttgcacccaatttgagct

SEQ ID NO: 10946 - DNA, 343 bp, Glycine max
agcttcttatccaaggctcaatttggtggagttgctccttcttccatggcttattccttagaggatggcgcctcctctcacctcttctcctttgtcttccgctgcatctccatagtggaaaatcaccattaaaggacctcattgaagctcaaagatccagcctccatagaagctccacaagcaagcttccatcactaattaattgagaattaatctataactgtctagttatgaattactcttcgttaattagcctaacccgcgcatctttcccccaatgacatacttctaccaggaggatatatatatatatatatatgtatgtatatatatataattattt

SEQ ID NO: 10947 - DNA, 282 bp, Glycine max
tcttcttaacattcagtgtcatattattgatcaaaacaaagcaggtataaatatgcaatactagactcaaaatatgcaacaaacactagacctaaatcagtgtcacagaaattggaagaaaatattttatccaagcacaaacttcaagccttattccatgtattggggggaagttatggctggccatatgggtagaggtgtcatagaggagcaggtatggaggaagggaccttggactgctgaagaggacaagttgcttgttgatattgtcaggtgcatggt

SEQ ID NO: 10948 - DNA, 436 bp, Glycine max
  unsure (1)..(436): unsure at all n locations
attttgaaaatgaagccactgaaatatacatttgaactccaacagctagaccactgtgctatgctgaactgctatgcngatctaatngttaattgaattaatagatgtgcaattttgtcattgcgccagtgactactagacagaacactcaatgatctgtgatacatttcggattattagttcacttatgcgtcaactgctctgtgcatatagccagctgaaataagacagtgcatctaatctaggcaacaaaggttgcatcagtctatctaaaacaaaatatctactagattactcgaaaaagtgtcaattaggtactcaaaatcaaaataggctataagggcatattcatgctcactctcagtgtggaacttctgacggattcttctaatgagaaaagactgtcttaatgaactaaaccgctttctacaaacct

SEQ ID NO: 10949 - DNA, 302 bp, Glycine max
agcttgatttaacaattatttttccattccaatccattcaaatcataaaattgctcattcaaatcattctcaaacactcatttcataccaaacaatccactgcatatcattttcaaacaattcactgctcaaacacacttttggtacaagcaaacaacttacagtgctaaaattctaaataactgaaatttaaaataactgaaacataaaataattgaacataaatcataaaataactgacaataacataaaatgttcaagaggcacaaatttaaatgtactgctcatcatgtggatgatct

SEQ ID NO: 10950 - DNA, 510 bp, Glycine max
  unsure (1)..(510): unsure at all n locations
attcgtgactcactaactaccgagtgacagccttgactcaacactcacttatggttgctcttggcaatggatgctaatggtattgantgtcgtgaagtgatgggtggtggtgctagcatatgcttgaacatggactcacatgtccgtcttgtatgatctaacaccccacaatgttggaatgctatgcatacctgatntgatgaacaccatgngcattgttgactattnggactgatcatccgaaaggctagaatgccacttatctggctngatcaagttatcaagacacaagagtctgtggtagtacctttgcacatacttggccctcatattctatctatgtagattgtatatatggagtagataggcgaacttgatacactggtgagaatatgtgtgcttattgtgcaagtcaatctaatgtctgtgagaaatcaaacttatgacaattgcaaaatatatttccgtgttaaactaaaacgttgccttggatcaactatggttgtaacc

SEQ ID NO: 10951 - DNA, 348 bp, Glycine max
agttcccttttgaaggcgatttgttcataaaggggtaaattttttttaaaaaattattaaatgggtataaaatttaaattaatattttaaaaaaaataagtcatagggtattttataacttgtgagcacaaagtctaaactgtgttatgatttcattttttttcttttccattgaagttgtaaaaaagtttaagacttcaatttttttaataccacttttaaattgtaagtattttttttagaagttgtaaactatttatgacttcaaaatcgtaaatagttttttttattttaattaataatgaaattatggttggtttctttttaagctttaattaatattttcta

SEQ ID NO: 10952 - DNA, 460 bp, Glycine max
ttcgtgaatcttagctcatgatatgcgcactgcataacaatactatgcatatctggataaattctatgctgggtactgtatgtgcaccaagtttccacagcacagtagcacattgtctccaagtgtccagtgcatgcctatcactgacaactactaccttatataacaactcttgtcacacttcagtggctataaaatacattaataacaatggcttatcttcttggctacacacactgctttctaacgctgtaatatgcagatggaactctgctctgttcctgatgcccatctcatgactgctgttgagctaatttcttgagatgctatcatcatctaaaatataacttaggatacttctcgccaattagctgaattaactatgcttctgtattatcttgactttatccactcgaaaacttcttgggtattattatattctcaatatccttatttaacc

SEQ ID NO: 10953 - DNA, 331 bp, Glycine max
  unsure (1)..(331): unsure at all n locations
agcttgtgaagggcggncaaataacgccgactgacttatatagcacggatgctattgagacgagctcattccttaatgctcgaacacgtataaaccgatatcatcatttagttctggtttaaccgagccatttcctctttaaacaaatattcttggttcatggttctactttatgcctacgatctatttatgattgacaatgctaatagggcaagaatgaatttttttttgttaaaatgcaccccgatgacgatagagaaacctacatcgcagagttgattacccaagtgagaacaacttcaatgatagttagacccgaggaccacactat

SEQ ID NO: 10954 - DNA, 512 bp, Glycine max
  unsure (1)..(512): unsure at all n locations
attgttatacntgnnncngtattcacaatctacctcgaaagaaatccaactaaccgaacttataaatccgagcaacttaactattcgcttctaatgaatccanagcagactatccctgactaacctaacctgtccaacaagaattcnatcattccgattccatctattaccaacaccatcatctacatccatgtgaatccgatgacataacgcgtgcgctggaaaatgacaaaaatcagaacaatgaagataaaggcgttcctgaagaaaaccaacccttgtgacattacctgaatgcatatagaacaatgagaagatttgcattacacccaactaatgaatgacaaaatgttgccgtgtatgcataaaaacatattccattttaagggttatccatagattgcactattggaaatttctttttaatgtataaatttctgtaaaatataatgattatcaccccaatgtatttctttgacctaactgtcttatataaacatttaactattacg

SEQ ID NO: 10955 - DNA, 189 bp, Glycine max
acatgttactgactaaacgtgccaacgctagagacgtaataactcggtctatactacaagaaaaatgacctatacctacggacaaaatccgacactataaacaaaaaatctgtaggtaaatgtatgatagattttgtcctacagacgtttcttccatcaactttgaggggccggataatgacagttaat

SEQ ID NO: 10956 - DNA, 252 bp, Glycine max
  unsure (1)..(252): unsure at all n locations
ttagcttcaactttcaatnntgatcgtctcgatatatgacgagactacatcatacatccgagtaaaaagttatagtcgtttgaatttgctcacagcttcaacattcaatttcgagcatctcgctatattacgggactcaatcagacatccgagtaaaaagtttgttgtttgaattggctgagagcctcaacattcaatttcgagcgtcgcgatatattaagggactcaatcaaacatcccgagaaaaagtta

SEQ ID NO: 10957 - DNA, 286 bp, Glycine max
  unsure (1)..(286): unsure at all n locations
agcttgtggatggtggncaatttcctacgacttttgtgcatattaaggatgctattgaagccgtcttattgctgattgaaggctcccatatgaaactttatatattttaagtactgatctgattgtaaaagttcatcttttgactattactcttgtatcatggttcaactaaatgtgaacgataatttttaacaggaaaatcctgccagggccaatggacatatttttaatgttggaaacccaaacaatgaggttacagttaggcatcttgctgaaatgatgacac

SEQ ID NO: 10958 - DNA, 318 bp, Glycine max
ggctgcagctttaagtagttatttatgccaaatgttttatttgtttcttttttttttttgttgagttgggtcttttatcctttaaaaagtttaatttgattttatcatttttttttggtttagtttagtcttttactctttaaaaaaataattttggttagtttttttagtttagtccttcgatctatttatgattgacaatgttaatagtttaagaatgattttttttttgttaaaaatgaagcggaggaaaaatagagaaaactaaatcaaaaagtttatttctaaatgattaacgacttcaattttaattagtct

SEQ ID NO: 10959 - DNA, 178 bp, Glycine max
aacacctccaacaagtaattcagcttacttcctctgacatcatctgacatcatgtgagggacatcctttgacatcaaacctactgataattataagcatgtaagaatgggcatccatcgatgtctaagttagattcaccctttctgttatgctagcttttgctgcaagaagtatgcag

SEQ ID NO: 10960 - DNA, 267 bp, Glycine max
  unsure (1)..(267): unsure at all n locations
agctttcttctattttttcacttacatattgctgccaaaatcgctgcttaacatgttactgactttatgtgtctatgtttgtgatgtaataatttggtctatactacaagaaaaatgacctatacctacggacaaaaactgtcactataaataaaaaatctgtaggtaaatgtatgatagattttgtcctacagacgtttttttcatcaactntgaggggccgtataatgacagttaattgtctgtcactatagggtttacctacta

SEQ ID NO: 10961 - DNA, 544 bp, Glycine max
  unsure (1)..(544): unsure at all n locations
agtcgtgactacttggctcactgaatcaacagctactaatataatgtctgactatctagcgatgtgtgtgctatgagcatgcatttgtgtattgacactataatgtagcatcaactatcttaatgcatctatgtngggatgaatccctgatagatatgcaataagatattgcggaacctcacctcatctactttgtggattagtatgctgatctacatcagatgtattgaactatatatcatgttaccatatgcactattccgtgtataacctgaatgtaatcctaactggctatatatcatctagctgtggggtgtgagattgtcactgtgaacacatattacattaggtatataatgtgagatgagaccgattgtattgctgattgaccagctaacatttagcttaaatgtacgcttttttatctgttgttattatgttgaagaacttatacgtataagccgcatattgttcaaatctccctctagcttatattgaccttattttgcgtgctctgtatataacagttatgatcacacattct

SEQ ID NO: 10962 - DNA, 241 bp, Glycine max
agcttgaggatagagacttcttatctatttattttctctctcaaagaggctctctaactttctagctttctcactctaagaagtggattcactcttgtcttggatggttaagaatgaaggctcctacccttatttatactactccacctccacaatgaatggtggagattaattctctagaatgctccacacattctaggagtctctacactcttctactcccttccatatcctttcatac

SEQ ID NO: 10963 - DNA, 335 bp, Glycine max
  unsure (1)..(335): unsure at all n locations
agctttnttttttcaagtcttgtttatttagtaaaaaatctctagaatttttttggtttttttttacgtatggggtcctaacttaaaccaatcaataaatggtgattcatattatgtcatctctgtggataattattctaaatatgtatggctatttcctatcaaattcaaacctaacgttactaccattgtcctaatttttaaaacattatttgaaaagaaattcacatgttggatcagaaccctctatagcgacaatggaggtgaaattattaaatgctgaacctctttccaatcactaggctgtttgacctaaccaccattcctatacacct

SEQ ID NO: 10964 - DNA, 237 bp, Glycine max
  unsure (1)..(237): unsure at all n locations
tagcttgnggtacttgcaaatttctatgcaaccatgctaatgggggactccgtaccgagtttcttaatttgctttgtgttcacatagggtagcaactgcaactttggtttagaaaaggactcatgagggaattaggaatttctacacatagagatcgaagttaacataaagagggcgtttactcattagggaatttcttttactttctaaaaacctaaagataacaatattaccttt

SEQ ID NO: 10965 - DNA, 182 bp, Glycine max
tgcttcttttggaagatccttctattctctcttccgagggtaaggttggaaatttccattctgggtcaaggttaaggccaaaaagttgatgtttggctcaaaaggcctacgaaaagcaggacatgatgtatgttgagatatttgtttagtaagtggctcgggaataagggaatgccccaaat

SEQ ID NO: 10966 - DNA, 182 bp, Glycine max
tgctttgagccgaaatcctgacccaccataaaccttgacccagggtgagaatgtcaatccttaccctcggaagcaaaaaagaaaagaaggaaaatttccaatcaaagagaaagcaaaaagagaagaaaggaaattcccaatcaaagagtgggagaaaaaaaagagagaagaaaggaaattcc

SEQ ID NO: 10967 - DNA, 464 bp, Glycine max
  unsure (1)..(464): unsure at all n locations
acatagctactngctccaatagagccctgctataatctatgctactggataaactatgtggactaatggacaagacccacgcacagcgcacattgctcaaagtgtgctagtgcatgcctatcactgacaactataaccttagtataccaacttttgcacacttcagatggctataacaacaccttaaataacaagggcatatctctcttggctacactcactgatttctaactggtgacacaatgcacctgtaactctgttctgttactgtagctcagctaagactgctgttgatgctatatcaaaataacagtgaaaatcgtgggaaaacgctcaacgcctgatgtaacgaatgaattaagttccacgatctacccgttcgcangcttttctaacatgtgcggagttccaaaacggcacccgtaattccttgatgcaaatccatacttatctgaacgtccttc

SEQ ID NO: 10968 - DNA, 178 bp, Glycine max
agcttgtccatccacgatgtctccaatagaaaggtccacccctaaccatttgctcacacgaacatgaaattggacatcaccataatcaaatccatgtgtcccacactcaaagataagcttacaaaataattataattaaaacaatttatgaaacatcaattaactatgacataggctc

SEQ ID NO: 10969 - DNA, 144 bp, Glycine max
tgcttgaaattgaacaacggaagctctcgagaaattcaaatggtcttaacttttcactcggatgtccgagtcaggctatgtcgagacgctcaaaattcgacaatggaagctctcgataagtgatatggtcttggcttatcactt

SEQ ID NO: 10970 - DNA, 72 bp, Glycine max
caacgtaactccaatctacgaacgtacgaatgttcgacgctgtgattctacgaacatgtcacaatcaaaaaa

SEQ ID NO: 10971 - DNA, 186 bp, Glycine max
tgccttcctttcttctacttatgcggaccggccgtcttccttcaccttctgggataaagcccaaatttacactatggagcatgcttcaaaaaaaggttaatttccaatctgacagaaagcacaaagagaagaaaggatattcccaatcaaagagtgggagaaaaataagagagaagaaaggaaatt

SEQ ID NO: 10972 - DNA, 178 bp, Glycine max
agctttaggatcaaactcttttctctttttctctcaattgttcttcattcttcttcttcttctttttacttatgttcatccttttcttgcacaaatttcgtggctcttccattgatgataatcgtggaagactaaacactcaatcaatccaaggatccagtccaagcaaggctaaatt

SEQ ID NO: 10973 - DNA, 173 bp, Glycine max
ttcttgtcagtgtacctgaagatgctattaagcttagtctgttttcattttctttatctggggaggccaagagatggttgtgttcattcaagggcaacaatttaaagacctgggatgaggttgttgagaagtttctaaaagaatatttcctagaatctaaaactggagaggga

SEQ ID NO: 10974 - DNA, 176 bp, Glycine max
tcatcttcttatccaaggctcatcttggtggtgaagctccttcttccatggcttattccctagtggatggcgcctcctctcacctcttctcctttgtgatgtaatcctccctaggaaaggaccagttaccagagccatgagcaagaggctccaagaggattgggctagagttgata

SEQ ID NO: 10975 - DNA, 141 bp, Glycine max
  unsure (1)..(141): unsure at all n locations
tgtcagggtcactacctggcactaatagaactcatctactacgctttactatctctcccatgagtcctgacaacagtattatgctctctanatgattatgtggactctctcacagacttatatgccacatgatcatcatct

SEQ ID NO: 10976 - DNA, 179 bp, Glycine max
ttgcttgaccaatcccgacccaacccgggcatagtcagtcagtgagacctgtgatgtacctaaacaggcgagctcctggcagtcaacagataaaaggaacaaacaccacaaagcaaggaggcttgtgtggtggctggccagctgtgaactttgtttgatatatgggatatgggctctgg

SEQ ID NO: 10977 - DNA, 80 bp, Glycine max
  unsure (1)..(80): unsure at all n locations
tacatctctatangaccacattatntatgtgatgtaatgcttatattgagctagtattctgtcatatactgactgatgca

SEQ ID NO: 10978 - DNA, 171 bp, Glycine max
agcttgtacaatggctacacatgatacatgtcatggcttggtttggttcaaggataaaagggatgcgcccacattatttccatgacgcaaatgcaaaaattatgatttggaaattttatgccaaactggtcatgcatgcgcctatgtggacactcaattgtcaaattttta

SEQ ID NO: 10979 - DNA, 180 bp, Glycine max
tttgcttgcaagcttctgatggtaggacaaagaagaaagtacttcagactgtcagcgagcggtggaaacaggttaaatttggtttgacgaggaaatgggcacttgcagctgataaggacagtgtggatgacactgttcgtgaaaaatacagcattagcaaggagaaattggcccagtttt

SEQ ID NO: 10980 - DNA, 183 bp, Glycine max
ttcttttatgatatggaacttcacctacaaatggatcaaagtgagtctgaaaaaaaggaaaatttaatcatactgcttgcactaatgataaaactggggcaaattaagagggtgagaatgagggacaagcccatgctgtgactgccattcatatacagccgagtttctccaccatcccaacag

SEQ ID NO: 10981 - DNA, 121 bp, Glycine max
taacacttcctttctcatgtttgcaacaaaatcccttcatagattgtctatatccgctcaggatgtctctcacttctgtatcctctctcttacttggacaatgcttccttgattatcttct

SEQ ID NO: 10982 - DNA, 181 bp, Glycine max
ttcttccatcaagtggtaatcagagcacaagagcttcaagtagttgctccttaaacctccattaattttttgctttaccttctcttccattggtttttcttcattttttctccatgtatctcctcaaatgtcttgtgctaaatgttgttaacatgattctttagagttttcaccgattaaa

SEQ ID NO: 10983 - DNA, 123 bp, Glycine max
ctatcttagttccgtaatgttaagccttattttgtaatttgtctgtctgacatatggtagtagtcttagttgctgatattggtgaacactaatctctaattagaagaactaattaagctgtac

SEQ ID NO: 10984 - DNA, 168 bp, Glycine max
ttcttctttgcacttttccattttgaatttcttaattagttttgtacattactttgtttgacataggaagttgccatgtttcatttgcttgacttgaagtccaaggaagaaggacaattctcccatcatagacatctcaaattctttttgcataaagttggaaaattc

SEQ ID NO: 10985 - DNA, 52 bp, Glycine max
gcttctatatgcagttccaccaccacatgcatacttaccatacaccttctct

SEQ ID NO: 10986 - DNA, 173 bp, Glycine max
agcttgcctaattaacctgaaattgagagaaaatgattattaagcacaaaaaatggaagtactaagtatttattacctatactcaacagaaaatacttataacactacaaaataaccataaattggaaaagtttgatacaatttacacaagttttatacacaaaagtaagtcg

SEQ ID NO: 10987 - DNA, 179 bp, Glycine max
ttcttatgactatgaggagtgcgataatgtgacttcccaattttcaaatttggagctttaaaaaataaggaggaaatcgaaacttaaatttaagcacatgtgcagaggatacaccctaggaggacaatcttagggaatgcaaagaacaattaaaactttgattagctttcttatggagt

SEQ ID NO: 10988 - DNA, 177 bp, Glycine max
ttgcttgagacttaattgctttgttcttcctataagcagtagtcagtagtgcactctcacccatctccattacaagcctttcttcttcctgaacacacatggtcattaattcattgatagaccatttatctttatgtgtgttgtaggaaatcttaaatggcccatattcatgcggaa

SEQ ID NO: 10989 - DNA, 87 bp, Glycine max
tcatgtactgtttctcatatagtcatctgaattcattgcagtctctatttattgattaacgatcacatcatgtagatgtaagtatcg

SEQ ID NO: 10990 - DNA, 181 bp, Glycine max
tctttcttgtgcatgagagcgagaatgctagtggttttgatagttcttggaggaccctaaaatgggagggttagaaattaagattaaaaattgagaaagtggaaatagttaatttaaggggtgaaatgagagaactacagataaaatgagattgtgcatgttgttgttgcgagcgatgact

SEQ ID NO: 10991 - DNA, 174 bp, Glycine max
tcattcttgaaaaaagataaggtataaatagggagggcagtgaggacaaaattgatgagagtaacctttccagccatagataaaattttctggttccatttaaacagcttctcttcatatttcctgatcaacgggtcccacaccaaactggtgggggactttgccccaatggga

SEQ ID NO: 10992 - DNA, 598 bp, Glycine max
  unsure (1)..(598): unsure at all n locations
atgcttgtgtgctatgaccttcaactagctctatcangtatctgtgtagctctcttctgctanntctanntgatgcgctctctatctctttctttgnnctcgtgatctcatgtgaaaataccatgangactcatgagctaggatcacctcatagagctcacaagcagttcatcagtggaatagacacagaactcaagangnctcttanacctcataagtgtttgcttacctctctctatangtttcttcatttctcatgatctctacatgctgtctaatgtgtacatgatcttaagttgcacataacttgttagagtaaaatgattctatgtcaatctgtctgtctgacatgatggtgagtagtcttgattgctgtatttgtgtaactaactaatctcaaaataagaagaactcaactaggctgtacattgattgctaagctgttctactgcagatttagtcgatatctatctttctcttcagcttatctccatagaacaattatgctctcaccctatttactgagtttcatctttcccgcctctcacgaatttcactcgttgctataacttcacctgtttgtctccacactctcgcc

SEQ ID NO: 10993 - DNA, 169 bp, Glycine max
ttcttgtcactacagcagttaagtgaacaaatgaagtgtccacagtcattggatggttgcttggtagaggtacatgctattaactaataagatttcctgtgcagggtatcattgtttttgcatgactgatggctaccttggggctggagattttggttgaatctgcctc

SEQ ID NO: 10994 - DNA, 560 bp, Glycine max
  unsure (1)..(560): unsure at all n locations
accgtgcgccactgacttcaactagctatgtgtatcagtgtntatataccanacccaatatgttcagttgagtcacagtatataagatattcagatcagagaactcagagatcagatcagaanatgctcagatctagagaatagacagtcaactccaggaagatganagtttcaaacaacataccagtatttactgtactgtcagaacgtcaacatgaatgtggcctgaattatttttgatctcacgctaaatgacagggccgaatatatggtgctatttaaaaatggacatggctacaactcgaagcaattagttatattgctccaacaatttttgatttggtcacatgaagggcaattatatgctgctataaaagtactggctacataggctacatgttatttccattagcgactgatggtattttatttatcacagaacggccactttttgantaaataacgactgcgcggccctgttttctctctgagtgatgcattttcgtctcataagtcatacctggaatccacgtcgcgatattatcctcgttgccttcccg

SEQ ID NO: 10995 - DNA, 181 bp, Glycine max
ttgcatgctttcttatagtagggtatgaatgtacttggtgttgatgattgatctttttctgcactgtgcagacaaatgaacatatgacttgccactttgtgggcatgagcttgaaaaacactagttcttttaaagatatttagttttctgataagatacttgagtgttggatgattctaaa

SEQ ID NO: 10996 - DNA, 105 bp, Glycine max
gagtgtgtgtacattccacgattagctgttgaatatatatctactgcttgaaccgatatatattttttggtaaggacagccttaaacttagctacatctattgct

SEQ ID NO: 10997 - DNA, 169 bp, Glycine max
  unsure (1)..(169): unsure at all n locations
ttcttgtaataactttttttaggttgcttataataacgttataaaacacttctataaatataaataaactctattaaaacaaaattggtaacttggagaaaagatacaaaaaaacaccagaaagaaagaaaaaaaaaaccnactcttatatccctacattcttagtaag

SEQ ID NO: 10998 - DNA, 455 bp, Glycine max
  unsure (1)..(455): unsure at all n locations
tgctttgaacctgacacnctcacngcacacaacacttttattgttctanatatcgactttattcgatctgtacatgtggttgctaagccactgtgtacgcctactattgttttgaataaacccaacattgagacgttaacttctctaactaggtctaattcatgttccaagagcatattaaaatttattattttatctactcttcctagttatataatgatattagttaatcaatcttgagttatgatgtcgtgttatgacgtctctgtataaaggaccatctgcttctcatatttgattattttagaccttttacacctttttatcaactttatattattaattcaaatgcgcgtcgacagatttttgaaacacccttatgtatattaaggcacaaaccttttgagcatctaacaggtggcgggctctactggagacccatctctgccatcacc

SEQ ID NO: 10999 - DNA, 181 bp, Glycine max
ttcttagctacacacccctataatagctaagctcacccccatgacaaaaaaacatgaaaatacaaaaaaaatcctactacaaagactactcaaaatgccctgaaatacaaggctaaaaccctatactactagaatggccaaagtacaaggcccaaaataagaaaacaacctattctactat

SEQ ID NO: 11000 - DNA, 174 bp, Glycine max
ttctttggttttgaatttcatcattatgttaactttatttaattgctactgttaagtgtaagtgcttccttcatgctttatataccttgttgttaacgatacaacacttctgaaaagatcggactaaaactagcactcaggcataaatatgtccattagaaaaagaaaaaaaaa

SEQ ID NO: 11001 - DNA, 156 bp, Glycine max
  unsure (1)..(156): unsure at all n locations
tgttgtgacgcttcctcctctctgtgggatgaacagcaaatgtaactaagcacactcatctctctacagaatgcctcttctctcacattgctgtaccatgtgcaaactgttgttcattcttgtttcactatgngatttcttttttgtctctcttct

SEQ ID NO: 11002 - DNA, 182 bp, Glycine max
agcttgtgcctctttatgtctgggatatgaatgtagcatatagatccaaagacccttaggtgctttgctgatggcttcttcccattccaagcttcaattggagtcttgtcttttacagacttagttggacatctgttgagtatgtaaacaacagcgtagactgcttcagcccagaatgtgtt

SEQ ID NO: 11003 - DNA, 192 bp, Glycine max
cgaagtggagtgatgtggtctatcctatagccatagactaacacagaaacatgaatatactatagcagtcttatcctcaaatgtctatgagtagacataggacttatcacgactgtttcaattacccacgctaatacagcctacacttgaaacagatactgaaactgtttggtgtatccacgacactaactc

SEQ ID NO: 11004 - DNA, 205 bp, Glycine max
  unsure (1)..(205): unsure at all n locations
aagggccagggagnccaaagagggagggggcaggcaaagcatttcattaacccgatacaaaaaacgaagggggaggaaaaaggcgagaacgacaccaaggaaagaaaaaaaaaaagagaaaaaaaagcagagaaaaaaaagaccaaagaaagaaaggaaaacaaaaaaaaaaatggaaccgagaaaaagaaaaaaggggagaaaa

SEQ ID NO: 11005 - DNA, 178 bp, Glycine max
ttcttctcacctgataaatttagtggcatctatttttgatcacacccatctgttgttgtgtactgattgtggccagtctcatgtattcaataaacgcttctgattcgaaaaggcttggcttgcaaagaaggatctacctgatgtggtgaaagctggttgggagaaagaaggtgggaat

SEQ ID NO: 11006 - DNA, 175 bp, Glycine max
ttcttcattgcctaacaagccaacttacaacagcaagccccaagagactcagcataaggatgcacagaccaaagttgcgtatgtaaaaaaattgtatgaccaagtgaaggtgcaaattgcaaagaagaatgaaagctatgccaagcaagcccaaaagaaaaggaaggaagtggta

SEQ ID NO: 11007 - DNA, 546 bp, Glycine max
  unsure (1)..(546): unsure at all n locations
ctatgctttgcgctatgagcttcatctagctcaccanggaatgacattagtgctgagntcatgcatgctcaagtgactgccgtagttatgtagtcacctcatgctagactatctctttatcagatgagatcgattgagacaatctctcagaggaagatgtangactgacagacaggcangtcactgangcttgagactatacaggctaacangaagcangactctcacaatgtgcatctttgatcaaccagttaggaaaagcaagtggatgatctgcaatgagagatatgaccttgtcattaaggtattgtaaatgccactgaagtgaacaaaatttggtatactaagctatagtatcatgatggccatgactgctacttgaacaaggtatgtgtgtggactgtcctctcctcctagctatctagagtatttatagaggctcaccggatttacactttaacatggttgatagttctttgaagttattggtaactgtaagatatgtctcgagatttcttcttacacaactcattgattccaaatacg

SEQ ID NO: 11008 - DNA, 164 bp, Glycine max
tcaatcttgtttaatggcttgacttactccatgaccaggcttgttagggatcaaaggtaaaagggaagcccatccttataatcatgacgcatatgctttataagactataagtaaatttattgcaaattcggacatcctttaacgtattaatggaatgacactt

SEQ ID NO: 11009 - DNA, 178 bp, Glycine max
cttgcttagcgagattcctcctcaatgtcactttcgcttagcgagccatgttttcttagtgaattcaaaataattaatctcaaagttttccacaacagagacatttagtcactcaacaaaaatcccacgctcaatgagacacgaataaatcaggcacccctagctctagggtcttgtt

SEQ ID NO: 11010 - DNA, 566 bp, Glycine max
  unsure (1)..(566): unsure at all n locations
tcgttgntccactgactgtcagctcnctatactctacttatanaacgaaaatatggtgtgngcatgtgaggcgtagagacacggtaacatctctantcaccgatccaattcatataataaggacacacagcggatcatnttgtctttgtagtgacacactcagatttcaaggacacatntttcttacaatatatgcatcattcagagactgtcacacatatttacagctaatgatacacttgatatatacatacccgcgaatatgtaagatctcaactagatttaacatgacttatcacgaacttgactctgtgatatatattatcttaacaaaaatgtactctgatacatgaccctgacctctgaagggtgtcatttcacacttacgactactgtgaatctagccctaagtacaagcttgtgaagtaattgcaactcttggtagctattcagtctgacggacaatgatctagttggctcataatatgagtctgccacacctcagccccacccagattttcattcaagaatatggacaacgtgatatataaagccggcgcacggct

SEQ ID NO: 11011 - DNA, 172 bp, Glycine max
tgcttggtggcgtaaaatcagatttttggtggtcatgttggaagaagaagaagattttatttcatttgccacaccaaaatacaagagtatgatcccctatttatactagaatagagtgactactcacataattgcttattcaagaatactgaatgctcacataattgcttat

SEQ ID NO: 11012 - DNA, 169 bp, Glycine max
tttttcatatttagagaaaggaagataactcaactaaacatatgagcacaaactcattatagcaatcaaacaagacaaacaaataaaattttgttagtcatcatataaacaagttaaataaaagagaaattttaacccacttaattttaaaacataatggttttgatgt

SEQ ID NO: 11013 - DNA, 152 bp, Glycine max
  unsure (1)..(152): unsure at all n locations
ctctgttctgtgctgctctcaggcttctatanggctaatacatctcactgtgtctcgctctcaaagcttgagtagacatgcttgtcctcagctcaaaaaaaaaatattgagaatgtacggtatatatatctgttcttcatacctctcttcta

SEQ ID NO: 11014 - DNA, 180 bp, Glycine max
agcttagcacaatcggcgcgctaagcgcatttccaagcatttcaaaagcagtaagggattggcgcttaacgcatgctgccgctaagcccaactcgtgaaagttcacttccagaatggatatggggcttagctcaggacaatgcacttagcgctgctacaaaagatttttccagagatgga

SEQ ID NO: 11015 - DNA, 168 bp, Glycine max
ctactggtgcacagcctaactgttgccatctcttcgcctttgtttgttacactatggccatactctactgacactcttctacctatgtgtgctgacttctgacactggccttagtcgctcaagtgactttgttctgggtcacttcaactgatttactcgagagatttg

SEQ ID NO: 11016 - DNA, 175 bp, Glycine max
ttcttttgcccaattcgcttttgatctcgataaagctgctcaaaatcaattagcaagaggtcaatgattgcgcgagttgcttaaacaatcccaatcagctcctcttaccgtggaagaacagataataaggatttatactggaataaatggttatcttgattcattagaaattgga

SEQ ID NO: 11017 - DNA, 175 bp, Glycine max
tgcttgagatgaagcagctaaggagcatggagggttgcagaccgacaatccgattagccagggattcgaactggttgaggtaagttgtcacagatccttgttgtgtgagtttgaagaggatcccgatggggtcctcgtaaggtgaaggtgagaatcgtgcctcgagtgcttctaa

SEQ ID NO: 11018 - DNA, 418 bp, Glycine max
  unsure (1)..(418): unsure at all n locations
tctgtactatctactgacaccactcgacgtatcgcctgaagtagcctaacattcatttagtgaccaacaatcatgccttatgagaaccaagtagactatgagacttggatcttgagcactattgtcactgtttaaactaccatcagctgagtatgctccagtgttgaaaagctgtcggtccatgagatagctctcataaggtgattagaacaaaactttatcgtgtcaatgctatgcagacaccttgagttgcattttgtactctatattcagtttactgaagtttccgttcaagcaaatatcgctatggttggtatcgaattgtaaggtaaccattgcttctcctcttactagaccagtgactctaataatgcttggattcacacgtgtcctaaacgtctgattataatacgagncc

SEQ ID NO: 11019 - DNA, 183 bp, Glycine max
ttcttagtgatataagtgtaagtgtatatggatctacaaatgcttgttcaaaacctcaccatgattagacaactatatatggatggtgcaagtgtgacaccctttatcctgacatacatataaatcagaaaaacatataagaatttagaatttaattaaatcaattttattcaaatcacttaa

SEQ ID NO: 11020 - DNA, 92 bp, Glycine max
tatatgcttagctatactatggtggtctcagacatatgataggtctactgaaaagttcctttaaagattgcacttctttcttgtcttcacag

SEQ ID NO: 11021 - DNA, 177 bp, Glycine max
tttcttcattaattttctatatggaagtgtactgtgaaagacatgatatatatcctctttacaatcttgagaaaaccccactaactattggccaaactaactccgagcactgaagacatgtgagaagcacatgttccatagtcttaggccagtagggaacaatgctcattcacttat

SEQ ID NO: 11022 - DNA, 467 bp, Glycine max
  unsure (1)..(467): unsure at all n locations
tcgtgtccatggcttcaacactcctacgctgtagaaccatatatgtgcaggatctgccgctgccactgatcttttcaactaacctctgctacctgaccactagagttataatcagactgaccaacacttgcttatacagtctactttcagctctcttatacacatattgtgtaaactgtcgaatgctgtgtattatcaagcttaccttgattccctganaccttatggaactgacttgctgcacttgtgttacatacgggcctcactttgtctgatgcaaccgaagaatcgtccttctttcttaaaatacccttcctgctcccacatggaccatcgtagctgtttacaagtgcctactctctcactaagaaagtactgtcactgtaagaacctctttgaacaaacaattcgaggtgttcatctaactggctnaaatggatggcttctcacacgcactatcggggtgg

SEQ ID NO: 11023 - DNA, 176 bp, Glycine max
ttcttctgcaggatatgttcttgacgttataaggctgtatccctccaagcattgaggctattgaggatgttttaatgtggaataatatgcaggatgacaacatgtcagaggcttcaacatataaaacgatagaaggggctactggcccatattgcgctatatataatctgatttgg

SEQ ID NO: 11024 - DNA, 173 bp, Glycine max
tgtcttcccaatatcagcatttccatgcacattacatccagcaaggagcgctccccaaacagtcaatggcacctcttccccaagcccctcaatgatattggaagcttctttcagccttcctgcacgaccacaaagatcaaccaaacatgcatagtgatcttctctgagttgta

SEQ ID NO: 11025 - DNA, 416 bp, Glycine max
gttgtggcttgactccatctactgcgtagctggacaatatagatgctgtctacgtttgcacttgctcaccacagttagtggctactcactctcgccaatggcttatcggaagatgattcgactctatctgtactgtaattctaaggtgccgataatgacttagacctcatggtcctggtcttaatgttctttatgccatccaatctatgacttttctactaagaagccaccccctcacacagttactcccatctgacgatctagattacacgttctgcatccactccgagtacactcagtgtgtatctcggcgttagtcgcaggaagacattttattcaccttcaatcctttttcttaagggcgtaacccccagcaccgtcctttctaaacctattatgacaatgggagtttctcc

SEQ ID NO: 11026 - DNA, 173 bp, Glycine max
atcttgcctcaaagaggtccaggaaggacaaggcagccgaaggaactagttccgctccggagtatgatagtcaccgctttaggagtgctgtacaccagcagcgcttcgaggccatcaagggatggtcgtttctccgggagcgacgcgtccagctcagggacgacgagtatact

SEQ ID NO: 11027 - DNA, 534 bp, Glycine max
  unsure (1)..(534): unsure at all n locations
tggtggcatggcttctctactgatgactcatgtagttgacgttactctaagaactcgtgtcaattcagcgctcatatatatgcgcatgatctgagaccctgtgcacgtatgaccatctgaatgctcngagcttctgtggtcagaatcacgtctgattatatgcgccgaacgacatcgacgaaagtataccattgattctcatacttcgtgtcatggagggtattatagctcatgacatcgttgaatatacattgatttgaagctcgtgtattcacgctattattggctatcaatcaggaattacatgatctgactcggtattaccccttaggcgtgctcgtaagttacttaattaagtcggttatactgttttttccaggctcgggaattccttatcaatcgtgttgggctctccctccataggtgactcattagcttgtccgcaattcctagcgcgaagtgatttccttataagttcttctgtagtcgatcgtctgttcagtatccaactgggtgagtatctctgggttccct

SEQ ID NO: 11028 - DNA, 178 bp, Glycine max
tgcttattaatttatgcttataaaaatcagtacatcattacaagtacaaggtggcaatcaaatgattcttggacatctcttaagtatctacacctgtgataagtgattgatttgattggtgatataatatgatgaaaaaaagagagataaagagaaaatagatgtgttaatgaggtgt

SEQ ID NO: 11029 - DNA, 599 bp, Glycine max
  unsure (1)..(599): unsure at all n locations
ctgagtgtgctttgacttcaactagctacagcattntatagccactccaaaatagatactagtgcataactangaatananattaactatgctgatgtactgaatagggcaccaaagtaccccacagcacaagtagcacatttgtctccaaaggctgtgctangtgccantgtgcccttatacacttgactnacctaactaagcctttantgataaccanacatatttggtcagcacttacaggatgtccatattaacaactaacactctaaatgaacaagtgggcattagtctctcattggcctatcactacacttgacttctcttgaactgctgatcaataatgcacactgtagagctctggcttctgtctacctgatangctcagtctcatgacttgctgtctgatgctaatcacccatgacgcgatatctatcattcattaccttctatcctccacatgactcatgtgtagatcattactttgcccgatgtcttcactccactgcctttgttgttcttcctcggcaatgttgttcccacgcctttatgttcccttgctatgtcgccattacatatattattcgattgacctagct

SEQ ID NO: 11030 - DNA, 173 bp, Glycine max
tgcttcctcggggccattcctgcgaaggcaaacatttggaaagttaattttaccagtgggacgttactctttaaagcaaaaatggcatataacctcctcccataaatacaaacatcaatgtaaatttagagtaagcttatgcgcatacttccttacaaatgttctcttgcaca

SEQ ID NO: 11031 - DNA, 169 bp, Glycine max
atcttcaggctgctcaattgctccaggttgctgcatgggagggcaaaggtctgtatggtggtcagcagaggagcacaaaccacaaactcttgcgacaggtacagatttctgattcaaggccagctgggttaccaagttgaccaacgcatccagtttgccttcaagcttc

SEQ ID NO: 11032 - DNA, 214 bp, Glycine max
ctttcttatctgccaggactgaatttggggagactggccaggggttgcaacactgcaccacaccgcttatatgactggtgctacgcactcgcgcacatagacaaccacagactgtggtgccttgttgtaatggatgcttgatatcacgtgatatcagtaataacgacaatgcttgatatcaagggtactcactaacagcgataagttgatatca

SEQ ID NO: 11033 - DNA, 277 bp, Glycine max
cgttctcttaaacataataatcttcccggacaaacaacacggtgatcagctgcacctggaccccggagccacagaacgaccggcggcatgcaaccttgtacgaccacggggggcccaccacaggcaatgactaggaggcggcaggacaaaggaagcgcggaacaccggccacgaacacgaaagcgggcaaataaccgcgcatccgacgcaacccaccatcaaagtgaactcacagacaccgacagagcccatgtccttaaaagtgacaacgcgggga

SEQ ID NO: 11034 - DNA, 67 bp, Glycine max
ttactaaaattatatctgatgacagtgcatgcaggaaaactgcttaacactcctagactacgtgtac

SEQ ID NO: 11035 - DNA, 180 bp, Glycine max
tgcttctaaaccttgtacaagaatgaagctctgataccacttgttagacaagtggcctcagatatcttaagaaggggggttgaattaagatattccaaactgtttcccctaattaaaaatctattttactttttactcaagttatgaattcccttaatgacaatcttcttaaatattaat

SEQ ID NO: 11036 - DNA, 176 bp, Glycine max
tgcttccacaggcaccacatcacacaaaacaaaatccttgtatttggcaatggagaaaccaacttgaacttgcttattcatgatcattttaccatcttcaataagccactgaagcttgtaaggtcgcggatgtggtttagactccaaattcagttttgacaccaatcttgcactac

SEQ ID NO: 11037 - DNA, 151 bp, Glycine max
tgcttctacttgaagaaaagtattacaacatcgaatacatctaatggtcagacacagtgtcaaagctacacaatgtgtctttgttatacagaatggtgccacctttatctctgtatgttgctgtagctacatgtatattataaatctgaca

SEQ ID NO: 11038 - DNA, 175 bp, Glycine max
agcttccattgttcaattttgagcgtatcgatatattatgcgcctgaatcggacctccatgctaaaagttatgaccatttgaatttcccgagagcttccgttgttcaatttcgagcgtgtctatatattatgcacctgaatctgacgtccgacttaaaagttatgaccatttgaa

SEQ ID NO: 11039 - DNA, 574 bp, Glycine max
  unsure (1)..(574): unsure at all n locations
tggaaatatcactgactcactactatctacgactcatcataacagtggttatacaataagtatctttatctatgaaggatctctaatctgaggatcagacacctgctgatanagacttacaccttggtgtgcctgctgaagaggatcttcttcttatataccctgtcttcaacacaatccagaaatcactctgccagaatatctgtggcatacntcatntacgcactcattagtgatcttgagctannatgattcanacgagactttcatctcgttggatcactcatttgagcctgagctcagtattgcattttattctgcagcacctaactacttcatcatatcttatcagacactataacacaatacactattctcttctacattcgttcatagtatctacactacagctgctgggtttaaacctcatacaaacttctgtcctgacatttaatcataacgcctcatataacttctagcgtgcggttatacataagacccacgcaacgtcagcgacctttgcgtaacccctctgcctatttttttccgtagcaaccctctttcccctgccccg

SEQ ID NO: 11040 - DNA, 162 bp, Glycine max
tgcttggttatctccttcttcactacgtcaagaatcaccgggttgagtcttctctgtggctgtcttgctggtttatctccatcctctaaatttattcggtgcatacatgtggatgggctgaggctcgtgagtgggcggcacaaccgagaacatttgcctgat

SEQ ID NO: 11041 - DNA, 176 bp, Glycine max
ttcttcatactcaggattcacacaatctacaatacgattatcctccatgagatagcaaggcaaaacgaccggattgacgatgaaacgctgcaacttatgcgctttgatcactagttctacatgttgtcgccagtaaaactgagtgataaagtgtttgagaaggtgagaaagtgttt

SEQ ID NO: 11042 - DNA, 177 bp, Glycine max
agcttacaaacatgttttaaatccaagcccataagtaaaatcaaatcaaatctagataagataagataagataagatctagatgaaataatatctagatgagctcaaatctaaataatatctagataagataagatctaattttatagaataaattagtctgccctcttcaagtcca

SEQ ID NO: 11043 - DNA, 445 bp, Glycine max
tttgctgtgcagcttgaccttcatctactgtctccacgccattattatcattattataacttattagctgattgctttatatgattgacattactttctattgctgatgatacagatgtttactttgattatgtatcatatacgtgtgtgtctacttgatgtatgttcataaggtgatgtgtctttatctaattgtcccttgtttgtgtcgaggaattttatacctgactattcgagtactatcgcattttgatcatgattcaaggataacgcttatacagataagtttttcaattaagggcaactaattaaccagataaccaaccctacactaccaaataagcactaattacatattgttcataaacaacctcacaagtcagtagttattctttcatcaatttgttttgtttccataataaccttacctttgtcctcatcaact

SEQ ID NO: 11044 - DNA, 173 bp, Glycine max
ttcttcttgatttttatttttttttattaaactggggaaaaataacaagactattctaagatatccctcagcaagagtttgaggaggatcatttcaaaaacaaaaacgttgggtttgccgaaccacattagaaagaaagtgagcaatagtgcagggccatttcttgatttgcc

SEQ ID NO: 11045 - DNA, 173 bp, Glycine max
  unsure (1)..(173): unsure at all n locations
ttataagaataattcttatctaatcatgttgatnttatgacattaatttgaattaacactaaatgcaaattattccttaaaatgaaatgtatcttttgtgagacctcaacgtatgtntctttactcatcgttcctganatctaactatctcactctatctcctcctggactta

SEQ ID NO: 11046 - DNA, 174 bp, Glycine max
agcttttttataagctaaaccattttatcaataaacacaagttgagttttattcagaaaaattagagtttatctcttttatcttggtgagagtgattctcctaagttcttgagtgattcaagaacatcctggctatatcaaaggtctttcacatcctttgtgtgttgccctcgc

SEQ ID NO: 11047 - DNA, 99 bp, Glycine max
atactctgcaggtgcataaacaatgagactgcgcactttctgatgcttgtaggactgatctattctctgtgctgatccctctagaatggacactcccca

SEQ ID NO: 11048 - DNA, 182 bp, Glycine max
tcttcttgtactccaatcattcataaacctatttgaaacatttcacataaataaagttaactatatattgtaacaaatattaattatgagttaataaattagacacctattaaactgaattacttacatcatccacaattgtagtatagatatgttctagcatttgtcgcctaaaataattt

SEQ ID NO: 11049 - DNA, 265 bp, Glycine max
  unsure (1)..(265): unsure at all n locations
taaatgctatactctgtccgagaatctatataactctatttatgagtggtacactctgaaaccgctgcaatttataagatgattaatttggagcctgacangactatgtccttatatgccgagtgacatgaaactaactatgactgagagaaanatagtcattattaaggcnaattatactctcctagataatatcttaggtcaatgtaatgtagattggatcctcagacctaggcacatgtaaactgtaccttactcgattact

SEQ ID NO: 11050 - DNA, 173 bp, Glycine max
agcttgtatcacccgtgccaatggcgggatcaacctgtatcgccattgccactgacgggtcatgctttaccgccaaagccaacaacgacttccatgcaaataagagaccctctgtgcaaattatttgaaaacaaattatttgaaaacagatccatttacataaaaaaaagttt

SEQ ID NO: 11051 - DNA, 208 bp, Glycine max
catctactgcttgaactggtgttagagcatatgtgaacctactgctgtagaggtgcaatgtgtctgtaaacatctaactgagtgctaattaactgaactgactgacgagttttgcacacattcttagtcatctcaaatactacagatatccatactatatttgtaacactatgctatgagcactcagataatttaaatacactatctt

SEQ ID NO: 11052 - DNA, 170 bp, Glycine max
ttctttgtgcaacttaagcatggaaagaagatagtctacactaggcatcaaatatttctcaaagaatatcacccatatcgattgtaaaaagcttttaatggaagtccaaagtctggattttccctgatacccttatcgagaaatgaactttatgagcaggtgaaggacat

SEQ ID NO: 11053 - DNA, 249 bp, Glycine max
aattctcctgaaaactcttctctatacttacactttgacaatgaactgttgactcattaagagctgtgctgactctctatcacgtggatatgtacgctgcctcgtcaaactcatgggtgcgtgtacttcttctagtaaagagacttcatgctgttaatttatttcccgaacttacctgatgtagaataatggaatatactaggtacctatgttgacaggattaagattttaattatttgtaatttcact

SEQ ID NO: 11054 - DNA, 179 bp, Glycine max
tgctttgcaaaaagcttggcgctagagctgacccatcaactgccctaactcttttacactggtgatccctaggctcttgaccttgacttgatagaacctctttttaagcgaaggcatttgacttgatcccatgttttactaaagtgaacaaaaatcggtgcgaatcaaaactccaacat

SEQ ID NO: 11055 - DNA, 531 bp, Glycine max
  unsure (1)..(531): unsure at all n locations
ttcatgctcacagtgcgaatggccatcatggctaggcgcgcatgtgccacagtntccatcacatgccgataaccacatccctgtgcccactcactgactacgactccacgagccatatctcgtttctcacaccggtccatcatctccagctcacatatcagcaacacaccacgccagcttcgcacaacgacaaggaaccgcaaccaccaatcgtttcatcaacccgacnatctgatcattgaacgtgacactcaattctgagtttagctaactacttgcgtggatacacaactcaactattcatatctccaccgcatctgattctgcttgcgattgtgcattacagaatgcagacattaaccctccttcattgcaatatctcagccatatgtactgtacaacactgacacaccgataggcaaccatatggttgtgaggatatagatggactccccccactatgatgactatcagatttacatgccgctctgtgtctccctctgaggtgatactcaaacctactctatatcg

SEQ ID NO: 11056 - DNA, 211 bp, Glycine max
  unsure (1)..(211): unsure at all n locations
ccggggatccattctagacaacctgcctgcatgcatgcttctcactgcagnagggatgcatggctttccatcacctatgaaaaacctgacatatacacacccggtattaggcctcatgagctttctcatattcaccagcttattggatttagcttgggtgacttccctttcaaatacttgggtgttccccttttatcatctacattaaatg

SEQ ID NO: 11057 - DNA, 177 bp, Glycine max
tttcttcgcattttcagaggatgcaaatggggtttggaactacctcatgcactcgtctaatgactatggcatcatttctggcactaaactgctgggagtgggaggccatcttctcaattaaatggctggctttgacacgagtcatgtcaactagggctcctccactggcgaaagcta

SEQ ID NO: 11058 - DNA, 520 bp, Glycine max
ggaattcgtaatcctagtcctggcgtacagccaaaagcctgactgctgtaacctgcagctattacgcgtctcttaattgctcaccccaacatctcagacgacgttgacttagaatgtgatgctcactctagactctggaccttatgactctaaaaacactgactgctcgtgaacctactagcttgtaccgcgatcttcaattgtggacttcaacatacctgataccgtggatctgaaaatattgatggcaaactccgtccagagcatctatttcattcgcttgttctgactagaaacatcttttgtttcatcattagtcagctttctcccctcccatacccaactatgttctgaacaacgagactctcacaattcatgtcggtgaacaaccacttcttttcagacagctctgctgaggctgtgtttactccctgtgattctaactgaacgactcttgttctctctgcgctggggtcatgttcatcttttcagttttctgtactctccttgtttaatatcc

SEQ ID NO: 11059 - DNA, 176 bp, Glycine max
agctttgagccaaaatcctgactcaccataaaccttgacccagggtgagaatgtcaatccttaccctcggaagcaaaaaaaaaaagaagaaaaggaaaatttccaatcaaaggaaaaaatagaggaaaggaaattcccaatcaaagagtgggagaaagcaaaaagaaaagaaagaa

SEQ ID NO: 11060 - DNA, 524 bp, Glycine max
  unsure (1)..(524): unsure at all n locations
tcttgatcctactgtcnggagtctgaactntgctncttctctaacnactctcatagtctataagatatttggtntgtattcaagagctttaacttattanattgtggctgctctctctagaaaagaataaaccctccaaatgctccactcgaacactaaatgttgggtntgtatcatagtcttataaaagacaacaacaaaagactatatatattatatcagtctcatttactgtcttagatccatactgagatctctacattatgtggtcagatacaacatgtgcactgagatgaagatctattataggagtgtagtaatcaataatgatagaagacatctcatactgataatgtctgtacacacgatttagacattacagtacaaggtagtgcatacctctgtagcntgtcgnggaagtccctatattacgaagacttgacctcccctctaccgaatttatcttatcctctctctgctccccgctcctactcctattagcctcatctaaatctcaactcccg

SEQ ID NO: 11061 - DNA, 182 bp, Glycine max
ttcttgttaattgctattcatgaactttaattgcattaaaaataggagaaagagtagcaatgtacctctaatttatggtttctttttgtaaataatttagtcttatgtgaatttatacagtggaaactcgattttgttgattaatgttggatttaattgggtttttaggctaaagaaaagaa

SEQ ID NO: 11062 - DNA, 248 bp, Glycine max
tatactacttaattttatagtctattggtagataataaactatactaatacatagaaataacaatctctaaataaaattaacataaaattttataatttagtattatcagtgagaggtatttcattacttgactatagactagaaaactattggctaatggtatataaaataatactgacatgtgctgaacgatatacatattatatataattacatattatattgacatatgcatttagtgtacata

SEQ ID NO: 11063 - DNA, 159 bp, Glycine max
ttctttgatgtggatggataggtttcactttcactttgaatggaagtcaagagcttccaagactgttagccaaagcaaaggcaatggcggacgtgtactcagctcccgaggaagttcatgggcttttcgattattgtcagcatatgatcgagttgatgt

SEQ ID NO: 11064 - DNA, 176 bp, Glycine max
ttcttattattattgttagggtttcttctgtaatggctgactaaacaccctagttgaggatttctaatgaacagctgatgtaaatactaaatatctaattgattatgttttctgtgttcaatgcttaatgtttgtatgcttttggtctgatcatccatttgtgtgcatagttaggt

SEQ ID NO: 11065 - DNA, 488 bp, Glycine max
tgtcttaccctgactcattactattccttctgggatgttcggaagaataagtgcggttatacccctcaacttacaagctggcctggctgcaaatttctacaaccgagagtcgactctattactcacatgaacctggcgagttgtgactgtcatacctgactgtctgtaatatcgagactcctgttcttacacacttttacatcttctcaaacttgcgaatttatcacagggttaatctctcccttgctcctcttcgtgatgagcggggacccacctcggcactcatcgaatgactttgcaacgagcgggtttcttctcaggtatctgacgggttcgtgaagagtatgagggccttgactgctgaattcaggtgtccagtcacgcgtattgctactctcctaacttaacaacatcctcccgtttcgcgagaagcttccttgaactcgtgttaccgcgtcatccctaaaatcccatgcggtcggctgcct

SEQ ID NO: 11066 - DNA, 220 bp, Glycine max
tcattgtcttgccagattaccgcttctacaatcatcgcaaaaacgcaaatttgggttttcagaaagttcattgtttatcggatctgaagaccactagactgaattcgtctagacctcttatttgaagaatttgtattacacccttcaaagaattacatttgagtgtgaattctttgaaagggtttaccctcaaagattcatggtttttgttaatctcggt

SEQ ID NO: 11067 - DNA, 204 bp, Glycine max
tgtcaatacatattaggcttatctaactgtcttaaccgtatcctgcataatatgtatggaagtgttttgagataatatctgttttgatgtgagattatactaagctaattctattttatactgaagagagatttattgtgtggggaatgaataatcacactataactatctactctacatgattatcacaataagatttagctg

SEQ ID NO: 11068 - DNA, 183 bp, Glycine max
ctttattcttaatatgcatattatattaccagggatgattttacatgcatccaaggatctaaggcatgatgagaatcatgagacaacccactttcaaagctagataaataacatatcccaatttaagataagaaggacttatgaatattccgaatctatgatcaaacaaaaaggcataaatat

SEQ ID NO: 11069 - DNA, 522 bp, Glycine max
  unsure (1)..(522): unsure at all n locations
atttgctcattactacctaaactatagtaactctattcttctgaatctaccatgtgcttggtgtcatatctacctcgtgaactaacgatttgcctcaactatgacactactatggcttgcgctgtaactgagtactgtgatgcaacactcttctaagctgctatgcttaccaggaacaattatatttgctgcgtgtatgattatggacctacacgagacttaatctttcatctgaactctggatatctatgaaccgcttcttnacaatcatgaacatctctacggaatcctctgcctatctggatgctaagttagaatccgcatgcctcgttgctgataaacatgtacaataaacatgttgtgatagatcatctttagtgctatacgagtagtacaatcactgcctataactattgcacatatgttcacttgtttagtgtggcacgtcaagctttgtcagttctgtgtacttcactgtagttggtcttgatcgatgtagttaacataggttcggcactcccg

SEQ ID NO: 11070 - DNA, 182 bp, Glycine max
cgttgcttgcattctttgtgaaatcgattacacggatttggtaatcgattaccagtgactgtttctgaataaatcaaaagatgtaactcttcaaaaaggttttgactttttcaaattggttttaagtttttctaaaagttataactcttctaaatggtcttcttgaccagacatgaagagtc

SEQ ID NO: 11071 - DNA, 168 bp, Glycine max
ttctttggaaagtgttgtttttcaccttttcgctaagccaatctgctggcttaatgagcgtctgctaagcgcaacactcatgggctaagcgtgaggaagactctggaagaagatgagttgtacaggttcactaagtgcaccgcttcatctcactaagtgcaccgcttc

SEQ ID NO: 11072 - DNA, 81 bp, Glycine max
ctaacatcttcacattcttgcttataacagtatgcgcgtgcttgctaaccattccgtcgatcatccacatactggcatata

SEQ ID NO: 11073 - DNA, 175 bp, Glycine max
ttctttcattaagttatgaccatttgaatttctcgagatcttccgtggctcaattccgggcgtctccatatgtcatgtgcctgaatcggacctgcgtatgaaaatgttatgaccatttgaacttctctagagcttccgttgggtcatttcaagcgttcttgtatctgatgtgcct

SEQ ID NO: 11074 - DNA, 503 bp, Glycine max
  unsure (1)..(503): unsure at all n locations
gtcctgcatcactagctattagcgacttatatanacagtggttatacaataagtattttattatgaggattcaatctgtgataaccctgtgtaagattcactgggtgctgtgaaagatttttctattcctgcttcacacatcaaatacttgcaatattgtgctactccattaccctaatagtgattgaccaatgattcacaacttcctctggaactttgagctgctatatgctcattttgtcacatctactacttacatcctctcattatgcagacactataaccagatacactattcacctctatattcgaatcaccgtatctaatcatgactggcgagaaataacttcatagcgcggactataagtaatgaacactcgaaaagtccttcatcgtggcttaccangatgacagctaacaagtatttcgtcggcgacaaccgaagtggtcaatgatatcagtccgttccaatgtcgactgatcgtctactacggcatctgcca

SEQ ID NO: 11075 - DNA, 180 bp, Glycine max
ttgctttcaacaagagtctttacaaataaccatcatgaagcagaaaactaacaaaactacccatcatatctcccaaaaccccatacccacgaaatttaagagagaaagaagtccacccaaacctgaaatttcgaagtcccactcgtagccacgcacttcacgactccaaaaatgccctcc

SEQ ID NO: 11076 - DNA, 170 bp, Glycine max
agctttttgatgatgaatcaagttgattcaagaagttttgataatgacaaagatattgacaaaaagcccaaagaatgatttcaagattaaatcaagaacaaattcaagaaccaagagaagtttgatttcaagattcaagaagagatgaattcaagttccaagagaagaaa

SEQ ID NO: 11077 - DNA, 519 bp, Glycine max
  unsure (1)..(519): unsure at all n locations
tatggtgctctctagctaatcttcgcgaacatagttatggacacacttatcttattgtaaacacacactgtgtcaatatctagtgtctaactgtgtaactgttgtaagcaatacatgcaatctngacttgaagtaggaactatggtaccagactaactagcatatgtgaaaacagataaatgggttatgtctttgcttttggtaatgacaagtgatcattgctgaaaaacatagaatgtcatgtgattgtatgcaaacatattatttaagtattaacatacttgatactgtggtatatgtctaacataacaatgtacgtcataggtctgcagctcatagttatagtgcggagctgatgacgaaagcatggtgtatactacgcaagctataaccatttgagactctcatactactcatttaccacagctcttgatgttccgcaggtgtatctttcaagagcctcattatagttcgcagctatgtagacctcacagtgactatgtaggataacatatcctc

SEQ ID NO: 11078 - DNA, 178 bp, Glycine max
agcttattttgatgatgccaaagactcaaatcaggaatcaaagattcaagcaagtttcaagaatcaaagactcaaatcaagaatcaagattcaagcaagtttcaagaatcaaagattcaagtgaagattcaagagaagactcaagatatgcaagaacctcaagaaaagcatcaaggta

SEQ ID NO: 11079 - DNA, 125 bp, Glycine max
  unsure (1)..(125): unsure at all n locations
gattgttctgcttgggactgtaaaccgaccagtatctctgtgaatantttgatcattatagtacaaggagtatatctctatccactgagctacatcagttgaaattatggatgaggtatgttgat

SEQ ID NO: 11080 - DNA, 183 bp, Glycine max
tgcttgtagaatggctagacatgatacatgtcagggcttggtttggttcaaggataaaagggatgccccacattatttccatgacacaaatgcaaaaaatgatgatttggaaattttatgcaaaactggtcatgcatgcgcctatgcggacgctcaagtgtcaaatttttatggtcatgtgat

SEQ ID NO: 11081 - DNA, 165 bp, Glycine max
tcctctttatctactactctaataatctgactactccaccctataactactaccctacaaacataatacaaaagctactcaacataagccaatcagtaccttcttaatacaatcagcaacagaaactttatttacaatacgactctactgctaacactagtataa

SEQ ID NO: 11082 - DNA, 176 bp, Glycine max
ttcttgaatcttccttggtcgggtacatgagcatatgcaatgctcccaaatactctcaagtgatcaactcttggcttcactccactccatgcttcttgtggtgtttgatctttgacattctttgttggggagcgattggacaaataaacggcacatgcaacagcttcggcccaaaa

SEQ ID NO: 11083 - DNA, 179 bp, Glycine max
gttcgcgtcctgcacgaaaatgagttctaacaagcttgtttacttcgaaatgggaaattaactgatatacctcatgctctttaggggatacggtgaccactgttgaaaaaccctaatgcaaatttttattgccggcatgaatctctgtatctgggaaaccattggaagacggccttata

SEQ ID NO: 11084 - DNA, 256 bp, Glycine max
tactgtactgagattgtgctcacgttctaaccttctacactacaaagacttgctcattatatgcggctagaattttccaccagacaagtgaacattgtttagtaaggctcacacaataaacactgacattttcgctcatgtgacgctatcgcagaagacgtaggctctcaaccgattagagctcagaatgccgtactcaaaagttcaggccgtcacgtcgcataacacccctgacgacccctctcctcgggctgaa

SEQ ID NO: 11085 - DNA, 176 bp, Glycine max
tgcttctaatttctatttccaaaacaaaatcaaattattaaaatctcgaccattaatgagttgaccattatttgaccaaagaattttctctgaattattcttattctttctaggctttaggttaaaaacttcaaagtttaaccatgcttaggtatcctatgggtaacatctcattt

SEQ ID NO: 11086 - DNA, 256 bp, Glycine max
  unsure (1)..(256): unsure at all n locations
gatgcatgtcatgtcatgcttcactcattatttatttatctacctacctacttttccataacgtgctccttgcttctttttcttttatntcctcctcctgggactctctctttccttctcttttctacttcgaacgtctctccttcctcttttcttctttcacgcattttccttcctctctcttctttcttccttgagagcctctcctcttttttctcctttctgcactcttctggaaggagccacacctcgcaac

SEQ ID NO: 11087 - DNA, 174 bp, Glycine max
ttctttttaaatgggtaaaaggctcacattcactttcttctacatcatattcaaacttgtccaaataaataataaagtcatctcgactcaaagaaagtcatataagtctcatacaattaatatagaacctatatcctaatgtcacatcctatcaaagcgtggtgttctcgtgtc

SEQ ID NO: 11088 - DNA, 176 bp, Glycine max
cgtttgcattcttcaccaaaaagatggcctctccaaattccttatttccagaagggaattctatcactagacctccaatctttaatggagagggttaccactactggaaaacccgaatgcaaatttttatcgaggccgtaaatctaaatatctgggaagccattgaaatagggcct

SEQ ID NO: 11089 - DNA, 177 bp, Glycine max
agcttttaattatgaacctttggcgttgattatacacgacattacacaaaaatggattaataataactctagtgaataagatcaagcagaggacaaggaacaagggatttaacaaaagcgtttgtttttttccgaggagaataaaaccatatgaaaattgattgaacaatgggaata

SEQ ID NO: 11090 - DNA, 167 bp, Glycine max
agctttaagggcaaagcacaaggaattctataatctgctatcgggcttacagctcccctggtccttatactaagtcactgaggtacttgggcctgagtgtgtagcgttttggactggtattgcctctgctatttgtagacatgatttcctcttggtgggaattattg

SEQ ID NO: 11091 - DNA, 305 bp, Glycine max
  unsure (1)..(305): unsure at all n locations
acgttcgttcttgggtgagccaggatgtgatacacaatggtgagatacatgctaactanggaaacaatgaatgatcatcctacaactatgtaactgaatgaaacgatgaaaaacccaaaggatatttctcaaagatacgaacatttttattatacatgtttaaaaacaagcgttataattacggaataaattgatggataatctgcatgttgggataattaattacaaccaccgattttttattttaagtaatattaccttcgacgctcgttctgacttctacttgccataagttatttttatcg

SEQ ID NO: 11092 - DNA, 180 bp, Glycine max
tgcttttcaattcattttatgtacccgtggtggtccacatttggtttcatgtatttttattctcgttttcatttactttttatacccctttttgacgtgcttaagccattttatttaagtcatttctcgcttaacctaaaaataaaataaatttccaccgatcgtttgaattgtattatc

SEQ ID NO: 11093 - DNA, 328 bp, Glycine max
  unsure (1)..(328): unsure at all n locations
atgactatgtctcgtaccacttaagctatcatgactggtactagactcctacctgtcataatttcaagaaaggcctacacattctcgtaccctgtgagtattcaggaatgtggctaccagaggctactactatacactatcaggctacctaccaaactagtacctgaactgctaccaagtgctatgtacactaatttttacttttctttctactnacttttcttcactaatatcactacattcctctcaatataaaaagaaaagtgccgaccttagctctactcattgtccagcatgactttattcttttctacactgcgagtttaca

SEQ ID NO: 11094 - DNA, 182 bp, Glycine max
tcctttagagtgcacccgttgcttgcaatcttgatgtgaacaaagacaaggaagactttccttttttacctagaaatatgtttttccaaataattcaatattaatggtctaagtgtttaggaattgttgcttttgcttatttactattactatatattttggaaaattttggctcccaaaaa

SEQ ID NO: 11095 - DNA, 174 bp, Glycine max
agcttgagccagaggagccagcagcagagggggaggatgagctcacccctcttaagcccttttgttttgatgcaggtgtacacatggctcaggaggaggagacttccacagaccaaatcctagagccatccccaacacccataactaatgatgccataccatctgcaccagcat

SEQ ID NO: 11096 - DNA, 488 bp, Glycine max
  unsure (1)..(488): unsure at all n locations
attctttggctctgcctcaactactctcacaatgctatattcatatctgtgataaactacttatcaccngcttgcagcatatgncnaccacattatatatatgatgtcaattccaagaactatcttcatgacttcacttatactgtagaaacagatcagtcaatgcaaacttattctacatacctcaacaaaaggaatagtcatgcttcagatatcagagtcttgtgacttaacaatctatattcatcttatagactacaataacagttgcacacatggcacacaattatatgtgtaatctcagactatcttaatacttnactttctgagaacagatagcaatgaaactatcacatctctgcttctntaacctcntcccactcatactacccactcatatttcctcacacaaacccccttactgctgcctataatcctatcagtaaagaggacttttaaggaggtcctcagtgagtgccacttgtctc

SEQ ID NO: 11097 - DNA, 174 bp, Glycine max
ttcttttgtccacaagaaaatcacttgaattcgttcaaaggtccaatgcattaaatggtatttttacttttagacggttaaaatgaacttttaaaagtctaaactcaatcctacgcgcaactttctttctttaaagaactacgtaggtctgagttcctcatcacaattaaggaa

SEQ ID NO: 11098 - DNA, 559 bp, Glycine max
  unsure (1)..(559): unsure at all n locations
atctttgaccatgaccttcaactactgctgatctctccttctagcatctctgctataaatctgctattactgctgtgttgtanantgtcatatnggctagtatacatctagttgaattcaatgnatatgtacacagtcccactaagtctgagcttcttttgtgtttgttcttatctaacatctaatctcttgagctactgcttatgtcttcatgtttatgtgatatctgaaattgctgtaacatatggtacttactcatctttgctcggtatctgccttgctctgtggattctaaggatgggctcctgtattgatcaacaggaaatactaaacttgctagacctctatgtgatccacaaaccacccaatgagcttngtattgatacatactactatgtcaattacaaacctattgaaatggcgccagcccctcttggtaatttgactcttaggaggtgggactatggcaccctgaccaatattgttttatatttccttgccgagcgctacaatccttccttagttgttatatctttgcccaaactaccgctttgtgggc

SEQ ID NO: 11099 - DNA, 176 bp, Glycine max
agctttccacagttgaagcacttcaattgatttctatccactatctttcttccacctttccattgactattaccacttcttctttctgagttttctgacttgtcttgatcagatctttcttgatcttgatattgagagttcttgtaatttccacctctgccccttcctcttcctcg

SEQ ID NO: 11100 - DNA, 129 bp, Glycine max
acataatgaatatgtggagtactatccaatgcaactcttttcagttcaactgatgtgctgccttcttttcgacatgggtaagaactgctatgttagagattagtataaaatctctttggtgacctatcg

SEQ ID NO: 11101 - DNA, 526 bp, Glycine max
  unsure (1)..(526): unsure at all n locations
gatgttgcagctatgagcttcatctagctgctgttacatctccccttctaagccantctaaaatctctcacatctaaaatctcatgattacattctccctntntgatatgacatnatagccctgaatagatgagcagcaacagcacgattattanattgcgtactctctatcttagagtgagacactgattctagctttctagcttctacncatttctcccttgcacataaagcaagtctggatcaacaattaatgaggaaaatattcagttagctacatcaatccataactcacgatcacattaacaaccaagttactaaaattgatcatctaaatagctgcagatagctcatccgtaaactttaactacaagggggtgagactcagtcatctatgtgattcgacgtcagcactcctaaactatgagtttagggattagggagtgctgggggtttctgctactgcagcccgctgagcgtcagttcttaacaatcttgggaggggatcatcaaagaaaaatagttg

SEQ ID NO: 11102 - DNA, 185 bp, Glycine max
tttgcttgcattcttaaccactgaggggatggaccttttcaggtcttggggaggatcaataataatgcctataggtcgaaccttcctagagagtatggagttaacaccacttttaatatttctaatttaattccttttgtaagtggagctgatatagaggaggaggaaccaacctatttgaggtc

SEQ ID NO: 11103 - DNA, 169 bp, Glycine max
ttctttccggatttagtcttcgccagtgaaaggatcgatgtgggtccaaaaagaggcaaatttgatcatcctactaggacgactgagaaaactggggcaaatgaagagggtgagaaagagggagaaacccatgttgtgactggcattcctatacggccaagtttcccac

SEQ ID NO: 11104 - DNA, 171 bp, Glycine max
ttcttaaccctagaggggatggacctttcaggttttggagaggatcaataacaatgcctataggttggacctcccagaagagtatggagtcagcaccacttttaacatttctgatttaattccttttgcatgtggagctgatattgaggagtaggaattaacaaatttgag

SEQ ID NO: 11105 - DNA, 566 bp, Glycine max
  unsure (1)..(566): unsure at all n locations
tatgtcnntganngacnnttgagtcacctgctgctgcacgctagaccaaacaatataggtgttcatatagaaatagagtggactgtgtcttgagtntaaggctgcacatacacttacagggagactcatttgtacaatatcagcctcaccatctccctgncaatactggatgaagatcatcttgttgctatagcatatcatctgacccaatatgatgcccaagtctttcaatgactgctgcctattcagcgcanataccactatctgagaccaaagatggtcgctgacacatatagcaaccagaaaactgcccccacaacggaagcactaatgctctttgcgatcatctatctccctcgcattatcagtgaaagataaatccaattacttttcctactagtatgctaactgcacactaatctgttacaactgacacaattacatcaacaccttactcaactatatcactgatctgacctctctagtgaaatgtcctgtctgtcaaatactcagcagaaactgcgccataacattctatgtttttgtatctacttagaaacaaaact

SEQ ID NO: 11106 - DNA, 453 bp, Glycine max
  unsure (1)..(453): unsure at all n locations
ctcagctttacccctccaatgttgaaatactaaacatcagaagtgtaaatcttaaagttaaaaagctatccacgaagcaggctggcataaccaatcagattgattaatctattcttccacaatcatgcaaaaatataatttggtgtttcatcatataaccacgagttgctgctttgaaatgctcattttgtaaatcttgatctgtataggctgagagcaacatatcccaccgtcacaattctgccatcaaagaatcgtccgtgcaaactatgtgctgccgaacaacatgcttcagctcttccatactcaacaagaacagaacctggtttaaatacatgaccataaatatcctcttccgtgtcaatgctcttttggggactaaccaattctgcactgatatcccattcagaaaagccttnctgaaatgcacaaactgtgtctttagattcatat

SEQ ID NO: 11107 - DNA, 69 bp, Glycine max
acatagacttaacgtaactgcaatctcgaacgtcgaactcgacctcgtaattttcgacatttcacaatc

SEQ ID NO: 11108 - DNA, 266 bp, Glycine max
cctttagtacggaatctatccttcctaagatggtgccttacccagtcaccctcgttaagaactagctcttttcttcctctattgcctttagttgaatacacctttgtttggttctctatttggttcttaaccctctcatgcaacttctttacaaactctgacctagattccccttctttatgtataaaagaagtgtctagtgggaagggaatgaggtctaacggtgttaggggattgaacccatagacaacctcaaaaggggagtg

SEQ ID NO: 11109 - DNA, 257 bp, Glycine max
  unsure (1)..(257): unsure at all n locations
agatcaactgacatcttcataaactgtgatgaangtgtttttactaaaaccactactcagaagactctaccaagtagagtgaagtctctttctctttattcaaataccagactttatcagacatggtgttcaattggatcttgttgttgaggaccatgtattataaacacttattccgtgatgtaactcagatgtatcacagacgtaatttagatcgtaaggctcactaaacccgacttacatatttagggtatgct

SEQ ID NO: 11110 - DNA, 412 bp, Glycine max
atggaaaaaatatcatcaactaattaaaaattattttaaatgattttaatgaaattattaccaaatttattattttataaaatatatgaaaatttataattgaaccataatagaaaaaagtttagttaaatttttatacattaccaataataatttgtaattagatggtaccataaaatatctttacactatattatttactgtacaatatctttatattctaacttaaaacacgttcagaaagtttttaagtgaaatcgagtattaaacatgtggatttttaaccgattgttttgatattgaaggacccgaggtgcaaagattatgcaaagtaatacgatcaaaatgatcaatccatataaagttaagaatatcatttatattataacactgtataattatcttatatata

SEQ ID NO: 11111 - DNA, 429 bp, Glycine max
  unsure (1)..(429): unsure at all n locations
tctatgttgtgtctataaatacttgtattctatcaattataaattattattggtatgattnttgttatagttatcatagaagacaaccaatttattgcattttgtgattggatcaaatcatgaaaaccctttacatggtcagtatcaatcaatcaattaaaaattagggttagtatgatttttaagataattattataaaaatttataaatttatgatactacctctgaatctattagtgtacattacaacttatttcttataaatagcatcagaggttagtatattataatttgatattgaatgacattatgaaaattcttttatactgtaatgcatgtactgatttctcttttaatttggtaagcacgcagcggagattccaatcaaagaagatccagtggctaacgaggtagcactgggactttgt

SEQ ID NO: 11112 - DNA, 589 bp, Glycine max
  unsure (1)..(589): unsure at all n locations
ntgtccttgcggacatcaacgcgactgcangctgcagctngaangangaagtgtagaaaggtgannacttcttgctttattcgntgaccacagagtggtacctggagaatatgtcgcggggtcaggagacctctgggacgtcaggtggtgtgctattgcccanaaccaagcttgagcaatcccgacccaaccctggcatagtcagtcagtgagaacctgtgatgtacctaagcangcgagctcctggcagtcaacagataaattaactaatacacaaagcaggatgccgtgtggtggtggtcactgtaactgtaatgatatatgggaatggctctggaatcgttaccaaggtgggaacgatacatgcttaaatgaaacagaggtaaatgtctctgtatcgatacangggggtatcataccagctgaaacgagcagaactagaggctctgtatcattccaggtgtttatctcacttaataccccttattgtgtgtatctttataatgttctctatatctcttatcgcggatttataaaatactataatttcttctttacaaagatattctttcgtcccagataatgcact

SEQ ID NO: 11113 - DNA, 306 bp, Glycine max
catgtttaatagatgtggcttttgtaattaatgtttttagaccaagcatatgtgtgatatagtctaagtttctttcatgcttagtagtgatcaaatgtgaagtgattgaagtattctttttctctaagtttcctaagtaaaagcaataggatttacttctacttgaaatatcgctagaaccatcgaattaatcgattgcctagcttgctaatcaagtgccaaagtcagttttagaagaaggaaggatctacaacttaggataattgattggctttctagataattgattgaccctgtgtgcatagt

SEQ ID NO: 11114 - DNA, 413 bp, Glycine max
  unsure (1)..(413): unsure at all n locations
gacgagtcaaggttggaaagcttggtgttagaagataagttgaaggcttgtcaaagggcaaagagaagtttgacggagcaactgagcagaacgaaagagaatatgttgacaattattgatcaatataaggagaaggtgaacctagctgctagtcatgggcaaaggctggaggatgaacatgcgaaggtatcagatctgcatattgaaatggaagcaagagaaagggtgatagaatcattgcacggngaagctatgaaatggatggataggttcgctctcactctgaatgggagtcaagagcttccaaggttgttagccagagcaaaggcaatggctaatgtatactcagctcccgatgaagttcatgggctttttgattactgccaacacatggtcgaaccgatgtcccacat

SEQ ID NO: 11115 - DNA, 383 bp, Glycine max
ggacctataaaactcagctttccttccatggctattgcttagtggatggcgccttctctcacctcttctcctttatcttctgctacaactccatggctaaaaatcaccattgaagaaccttattgaaactcaaagatccagccaccatagaagcttctcaagcaagcttccatcaagtggtatcaaagtacaagagctttaagtaagtactccttaaacctccattatccttcattggtatttcttaatttttctacatgtatttcctcacatgtcttgtgttgaatgttgttaacatgatcctttagaatttccaccgattaaacttgctacaaaagctagattttattttctatgggtcaaatttcttgttcttgttcttg

SEQ ID NO: 11116 - DNA, 219 bp, Glycine max
  unsure (1)..(219): unsure at all n locations
ggatcttagcacggccctacacaatcaagaaatgtggaactcgattggtgtaaacacttcagcagctaaactaaaactcaggcaaaagttctgcagtcactaacagtttttccaaccaagacnagcagcgacacgaccctaagctactaccttcagggagaccatctggactcctcctattggcatgtgaatggactacatggaatactgtggttaatg

SEQ ID NO: 11117 - DNA, 450 bp, Glycine max
tcagaccaaggcaacacaaaatctaggtatccaaaacccctcaatttaatggattttcagggtttgagaagtgaaattgagaatgaggtaaatttggagcaaactctcacctcacacaagtctataacatcaatttaaacttctcaaactggatttacacctaaaattccaccgaatcaaaatttgactcctcaacacccaattttaccctagaaatggctctttgttcactttggtaatttgtttttctctctagcacaacccaaactttctcataagtcctaaatgacatttcaagctaggattaactcactttaacctccaaatgccactaaatccagatttggccttccaactctcaaaaactcactctttttccactcataacaccatattctcactttctaaccctaggttaactctacccttcatctctaacagttttccata

SEQ ID NO: 11118 - DNA, 625 bp, Glycine max
  unsure (1)..(625): unsure at all n locations
atgtnccttganncctngtacacgngatctntagagtcganctgaggcatgcaagctntgcatcatcaaacattcagctnggatcattgtctacaatctccctctntttgatgatgacaatccctgaaatcaagacaagctatatacaagatgatagcacgttcacacaacccttactcnccctatcttgtggcatgtatgcctaactattcttaatgatagacatctaatngatttgtaacccgacagtatgtctctcaagatctctccccctttgggacgatcaaaagactaagtcacacaactaaatcttacagagccaacaatatatcaaataaatcatacattgtctaaccaatcaaacaaagcgagagaataaaatacttataatagtgcatatacgatactagagcacacaaagccaatcacggcataaccnagtctaataaactaatactatatactagcatatactaactagagatgatgagcgggtgggatcaacaaaacgagaagaactctctcacttgtagactgttcatgatcaccgattgaatgaatcctggattacttgacacaaaggtgaacctcacttgccatacctaaagaaaggaatattactggg

SEQ ID NO: 11119 - DNA, 419 bp, Glycine max
  unsure (1)..(419): unsure at all n locations
ntntggtggcccaggcgagccagaggctatgttgggcgagccaagggcctgaaaaagtccctaaatgaccattttgccctcccttttgggtattttccgcattcttttctaaaatgtcagaaaaccttacggattacgcagaaattggtgttaagcagctcaattcggctagcaagaatccaaatgtttacaaatgatcatccccaaacgaaattagggtatgacaccaaggaagaaaaacctgtaaacaaaaggaaattgaagtcctataaaacataaaaagggaggacatcgaagtcctatagagcataagacatttgaagttttttttccaaagcatagaaatagaggacgttgagtcctaagaagcacanagacaaagacattgagtcctatgaaggataaagacaaggacattg

SEQ ID NO: 11120 - DNA, 121 bp, Glycine max
  unsure (1)..(121): unsure at all n locations
acacatattctctctttgctggaagttctggtaaatgtgaaagtcgtcttgtgatggctcagcangtaatatgaagatccaanttctttcatatatgtacctctagtttttttttttgtta

SEQ ID NO: 11121 - DNA, 391 bp, Glycine max
  unsure (1)..(391): unsure at all n locations
tctagtactacaactgaatctttactgagcctgnggtattcatgtaatgacgctttagtggctgggtgaagatccttataaacaccttcatatactggaggaaaatttaataaacctaggatcgcacattccttgtcattccctttcaagccaaaaggaattataggtggttctgcacctccatgagtttgatctattgcaggataaatagagccattattatttttctgcagatcaatttcttcagcttgatgatcttcccttacactgcctgtaacagagtgagtagcaacaagtcagacttcagaataggaatgatctctgcaacttaagatttgttacagcactatgcatgcaatggattttctgttctcagcaggtgacaatctta

SEQ ID NO: 11122 - DNA, 658 bp, Glycine max
  unsure (1)..(658): unsure at all n locations
aatcatganncctatgacgngtcnacgngactcttgagtcacctgaggcatgcaagnnttctagttcagatgatgcagctgagtgtgtagctacctcatgcactcctctaatgactatagcatcatntctggcgctaaactgctgggagttggaagccatcttctcaattaaatntctggcttcagcacgagtcatgtctgcaagggctccaccactggcagcatctatcatacttctctccatattactgagtccttcataanaatattggagaagcagctgctctgatatctgatggtgaagggcaactgcacatatgtntntaaatctctcctagtactcatacaggctctctccacttgagtgtctaatacctgagaatatcttcctgatggctgtggtctagaacanggaaaatgtttctaaaatactctctaaggcatcccactcgtatggaccgtggacaaggtatacaacagtctctgcactcctctaagaagangaaagcttanaatatataactcttgcatctgnggttatggtggcaacatatagaatcctcaatgtatgccgcttacctcaggcatgaactttgagcaatgatantcatttataccattgcaactctttggctgacgcacctctaggatacggtct

SEQ ID NO: 11123 - DNA, 340 bp, Glycine max
  unsure (1)..(340): unsure at all n locations
tgcccagagaaggagtccacggatgaaatgcttaccacctcanaagactggaaagtggtttctaatgactcctctgcggcttccacataaggaatagaggatgggcagctcaccaagatgtcttccttgcctgatacgatgaccagatgcccttccactacgaattttaacttttggaggagtgttgagggaacaactcctactgagtggatccacgggcgccccaacagacagttgtagggagggttaatatccattatttggaaagtaacttgacaggtgtgagggcctatctgtactgggagatcgatctctcccctaacctctcggcgggtgccgt

SEQ ID NO: 11124 - DNA, 385 bp, Glycine max
tccttaagagattgttcttatacaaagtattggcatataacattcatgagaaacattgtcgaaactaagtgagctacgagctttactaaccgtagatcaaataattcataaactagaataaaaaaaaatgaaaattagaaggcacgcgcatcaatgccagaaagtcagaaacacatagccaattctgctattgtcaatataaccaaaattaaattgaaactcagttctaaaattgacatttactactcatatcttacaacactaaagcctgtaaatctactgagtctatgatcatctgatttacaaaaattaatacatattgtacacaagagtaagaaaaatgagattttgagggtaacataacctggtcaagagtgcttacaga

SEQ ID NO: 11125 - DNA, 581 bp, Glycine max
  unsure (1)..(581): unsure at all n locations
atgcttgagctcttacagtactgagctgcaccttgacaacacagacaaaagggtttgtttgtgaagctaagtatataatcctnngagtgtgtacatctatacctatntganggtgttgagggcctgtctcggaagacgccttattggatntcatctctattctntacccgatcactatgaaagctntgaangtangtanggtattgggcatacatatgttattgaagctctggcangaggtntttcactagataagggactgcccacctcagatattggcacgagttacgactttggatcataanggactccatctnttataaagcatggctaaactccgtgctgctataaaggatagagagctcttgtattttgtctacattataaaagacactagcctatcccagctaacacatataatcattgctccaaaggatcatgaaagctctacttcttgaccacttaatggtgtcttataagatccggatgatacaagagaaacatcatatttctcttgttaaagcctctatggctctaccctccttaatattagttcttagcgcgccacctcttgtctcact

SEQ ID NO: 11126 - DNA, 298 bp, Glycine max
acactataaaactaagcttaaggatttcaaattctacctgacaaataaaaaattttgtatgtacttaaggaaagtataaattttgcatattgaagaaaatcaaagaagaaaactaacatacttgaatatcctcccatatcaaatccttctgagcagcaaggacttccttccacgtctcgtatgggacatcgaccttatcacgcgcgatagtccccaaatatgttcttaatttcttcttgtggggaccgtcgaccttgccggtatcaagatcaatggtgaccactaatctctctgcacc

SEQ ID NO: 11127 - DNA, 503 bp, Glycine max
  unsure (1)..(503): unsure at all n locations
atcgtggagcgctctaagtccctgaagctgctgctgacactgggagatgaccattaagtgctgaagactaatgctttgctactagtgactgccgtagatatgtagttcacttcatgtcttgattacctcttttgatcagatgagaatcgattgaggacaatncttctcaagaaggagagaatgatgacgacatgaccaacacaacggcgaggatccacttgaaggactctgatgacctatgacanggctatagcaggaaagccatgaagctttcacacngctgtcatctattgaatcagccacgttaaggaaaagcaggtgtagtgttagccaatgagagactatgccccttgctatttaaggtagtgctataagcatctgaagtgtgcaattgttggtatataatgttatagtatagtgatagccatgactagtacttgaacaaggctcttggagggctgtgcattaccctctaatgttcaggagctacttcactctgggct

SEQ ID NO: 11128 - DNA, 205 bp, Glycine max
  unsure (1)..(205): unsure at all n locations
aacaacggaagctctcgaaaaatcagtttcatatattntcacacagaggtccgattcggtgtaataatatatctgagactcacnaaatcgaacaaccgaagctctcgagaaatttgaatggacataacatctcactctgatgttcgagcccgggacataatataacgagactctctaaattgaacaaccgaatctctctacaaat

SEQ ID NO: 11129 - DNA, 447 bp, Glycine max
ttgctcggcttagcactgcgctgcatggcgcctacactctgtggcaccttggcgtttataccaacggcctgtaagtacgattggtactgggaggaacgcggacccttaacaacctagaagggctctctcaagaacaaccaaattagcttctagataataaaacggatgaactgagcaaacgtataccaaacgtatgaacaaacgaatgaacgaacgaatgaagtgagagaacagacgaattgataaacagaatggaatgcttcatacatacatcagcaaaaacgaacctaacagcttatatgatgctacaatagctgctgatcatgtgtataaagagactaagactggccatcatcttgccaaaataacctgacctataatgcgattctatgatactggacgcgtattccttagccaacattgtaccagtatatcgatataaacaat

SEQ ID NO: 11130 - DNA, 414 bp, Glycine max
tctagccaaatggacttaccttgacttaattcctttgatagccctcttgagtcttggttccctttccttgttttgaagctcactacaagccttaagtgaaaaaccatgatatcaccatatccttaaggaattttggagctttggaattgttttgggaataagtgtgggggtttttgtttcattggataacatgttttgttggccatgcttcatgatatattttgagccatgtacattacatactggttaaatgttggacatgctgaatgagatgttttttctcaaaggctacagagtaaaaacaaataataataaaaatctaaaaaaaaatcagaaaagaaaaagaatagcagtaaagttgagtgaataagatcttgaatgacaaaagaatgatgagactcttagttctactct

SEQ ID NO: 11131 - DNA, 254 bp, Glycine max
ctctctctcgagaattgctgaggaaaaatattttcgcgaagaaaaatccagccgaagcgctttcgtaacgttttcgtgagaaattacccgaagaattctcaccggtcttcaagaatcattgttcgttctctcgttttttcaatcttcaacgggtaagtaccttaaaccgagcttttcattcattctattgtacccgtggtggtccacattttggttcatggatttatattctcggttatattttctttttatac

SEQ ID NO: 11132 - DNA, 613 bp, Glycine max
  unsure (1)..(613): unsure at all n locations
atactggagctctctaaggatccttaagctgcctgctgcatgctgctataaaaccaaatgcctaatcattccnatatgcttgtaatantacgcatcacaacagtcaagccaaggctatngtgcaagcnatcaatggtgcataacacaccatatgagtatgatgatggatggctcanattctcacaaaggtnaactcatcactttcanattgagctttcacaactatcatgacatgtagagaagaatcaatgatttcaagtcacanaatgtcaagaactcttattntcaaaacaattacccatttcttgaacatccctatattcanagaaaacatgcanagtcgtatgtgcacacannattgacccantatattaactatatatcccgcngaactaaccacattgacatataacaccactaactattaacagaaccacaaactagcaaaccaagacactctcccctactaacacacatgtctcatgacacattaagataaacaataatctaaagatcgcaatgataaaccgagaatgaagaactctatctgtggaagagtgatagagcttcccactcaaaaagtcgaatggtaccgcctcctacttgttggcct

SEQ ID NO: 11133 - DNA, 410 bp, Glycine max
tgtaaagttgagtcttgtatcaatttaattgtttaccattatctcataattaattacactggtgtttgagacactgactgaattattcaggagtctctgctttaattgattaccaagtggattaatcgattacttctttctcgtttaagtgttcagaggtgaagaagaacactttaatcaattacgtagggcatctaatgaattacattgtttttaagttgctttcagatattggatagacactttaatcgattacttagataatctaatcaattaattgttaaaataattgattaccttcgtaatgtaatcgagtatagatggttataattgctttctctataaataatcaacttgtgttcacatctatacatcaagagatcattagagaatactcaatatatttcaaa

SEQ ID NO: 11134 - DNA, 341 bp, Glycine max
tgaatcggacatccgtgtgaaaagatatgaccattttatatttctcaagagcttccgttgatcaatttcgatcctctcgacatattatgcacccgaatcggacatctgtgtgaaaagtcatgaccatttgaatttctcgagagtttccgatgtttaatctcgagcgcatcgatatattataaccctgaatcggacctcagtctgaaaagttatgaccatttgatattgacgagagcttccgtcgtcaatttcgaatatcactgtatgtgatgcgcctaaattggcattcgagttaattgtttgaccacttgattttccaaaagcttctgtctgtcaattct

SEQ ID NO: 11135 - DNA, 304 bp, Glycine max
tgagatgaggaagtgttgaagggtgaaacttcctgcttttattgtcgaccacagagtggtacctgtagatatgtcttgggggtcaagagaccttggggacgtcatgtggtgtgctattgcccaaaaccaagcttgaccaattccgacccaacccgggcatagtctgtcagctgagaacctgtgatgttcctaaacaggcgaactcctggcattcatcagataaatgaacaatgaccacaaatctcggatgcttgtggtggctggccaactgtgaattttttgttatattgtggattatggcctc

SEQ ID NO: 11136 - DNA, 401 bp, Glycine max
  unsure (1)..(401): unsure at all n locations
tatgcnttcctttaatctactgcttcttaatttgcttagaacttgcttgatttatgtttgcaggatcactgaagtggacaatggatttaaaaaatcaaagttgtggaagccccctatatacacagacacacggttgatgaaatatttgctgccaaaaagtctaggtttaaaattgcatctggcaaggaaaatgcaaaggttattatgtttttgtccaatttatgactcatttagtttattcagttggcatcttcattaaatcattgatcccaagatgttaatgttgttaatactacatcttattgttatttatatttattaatccaccattggtaattcattatctctttgcctatatatagattcagatattatcgagggggcttcacagatatcactta

SEQ ID NO: 11137 - DNA, 524 bp, Glycine max
  unsure (1)..(524): unsure at all n locations
tagctgggctcaggcctagagcgacgaggctgcagctcatccacctttttatacataatgcaagtgtcggtggttatatatacagaattacaccttagaggtcttatatagaatattatcataacctatttcctatttgatcatacttatatanaaatatttcttagagctattagttacctaattcttaaagcccagaatctgatctttattatctatttattcaaaggtaacaaaatgaaaatattttgacagatagtgaacaatcactgacataacttctttgtgagttattatttggatgtattacaacatctacattcagattttccctctaatcatattattgtttgagcgagatatcacttgcaaaatacggaaacattttaacttgttcaatgggtggtaaaaaattaccccatacctttcagggttggcctttatagaaaaccccctcttcatggaccgataagggggttttccaatagtaacatcctctataggggaatgttgttcaaaaggcg

SEQ ID NO: 11138 - DNA, 446 bp, Glycine max
  unsure (1)..(446): unsure at all n locations
tgcttaatctatctagatagaagggaatgatgagtggttatgcatggaagttaggaaaacgattcaaagatttttactatgaagtatatatggatataattgcaggaatcaattgatttattaagaaagaaagtaaattattaaaggtgatgaaaaatgaactgagtgaaatacctaaaaaacaaacgtgatttattaagaaagaaagtaaattattaaaggtgataaaatttaatatataggaatagggtttaatatacgattcagaaaacttgtcaaagttacaaacagttagcaatttatttattttttgatagtcacatctagaaaattaatctctatgctttntatgtaagtttttaattttaagttgctgaaactgtgaagtgagcaaattaagctctgtcgggttttaattaattaattattagtccattcactgtttt

SEQ ID NO: 11139 - DNA, 331 bp, Glycine max
tgcttctacgaggtggaagtttctcctacaaatgaataacgtgtgagaaaaccagcaaagcaatagagaaagcaaaatgaggagaaataaaggaaccagacttgaaacactgcaaccttcattgatgggctagaatctcattttatctcaaacagcaaacctcatgcagtaatgtcttgggagaaacatgatgcaccttccattctacaggtcccgtaagaaaatgactctagataccaattgttggtttttgttttatgagaaagagaacatataataagaacgtcgtgaaaagacaacctaagagtgtattttagaattgtataaacat

SEQ ID NO: 11140 - DNA, 126 bp, Glycine max
atttatttaaacagtggttgcatgggccctactgctaaccaattgatgatgtgatgcttacttataaccttttaacagtcttttcatgttacattatatatattttttatttaaaaatataatatt

SEQ ID NO: 11141 - DNA, 405 bp, Glycine max
  unsure (1)..(405): unsure at all n locations
gagaaacacaaatatccaaatggtggattgcttgtatttgggtttgacccgcggatgaatgaatgaattgtgaaatttatagatctaaattggaaatgaaanttgtagatctatataaaaaggaaaaagaaaaataaggagagaaaaaaagggaaaaattgtcaaaaatatgaccaaaggtggtcgaagaaaaggggataaggaaaatgaaaaatgaaattgacaaattatttcattaaacattttgatgaatatccggtgagcaacaaatatttttatgatatttttgttttgacgtatcacataagcggattcattaatgtaaagatatttatcccaccttttatattttggggaattaaattttaattttttttatcttttagaaagaatttatgaatttct

SEQ ID NO: 11142 - DNA, 373 bp, Glycine max
  unsure (1)..(373): unsure at all n locations
gtgatgaaacaaattaactcatcacattatttattagcaaaagactatttcatcctctatggaaccgagggagatgattctgattactggtgtgcggaccctgcatgcacaatcattgaacacataagctgtgaggctgtatctgtgactagaggctcttctttgtgagtatatgactgtgctgtgatgatgaagtgtggggcattcaagaactattgatacctgctgaaaagaacanaggtaaccatttgtacgtgatacataagctttgaataataagtgttaattatactagggggaacccctccgccctcaccgtagcttcctccccctttcctctttcacattccttcgctaatttcctttcctctcc

SEQ ID NO: 11143 - DNA, 442 bp, Glycine max
  unsure (1)..(442): unsure at all n locations
tgcaccagggaacaatttcactttaatagtngattccaattggcttcctagttttcagcttacctatttggatgtgggatcatggcagttaggtcccagctttccatcgtggattcagtcacaaaaaaaacttaaatatttaggcatgtctaacacagggattattgattctattcctacacagatgtgggaagcacaatctcaggttttgtatttaaaccactctcataatcatatccatggtgagcttgtgactacattaaaaaatccaatatctatcccaactgttgatctaagcacaaatcacttatgtggtagaataccctatctttcaaatgatgtgtatgggttagacctttcaaccaattcattctctgtatccatgcaagaatttttatgtaacaatcaggacaagccaatgcaattagaaattctcacatct

SEQ ID NO: 11144 - DNA, 530 bp, Glycine max
  unsure (1)..(530): unsure at all n locations
ngatggcttgatacctcgtctcagtcacctgaagcatgcacgctagactgtntgccatgtattacagggaaaaggctttgagttcagctagtcatcgtatantggatgatgatgatgatactagacgatntcttgggggatgtttcggatctactattgattgggaacaaaggatcatccaagagtaaaacactctatgagtctgattgaaacttaaatgactaactacataacatgagattaactaactatcatatttatataatctcaataagaatgccctaatcttttacattacacacacgtgattgaactattaaacagtgagattcagaaacttacactattttgattagactctgcagataaaaactataagtaattgacatgaaatctctgattacgaatcttctagcgttttctacactacgagtgcagaacgcaaattggggcttgatcttaaagcatccacatctgtcttagaatttaagttgcgcctcttatgaagatccagtttgtgccgcctaccc

SEQ ID NO: 11145 - DNA, 307 bp, Glycine max
tctatccttcctaagatggagccaaacccagtcaccctcattaagaactagctcttttcttcctctattgcctttagttgaatacacctttgttaggatctctatttggatcttaaccctttcatgcatcttctttacaaattctgacctagattccctttctttatgtataaaagaagtgtccactgggaggggaatgaggtctaaccgtgttaggggattgaacccatatacaacctcaaaaggggactgcttggtggttctatgaaccctcctgttgtaggaaaattctacatgaggaagatac

SEQ ID NO: 11146 - DNA, 363 bp, Glycine max
ttagcacggcgactgtgggaagaacttactcttagatgtacactgcacaagacccagatatttgttccgactgagtaagacaaaattttttgaaaatgattgtagaattagagataaaaagttcacctttactgatatagcgacaaagaagctttgtataccaccttgatagaaaaatccttaaatcaacctattatgccattttaataacatattgcaaaacaatgtgacatgcagatgtgcgaaacatgggaaatatttacagaacttaaactcaaaatcgaatggaaagtaaacttacgatatttaaccggaaaatgaatatcaggttttggtgcactgcattttaaaatagagggcctt

SEQ ID NO: 11147 - DNA, 211 bp, Glycine max
tgaagtgccatggacaaagaagctctagggtggttccaatcccataccattcttgggaagggttcaagatcacaatctcccaaaggttgcaaccgtttaaactacggaatccttttcgggcattactggtgctaaaacaggaagaaacaatgcaagaattcatgggccattttgagaagcatgtcgaaatggtgaaggggttggaggaatc

SEQ ID NO: 11148 - DNA, 629 bp, Glycine max
  unsure (1)..(629): unsure at all n locations
atgtgctgtgcgnacccttgagtcacctgangctgcangctgatgcanattaatgggtngaatctttgaaatagtacactcncatacatccataccttattatgtaatactggatgcagtcagtccacgctctatttggattgaattcacatttccacaatagacgtgttctgattatgctatattcatattactctcaatagcatgaatgcatagtttgggtgctggacaacaatattggtatttactctaatagtaataatagtacactttacatcaagctatggttcctcatctgttattgtgttcttactaaatatcaaaatatggtgctgctgaaagaatanactttgatcatatgacatatggtcagtatgacctctcttatggactggttggtttgagaatggacgagaggataccaatctcatgactcgactgagtttattactatttatanangaaaactcgcacatgtccatggnattgatgnactttgaacatgtgtctcgatttcaataatctatgacgctctgtctgaatnataagcatcactcctgtcataatgatgtagtttatacccacttaacttctatatgttgtaacggttgaggacccttggctctttt

SEQ ID NO: 11149 - DNA, 433 bp, Glycine max
  unsure (1)..(433): unsure at all n locations
gtatgaaaatgcatcgacactgttaactggttagcaagttcttgagcgggttgaggacatcaatacgatgtttggaaaaacctcaaataatgaaaaaagtaaaacttgcatatggaagaagaggtcaatattgttttatcttccatattggtccgatctagatgtcatacattgtattgatgtcatgaatgtggagaaaacaatgtgtgatagtgtcatcaacatgcttcttaacaatcaaggtaagacaaaagatggttcgaatactcgtcaagatctagttgagatgggtatatgacactaattacatcctaagtccgatgttaagaaaatacacttgcctccagcttgtcatacttttgtccaaaaggagaagataagtttctgtcagtatctgcaccgcgtcatagtgtcatanggatactcttcaata

SEQ ID NO: 11150 - DNA, 434 bp, Glycine max
  unsure (1)..(434): unsure at all n locations
atctcacacttcagatctgaagtccgtgatgcactacaatgaataatttgagacatctatagaataatntgnaacaaaaagtttaaaataataatcaacctagccattaacagaaatatcaaaaatttgaccaagatttttggtgcctacatagatcattcattagtaccgagcatctacccaggctgataaaatcaaaatgaccaaataagaaagcctagtctatacctaggaatatggcttagtgatagtactatcttgctataatagtactcttggctgattgcatttagtgcaataggccctactcagtaggacctatctggttagctgttctgattagacttggagattttgttattttgggggggctttctattttcatcttcttttattatttattactcccttcctattttatatcttcaaactac

SEQ ID NO: 11151 - DNA, 328 bp, Glycine max
cttctctgacttagcatcacattttcctaagttatcttttccattattcaataccaaacatttacaaccaaagatatgaaaatgtgagatgtttggttatctgccattgaacaattcatatggagttttctttaagatgggtcttattaaagccctatttaaaatgtagcatgcagtgttaacaggttcagcccaaaaatatgttggaagacgtgtatcatttaataaagtgctagcaatctcttccaaagatctattcttgctttcaacaacaccattttgttgaggagctcttggcgcagaataattatgctcaatcccatgctta

SEQ ID NO: 11152 - DNA, 220 bp, Glycine max
tctatataaatagtaccacaataaggctacacttatatatgacatcacaaactaccacaatagctactactatagtcactctacattaacctctcattacatacatacacaaaaaacagttggtataagtggagcagtttgagatgagtccatggaggaagaaacaaaggctcacaaaccaaaaaaaaaaaaaagatcatgctaataaactctctactac

SEQ ID NO: 11153 - DNA, 579 bp, Glycine max
  unsure (1)..(579): unsure at all n locations
ctatgtactatagattgattgtggtccangangcntantntgtgtactatcttattnttgttcttttcagccccnncaangagnnggtgatccttggtatcgnctgcatanctgngacacctacnatactncagactcttaatgtggatagggctttggctagtctatgttgtaatgaagcatggatatgggcttgagtgaatagcatggaattcactggctctacgggcgncgaaccttgtgaatattgtgggactgacgggggtggcttaccggaagtgggttcgaaaggagatattgcggtggcagaaagaacaaggctattggatggcccctcaactaatgtcaggaaggcaaaccatcgtgagggcttatcatggttgaaagcacgaaaggactattttaatgtgtgggtcaacaccatccgtttggtcgtagtgcctacagcggtaaataacgttcatctatacttaatgtcgctgttgtcgagtactactccaataatgatgaagtttatgcgtctcatatattcacactgttcagacatcgcaacagattatttagcgatataacagcatc

SEQ ID NO: 11154 - DNA, 118 bp, Glycine max
  unsure (1)..(118): unsure at all n locations
ggatcttaagcacctgcggatgcagctaacatactcagcgttatattacagttatcaacttcaaaagtatgcngtgatgctctacttcacatcaattcagcgttcatatatacgagct

SEQ ID NO: 11155 - DNA, 395 bp, Glycine max
tgagatgaggaagtgttgaagggtgaaacttcctgcttttattgttgaccacagagtggtacctggagatatgtcgcgggggtcaggagaccttggggacgtcaggtggggtgctattgcccaaaaccaagcttgaccaatcccgacccaacccgggcatagtcggtcagtgagaacctgtgatgtacctaagcaggcgagctcctggcagtcaacagataaaaggaaaacaagaccacaaagtaaggaggcttgtggtggctggccagctgtgaattttgtgtaatatgtggatggtggcctctggtaatcgattactaagggtgggtaatcgattacaaggcttaaaaatgaagacaggaggctaagatggtctctggtaatcgattaccacg

SEQ ID NO: 11156 - DNA, 435 bp, Glycine max
  unsure (1)..(435): unsure at all n locations
tgactgtgcctccggactaagcactgagctgcacttgcngaatgcctgatatggttatgacccnctcgatttgactagtctagagaccaaatcgactttgttcagctggtcatatattattgctcagctgaggggaggtgatggtaaattctctgatttaccctgttggactaattgtacctattcaagcacggaagtcctgcttctctcttttttgatcattattgacattgactataagggaaaaggagttacctctacttcttaggaccaacatctagacttgatattcagctaaaacttgaaaatgtttggcaagaagcgagcgactcggccttgttatgactgtgcaccttgtcagatcttggcatctagggcgtggacctttaagtgaatttctggacaaccctttgggagactttatgttatttcatt

SEQ ID NO: 11157 - DNA, 345 bp, Glycine max
tgtgcattcaatgtcctgatgagggtgatccatatgttctcacgactggactaatacatttgctgctcaagtttcatggtcttgcaagtgaagatcctcttaagcatcttaaggagttccatattgtttgttccactatgaagtcccctgatgtccaggaaaatcatatctttctgatgtgccatcattttctcctatttcttaacccttttcgccccattttaaatactgattagtcttaatcgacaaacttattatgcagttttattattagggcccattcaactcatttgatcgtcttaatctaatttcatgaactaatgaaccattgtgttagaatccaca

SEQ ID NO: 11158 - DNA, 401 bp, Glycine max
taagctccttcactacgcaagactcttaatatttgaagagtatccttgtggaaccttcacccaatgaagacactgacaacaacttatcttctcctttttggataatgtatgacaagttgggggcaagtaaattttcttcccatcagtccttggatgcaactgtgatcgtatccccatctcagctagatcttgacgggtattcaagccatccttcgtcttgacttgaatgttaaggagcattccaatcacactgtcacatacatttttctccacatgcataacatcaatacaatgtctaacgtctagattacaccagtatggaagataaaagaaaatggacctcttctttcgtatgcaagtcttacttttatccttcttttgggtatttccaagtacattat

SEQ ID NO: 11159 - DNA, 316 bp, Glycine max
tgatatcttgttccttacctggtcctctggtgactctcacctatgaaactgttccatctagatttacttgatgttggaaatgggggttgtcatgacctgttgtgatctctgagttggcactgagctgtatgtaagtgcactagaagtgttaagtagaaaaaaaatcacaaaaaacctaggatataactatgccaatgcacttggccttagaatcactactttattctaagcttcctcgcttctggatcctctattctctgctgcctacctaaacttcttgccggagggtgataatttttctgtctcgcttagattt

SEQ ID NO: 11160 - DNA, 539 bp, Glycine max
gtctttacatctcttattatcacgtggtactcgctataaattctatcagcaacaaccccgtggcctgtgaccccttattcgcgaccttagaaactcagctcgcttggatgaaaggggtcactctaagaatagcatttattttgtagaaatcttctctccggtggtgaagaagacatccattagagcaattcttattctagctgcgaaacaagacttggagggtgaacaacttgatgtccaaatgacattcttacctggagacttagaagaagaaatttattggagccaccccaaaggtttgtagaacttgggaaagaacacttaatgtgtcgcctgaagaaaagtctctatgggttaaaacaaactcttaaacaatgggacaatcaggttgatcttcttatggccccacatgaattcagaaagactctgtcaaacactgggtggttgtgacgaactaccagaaagatgaatccctccatctcttattgtgtgtggatggtggcaaaataaaatgaagatggtgctctcataacgcattg

SEQ ID NO: 11161 - DNA, 203 bp, Glycine max
attcttactcacaccatatgtttataagctgatctttttgtggattgccaatgggtaagtcacacttttctattaatagtgtgggacccactgagtatgtattctatgacgccttattcacaatcctgaagtgccaaatcatatggtctaccctaatgtgatatactgctccattatttacatgattatgacatttatataca

SEQ ID NO: 11162 - DNA, 362 bp, Glycine max
tgctagtgatacactctattcagagtttgaatatgtattacaaggaatggattttgagagaggttggggtgatatagctgagcgggtattggaaatgatgcatatgctcctagtccctaaatattcttcacgctcctgatcataatacactacagacttttcttgggagagagccaatggtattcaatgttgatatattatctcctcatggctactttggacaagccaatgtcttgggtttgcctgacattggtgggcaagttgtttatatactacgtcaagtgcgtgcccttgaaaatgagatgctccttcacatcaagatacaaggacttgatctcactcctaaaattctaattggtacc

SEQ ID NO: 11163 - DNA, 114 bp, Glycine max
tcatacacacgacttgaataatcaagctacctcaattgtggatcatccgcatgatcatacggaagttaaattcacgccatttatgttgatgctcagcttaaggctgatattaaa

SEQ ID NO: 11164 - DNA, 450 bp, Glycine max
taccttgaattataattgtatcctttgcaccctttgtgagctgaatgatattttcaaaattgaaccctgaacttaaatgactatctccagataccttgcttagattctaggagagcatttggttcaagacaatttaacccaaatttggggtagttaattgggattagtaaaaggtaaagcacatcagcacacacaacaaataagttgtgttagaaaaagagcaatcaaagaaaatgtgtgttgttgtaataaggtcaaatgcaaattaaagtgaacggctagtgagtaagctaattgtattgaaaagaatatttggataagtctaggatttgtgctctattagaatctaaccctttgaatcctagaaaaaccaatgatttttttgtagccaaacctcactacaagcctatgaaagtccttctgattctatttgtgcttttctgactttat

SEQ ID NO: 11165 - DNA, 446 bp, Glycine max
  unsure (1)..(446): unsure at all n locations
tctggtgggacatcttgacttgctttccaatctgacattcaccacagattctgccttcttctattttcagattgggaatgcctctaacagcaccttggtcaatgattttcttcatgcctcttaagtgcagatgtccaaatctttgatgccatattttgacttcatcttctttggaggatagacatgtggaggagtaactggtttcttgaggtgtccataggtaacagttgtcctttgatctgctgcccttcattagaacttcactcttctcatttgtcaccaagcattctgactttgtgaagtttacattgaatccttcatcacacaactgactgatgctgatcagggttgcagtcagtcccttcaccagcagtactttgttcagactangaagtccatcatggactagctntcccattccaatgatctttcctttagagccatct

SEQ ID NO: 11166 - DNA, 528 bp, Glycine max
  unsure (1)..(528): unsure at all n locations
tttccgtccggatcttagcactgcgctgcagcttatgaagcaagcacattgcccatccgtgctgtgatctgttatatcgggtcaccctgatctgattggaagaccaaagggataagtagactgctatggaaagagtcatttctttgacttcgactggctgactaacatagacttgatgatgtatgctgggaaaaagtgtattgaatggcctctacatcangcaacaagatgttgatatcgtcaactactgttgggatcacacgtgctcaagtggacggagaaattactgcccaacttgctacttgtcataagagaagatagttttgcagtgcttcatcggtgacagtccacaggatgctctcaatactatagccgtgtgcagtgacgacttaactttgagagtaagttcacgatgtccatctctgcataattgtagcgtgcatatcaacatttgcacacagaggtacctacttgcccggttcttctgcatttccaacctgtcttgagtatagcggaaagcccttattt

SEQ ID NO: 11167 - DNA, 432 bp, Glycine max
  unsure (1)..(432): unsure at all n locations
ngagtcatccttaagttcaactttgcgaggctgataatagttgtattgatttantggttccagttttcaaaattaagttgaaggtttataatttgtagtttctaaagtaagcattagaaattagaaaaaactgtcttgatctgttttaatcccagttgttgtagttgaataaattggttaaactattgtattccatgatatgtctttgcagttcccatttttgcatttaggtgataaagaatttattcatttgagttgcacagctttaccagtaccaacagtccaacaccatcaggccctactaacctggaagctgtgcatttgttctttttattattgntgttggagacaagtgatttggttatctccattttttggttagttaggcaatgtgggaatctgagattaaggattggaaacttttatgatagt

SEQ ID NO: 11168 - DNA, 67 bp, Glycine max
ctgtgttctgctaccacattaatgtgttgtcgtgccataattgtgctggtgtaatgggctctttcta

SEQ ID NO: 11169 - DNA, 447 bp, Glycine max
  unsure (1)..(447): unsure at all n locations
tgttggatgttctataaaaggacggcaccaacattggagaactacttgtaatggcatttagcatagataggcgaaattgctcattctcttgtcattgacattctacaaaggacttcattgcttgtcctgtcatatcttgatccaatcctaccccccaacaacattggatagaagactccaaaaagattgggccagagatataggagaatttagaagcaaagcttcatggtgaatcaaaggtgattcaaaggtgttttgatgataacaatgatgacaatgatgataacaaaaaatgatgacaaaggagatgacaaaaagctcanagatcaatcaaagaacaactcaagtgaatcaagaacaattcacgagttcaagataagcatcaagaagaattcaagactcaagaagaaagttagagtcaagagtaagattcaggtccagatctca

SEQ ID NO: 11170 - DNA, 159 bp, Glycine max
  unsure (1)..(159): unsure at all n locations
tatcctcttctncttngccttccactgcatctccatggtgaaaaatcaccattgaaggacctcattgaagctcanagatcccagcctcatagaagctccacaagcaagcttncatcaactctataaatctaaatcaagaaagtctcactttgtcatata

SEQ ID NO: 11171 - DNA, 417 bp, Glycine max
tggtttaaacttgctttaacatgttgttttgaaatttttgtgcttgctaacctattatggatctgtgtgttgagctgttttccttgagttttttatgccacaaataacttctttgagtgttaaaacacagggttagccttaaattttacgtaaatcgaagtttctagcaaaagttatgaataaaacaagttttagaacattttatatgataaaatttgtcacgaaaataatctaatagcgagagctgtatggactaattttattaaagttttgacctcaaaaaccagtttattaagtgtgaaaatgtacagtatcatataagatttgtgaacaaccgctgtccagagcatcaataacactgagaataagttaagagcaaaactttgtaaaactgagcaacgaagtgatttagacact

SEQ ID NO: 11172 - DNA, 443 bp, Glycine max
  unsure (1)..(443): unsure at all n locations
tcacatgtctaagtggactcattcaatgaaacatatacttgatcctgaagggatttcttagttttaaatgatcttttgatagattcttgaaatcttttcataggttttgtaagcgtttgagagaatagataagttattgtcgcaacctacccttcagcgggacggcgacacgtgactcgctggtgcgtgtcccaagaaaggaatacgcgcggagtcaccaccaacgtttatttgaggaaaacgtctgaaaaactggaaaagacgtgatctacgaactcaaagtgaaaggttcgggaattgtatntacgcacggggaaagtattagcaccacacgcgtctgtcacaagagacggcagcctttaattaaatgtgcacatatgacttcaagttatgtagtttccctttgtcggtcttatgtcttttatgccgtttatatcttatct

SEQ ID NO: 11173 - DNA, 465 bp, Glycine max
  unsure (1)..(465): unsure at all n locations
ctatacgacgctcttctagaatgatacnccggtccttcacacaccctttctcgtcgaggtcgtccaaacatcgatggaactncctaccatacatgtgttgggctgttctcggactatgttctttaaaccatacaaatagacataatcgtagtataataacaacctaaacatgatctggatctggtctgattaaaaaacaagcaaacaaaatcatatatagagtggattattaattatagcactgtgatgacaatgtatggggcctgagaatctactgttattcttatagtggaagagtgactatgtgtaaaacaagtagcttgatgacattatgtgtagcatgtttatactctcaggagcgaagaaaggtttcctcaaggacacaaaaactttctgttacacacaatttacgtggtggcttcaagccttttccaacccttgttgttcacactcttaccaataatt

SEQ ID NO: 11174 - DNA, 410 bp, Glycine max
  unsure (1)..(410): unsure at all n locations
tatcaataattntctcaagagagagnttttgcttgcgaaggtttttgttaataaaaaattatgatagttcagatatggcaagttttatatattttctttccttttccttctttccttttatctgaatgttttaatggcaggttctatatttgcattgaaactgccgcgtggttttgcatatgtgaagctactatgttgggtgtcaatatctatgtaatccgtatcaacttctgtcaaagagatcacatgagttgtccaacctgtctgagttaatttcggaggttattgaggaaaaaacacatgcttttcttgcctatggttcatttcactcagtgtctttcttcattttagctaaacttggttcctttgctnttgcttcttggcaacttctaccatactaaccaccgaca

SEQ ID NO: 11175 - DNA, 539 bp, Glycine max
  unsure (1)..(539): unsure at all n locations
tgtgcattgtngctnttgacgngatcctctaagcacctgangctgcagctgtcgtacatcaaatatcattaccttgttgacaacattagaactaaactaagaaggtagtgatagttaatctctttatgaaatattctaccganattaaatacagatataaactccttgccgctcatatttacacgaaaaggagctcttttacttcgttgnctgacaaatacacattaaccttaaacctctggttaaaaatcaaaatgtgataacaaagaatatgtgtacagtcaggaactctattatgctagccaccatcgccaaataatctaataaatttcaactctaactaacttgccttaaacttatttcttgatgacnagatcagatcaaagggtcatttccctattactcagtgccgccacgaaataattttgtgaaagcataactagcacatcccctccccatgtttctgacacaggacgcaatgaagctaacatgtcctgtgcattcttataagtttatcgtgaaaccccactaaatattct

SEQ ID NO: 11176 - DNA, 362 bp, Glycine max
ttccgtttgtcctctgtcatcagcagtggctaccacctatggctgacacaacggtggtgcaccacttctcatcacaccatcatggtggcgcgctgcaatgattatgccactacatgtttttctttcaccgttgagtaactcttgctgcttctctcattcacccattccacccaatctccaagtcttcttcctttgttgttcctctcttaagcaataattcatgctcacgtagactcaacaaaataccctttcacttttcttaaacggatcttgcatcaacatcctcacagattactccactatcaaccgatgctggcctctattcaacgacatcatatatgagacactgtatataaacatat

SEQ ID NO: 11177 - DNA, 589 bp, Glycine max
  unsure (1)..(589): unsure at all n locations
tgaatcgttatgcntcgcccgagncgacgtcaaactcgtgtccccgagttaatttnattacnacacacggggatagcagannngataaccttgatgcactcgctatgcagagacactatacaatactnaagcttgtaatgtagtttatctggagcgtataagtagatagaataacttgttctcatctagagacnacgagatcgtaagtgcaatttaattctttaacactcactactaacttattatattgactcggacgaatgcgtgattttgcacacactttctctattgttagggaaaccaaactcatacacggaaaacttgggagaaattgatcgtctagagagcttaactatttcaagaaagacaccatgactcactgactgttcacaccttgcccaaagagaatctcaattgtatgccaccacaacagtcctataaggatgcttcttaataaacagtgtttggccaacacacgactaaatactaaatatatacatccctcctataaaaatccgacaccctgttataagagataatcccggctactaatttcattcccagtgctactgcatctcactatgtcacg

SEQ ID NO: 11178 - DNA, 449 bp, Glycine max
  unsure (1)..(449): unsure at all n locations
ngtattcttgagctgttccntttaccggacctaagcaccgagctgcactacacctagataacattgtatcacgaccctgttctcagactgtacatgactgtccagcccctgaataattatcggtatctttagttccacacactctgactcgaaggattgttaatattttcattggctcatcttatggatcattatcaacattaccgatcttgtttttgcgatttaacaccttctgtcccgatgacgacggatatctgctaacaagaggcctttgttgcgaacactcttgtgcaaggaatcatccttcctaacgctattagaaaaattatctttactactcacgcaatggcattgaattatgatcaccctgtattataagtatgtggatgaaacatttgttcaaactagagtaaatatgtgattctttgcacctgataggccgtttcgcn

SEQ ID NO: 11179 - DNA, 363 bp, Glycine max
tagaacaaggagcgaaaattccagctactacacaatggtgtttttttaaggaattaaacttcataatttggtaactcaaaccttctaacaaccaattatattaccttcaagaattttggaaagctattatagcatgaaccattcagcccaaatttttttttaaaaaaaataagtttctataattttttttaataagaaattaaaggcctaatttttgcaatggttcagcctcaataaaaaaaatagcatgaacaaggtaatataaaaatggaaaggaagaaattagaaggatgttaccaagaaatttcaacccaagtactctttgaaaacccttgaaccggagctctgataaccaaaatgatg

SEQ ID NO: 11180 - DNA, 398 bp, Glycine max
  unsure (1)..(398): unsure at all n locations
ntcttataagtcctaaatgacatttcaagctagtattaactcactttaacctccatttaccacagaattcagacttagccttccaaccctcaaagtctcactcttttttttttttttttttccactcataacatcacattctcactttctaaccttgggttagttctacccttcatctctaacagatttccatcagcaatttcagcatataaacatcacaaacatcatcacaaaaaccctaaaacagaatgggtatgtctaactcatccaaacatggcgatttcaacaagttttcagcaaatgccttcacaaataatcatcacacagcagagaactaacaaaaccacccatcatatctcccaaaaccccatacccacgaaatttaagagagaaagaag

SEQ ID NO: 11181 - DNA, 622 bp, Glycine max
  unsure (1)..(622): unsure at all n locations
tgtgtccgncngtgtctctcagtcgactgaggctgcagcttacaataatgggcactggtgaatggcanactgggaatntcatctgataccagacccaagagctgggatcataatttcacaagccaaggtgagggaccctgacacatcanagctgagaagtgtaatgtacaaangggtttcacctctgagctatntgtgccatacatggatcccacacaagaattggactttaagacatacatggatgctggtgagtatggattntgggtgcangcaatgccactagaccctttgaatganntgcccaagaatgcttactacatggatggtgtcttgctcttcgatggaacacatatctcaacccacatgatngcattttgagagtatgctgtgacatgcgtggcacatgcaagtgcccatactgactcnggtaacatgtatatatagcatactttgttcttctttccactctgtctactttgtgatcaaatagatgagctttttcatctgactngtatggatcgcatgcattatagtgcactatcagtatctcgatgcctacctagtgtgtataaaccgacaaatgtgaggcgtgttctttagatgcctgctaaacaagtct

SEQ ID NO: 11182 - DNA, 426 bp, Glycine max
  unsure (1)..(426): unsure at all n locations
gtaactnttattaagatntcatataataataaaataaaataactgagaaatatgcaaataatagaatccaaaaatcaacatttgaatatttaacacaattgagctaatgagtttttatagcaatagtttgtatatcttagaccaaaccaagaaactttaaatccttactacctaaaatagtaattacaaaacataccaaaataagggcaaaagtatattttggatgaactataagattgagatgtcatacacaaattctaagagcaaagaagaaacatgtgtaaaaaaaagattcctatattaatattattaatatataatgtacaaataataaataatattataatttaattggtttttttcttattatcaatcaatntgtttaaatttaatgtatntatctaaattacttctggttaaaacaca

SEQ ID NO: 11183 - DNA, 446 bp, Glycine max
ctgataaaatccaatgaacacaaatcactatgtgcttaatgcaaaaattgtaagggaaagaataaacaaaaataaatattaacggaacagaaacaagtaaatattggtacccaagtcacaaggctttgctgtcctcgtggcagtgtatgatccactggtttacgccccgttaagagttccagcagtataactccaaagctataaacatcactttctgaagtgagttgtccagtcattgcatatctgtcataaaaaaatcaagcccaataaattataaaaaaaccacaacttgtgtaaagagagttaataattggccctaaagtggattgaagttcagtacatcactgtccaaagatatttctaatttacaattaatcagtttcatgtttactcaattgtgattttcatattctcttattccaagtttttcatctttcaacttaagc

SEQ ID NO: 11184 - DNA, 577 bp, Glycine max
  unsure (1)..(577): unsure at all n locations
tttccgtcagatcttaagcaccgagctgcagctggctttcagtcattacatacattaaacacgatgcttcttcactccttagctanggccatgtattctgcttcagtagtagaaagagtaacaactgattgttgaccanacaaagtaaacacatatnctattaaaaaattccttgtgtctacatttgctgcanaatctgcatctacatnagcctgtgatggctgcctcatgtgctgtcttcttgaccctaatcagctttcanagatcattagatccttagtgtcacttacagcttccaatgtcactaccggatctccatgatctgctatatactacagatgaccaagcaggctactgaaacattcatcatatctncacacactgcataggtgtgatcatttaacattctcactgttctgtgctgatacaatacttgatatgacagtgtgtctacagttcgttatgctctaaccttcacacttctgaggattgctggacngatagtacccttctcatccatgaatcaacgagttttatctgcctacatattaaattggcacttcttatccacctctat

SEQ ID NO: 11185 - DNA, 366 bp, Glycine max
tgtgacagtctcgatataaaccaataatggtgtacgtgtgaatgtgaatgggtgatcggagcttttaactctcatagatgtgtgtggctcacatgagacactcaatacctatagacgagattcttttgaattataatagaatataaaagtcgtatgttcaaaaaaaagtacaatatttctttccaatcttatatctctgcttccttgtctaataacatatatgggttaacttgtgcaccttagaatcagatccctaactgtcctcatagctcacatattcacgaagaaaacttcatatatagaacaagtaacgctagagaagaatgagcagtccctccataccttagttggtgcactagaaaaatg

SEQ ID NO: 11186 - DNA, 355 bp, Glycine max
  unsure (1)..(355): unsure at all n locations
taatatcatcctcttggacaaacccttatatnatttctgtccaggagaccacattatggacttgcatctgggaagaccgtctatcaacatcactcatacatgcaaattttgcatatgaatcaacaatagcagactccacaaagacatctgttgcaccacattagattgcccacccatgaactcctctcccaatatgcaaatctttaagcacacaacatgctcgcagattgctcggaaacgcatagctatccggcattagagatgcatggtacattccacgaaacagattctaagcaacccagcgtcctccactataaactgccaacgatacaatagcattccaacatgccacgtt

SEQ ID NO: 11187 - DNA, 111 bp, Glycine max
atttgttgtgtggtggtttttttttttttttaaatggtatgaccacaggggtagggcaaacacaataaagtgggagtccgctcttttgtttgtggagaaccagtacacata

SEQ ID NO: 11188 - DNA, 398 bp, Glycine max
  unsure (1)..(398): unsure at all n locations
ttctatgtcatctntaaataaagatctggtggtaaagaccccaactagtggttntgtgttaacttgtaatgtgtatttaaattgtcttgtggaaatttttagtagaacattcttgattgatctgatttgtttgcctttgaaccaaattgatgttattctgggaatggactagttatcttccaaccatgtcttgttaaattggtttaataaaaatgcagtgtttgatgattctggagtgagtaaggataggatgtttatctttgccaaccaagttgtgacatctttaaaagaagatgcttaagtctacatgatcatgtctaacctanaagtagagacaaaggtttccatgggtgacctccctattgtcagagagtttcctgaagtgttccctaatgata

SEQ ID NO: 11189 - DNA, 571 bp, Glycine max
  unsure (1)..(571): unsure at all n locations
ttactttctttgtctcacgctagctctgaccactgttcttccttcccgcgatgcttcttttcatgtcccgctgagtgtgcttatagcctanaccatacttnccacgaatntcttggggtttatcannngctagtatgccgcattgtctntgcctaaacacatnccnggggttcataaccgtccccaacataactcgngcctatcattaccgcgcatcggacagacaanggttcccaaagagggagtccacggaggatatgctgaccacctcanaagactgganagcggnttctaacgaatcttctgtggcttcacatanggcantgaggatnggcagcttaccaagatatcttcctcgcttgacacgatgaccaaagtgctcctcactacgaattcagctgttggtgagtgtgaaggcacactccactgatggatcanggcgcccacangcagtgtagggggtgatatcatatttgaagtaatgacgnggaggcctttgctggagacacttcccaccttggaagcgcaagccaaccatgaatggtaaaggaaataagactgcaaggctact

SEQ ID NO: 11190 - DNA, 406 bp, Glycine max
ctacgctatgattccttatacatgcttataatggtttattcttacttcttaaatttacgttatatacttgttataggaaccttataattctaagtatatatagttgtagtatggcgctctgccttaattgcatatatagtatggttgtttgtgatttcttgttcttagtaatgctaatactctatagttggatgactcatatcaagttatatttcataaggaatactcttttgatcgtaccttctaattctagtgcaacctattctttgtgttgcgtgcttaaaacaaataaattgattacacttgaaagcctgagtataattaattctttgtgttatgagactacatcatacaattggattactgatgttcttatcacaatcaagcaattgctaatgtcttcata

SEQ ID NO: 11191 - DNA, 414 bp, Glycine max
taaccatactagggtatcctatggtaataccttattttctaccatttcaatagtctaaaaacactacccaatcacaacaaagcaataacactatctaccatatgataactgttgtgtatagatatattttgggattaaatcatataggaattgttaattttcctctcttatttcttccttcttatgttaataattggcattttaatatcatttaagcttttgtgcagaatgtgttcaagttttgtgaatttatagttcttggtgaataattgccgcagaaaaacaaagtaaaactcgagaaagcaaattgaagatttgaagctgctcacccaacgcgtctcaagtgcttagtgcgacacagtcgctcagtgggaagaacacgcttaatggcatgaagtatgaagaaagtctata

SEQ ID NO: 11192 - DNA, 543 bp, Glycine max
  unsure (1)..(543): unsure at all n locations
tatctttgcgcgcttccgnatcttaagtcactgagcatgcagctaacaatctaaccgtatacaagctcaattaaccttatctgtgacctggggatttatgaaaatattggatgaaggcttcttcanggttcnnggtcangcataatcaatggtctgactcatcatctatataatntgcgccccaggcttgatgtcacctacttaaattctttactatataggctttgtaccaatatttataatctaaatatcagacgatctctctttgtnctatctcattctgngagaggggcactggctgaatcagtgaggaatagtatgtaagaactcttagcttcatctcttgatgcttaaagctcgaagatgtacattatagatgcacatgaatgtcatgttactaccactatacttaactgaatttgttaatgttttcaccgctctttcttgtgaaaatcccggacgatataattattaattacctcacttatggccaggaactttcctcgtaaacatttggtctctggaggttaagttctcttaagg

SEQ ID NO: 11193 - DNA, 486 bp, Glycine max
  unsure (1)..(486): unsure at all n locations
ataccctgaacnctgtttcggaccttaaaactcagcttaggcttgcaatattctcccatgcaactgtatgaacttgtctctgattctcattatctccccaaacgaaagctctacacttttgaccaacttcatgacattgatctaggcaagcatgcaattttcatagcataagatgagagagcttgtaacacaggtttcaccaaagatatatggatctgacatgtctataatttttaaccagcttgagagcttttagttcttgcgtgatgctatataaacatggtgagaacagccaaagcataataagctggcacccaagaatccttctttcattaacacactcttaaattcttcacaacaatattcccattaaacctcgcaaacaccatcaaaagcacgattggaacaaaatacaacactagcccanaatacatattatatatatatatatatatatatatatatatatatatatatatatataan

SEQ ID NO: 11194 - DNA, 640 bp, Glycine max
  unsure (1)..(640): unsure at all n locations
ttgtccatgannccnttcncgngatctctgagtcgacctgcggcatgcaagcttctaatgtccatganttatctnnngtctatacattnttatgtttaacacatcatactcgtgattattcanacaataaggatgatattgtgagcacgcacgcaagaaaacttacttgtggtggcatagttgacaacggtggaaaagagaatgccaatggtgatattcaactggacaagtatattcaatgctgcacgtattcttgaaggtgcgactcttgtaagataactcgcacaacctcgtgtcataaannaaaataaaccacanagataagtgagttcgaagaaacacttgctactacacaacattgaacactggtttcatacataaaaataacacacacatgcatattgcagaatgtctatataccgaaatagatgaccaacctcattacataattaatatttcattgacacatctgactattatttanacctacanatgcttgccaatgactatgaatcaatttcaagggtcactttgtttcaaaccctacattaatgtggggaaacaagatgatacactggacttgtcttccaataacacctgccgcaccaccttgtaacctcaacagtgtgagaaagtcact

SEQ ID NO: 11195 - DNA, 458 bp, Glycine max
actcaagctgtaagctgtctctctcctatttgtatatatatatgttatttgaatgaaataaaactaagcaactgagagaaaagtttttctcctcacatattcaaagctttaagtctaataatggcatgcataaaaaattaataggttgcacgtaaatatcttttcgttactctaaaatgtcaaaactgaaaattcacttattctcctatcaaattagatcctcttcagcatccacagcaaaatataaaaacgaaaggcgaaatacagaaacaatgaagagaggaagccaaataatgccccgtcaaagaaaaaaaaaagcctaataaaattattccatccgtccatgcttataataacttttcaactaattcatatccgttaataaaaaaaattagtgtagttaatcatattaaatttatcaattatctatactatcattctaaaaaatttttttattc

SEQ ID NO: 11196 - DNA, 255 bp, Glycine max
  unsure (1)..(255): unsure at all n locations
atatacataaacatcagacctcagaagaatattagtcagcagatataatgattaaataattaataatatttntgctaatagctctcttcttttgtgaacacttctgctgatagctntatcctgtcaaatctcgcaaaatagacattnntttcttatacgccaacgactaatacacattcanatttaccttctggcaatatacacaacattgatgtaattatcttgctgtgacaaactgagagaaatgctcataat

SEQ ID NO: 11197 - DNA, 413 bp, Glycine max
ttaacaacacagaccattgttgtaaaatttatagtcatttggttgcctgttaactcaagataatagatacacaacccacatgtttcaaggagctgagtgattttctcatgcaactgcaaagataattgaaagaatatcatctgactgaatttctaaaagcatacaaatgcttttcccctcacaaggaaaggtaaacaaggaaatcagtcagttaaatatgccatacttgggtcctgcagacattgtccgacaattctcaggagtacagaactctgtaagggtaccataaagcagattcacctgattgaagaaatcaacagctgtaatgcatgaagaagaaaaaaagaagtcagtttactgcatttcagaattgtatgaattatgaatatatagttgaggaaactagagaataa

SEQ ID NO: 11198 - DNA, 305 bp, Glycine max
cagaccaaaacatgttggacattgtttgtgagtatcgcaattgagcgatgcacctatcatgaattcatgataaaatgcatcaattattgtgacacattgacatgtctaacgacctgtgtccacatcgtgagttgaaagacacaggcacgaaaatggtgatcaagctgcggacaagtgtctagaacgacaatactccaataaggaattcacttaaaatattgctagttatgcatgaattacagggcccccaaaaaaaaccaaccaattgatattatctgcgtgtgctctgaaatattatttgaaac

SEQ ID NO: 11199 - DNA, 481 bp, Glycine max
taatgcacctccggatctaagcactgagctcactgcgttgcttgtgcaaaatcaatggttaaaagagcaatctgacatatgcttgataatgcaaaaactgggcaatgaagagggagatgaggagaaccctgtgtgactgtattctatacaaccaagttccaccaaccacaatgcatactagcaaaacaactctctaccaccaccgtatccaaggtatcttaaaacacaaccgctactacttcatacaacccacttaccaaccaaaacaacagaaaaatttgagcataacctgagatcacccattgtgccatgtgctgtccatttactgaaataatgagctacccagcaggtatcactcatttcagatacataaccattggtttattaaacccggcgcaatacattaggccaacgaaggagctatgtcaccctaaatagaaacttgaaactcattcaaaaccccgggcattaacgtgttatg

SEQ ID NO: 11200 - DNA, 393 bp, Glycine max
  unsure (1)..(393): unsure at all n locations
tagttagattgcanaattttatagatcatgaattggtttcaaaatagagcaatccaaccctgaatccacaccatcacgcaaaaatgaccaaaacaacttaaacaccaaatattcagcagccaagcatcacaaaaacaacatcaaaactcaatgcaaacaataaattacatagtaaaatcttccttacccgaattagcctccttagggttctaagcttccttacccgaatttgctcaaatgaacacattagaagaatgcttaacattctagttaggtaaagttatctatcacattagttcattattattatgctccctatatatgtatagtactactcactctggtgaaaacatagataaaagttcatttatggatgtgataacctcatgatga

SEQ ID NO: 11201 - DNA, 631 bp, Glycine max
  unsure (1)..(631): unsure at all n locations
cgctctgtctttcgcgtgtcnttacagtcgacctgcnggcttgcatgctngtcttgtgcagaatangatatacaatnttagcaagcagtacagaatttcatagcaagtacaccacagtgctaatttcgagatagaagctctggaggcagcaagaggagcagctttgcagagaagcctacggttcttcaatttagagagaatattgagctgtaaagtgattgtgacgtgctgacaaaaggacgacggatcctccttcttgtgtanggaacacatattctgtactctcaatntaattcgcgtacgggttttctgtcatggctagctacactcctttgtggcgatntctangaacaactgatgtantactttactattaattattgggtttatgtgtcatgcttcttcaatgctaatnctgctgctctcgcctgacccatttgtggttcgttagggacttaccttcggaacgcatttgtcctanactgtagaacacactgatacctgtttcaggtggatgtgggtctgtctctccatcctcttcattcctctctctcctccctctttcgatcttttccctctctccttactccctctcttactatcatactccttcgctcttccctctctctcg

SEQ ID NO: 11202 - DNA, 401 bp, Glycine max
gttgctggaaaacactttctgagaagaattgggtctaaaattaggtttagtagctttgataagattaatcgaagcaagagatgaagtaagtgctttctttcaagataattgagtttcatgagctaaaagctaggttgcaacctcattgataaaaaaagattcaaactttctacaaacaaaagtgattaaagacttaaactcatcaggcataccatcaagaactatatcaagatgttcagattctgaaacatgttctctaatcaaagaaagtgaactgattagattgttacaaagttgacacttcatagaatgaacaatagattgaaaatgcgaatgatatttgtcccaaagatgctaggatgatcttcaatgaatgaatcatggaagaactgtgccgggaa

SEQ ID NO: 11203 - DNA, 116 bp, Glycine max
tttaagcacagaagctgaagggttttgtctggagttatggcactgtctatggagttctcgttcttaaaaggggaacaaacaatataataataatcaatggtcaacaatcaatcaca

SEQ ID NO: 11204 - DNA, 440 bp, Glycine max
  unsure (1)..(440): unsure at all n locations
tcagattaatctcanagctganaaatcattacctcatgagaggtcttccaaattattctttccagactaattttctttgtgaatcttgtgagaaaagtaaacaggtaaaaacctattttcaaagtaaaatattgttttcacttacatacctcttgagattttaacctattacatattttgatttgtttggtctaaccagaattatctcaataagtggtaaacaatatggactcattgttgtggacgattatactagatggacataggttatattcctaacccacaagaatgagcctttcaaggtcttttctacctttttttgaatgttttcaaaatgaaaggaaaaggtatgcattgcttgaatcaaaagtagccatcatgaagaagttgataaccaaatgtttcaaagattttacgaggagaacaaaagtcttcacaac

SEQ ID NO: 11205 - DNA, 431 bp, Glycine max
  unsure (1)..(431): unsure at all n locations
acccaccatcttctcatagtagaacgctggtaacatgtctactatcattggtataatctctctctccatcattgggggtgctacttgagctaccagatccctccacctttgggcgtattctttgaaagattcatgctccctcttaaacatgttctgtagttgcattttatctggaaccatatcagaattgtactgatactgcccaatgaaggcaaccattaggtctttccaggaacggacccgagaagactccagattggtgtaccaggtgatggctgcccaaataagactttcctggaagaaatgcatcaaanaattttcatcttttgcgtattccccaattttcttgcagtacatctttaagtgagtcttgtggcaagtagttcccttgtacttattgatgtccgacaccttgaacttcggaggaatta

SEQ ID NO: 11206 - DNA, 533 bp, Glycine max
  unsure (1)..(533): unsure at all n locations
tganatcaaatntcctcttgataccttgaagtgttcttaattgaatcttgaacctcattcttgattctggagaatcatcatcttgttatcatgaaatgctgttgatctttgagtttttggtcatcaccttctgtcatcactcaaaacttctttgaatcaatcttgagtcatcatgaagcttgctctacaatctcctccatnntgatgatgacaacttcttagatcaaaaacacacacacacacacacacacacacactgtntctagtcgatgactcacatannatgtcattctccccctctgttattgaattatgcgtgtcttaaataagtgatactcagcgagtcctgattaatcctattctctccctttcataacaaaagcaaatgcgacaagtgagctcaatcactacctgctcacttctgagatataccatttggcagacctattaccattttaaccctgcatactataatatgcacctctcataaaatagattgcaattatataccacccgcgaacaatcaaataaag

SEQ ID NO: 11207 - DNA, 439 bp, Glycine max
  unsure (1)..(439): unsure at all n locations
aacctttgctnnttttgctagactagaagctataagaatcatgctttcctttgctactcataaaaatataaagttatttcaaatggacgttaaaagtgctttcttaaatggctttattgaagaggaaatatatgtcaaacaacctcttgggtttgaagatcatactcttccagaccatgctttcaaacttaaaaaagctttgtatggtctaaaacaggaaccacatgcttggtgtgacagactgagttcatttctcttagaaatggttttattaaagtcaaagtggatacaactctttctaaatgagaagttggcaaagatttcattatagtccaaatgtatgttgatgatagtattttcgaagctactaatgaatctctttccaagactatntttgatctgatgaagagtgaattccgaatgagcatgatgggagaac

SEQ ID NO: 11208 - DNA, 217 bp, Glycine max
cttgatcattatgtattgtatagttaaagaaactagtacggaaagagatgaaaaagaatggggaaggggttttttttatactgtgcacctcaaaactttctacaaacataaaatatttgatagtacataaattatttacagaactttctaagtagactacctattgtacctaacactctagcttgatttgccagtaaaaaatacaaattttcttctc

SEQ ID NO: 11209 - DNA, 451 bp, Glycine max
ctaagctgtccaactccttaattgataatgtttgttggattgtatcaatgtcttcagcttcactgattcaacatgttgttttaaagtatgaaggtccctaaagcttgtgaaccaatttaaaaaatctttgtaagacagtatgacacgtataatttattaactcatccctcaacattataattgaaggacacaacttacatatagtatctggtaggtgcttttagtgttctccaattaaaagttagagtttcatctcagtaatttctttaataaatgtttgcatacaaattacggagatgaaactctaattacgattagagaacaaaataaaaaatacctatagaaatcctttcacacacaaacttaatgccatacaatagaacactgaaattcaagatattgtgacttatctaacatcctcaacatgtctctttgcttgctcaataatctc

SEQ ID NO: 11210 - DNA, 309 bp, Glycine max
  unsure (1)..(309): unsure at all n locations
atctttgctgcatgaacaacacactttgcatgctattntcaaggatgctcgctgttacttgttttctttgctgcacaagagaactaatggcatgttctaaagcttgtgtttctttgctgaaaataattaattagttttgcattttcaatatcactcagatattattaatttatggtttagcgtccaaataattttggtaaatgattattatgtgtgttacaataataaggtctatttaatattaatttacagtctacgtagatacattattatacatgactcatgaattatcttaaattattattttat

SEQ ID NO: 11211 - DNA, 243 bp, Glycine max
gcttatggaaaatgtactctacattgattgattcactttaaggcactggaatcataccaaacatgaatcatacactttgaataatggacgtggaatcattgaaatttcaaacatcaagttgaaacttttaactactgatgagctcttatttgatctgagctgactgactgtctgaactgcctgatctgactgcttactctctagctgatatctgactactgacctgatgtctgtactggtgct

SEQ ID NO: 11212 - DNA, 432 bp, Glycine max
  unsure (1)..(432): unsure at all n locations
tgcccttccaagtagcaaagaattcttcaattnttttgtcctcacaacaccaagtatatccccttgtacaccttgcatccccaatttaaacaaacatacttatatccttgtgatgtcatctctcctaataaaatgacattagtagtccagaaggtacaaatctcacattttgaaaagtttggatcgcactgttgtggaatttcattctcacataacgaattcctaatctttttttttaaaaaaaaagaaacaaatccctaaaataaataaaaacaaaaatctagattaaatcctaaagatttgaaacataacgaattcctaaaaaaatctccttgaattttcatcatctcaattatttttaaatgtgaattattctaaaaaatttctccctccattaagaattttaaataagtacctcattatgaaatttta

SEQ ID NO: 11213 - DNA, 352 bp, Glycine max
tgagatgaggaagtgttgaagggtgaaacttcctgcttttattgttgaccacagagtggtacctggagatatgtcgcgggggtcaggagaccttggggacgtcatgtggggtgctattgcccaaaaccaagcttgaccaatcccgacccaacccgggcatagtcggtcagtgagaacctgtgatgtatctaagcaggcgagctcctggcagtcaacagataaaaggaaaacaagaccacaaagcaaggaggcttgtggtggctggccagctgtgaattttgtgtaatatgtgagatatggcctctggtaatcgattaccaagggtgggtaatcgattacaaggcttaaaaat

SEQ ID NO: 11214 - DNA, 167 bp, Glycine max
tgatacgtcttcctactcactggcatgtctgataaccagattatagttatattttgacaattatgacactactgatatgaataataccgacctggatataactatcacttatagagaaaaactgaccttctattgaattgaccataccgacaatggatttgaaacta

SEQ ID NO: 11215 - DNA, 379 bp, Glycine max
tctcagatccggtcatggaaagacttggcaactgccttaattatgcagtaccaatacaacacggatatggctcctgatcgaaaccaacttcagagcatgaccaagcgggaacatgagtccattaaagaatatgctcataggtggagagacctagcagcccaagtcgtcccgcccatgactgaaagggagatgatcacgattatggtagatacgttgcctacgctctactacgagaagatgataggatatatgtcggctaactttgtagacctcatcttcgctgaagaaagaatcgtgtccggactaaaaaaaggcaagtttgaatatgctttcaacgttgcccccaacaacaatagaagaacctcagtggtggacacac

SEQ ID NO: 11216 - DNA, 427 bp, Glycine max
gatattaccatccttataccggtatcattagagcacattaaccttttcctatgaatgtacaagattggcaacaatatagtgaataatcgttgcacataggtgtgagccatatcaaaaaagttgttgcagtaaaaacatcaaacacacatattgtactatatattattggatgttgcaacaataaaaatgaaattgtttattggttgctattgttgattaatgttgaagtgaatttgaaagaatgcttgagtgaattattctacactttacacgatccttctttctcagtcagatccccaaaaccattatatgttgacacttcaaaattgactcataaatgcacaactaattttagttcaaatgaagttgtttaaagcttcactagccaaattactatttctttagagctatgctttaataccaccct

SEQ ID NO: 11217 - DNA, 519 bp, Glycine max
  unsure (1)..(519): unsure at all n locations
cgtgtgtccttgagtgattncncttgccgagactcttaagcaccgcngctgcagctgactggctagtgatntagcctatttaccttagtatagctattcgtaagaagagaaatccaagagaaatgtccggtgatttccgcttatttactaaacgatattctgtatatatatatctatccttttgattccaacgggtacggacgacgacggcggatttatttaacaagttacgatctacatcaacgtcgtggaattatttatttaagtaacgaaatgactagtaatggtaacacgaacagtgataaagtatgaatgaataaaatccgaaccaagtgaccccacggtctagacgaatgaaagctgtcaggtctcctgtgaaatcagacatataacatgagacgcgatatgttgacatgcgatctacgaacgtacgacgtcgagcctngtatttctccgacatctcagaattagaaaaatgcatgtgacttctttactctctattaaatggatgtgcccccg

SEQ ID NO: 11218 - DNA, 425 bp, Glycine max
agatagatgtataaattaagataccactctggaagttctagaattctaaccttgtgccaggacctacgggctgggggacagtctcatgtatacagtttctatggggcgtaggcttgtcatatggatgatgtatgatggtcattatatgtgtgtgcgtgtgtgtgtgtgtgtgtgtgtgtgtgtgtgtacctatttaagtattatgtgcattgcttggtgaatgatatcaccaaaaaatcaatcttcgtttcatattcaaattatcggagttttcatttaaatacgttagtatgcgctcttaagtagcgattctcttctaccagagattctttattccaccacctcttcctttggatctcacactatatgtagctcatgatatatctctgactatatccttcacttccttattcaacccaacgaac

SEQ ID NO: 11219 - DNA, 590 bp, Glycine max
  unsure (1)..(590): unsure at all n locations
ggacattgcnctgattnccnctacacgagactcntagagtcgacctgcggcatgcaagctntgataccacgtagatccatcttanaatcangagtaanatatacataatntcttganggtnggacttantacacttgatacccattctttttgaaccctccaaaccccttaattacaaggtttgtagactacaccnctaagtccacaaattaaatgctaataatgtgtacatgtgnatgcacatgagcttaatgattttttctttcaacaaaccctattctcttgtgagactgacatgtttggtgggaatcagtacagtcattcaccaatgaaccaaanaactattgaggtganggcatgatatcattattttaggaacatgaatcagaatatcaccatttaatgagtgaacttgcagctaatcatctcatagctatttgaacatccattttcgaaataataaaaagatttatgaataagagggtttatattctcagaggataaaattgtttcttaaaataaatacaatagtaaaatgtgggatcctggtaaaactatgagcgaaggcttcatgttctctctttatttct

SEQ ID NO: 11220 - DNA, 424 bp, Glycine max
  unsure (1)..(424): unsure at all n locations
cttaaaagctgcctagtaaaacaaattcatgatgtatttataattaagttntgaagatttggacagcaaagatcaaaaggttttttttaggtggtccttgaaagtggtaggtattgtcacatcagttcctaaaattcatattgtaattagtccctaaatttaactacttactaccatccaagtctctaagcatatgttaatattatcgttttattcacacttttttttttatgaattttggaataatttgattgttgatttacacttttagattttcctttttttaaaaaatattcaattctaggacttacgtgacaacactttacaaattcaagaactaaagtgatcatttacttgattttttttctagatcttgtttggttctttagtgtgttgaatttggaagtgagctacataaaaatta

SEQ ID NO: 11221 - DNA, 125 bp, Glycine max
tttgctcatctgtatctcagtaaactattatatatcagattattggcagcttttttatatataaccacaacaacatctgtcgaaacttacatgtcccacatgaggtaggcgtcatacaactttat

SEQ ID NO: 11222 - DNA, 344 bp, Glycine max
tgtgccatcttgcttgtctgtcctattaatgatactcaatggagaagacgacatggctgacaaaaacctgggttggaagactaagaaacttagcgatgtttgataggctggaagaagaattcatgtgggaaggaggagaagagattaaaccaaagtatatcggtggagacatggtgtttctcatgggacttactaaagcaagagcataacaactatgcagagatgaagttgaaagtggattatcaatggagaaatggagcccgagtttaaatcctgaatttaggttggtatgggtgatatgttgggggattccgctctaaccaagggatgtggaatacatcacg

SEQ ID NO: 11223 - DNA, 220 bp, Glycine max
gctttagtagactaatttcgttacacactatgacctttgcacctgtaagtttcttggtacttaggaactttgcatcctcgctggatagttcttgacatacattgtgctgactggctctttcttaagcacttagaacggctgaaactctagaaagtggatgctaatttttactgatgcactaggactgtcccgaacatcaaagagtatggttaataacttt

SEQ ID NO: 11224 - DNA, 455 bp, Glycine max
  unsure (1)..(455): unsure at all n locations
ntagccttaggttgtttcaagttgttgcttcctttatctctaacaatctccccatattggctttaatgatgccaaacttgaatgcgacattgagtgcatttggagagtcttgagattggattggaaacatgatccttagtcttatcctaaaaaatacttaacacttaacaaaggattaattcatcatcatcatcatagatgtcaaaactataactagtatattataaccatctttatataaaacaatgctcaacatgctatgcaatacattcaatatgccctagcgatatgcaatatcttcttctcccccttttggcattaacaaggccaaaaagttgagtagacacaaaatgaaacacaattaaatagagaaataaaccatatttcattgaaacttaagagcattgcatagactttntaatcatgagataaacaaacatagacactatcatcaa

SEQ ID NO: 11225 - DNA, 107 bp, Glycine max
  unsure (1)..(107): unsure at all n locations
tgatgttccagttcatatatcttccgantactcaccaccttatatatctaataatttccattatgccaattccttctactcattgaganattctaagcatccatgct

SEQ ID NO: 11226 - DNA, 599 bp, Glycine max
  unsure (1)..(599): unsure at all n locations
gtagtccgttgagngacctcatgnagcgacctgaggcatgcacgcttactatgcagagaatatccaagganaataccttcatctgactaagcatcatantntcctaatgttatctntccattattcaatacanaacatntacaaccacagatatgaagatgtgagatgtntggttctctgccatagaacaattcatatggagtgttctatataatgggtcttattaaagccctatntanaatgtagcacgcagtgctaacggctctcagccaacatatgttgaagaagagtatatttaataaagtctagcagtctcgttctagatctattctcacttcacacaccatttagtgaaggttcttgtgcacaaagtatgctcatccatgctatcacaaataatcaatccttatttcaactgccccatgatcctcaatagaataacgtaaatttctattngatgatttgcagttctcagcgtaaagctttctagaggtaaaagagctgtgttgagtatctcctgacaaccttgctctcaacctttttgatgccacaacatatgatggaggggggtgacaagttattaaaactattgtctttgt

SEQ ID NO: 11227 - DNA, 361 bp, Glycine max
  unsure (1)..(361): unsure at all n locations
gcgcataacacgncgagaagcccgaaannaaacaacgaaagcccgngagaaanncaaangggcataaccnccgacacggacggccgaancaggcaaancacanancgagacgcccaaaanngaacaacggaagctcctgagaaattcaaatgcttataacatatagtgacactcgaaatgtccgattcaagcttataatatatcgatacgctcgaaataaaacatcgaaagctctcgcgaaatttaaatgggcataactcttcacacggatgtccgattcggacgcataatatgtccagagggctcgaattgaacaacggaagccctcgtgaaattcaaatgggcataacttttacactga

SEQ ID NO: 11228 - DNA, 465 bp, Glycine max
  unsure (1)..(465): unsure at all n locations
actcaagctagtctgctgcgctaagtgcccagtcaaaatcacagttatattgtgatgttnttgtgaaaataacctgtgctaatctcttgtgttttgtcttatattttgcagatggcatctaagaaaaggagggctccttctacaccttcccaagtcagatttgatctgtctcagttcacatctcaagaagcttgtgagaggtatacaaatattgtggtgcctaggaaactactaccagagaggaatgtgatagtttattacactgagttcgacaagttcaaggaggaacttgagagaagagactacgatgaggagttgactgattntaatgacagcagcatagacattggcattgtgaaggaattntacaccaacctctacgacctcgaggataaatcacctaagcacgtgagggtgagaggtcacttattgaaatntgatgagaatactctgaacacattcctg

SEQ ID NO: 11229 - DNA, 409 bp, Glycine max
  unsure (1)..(409): unsure at all n locations
tgtaattcagcgcggcacgtacaagacgctatacatgctgccaaaaaggacacttagcattgtaagtctctgcctgggcactgaataacaaaagagaatgaacttaaggtaggagctgcaatatgaaaattaaatgaatcaatgcttcttctaagcatgcttttccatcactaattaatagtcacaagagcttgagatgaaaatttcaacagcatgaagactgaaggttgtattacgtaccaaaggcttgactctcgtgatgtgaggacatataagacactcactgggtatttgaaggcacaacatagtaatctgaggagtctaaatcactntctgagtaatccataaatatcgagcttagatgatatgcaacttccaagctgcctgtactagcacaatatctcagatt

SEQ ID NO: 11230 - DNA, 613 bp, Glycine max
  unsure (1)..(613): unsure at all n locations
ngtagcatgtacccgtcacngatcttaagcacctgggctgcagctgacaggcggtgacttggcatncatattctttnntgttntcttctctggggtntatggangaaaatttgcatccagtgtttaagatggagatcagttgtaatngaattgagttcttattaatacnncgtttcataccacctacnntgatggattctacagttgagtaantcattggatngtaatganggtggttntcttgcttctcgtacagtgtatataaaaactgtngagattacgatattnnatggatnttgatttgagtacaaagtggcttattaactttcatctcngaanaagactttgaacanatngtnatcactgtgatattctacaccttnttacttatgagattaatttaacctactagtcactgatctgaggcctgtgctagtagtactatatactgctgtcatgcatgatagaacagatatatgctatgtgtcaagaatgagttacatggtttcttatgtgaggtntgtggcttgcttgtaaatgtgtacanaggctttgaactgaatttgtttatgaaggaaaacttgtgaagcgctacttcctgtgctattattcg

SEQ ID NO: 11231 - DNA, 534 bp, Glycine max
  unsure (1)..(534): unsure at all n locations
tgtcctganccccgtccggccttaagcacctgggctgcagcttaggtgggtcatgctccagatgctgcnagaatgacagaatctgatggtgtctgcnatgaacatgcccagactcttgcacaggtcagatcatattttgatcatggaagtgagtactagtggcaagctcagtttcctcaacttttatttcacgatgaaagaattgggccctctggctccttaggcatacatattctgcactgatgtggagtggagcctctctcatcaattctagctcacatgagcatattcagagctcacactgctgctaatctactctctcatgtgtagccctctaaatatgcgaggagtgctctaatctgtgtgagcagctgcccattcttgatcttctatactcacaacttctcactagtgctgagctgatggttttgatgcgtgctaatgccgagaatctcagacacctctatgatccattgatggctgagcaggatcaccactttcccccccaatgagagactttaatatatttcgccn

SEQ ID NO: 11232 - DNA, 355 bp, Glycine max
  unsure (1)..(355): unsure at all n locations
aaaaacttaatggctgactgtaactgaaattgtggcaaccaaaagtcacccccaacagccaacaagtcagccaccatttggtctcccaaaaggctgatgcctaggttgccaattgggcccttattacaacttgaactaaacctaactaaagcccttttagttgattaacccaaaacatatttttggtcagccaactttacaaggattgggccattatttagacaaactaaacactctaaaattgagacaaagtggtgtcatttagtcctcctccatttgggccatgatacaactcacaacctttgacttttctccttgaaacttgngcttgtattcaaatagtatggacaacact

SEQ ID NO: 11233 - DNA, 72 bp, Glycine max
tgcattcatcgcatccactaacagacgttgagcgccgtcaactgatggactcgtcacaccaccatctgctcc

SEQ ID NO: 11234 - DNA, 359 bp, Glycine max
  unsure (1)..(359): unsure at all n locations
ttgagccaattcaaacgacaacaacggtgtttctcgaaatantttattgaggcccataatatatcgagacggtttatattgaatgttgaatctctgagcaaattcaaacgacaatagctttatactcggacgtctgattgagtgccgtaacatatcgagacgctcgaaattgaatgttgaacctcttgagacaattcaaacgacaataacttcttactcggatgtctgattgattcccgcaatatatcgagaccctcgtaattgaatgttgaagccctgagccaattcaaatgacaatagatttttactcggatgtctgattgagtccccgtataatttcaggacgctccaaattgaat

SEQ ID NO: 11235 - DNA, 520 bp, Glycine max
  unsure (1)..(520): unsure at all n locations
tgatactcactggtggacaagtggcctcagatatcttaagaaaggggggggggttgaataagatanttacaacttatttcctaattcanaaatctatttatctttctattcacgtatanattccctaataatggaattctanatatggattcanatnaacaantcgatatgaatatatacaataatatataaagagttaacggagagaaatgccactcagattatactggtcggcacacccttgtgctactccagtcccaacaacccgctgagagtccactatcttggtaatctctttcaagttctaacacacaggacaccctcctttggttagagatcttcacacaaagacctcgcctttaatccttttaaatgagagaggaacagaaactttctgagaatgatgacattggcactcatatcctttgaccataatcggcagattgagaggtaacatttcttattaaatacctttgcttaatttaaaacggtcagcaatttatctttgtctctaccaaan

SEQ ID NO: 11236 - DNA, 335 bp, Glycine max
ttgcacgtatcagtcaagtgtatggaccatatcgtagctcaagtgctcatcgataatggttccagtttagacgtgatgcctaagagcaccttggagaaattaccattcaatgcttcccacttaaagccaagttcaatggtggttcgtgccttcgacggcacccgccgagaggttatgggagagatcgatctcccagtacaaataggccctcacacctgtcaagtcaccttccaaataatggatattaacccccctacagctgtctgttggggcgcccgtggatccactcagtgggagttgttccctctacactccaccacaagttgaaattcgta

SEQ ID NO: 11237 - DNA, 465 bp, Glycine max
  unsure (1)..(465): unsure at all n locations
gcgtttcccttanattgttccccctaccgngatccttaagcacctgcaggctcagctctcccatttctataaaggggaaaggaagaataggttatcttagcctctcttttcaattgttagaaaatgttcggaaaaatccaccgagccttcgtacgtntcggagtgattccgaagttcgacgtctcacgtctcatcgtcttaccgtctcatcttaatggtagtcctaaccagctttcatcattatgcccgggggcccattgttctgatttatccgtcatactttatccccttgcggctaaccattattagcatttccttacaaataataattcacacgtgatgatatcgtacttgtgaagatcacgacgcggccaccttgaacaaaaagaaatataatataaatcccttaaaagagacatgctttcttgttcttatatgcaacaagaatagtacctctcaccccca

SEQ ID NO: 11238 - DNA, 381 bp, Glycine max
tgcccgttagaaagccaccgctcatgcacagagaattgatgggcaaattgggaccgactcttatcaaacaaagaaggagtgtctgtcaactggttcccttgatggaaagaaggaagaaccggggttcttatttcgtgcggaggatttctgaatgttcccttgatggggacaaggggttgcatcagttacaatcccgttcttgctataaggcaacttggctaccccatgagaggggcaccactagaggaagagctcgcgcctgtcatttcacaaggtttaaataagaccaacatggagacacttcagaagttccgcaaggtatgagaggtggtgcaaaagaaggacaaagaactcaagggcagtaacaataggcccatcggt

SEQ ID NO: 11239 - DNA, 429 bp, Glycine max
  unsure (1)..(429): unsure at all n locations
ntgagcaaattcaaacgataataactnttgactcggatgttcgattgtgtcccgtaggatatcgagacgctcgtaattgaaaacggaagctttgagaaaattctaacgacaataacttttcactcgaatgttcaattgagtcccgtaggatatcgagacgctcgtaattgaaaacggaagctctgagaaaaatcaaacgacaataacttttaactcgaaagtcctattgagccctgtaatatatcaagacgctcgaagttgaaaacggaagctctaataaaagtcaaacgacaataacttttgactcggatgtccgattgagtctcgtaatatatcgagacgctcgtaattggaaacgaaagctctgagtataatccaaccgacataacttttaactcggatgtgctagatgaatcccgtatatatcga

SEQ ID NO: 11240 - DNA, 472 bp, Glycine max
  unsure (1)..(472): unsure at all n locations
attcttaggtcttcgcactgagctgcagctctatcangtatctgtgtaactctcttcatgctattctagtgatggcgcctctctcactcttctctttgcttcgctgatctcatgtggaaatcacataaaagacctattgagctaagatcacctcatagagcccacaagcagctccatcatgtcatgcattgagcgcatgcngtacatgtacggacaactgctaaatgttgaagtttatctagtatatgaatcgtggtctacctattcgccgagatatactgatattgaacatgatcgcgttgaatactgatcttgttacaatggagccgaactgcgaataaagacagtaccatcggaatcgatggcgaacaagcgtttgcatcgattctactttaactaagaaaaatactggattactcgaagatggttcaattagtctctccgagatcacaatagataaagggcatctgcg

SEQ ID NO: 11241 - DNA, 459 bp, Glycine max
  unsure (1)..(459): unsure at all n locations
ctcaagcttaatcaagagtattgttgttatgaatatgtttggttacatttagtcatatatatatatatatatatcgatagatatattaaatgagaagaaatttaaaatgaaaaatgagaagaattgatttaaccattagattattattaaaaaatgataatgatttaaattaaaatttaatttttgatacatcatatttattcaactagagatcactattaaaaaaagacttttacatcaattaaaaaatacattntatgtcggatgcatgactggtgtctatgctagtgacattcaaagtcaaattttttaaatcgactgttaaccgatcttaaaagttaatttttatattgatctttaagtaactgatccttaaaggtatcttcttagatcgattctttaggtaattaatctagaagtaattatttaaatcagttaagaaaattagcatgatgtatt

SEQ ID NO: 11242 - DNA, 302 bp, Glycine max
tcacttaataccctacttgagatttgtcatatggatgaacaattttatatattactaataatgttagatttgtcttctatagctgtgatactactggataaagaaactaagcggacattgatactattgataaaaaactaatgcggatatataatttttattatataccctttatgcattatacaatattgtagtgttacaatttgaatgtaccccagttcagtaactgaaacttacgcataaagattaattgttcgctgactccgtctatcagcctagactggctggggtgattgctgatg

SEQ ID NO: 11243 - DNA, 222 bp, Glycine max
  unsure (1)..(222): unsure at all n locations
caaccaaggtacaaagacgcaccctcacgcngcgaagatcatagtaatatatccgacgagccgccgaaccaaatgcaagggaaggagcaaacacaaggggaaaccgaacacaacacacagtcgccttggtgatgaggggaccaacactaactccccgcagaaacagcacacgtgagggaaacaacccatcagacagccagaatgaaacacaaaacacacaaa

SEQ ID NO: 11244 - DNA, 538 bp, Glycine max
  unsure (1)..(538): unsure at all n locations
nggtatgtgccgttgagngtcctctgacgcacctgcngcatgcacgcnttctcttcanntggctantctctagtggatgacactcctctcnncctcttctcattatcttctattgcaactccatggctgacagtcaccattgaaagaccctcatgaagctcaaagatctagccctcatagaagctgctcaagcaagctctcatcataacccaaataaatcctggcggctatgttctttntgactctntctctctctattgcttctntatcaatttgtaagttcaagaaattcaataatgccttaataaagagatatgttgggatggtaaattcttacaacatgatcactttaacaagttaaatcatttattatgatgttacaacacccctggtgataccatactttgataataagctgctgagactcaacatgtntaaatgtcaacaaacttaaaaaggcctatgcccatgtgagaacttctttgcaaaagacttatacaagcccgcgagctgaacacttatccaaagaggaggtcac

SEQ ID NO: 11245 - DNA, 358 bp, Glycine max
acctccttcactacatcaagaatcactgagttgagtcttctctgtggctgccttactggtctagccccattttctgccatggaccagcctatagccctcttatgcttcttgagaacatataacaacttcttctcttgctcatcagcaagggatgcagatattattactggaaaacttttgctatcattcaagtaagcatattttaaatttgatggcagaggcttcaattctggtgtgggcggctggatagtggtagaaaaagatggtttctcagcctgtacctcataaagaaagtcagaggtatgtgcacttcctgaaacatggttagttctatctgactttataaaatcaatctcaa

SEQ ID NO: 11246 - DNA, 604 bp, Glycine max
  unsure (1)..(604): unsure at all n locations
ctgtccttgaggccctatagcacctgtgcatgcagctgcgccagctcgccangcgagcangggtgcttctcancagccttcttgatgaatcttctgganggcccaagtgnngcttggtgctatttgcatccccatttttactaaataccacccctgccttatnnttggtgattctttttccgtaatgttacgaaactntacgaatntcgtaccgataccttattttcttcctgcagggtacgaaatcttacgcgatatgtnattactctttcttagctttcgaagaagtacgaaatcttactgattggcaaaacacctcttttgacttccgcacatacggaattcacggtcgccaagctgcttctttagatttgnacgctcngactcattattggcacaaggatgccagatctcaaagcgctaccaatggtgatgtataagtatatcccgacgaataggtatacattgctctttactactctctcgaataaaagaagcaaatagactgaatctcgccttcttcgtgagacaatcatttcttttttttttgcaaaacaaccacccaccacaccattattcttcactttctcttggagggctcggt

SEQ ID NO: 11247 - DNA, 395 bp, Glycine max
tagtagccgttgcagaagtcaatgtttgtgccaatgactatcatcttttctatcttacctattttgaattatggccttggtttgtgtgtctagattgacaccaaacttctacatacacaatatctttcattgcaagcttagcaacagtcccaaaacccaatgtgtatgcgcaaccaagtgtcatgatttctatattaccaatcttgctagttgttaatgttgaatcataaggttgctctctcatctagcattcgtctcatattgaaaacctatttcgtgtcgtccagatttaaaaaaaacttctcttactttatttcaaaatcattcttctgtttaccttacaactcactcaactctatcattagcccttttcaatatgcataattaccaacatg

SEQ ID NO: 11248 - DNA, 380 bp, Glycine max
tcaccggatgacgccgatcgaacatttcctaacttacatcatgcaaatttcattcagggattgaataaaaaactcattacgcgacatctgtcgtgaagtagcgactgatatttttcagccaacattgcacaattttttttagaaaagctcgctggtcgataatgtttttttacggcagagtaagctttcttgttttggtgttgcataaaaaagttacaatgtacttcggcaaggatttgcgtgcgagctcaactgacgttttgtttcggccgaagctggcatgtttccatttattcggccaggaaaacattagcccacctttacaaataaaacaattgctaaccagcctcatgcatatttgatcatggatggatagaaac

SEQ ID NO: 11249 - DNA, 195 bp, Glycine max
gctgcgacaccacgctttttagcttgttgatttatatgcatgggatctgggttgaattggacctgtcaccatttttgtatctactaaaccctatatattatcataaatctaactatatacaacaatattccatagtctctctacctacttataaaatggaacaagaaagtgataaataagttaatcaagagctta

SEQ ID NO: 11250 - DNA, 448 bp, Glycine max
  unsure (1)..(448): unsure at all n locations
agatactaagctatgttaaaggataaataaggaaaataaaaattttttattaaaatngaactcataatcatttattcataaaataggcaataaatcactaactcacttgtttaccttaattaacaactttaacattattttttatgtattattagtctagtgttattaattttttttcaaattatcaaattttataaattaaaaatatttaatatataaatctttttaattttactttatatcattttacatttttttattttgaatagtctacatatttttatttttactttaccaattttaattaaatctcataaattaatatgtaattatttacatgatttttttaattcattttaatatacaaattattcttactctaattattaacataaaattattcatggacaagacaataaaacacctgttttgttctgtagctatatta

SEQ ID NO: 11251 - DNA, 502 bp, Glycine max
  unsure (1)..(502): unsure at all n locations
atattattgtccccttgacgcgaccttaagcaccgcggatgcgctagctctaactgccacgctctatattgatagatcctgtgtacctcaccgacaaacactgcanaactatctctccttcttgacaaagatggaggctggggcaagtaatttcttccatcagacttggatgcactgtgacgataccctacactaaactgacggtatcaaccatcctcgtctggcttgatgtaaggagcgccaacacacttacaacatttctcaatcatacatcaacatgcaacgcagacacacatcgagatcagaaatgactcttctcaatcacttgcttatctcttgggctccaaacgatctggtcaccgtaatactgtacagcacgatcggcaattgctgctcataaacttgcatctcgagaggatggtaaacgcatccctgcacgttttcattaaggtggatggttttccatgggtctagactaacgacctgatcattcgagataggn

SEQ ID NO: 11252 - DNA, 324 bp, Glycine max
caaggaatacaactgacaatttggtagcacgaacatgttctgtaagtgggtgccattcttttacccggaaattgatggtgactggaccacaataaaaccaaaaactcaaaaaacataaataaaattaactcactttatttttcttccattgacagagagtatccttgcaggggttttgaaaaacacacaatacatgtctacgtataccaaatgggaaagagggttctcagtttatgtaatacttaagggacaaccaccaccaattaaaatgctaacacataaacacaaaagggcacgaaagttaacttatttgttcaaatcctt

SEQ ID NO: 11253 - DNA, 381 bp, Glycine max
  unsure (1)..(381): unsure at all n locations
tattctntatctagagtagttgagcacaacaacttactactgacatatattcgactttagtagcggacaatgtagttgagccttgcatcttgcatattcatgttactaaggtagcaccgataaagtaatagcttccactagtgctttttctttcaactttatcaccgacatagtcaacatcataatagcttgtaagtctgaaactttctcttctttggaacataagaccaagattagaagttccaattaaatatctacaagatatgtttaatattagttaggtgaacttccctttgttcttattgaaatcttgcacatagatgaacattgaacataatatcataaatggatgcagggagatagaccagtgagttgcatcca

SEQ ID NO: 11254 - DNA, 546 bp, Glycine max
  unsure (1)..(546): unsure at all n locations
tttcttgtcccgtgcggatcttagcaccgngctgcagctcgtctaatcctctgttgactngctcacttaatgctatgaagttanactattacctagcttgtctcaatcctctgtggactgactagatccacaacttattgtacaacatattnaaaccaaacttatccgcagatcctcatttagactaagttcaatctgcttcatcaagtctaatgcacaatacattccatgctaagtccctactatgccacaatggtgatcgaccagagcatacgaattatgcctgaagaacattgacacataagacaccaatatatttaaaggatacatcagtgtcttataatcccacatggtgttaccaccatacagaaaccctacatattggatatagtaagattatgtcctaccagaagggatctcttcttttcacatccaatactttgactataatctttaatccaactagttcttgaagcacccttgcgtccaattttctaatagctgggtgctgatttatatattttccttttccaaaaggtaaagcct

SEQ ID NO: 11255 - DNA, 392 bp, Glycine max
  unsure (1)..(392): unsure at all n locations
tataaagaaaaatgatggcatgattttaacccaatcacactatgttgaaaatctgttgaagaagtttaattattttgatgtgaaacctgtttctactccttatgactcatccatcaagctaaagaaaaatttgggtaaaggaatttcttcacataaatatcctcaaattatcggttctttgttgcatttgacaaacttctccaggcctgacattgcatatgcagttggtagattaagaaggtatactaataatcctgatcattctcattggattgcattacaaagagttcttagatacttaaaaggaaccatcaattatgacattcattatacatcgtttcctgcagtaattgaggcgtttagtgatgcanattggatttctgattctgatg

SEQ ID NO: 11256 - DNA, 516 bp, Glycine max
  unsure (1)..(516): unsure at all n locations
tttgcttttgnattatgcccgttgcgagactcttaagcacctgcggctgcagctctttgacctgacaagcacaactctcttagaacctgctatggctccactggcccttcttcctcgcactgagttatatgctaccataagctcggaattgtccggcataccctccttgcaagcctctgggtcttgacaaggctctgggtattgattctcttcccgaacccggacactcttccgacgtgtgtgcagcacttgactttcctgggaggttgctttcaactcgtgtgagagctgactctcgtcctttcgggctgaaatctttggtgcacttaacttggagcatctaactccatgcaatttcgctatctgaaccccatatgcatacatgcttaacctgtttcctaaggggcccgctatgatcttttagttgaactggccaacccaagaggactctttcccggtccctgggccaaggtatcacgggagatataccccccctcccgagtgtggcccaaagct

SEQ ID NO: 11257 - DNA, 239 bp, Glycine max
atgacatttcagattccttagaagatagacatattcattgaaatgactcttaagaaaaagatgaaggaagccatgaagattctcaagataatggacttagagcaaataatgaacttcccagagaatggaaagcctcaagagatcatcccctcgacaacattattggtgatatatcaaaagggggaacaactaaacattctcttatagattcatgcaataatagggcttttgtatctatg

SEQ ID NO: 11258 - DNA, 75 bp, Glycine max
atgatttttgagcacctactatactcatcttttcgacacttaaccatacctttctctctaatccttctagtacaa

SEQ ID NO: 11259 - DNA, 633 bp, Glycine max
  unsure (1)..(633): unsure at all n locations
tatagtccttgnnattgattccccctcgacgtgtnctctgagtcgacctgaggcatgcacgcttaagaattagtcttcatgttgtcatgtagtatctcctatctctaacactttgcccttataccaccacctcctccatgtataccaccacattctcaacctccaacaccactgcctgctcaagactgactatgatgttcgtcattggttttatcttcanacccttttgtgcttatgagatcatgcggagaaatatgaatcttgattgtaaacgactaatatctctatataagagtggttgtggagtattttcatatgatctctcatcagtattaactatattattatgttgcacatatgtcatatataatttactgcatatattcttccatgattgacttagggaaggttacacactacatgttgtactctctaaactctattactttataatcaaattattatgtggctcttcacaaatggagattgtngtcttgatatatcttctctcaacttggcttgatgataaaaagatataattgagtctattgttgttgcacggccggtcaatgtataaaatcatattcttttccttacagaaagaattttattcgtccccttaccaatattcct

SEQ ID NO: 11260 - DNA, 410 bp, Glycine max
agcttgctcgtcttgctgatatttatcatgttgacttttctgatgatgaccgaggaacaattagggatcaacttgaaacttatgtgcttcaagtgagaagaaatgcttctttttccacttgtgaagatgttcaaagtttggctatgaagatggttcaaactgagaaacatttggtatttccattggtttataaacttattgagctagctttgatattgccggtgtcgacagcatccgttgaaagagctttttcagtaatgaagattatcaagtctaaattgcgcaataagatcaacgatgtgtggttcaatgacttgatggtgtgttacaccgagcgggagatattcaagtcacttgatgatattgatattattcgaacatttaccgcaaagaagtctcggaaaggacac

SEQ ID NO: 11261 - DNA, 440 bp, Glycine max
  unsure (1)..(440): unsure at all n locations
tgccaaatgctctattggctgatgagttggtccatcctctctaagtccaatcgaatcatgagtcatcacataaataactccaacttcacacagtgcagaaatccttatggcagctctcatgtagtcagtgaagacaaagggcatttagattttgctgaaacaaatttcttgtagcatctgtagggctttctggagcgtatgtctgaaagttgaaatttaattagaagggtagtcaataatccagaaacaaatgatggaagtcaagttttatttatcttaaaagtttgaaggctatacatgcatgaagcaaaaagatagatgatgagtgaagatgcaatgtacttaatatgaattntaactgtaattaggaaagttaatgattataacaaaccatggaaacgaatcaccactattcagtannaatgggatacacatcattc

SEQ ID NO: 11262 - DNA, 420 bp, Glycine max
  unsure (1)..(420): unsure at all n locations
ctctaaacttggaggttgngncatatatactgactcctcaagaaacccatatagcaaagcattgttcacattaagctgaaataattcccacccatgggaaagagcaagagtgataacaacacgaattgtgacaggcttgaccacaggagaaaatgtctcatgaaagtcaaaaccatggacttgatgaaagcccttagctaccaaccttgctttgaacttgttgatggaaccatcagcattttcttttactcagaaaaccaacttacacccaatggcttgcttattagaaggtaggggaactaagtcccaagttctgttttcagcagagcaccatactcttgctgcattgcagcaaaccaatctgaattnttcagggnctgtntaacatttttgggttcagaatgagcaagaaataaagaa

SEQ ID NO: 11263 - DNA, 361 bp, Glycine max
tcacaatgtgcccgtatagtactgtccaaaatgagaaaatgataaaattaatgcagtcgttattaccaattttaatttaagaaaataattgaaaacattctttatttgcttaaaactttttagagttgggtctctgagtctatttttcattattttgaattgatggataggtatagaaaatcaatcctagtctaaacacgctgtttgacttatagccccacccatggctattgctgagacaatacacaaaaacacatttaatttccaaaccattcaatcaaatgcaccaatatttgaatttgtagctgcaagctcgtcatcaaatagacaaatagaattgtctagtacactacactaacct

SEQ ID NO: 11264 - DNA, 481 bp, Glycine max
  unsure (1)..(481): unsure at all n locations
ntgacctttgatccggatccttaagcgacctgcggctgcagcttatatattgttaatgttttcttactaattgttgttatttgattnttgtattaattntcttttataataaactcacccctcacaatttttgtaccgtgtggttggtacctgtgatgatcacaaacctttgttcgtgggagcagaatgacagcagtagaggatgagaagtgagattcttttgtggagctaccgagctgacgtgatgacgttgggattattttgggagagagttgtgttttgttaatcaactcctccatagcttgttccataattctttttgttggtttgaagatgtaaatcacaaatttaattatatgtatgatgtgtactgagttactattcatatatatatatatatatatatatatatatatatatatatatatatatatattcacttaagtaatggcgcgttatttggtgaatgtatgtcgagaan

SEQ ID NO: 11265 - DNA, 439 bp, Glycine max
tgatctagtagaagacatgtatcaagaatgggttagtgtcttccttgttacccgataccattggggttgcttatataaccttcttctaggttaatggacttagtttcctattttaagccccacaatggtgataatcttgggtaatagatatgatgttgatatatattttcttatatgatcctttaggcggtgaggataaactttcccactttcctattttacaatgactaaatgcgctgatgatttttgcaatagatctactcaatgagacacccttctaggtagtgtgttaagtatgagttagcacatacgccccaagcatcatagtgttctgtatcggcttaagtgttttctttctagacagatagatatcaattactaaggttttttctagtctaggcaattgtatgctcctggacttctcttttaaagctattta

SEQ ID NO: 11266 - DNA, 432 bp, Glycine max
  unsure (1)..(432): unsure at all n locations
gtcacctgcggcatgcaagctntacctttatcacttttcctcccttcatcatgcttttccttgccttttaagcccccaccgagtagtaccttcctttcacctataccatggagtttgaccttgaaaaccctttagaaaatcttcactctgatgatgtctcttacctcttcctcattgaatctgaccacaccccatcacagaatcactctcagactctcaaagctagagatcttgacatctctgtcagaagagaactcatttccttaatctcacaggtatgtgccaaaagcgtttattatattgtctgagaaaaaaagatttgtttttttcttaaacatagtaatctcggtgtgcattggttggttttgttcattcagttgtcctgtgctttggatccggttttgtcttaccttgctatcaactatctggacc

SEQ ID NO: 11267 - DNA, 429 bp, Glycine max
  unsure (1)..(429): unsure at all n locations
ctaataaagagcatttaaagaaaataattttataatctctattgatatgaaatgacaaatgacagcaataatatatgcttttgttttccattgtctaacaatgacttgtagtttaaatatgaaaatatatattaaatttcattttctcttaatgtatttaaaataaattcatttttgtttcacaagaagatttgaacatgggagagatgggagattaataagaaaaaaaatcctcattttccttccattatccttattattattgttaatatagagatcataaatattttttttatcaaaaatcatcctgcaataaaaatattagttaaattaaaacaattttatacccattgatgatggtcagtcaatccattctccttatcataaatctttcaaaagatattagnaacatttttccttctttgatac

SEQ ID NO: 11268 - DNA, 442 bp, Glycine max
  unsure (1)..(442): unsure at all n locations
agcttccatcttanaccaaataatgttaacttataaatttcatggtagtgagcaatgcaagaacaaatgataatgagtctcaactcttactacacaccaggctaaaaacaacaagacagccttattttatcaacacttgttcagccaacacctattatatgtccatttttaaaattaactctagaaaaataacttattttactataaagacctagagtaaacccctattaatgaaacacaactattggcagaaaaaaccgttttaaggacaaaaacctgattaacagcttcaccaaaagccacaaatgcaaactccccaccaggagcaagaagtagaccaactctgatggcagaaatgagtgaaatcccaaacattctacctatcaaacaaaccaagatagtcttgccacatattaagagtcctagtgtgcccgtaatgact

SEQ ID NO: 11269 - DNA, 437 bp, Glycine max
  unsure (1)..(437): unsure at all n locations
ctggctgtcctgcatatatgatatatcattgcaagattacttatataacttctatntctacatgtnnttttcttgttgctgagaatgatttgggcctaaattaaaatataggttttgttttcatccgagaaggattaaagtttaacaatattgtaattaacaaaaacaaaagggaaatggactcttcaatttaactgtggtgtattctattaaagtttaatttggtggtaatcttgcatcttggcattgcagttataaagcttaattttcatataatatactgtgaataacatttcagtaaattcaccccatcaaaatacataggccaatctttgttgacaccaaaagaaaagaatacagaagttgaaccataattcaacagataagttaatatttaaaatatttaagaccaaacactgaagacaagtgaaagattc

SEQ ID NO: 11270 - DNA, 259 bp, Glycine max
  unsure (1)..(259): unsure at all n locations
tatatatcgatacgctcgaaataaacattgtacactttcgaganaggcaaanggccggaacttttcacacggatgtccgagtcgggcgcataataatgggagaggctcggaattgaacaacgaaagctcttgagaaattcaaatggacataacttttcacactgatgtccgattcatgattatactatatcgatacgctcgaaattaaacatcggaagctctcgagaaattcaaatgcgcataactgttcacacggatg

SEQ ID NO: 11271 - DNA, 309 bp, Glycine max
  unsure (1)..(309): unsure at all n locations
atgaaaaccgagaccatctgaatagagagaanagcttgtgcaagacaacaaattttacgaagtaaactgaattaacgcgtggactactcggaggctcaatgctgaataaagacaagtcacgtagtaatgtgcgatggaatggaacaatataacttctcttgtaaatccaaatagtgtaagctcttcaatagaatttcaatatatttggcgaggcattttaacctctgtgaatgtgaagctacaaagaacacactcttaaatattttggctctaagtcgntgtgcgtgtaacccacggctttgactcttg

SEQ ID NO: 11272 - DNA, 393 bp, Glycine max
  unsure (1)..(393): unsure at all n locations
catcgngtggatcttcctccaaaggcattctacgtataaccattttatngacaggagnccatgatagaggttgtgctgattgttgaacagtgttgtaaccaccagcagcaatatcactgctactaccactaccaatggtgatcagcagtagtaaataatgtctttgattttttctgcttgctaccgtgacaacctattttgtttggtgaatgatgaacaatttgagagttaaagagatttattaatgattgttagtgaacatgtattgatgtactaccataactactaaagagagaattaagaatccatatgttccactgttccatgaagcaacaaaaatcctaataacatactaatctactggatacaccctactatgtagtaaaataacta

SEQ ID NO: 11273 - DNA, 438 bp, Glycine max
  unsure (1)..(438): unsure at all n locations
agcttganaacctgtgtaagagtgtaaacctttttgcattcaatatatgttggttgttattgatgacaatcattcttttcagcctgatcctgaaaaagctgctcgtgatgaagtcgcagagaaacagatattgcagaaagttaaagctagtatgacaacagaagatctagcagagttggcccgtgctactcatgagcttcggcttaagcaggagactcctgacccacctgaagctttgaaaactgttcctagcctttctctacaagatattcctaaagaacctattcgtgttcccactgaggttatcactacttcccctcgagtgaggtagacctgtttgtcttatgatctgtagaaattcacaaggatntactngctaaatgtaggttggggatatcaatggagtaaaagttttgcagcatgatctcttcaccaatg

SEQ ID NO: 11274 - DNA, 413 bp, Glycine max
tatcagaaggggaatggtaaaataccacctctttctgatattatgaaggtggcaaagtgtttcttttgcaagaagaagggacacatgaaaaagaattgccccggattccagaaatggcttgagaagaaaggtaaatcaatctcattagtatgttatgaatctaatatggttagtgttaatattaacacctggtggattgattctggatctactattcatattgcaaattctttacagggtatggaaaacctaatgaaaccagtgggaagtgagcaaagcattttatcaagcaataagctaggctcacatgtggaggccattggaacttgcattctgactataagtagtggctctattttaaaattagaaaggactttttatgtaccaagtttttcccgaaacttgatttctat

SEQ ID NO: 11275 - DNA, 446 bp, Glycine max
  unsure (1)..(446): unsure at all n locations
ccggatccttaagcacctgcggctgcagcttggtcgaagaattcttttcccttatattgctagatttttaagtttgtattgagggtattaaagggaaacaaacaaacaaaaggaatttagatgccgaaagagcttaggatgtcttagaaataattcatacaaatatttgtggtccattccttatggattcatggaatgcacaaatgtattttattatttttgtagacaactactctttctttaattgatgagaagtcttgatctctagatgttttcaagtctttcaaagttgaagttgaacttcaattagaaaagaaaattaaggctgcaaatatgactataacggtgactactatggtagatatgatagataaggtgagaaatgtctagaacctcttcacgtttttttcttctttaataagtgtgaaattattntgtaatataca

SEQ ID NO: 11276 - DNA, 421 bp, Glycine max
tagctagatagaatgtcaaagatggaagatactttaacattgtttatgcaagtatccatcgcaaaccaaaagaacattgatgcttctgttaaaaatctagaagttcgagttggacaactggctaaagagctatctgaacttggaagtggatctttctcagcaaccacacaggtcaacccaaaggaacattgtaatttaattacaacaaggtgggggattatggttggtttgaaggataatgatgagaaaaagaataaagaaggagttgaaaaagaaaatgaggaaaaagatgaagtggtaactagtgaaaaagtggtaagtgaagaagagaaaaagaaatcaaatgaacaaaccactgataaaggtaaagttatagtaaaccatccaccaattgagcatcttccttatctgcatgctccat

SEQ ID NO: 11277 - DNA, 446 bp, Glycine max
  unsure (1)..(446): unsure at all n locations
agcttcaacaatcacattcatgattacacttttaagaagagagttaaccaatcatgcgtttacacatcaagagagacacactcatccaaggcatatatacggttaaaaaggtattcacaacattaatctacatgtcaagagagagataagcaagttaacaacatacgcaccagaagataagggctcattaaggtattatcaatcaatatcaagactacctgcatcacctaacggcttgccataatgtcctacaacacttcacgaattataaagatggttggctgtttggcttccgacaagtgcaccagatcgcacaagtagtataaaacgataagaaccgagtatcgaactctcggngaacttgtgttatttggtaagctatttcagcaaataagtgtctagtgtgtaatgataagtgtgaatatgaacaggtgtataaactatct

SEQ ID NO: 11278 - DNA, 371 bp, Glycine max
attgaggaagcttcgccaagtatgcgcattgaaaaacctttattcaaacctttcaaagttagtgagaaggctaaacgaaaaattagggaacttagaaaaactaaatccttaattgaaggcgtatgtgacaatcatagtgaattactaaacaagattggtagtttacttaatgtcattccagatactccccaagcctcgaaaaatacttccaaaatggtaataagaagtacctccaaattaattaatgttattaatgaagatagtgaccaaaactcagataacacaactgagatagaatcagtgtcagaaaagaatataaatccaattaattccaaacactggagaacaccctccacattatattatcaacg

SEQ ID NO: 11279 - DNA, 420 bp, Glycine max
  unsure (1)..(420): unsure at all n locations
agcttctttgagaaaactttcttgttatgtcttctttgagaaaacttccttgagaagctagagcttagctacacatcccctataatagctaagctcacctccttgagaagcttccttaagaagattcctaaagaagctagagcttagctacacatacctgtctaatagctaagctcacctccttaagatgagaagctagagcttagctacacaccccctataataactaagctcacccccatggcaaaatacaaaaaaaatccctactacaaagactactcaaaatacctcgaaatacaaggctaaaaccctatactactagaatgaccaaaatacaaggtccaaacgaaggaaaaacctattctaatatttacaaagataagcgggctcatacttagcccatgggctcanaatctaccc

SEQ ID NO: 11280 - DNA, 270 bp, Glycine max
  unsure (1)..(270): unsure at all n locations
atgtagaggtgatagagatcaacaagattctcatccttgatcatgaagattaaagacaatgccatggcttgtgttcaaccttgagcaaattgatttagatcttcaagggttttgtgatctcattcctttaactctctttttttcttatcatattttgatttctaaaatacggatttttatggactttgttgtaggatccaacaaaggggttattttactctcacatggttgtagacatgtangggtgagatttgttgtgtgtgtgtgaat

SEQ ID NO: 11281 - DNA, 436 bp, Glycine max
  unsure (1)..(436): unsure at all n locations
agcttgaaacaaaaagttattggagtatttatttaatttaatgtataaattaaatatagttttatattatatataaattttaatttttcgtgtaaatacaaaaggccatatatggcatgataacaaaaagcataatgtcataatacaccttatataacaaaaaaataatatatatcagtcaatagtttacctcgtacctctttcgacttcaatcaaaagttgttataaaccattatgtgcatcttcaaatcataccaaaatgcactcaccacatcaatcaatatattcacggtgagaataccataaaaggaggtatcaaactttttagacaggttgggccggttgttntaacttaattattaaaaaaaaatanttgttntaataaaataagtagttttttgttttgttagtatgtttgtctaaactgttttacata

SEQ ID NO: 11282 - DNA, 175 bp, Glycine max
  unsure (1)..(175): unsure at all n locations
aacgcaacaacacaaatgactgtgcagtatgaataccacaaccactctattgtatcacaccacattcgctgtgatgtataggaacactgcaggcttataccactctcacaacgcaagagttctgaagcaaatatagagaatatggccncgccatagaacaatttaccaatatgtg

SEQ ID NO: 11283 - DNA, 428 bp, Glycine max
  unsure (1)..(428): unsure at all n locations
gcttctaggattaagtttatcttgggattatgatttgatttgagaaagagagcccttgcaaatgcaaatctgaattgtgagaattagggaatggataatgatccttacaattctactttccacacccgatttttctaagcacgctcattccttaacatacatcaaggcccattttctcagacctaaacttaccaaaaactcaccaaatacactcaaatataagcacaacatcaccacgtaaataattaatttacttcaagcacttaatttaaatntatttactcttgcaatctaattaaaacacttagtcaaacctgaaaatcacaantgtacatcactcaacttttatttccatttaattaagaaaataataatcaagataatattgcggcattattnggatataaaaataaaatttatcactcttt

SEQ ID NO: 11284 - DNA, 438 bp, Glycine max
  unsure (1)..(438): unsure at all n locations
cctcctcaactcatctgtcaacttcctaatatgactattcatgtattatattngtttacattnttgtatatatagtaacaagtctggtttgttttggccttcgattatttcaatttttccattgttggttcctgcaccttgtgtctataattatttgtttgcttatttggggttcaggctgatgccaagaccgatgaagtgtactcgcaaatgaccttgcaacctctgaatcttgtacgataagtgataacactgtcttaacttttcattgataactagtgttattgcttttgtagttatttaggttttaactaagaccgtgtttgtggtaagaccaaaaggaggcatactatccagcagagctggtcaccccaagtaaacaaccaacaaactatttctacaaaactttgacaatcagtggcgcaagcactcatgggg

SEQ ID NO: 11285 - DNA, 404 bp, Glycine max
  unsure (1)..(404): unsure at all n locations
gcaagcttgctctaaatntacattgatgttngtatttatttatgaggttatatgccattttttgctttaagagtaatgtcccactaaaactaactttccaaatgtttgccttcgcaggaatggcaccgaggaagcttgcctcaaagaggtctaggaaggacaaggcggccgaaggaactagttccgccccggagtacgacagtcaccgctttaggagcgttgtacaccagcagcgtttcgaagccatcaagggatggtcgtttctccgggagcgacgcgtccagctcagggacgacgagtatactgatttccaggaggaaatagggcgccggcggtgggcaccactggttactcccatggccaagtttgatccagaaatagtccttgagttntacgccaatgct

SEQ ID NO: 11286 - DNA, 286 bp, Glycine max
  unsure (1)..(286): unsure at all n locations
ggaaagttagnnnctttgggacatttcncnnaaagcaaaaaagggcatataaccgcctcccataaagacaaacaacgatgtaaatttagagcaagcttatgcgcatgtttacttacgaacgttcacttgcggaagacatcctatggaccgaaaaaatgcacccgtgtacaaacaaagcagctttgttacctagataatttacacgtactttcaacgtgtataagtactaacgaacacacatctccttggccaaagccaaataaatgcatacaaaatgcattttggg

SEQ ID NO: 11287 - DNA, 452 bp, Glycine max
  unsure (1)..(452): unsure at all n locations
ttaagtcaccgcggctgcagcttgcttccaaatctcccccttttggtgatgacaacttctgaaatcaagaaacacacacacactttttcctagtcgatcactcttataaatgctccccttttggttttgaatttatgcttatcttanaataagttgattactcatgtgaattcttgatttaatcccatttctctccccctttggcatcaacaaaaagccaaagtgcgcatcanataaatttaatttaaacatccatacaatgttcataaaaaatatcaaccaaatcatgaagcaagaagcaagaaccatgaaaccatgaagcaaacaaccatgcatagataaattataaactccacatagtcaaataacatacttaataattgtccaaacataccatgcaaatagggaaatagtaaattgttcanatagtgtaataatatagccaaaataca

SEQ ID NO: 11288 - DNA, 432 bp, Glycine max
  unsure (1)..(432): unsure at all n locations
ttactttntgttccctttntgtttggcagtctcttcattatacttcctaagaaactcatcactagagtcttagagtcaaaggaaaaattaacaagactaactaggggtgttggagaatgaggaggtttccacccagtggatttcttgtagaagaaatcattgatcaaagaccatttgcaagcctccttctcaacatgggcacattcattcaaggcttgagcaagtgcctctctggttctgacaagttccttttcaagtagttgaacataggctcatgaaggtgaaggatcatacacttgaatagccaggaatccaaatgcagtgtcaaactcaacttcttcaatgataggatccacatgatgtgtgaagaagaatctagagaaaggaaataacaccataaatgataaagtgcgatcagacttagcatagaaa

SEQ ID NO: 11289 - DNA, 363 bp, Glycine max
  unsure (1)..(363): unsure at all n locations
ccatgcattangtaccatgttcaattattttgtttttaagtgaaacgggtttatgatcccaacatgggtggctcgtggtgcctaacacatgaaactaagaatgtagtgtgaagtttcacgcttcccccttctttgtttttgtttttgttttgcagaggaaaacgcaaggatgagcaaacatgaaaacaaatggtatgcaattgtgcagatcaaaaagtttgttgaacgcatatgcatgatgatgccatgactcatgcaaaatgtgaggctggaatatgataacggacaaatgcacgatatgtccattatgatgttatgaagagatgcttatgtgatgcatgatatgaatgcattntacggaca

SEQ ID NO: 11290 - DNA, 432 bp, Glycine max
  unsure (1)..(432): unsure at all n locations
ttctggcggacatcttgacttgctgtccaatctgacatttttcacagtttctgccttcttctattttcagattgggaatgcctctaacagcacctttgtcaatgattttcttcatgcctcttaagtgcagatgtccaaatctttgatgccatattttgacttcatcttctttggaggatagacatgtggaggagtaactggtttcttgaggtgtccataggtaacagttgtcctttgatctgctgcccttcattagaacttcactcttctcatttgtcaccaagcattctgactttgtgaagtttacattgaatccttcatcacacaactgactgatgctgatcaagtttgcagtcagtcccttcaccagcagtactttgttcagactangaagtccatcatggactagctttcccattccagtgatctttc

SEQ ID NO: 11291 - DNA, 474 bp, Glycine max
  unsure (1)..(474): unsure at all n locations
atccttaagtcacctgcggcatgcaagcttcctcggggccattcctgcgaaggcatttatttgtaaagttatttntaccagtgggacattactcttaaagcaaaaatggcatataacctcctcccataaatacaaacatcaatgtaaatttagagcaagcttatgcgcatatttccttacaaacgttctcttgcacaagacattctattaaccgaaaaaaatgcacccatatacaatcaaggcagcttcgttacctagattatttacacgtacttccaaggtgtatttgttacttacatcacacacatctccttggctaaattcacatacatgcatactcaaagcattntggggtaccaaaaattgcatatgtgcacatcttggtatttctaatacctatacatacacaaacttcatgatgaatcttgactatctacacaataaggtgctacatttcatgctcttttcaagttt

SEQ ID NO: 11292 - DNA, 425 bp, Glycine max
gcctcttaatgaagctgcttgaggaagcttatgagctttctcggtataaatgcagcccaaccttcgttaaccgttggatcttctccaaatttggtctgcagtttcacaagacaactgtacatgatctgtaaaacttggatttcaattatacttatgaacaaatttaattttcgtttatgtgtatgacgtgtactgagttactatttctatataattatgtatattcgtttaagtaatggcgtgttgatggatgaatgcatgttgtaacaaaattactttggttttcataagcaaaattaagggagttcttttgttaataattgaaattagcgtatattaaagtgtggatatcgtatcgacgatgcgggtcgttacatgtagtggtatcacagcatgttgaacctttctgcagtgagttgtgagtc

SEQ ID NO: 11293 - DNA, 382 bp, Glycine max
  unsure (1)..(382): unsure at all n locations
gctgacgtatccttgaccgtttatcttctatactactccctttgctccnctcatccccaacagatgcaccaccacctgtggagaccttaacaacacccaccacatctccatcttttcccaaaccacaaccaacaacaacacccacgttagctccgcctcccttggctgtttcccaccatcccgaactcaaaacagtcgcaccaatggctctgctgtcgcttttgcgctttcattcgaccaaccaccacatccagcttaatcgtccgttgcctccatcactccgcaccgcccactgtcattaccgccatggccattgccacgaaatcccttacgacaatgacaccatcctactcggcgacgctgtcgtcaagcatcagattca

SEQ ID NO: 11294 - DNA, 314 bp, Glycine max
gtagatgaatatgaagccgtgtccaccttttggactcctctaagaacaataacatcatttcttgcactgaattgttgggagttggaagccatcttctcaatcaaattcctagcctcagcaggggtcatatcaccaagagttccaccactggcagcatcaatcatactcctctccatgttgctaagtccctcatagaaatattgaagaaggagttgctcataaatctggtggtgaggacagcttgcacacaatttcttgaatctttcccagtactcatacaagctttctccactaagttgcctgatgcctgaaat

SEQ ID NO: 11295 - DNA, 415 bp, Glycine max
agctatccttatggcatgccttttactttaccccccgtgccactccggaagatttaagccaagcccctacttttgaggggcaactcccaccttatgaagactatcccgggcaagacgatggggaaggagatacccatcttggccccctgctccatctcaaagatccatccccgcatgaactaccccagccgaacatagtccgccatatctcgacctcacccacacccgcaaaagaatctgttccctttgtggaagataagggaaagattgaagcgcttgaagagaggttaagagcagtcgaaggccttggcagttacccattctcggatttggcagatttatgtcttgtgcccaacatcgtcattcctcccaagttcaaagtaccagactttgataagtacaaagggacgacatg

SEQ ID NO: 11296 - DNA, 315 bp, Glycine max
gagccaaaattctgactcaccataaacctttacccagtttgagaatgtcaatccttaccctcagaagcaaaaaagaatagaagggaaatttccagtctaagaaaaagaaggaaaatttccaatcgaagaaaaagagaagggaaatttccaatcaaagagagggagaaagaaaaaaaggaaagaaagaaaattcccaaccaaagaaagtaaataaagaaaagaagaaagctcctggtcaaagaaaccagaagaaatgtgcagagaggtctttagaccggacaatatctgagcaatacagaattgtctccatatgaa

SEQ ID NO: 11297 - DNA, 440 bp, Glycine max
  unsure (1)..(440): unsure at all n locations
atccttaagcaccgcggctgcagcttacagcagatttagtaatgacccatatcttataattaaaataacttaatgccattaacctagggaattaaaacaaacttaatggctgagtgtaactgaaattgtggcaaccaaaagtcacccccaacagccaacaagtcagccaccatttggtctcccaaaaggctgatgcctaggttgccaattgggcccttattacaacttgaactaaagcccttttagttgattaacccaaaacatatttttggccagccaactttacaaggattgggccattatttagacaaactaaacactctaaaattgaaataaagtggtgtcatttagtcctcctccatttgggccatgatacaactcacaaccttggactnttctccttgaaacttgggcttgtattcaaatagtatggacaacac

SEQ ID NO: 11298 - DNA, 419 bp, Glycine max
ctacccttacagagatttagtaatgacccactaacctagaatttttataacttattgccattaacctagggaattaaaacaaactaaatggctgagtgtaactgaaattgttggcaaccaaaagtcacccccaacagccaacaagtcagccaccatttggtctcccaaaaggctgatgcctatgttgccaattgggcccttattacaacttgaactaaagcccttttagttgattaacccaaaacatatttttagtcagccaactttacaaggattgggccattatttatacaaactaaacactctaaaattgaaataaagtggtgtcatttagtcctccatttgggccatgatacaactcacaaccttggacttttctccttgaaacttgggcttgtattcaaatagtatggacagca

SEQ ID NO: 11299 - DNA, 433 bp, Glycine max
  unsure (1)..(433): unsure at all n locations
agcttgtacgcacatcgancgcgttatgtttttcactccacacggcnngaagnagatgagagcttcaaccctataacgcaacgtggcggacaaaagtgggcaagaaacttgaatggtcgtcattgtcaatgcggaaggtattctgcgcttcactatccatgttcacacattattgcaacttgtggttacgtgagcatgaactactaccaatatatagatgttgtttatacaaacgagcacatcttaaaagcttactccgcacaatggtggcctcttgagaatgaagcggctattcctccttctgatgacgcatggacacttatccctgacccaactacaattcgtgcaaaaggtctgccaatatcaacacggataagaaatgagatgaattgtgtcgaaccatctgagcactgaacaaaatgcaatagatgtg

SEQ ID NO: 11300 - DNA, 227 bp, Glycine max
aaacataccaatggacaccaagtccaagagtgtgcaacaaaggaagattcccaacttggaaagggagcgctcccgaaaatgaattgcaaccaggatgcagatacctctactgtgagagagatcctagcgggtacgggagtctcccatccagataattaccacttagatcaagatattgtaaatgtgtaagatttccaagttgataaagaatttgtgcttggagtaaa

SEQ ID NO: 11301 - DNA, 432 bp, Glycine max
  unsure (1)..(432): unsure at all n locations
agctgggntcttcgggtttctattgtcgcttcaccatnnnacacaggaacattgattaaaagatgtatggacaagaattccaacattagaacctaccctgatataggtgaacttgcatttggaaagacaggaaggctaatagtatcagtgtccatgtacaccgagctctacttagtttcgatagggttcttgattctggaaggtgataacttacctttttccgtttcaaactcagatacataacaaaattaggaatgtattgtatggcctactattttatttcttcaagactattgcattgcttattgcttataaaaggtagggaagggttgctgttagtcttttcatttaaataccaatatgatgcacatcattttaactatgcaacggtgcctggatagataattgagtcatttggtactgtataaaaaa

SEQ ID NO: 11302 - DNA, 408 bp, Glycine max
  unsure (1)..(408): unsure at all n locations
tttactaatatacnnatacaaatttacattttttatagttttatgaagnnaannaaccatngcattgggtaaccagaggcattcgagcctcacaacatttctatacatgaaataaacacgacctaactacttatattcaacaccttttatttcttggcttaatttttatgtggtgtgtaatgagcataataattaagtaggtacttgtgtctgcagatatgaataaatttcacatgtttgtatttaatgtctaaacaactttgcatgcatgccagccataacatacatctctttgcagattctagataagtaaacctcttatgttacgccattgcacaggagttaaaggtacaatacggattttgttatctttgaagtagattacgatcgatgatataaatatctaca

SEQ ID NO: 11303 - DNA, 417 bp, Glycine max
agcttcaaggatgaggactacccttgtttctctgacatagcaaactttaagggcacaggacaaccaccagaaggtatgcaatttcacgagagaaaaaggttcttctgagaagccaccaggtatgtttgggatgaccttattctttttcgtattggtgattgcaatttgttaaggtgatgtgtaacatagggagaacaaactaacatactttggcattgccatgactcaccatataaaagccacttcaacgaagaaagaacaactgcaaagatccttcaagcctgattctattggcccatactcttcaaagatgctcataagcatgcacgatcatgagacaactgtcaacaaactggaaacatatccacacggcatgaaatgccattacagaacgtgtaggaggtaaaagtctttgat

SEQ ID NO: 11304 - DNA, 300 bp, Glycine max
  unsure (1)..(300): unsure at all n locations
tcgacatcagaccacttccattgtgctggttctacttcttatggatttgatggggcctatgcaggttgaaagtcttggaggaaagaggtatgcctatgttgttgtggatgatttctccagatttacctgngttaattttatcagagagaaatcagaaacctttgaagtattcaaagagttgagtctaagacttcaaagagagaaagactgtgtcatcaagagaatcaggagtgaccatggcagagaatttgaaaacagcaggttcactgaattctgcacatctgaaggcatcactcatga

SEQ ID NO: 11305 - DNA, 219 bp, Glycine max
  unsure (1)..(219): unsure at all n locations
agtgttctgtgccttgcacaaggttgctcaccctagtaagtattctggagcgttgcacttataactagtttgcagacactgaaactctcttttactgattntacttgtgttaattagtactttcctttagttctttgtcagagaattgcaatgctactgttgtctttgcgttgcatttgtatacacaccggatgagtgttttctagaaattcattaaac

SEQ ID NO: 11306 - DNA, 432 bp, Glycine max
  unsure (1)..(432): unsure at all n locations
ggccagactctcgtgcatccagaggcttcttattgaattatgccaaactccctcaaaaaatttgatttcaagcttaaataggtgggttggtctgtgcttgcgcgcttagcgcaaatctgaatcgcttagcgcgcataagtggattttggcttagcgcacttctctcgcttggcggatgagttgaagcggtgcgcttgatgacctggagcggtgcgctcagcaaacctgacagctcatcttcttctggattcttccttgcgcttagccactgagtgtcgcgcttagtgaatgctcgctaagccagaagattggcttagcgagaaagtgaaaacaacacttttgaaaattntcctaattaacctgaaattgagagaaatngattattaaacgcataanacaaaagtataaattatctattacctatatttaata

SEQ ID NO: 11307 - DNA, 413 bp, Glycine max
  unsure (1)..(413): unsure at all n locations
agctntacaaaagaggagagtntattngactaaggttatctcaatngaacaaagaaaaatcacaaattttccccctttatacattntttccccaacaatcatggggtttcaaaaaagttgaagcacaaataaaatgaataaatgaacttacatcgagtataaacaaaagtgccataattggaggagctgcatatccaagcccttccaaaatggcatctaacgatagatggaaaccacccagagagtcaattcccgtgattgaacatataaaactccccgcaacagccatggcaccatatatccctgaaacaaagcaattccatcgcaaagttcaactcacagtaaacaaaatcaagattcccattttcccaagtggaaaattcattgatttgattgaagagagtaagtttttt

SEQ ID NO: 11308 - DNA, 420 bp, Glycine max
  unsure (1)..(420): unsure at all n locations
caatgcgcacttaaatacacaggctctttnaatccatagatagctnttgacttattctcttctggtcgaacatagccctcgccccacatacaccagaatcatttgccctctcccccaaaacaaaacaagtgttaatttcaatttatccatgtggtatggtatggggacataataatttacccctagttttattgatgtacattttatttcacgtgtttatatgaaagacttgaaataattgaagagacgtaccacatgggataaattgaaattaactcagcagaagcaaatagattactctagtatatatagtatgatgttttttttttccgataaaatatagtatgatatgtntttgaacagtggacaatgtaaattatatataggggtattcctgtacttgaataattgaagtgacat

SEQ ID NO: 11309 - DNA, 390 bp, Glycine max
  unsure (1)..(390): unsure at all n locations
aaccagaataattggcattccatactttgtcaggtctaataaaaaacaagatataaacttctcattattcttaggctgttgaagatagttaaaaattgaacccttaagccagtgagtggaagcattataagcatttaggaaacttaccgctgtttctacccatcaacttgacaacacctatgccattttctacactttcagcttcaacatgtgctgcatttatagctcgttgagcctcctcaacagcagtgtcaaagccaaaagacttatcaataacctattaagcaagagacagcagaagaaattaccaattaatgatgctaatggngtttaaattatgagtttaaagccacaatgtagaaggaaaanaaaaacttactggaatatcat

SEQ ID NO: 11310 - DNA, 389 bp, Glycine max
  unsure (1)..(389): unsure at all n locations
gataaatctgccatatattcagccggtattaggcctcatgagctntctcatattcagcaacttactggatttagcttgggtgacttcccttttagatacttgggtgttccccttttatcatctagattaaatgtatgtcattatgttcccttgctttccaagattactagcctgattcagggatggagcaagaagtctttatcttatgcaggtaagttagagttgatcagagcagttattcaaggaattgtgaagttttggatgaggattttttctttgccgcaatctgttctggaccagatcaaaacttcgtgccgtaattttctgtggggcanagcggatattggcaaaaacaagtccttggntgcttggtcagtagtttgttctcc

SEQ ID NO: 11311 - DNA, 439 bp, Glycine max
  unsure (1)..(439): unsure at all n locations
aaagttgaaactgtgtgacagngncctcctacctacctgtcaccggaaagggacagagacgacgcagatgcactctccacgtcaaaaaacgacgccgtcgaatacgaatgaacataacccttaaactccccatctcccccgccaccttctttcttcccatcccccacctccggcggcgccacctccctctccatgtacctcaccacctgcctcatactgggcctctcttccggcgcctccgcggaacacaacaaccccaccttcaccaccaacaaagcctccacctcatcaaacaccccacccaacctacggtccaccaccgccaacacgttccccacgcgccaccgttcccacacccactccaccagcacaagctcctccggctgcgccttcacctcaatcggtctcctcccacacaccacctacaacaccaacgccc

SEQ ID NO: 11312 - DNA, 383 bp, Glycine max
  unsure (1)..(383): unsure at all n locations
ggaattcatttagatgtttccttatatgatcaagtacaagaatggtaaggaaaacatagtggttgatgctttatctagaaggtatgtttttcttacttctttgcaaactaaattgcttggttttgagtttatgaaggacttgtatgctaatgattctgaatttggcaaagtatgggattcttgctctaaacatgtttttaggaactattatagatgttcatgtttcaaaaaaaaaagttgtgtgtgtctgtgttccttgcatgaaatgttagtttgagaaatcatggtggtggaatgatgggacattctggtgtgaaaaagactntataaattctggataagcatttttattagcctagcatgaagcatgatgtgcaacctat

SEQ ID NO: 11313 - DNA, 484 bp, Glycine max
  unsure (1)..(484): unsure at all n locations
atgaaccctgcatcactgacactactgtgacttacctaacaccatatatgaaattacattaaaataattatattctcttatgttctgtacttacatttnnatggtttgtgtgcatatatatatatatatatatatatatatatatatatatatatatatatatatatatatatattctttatgtaatttagaaaataaatttaataattttataaaataaacacatatatttaatgtgtgaaaaaaatctagcttaattgtatttttagttcctaaaatttatcaaatgggtgagttcaatccttctagttccaatttctcaaattcaatatagttttttaaattataaatttcagtccaacactaaaagattatgtggaacacatctgtttaattttagtattacataattttttttgtattgagataaacagatggttgcagataattcattatggaagtatatataactctgtctaacacg

SEQ ID NO: 11314 - DNA, 356 bp, Glycine max
  unsure (1)..(356): unsure at all n locations
agcttcatggtgaatcaaagatgattcanagtttgtttgatgataacaatgatgataacaaaagacgatgacaaaggtgatgacaaanagctcanagatcaatcaaagaacaactcaagtgaatcaaagatcaatcaagaagaattcaagactcaagaagaaagtctagagacaaggatcaagattcaaggttgaagatctcaagaatcaagatcaagattcaagactcaagattcaagaatgaagagaagactcaatcaagataagtattaaaaagtttttcaaaactttgaatagcacatgagtttttgacaaaaccttttaccaaagagtttttactctctgggtaatcgata

SEQ ID NO: 11315 - DNA, 431 bp, Glycine max
  unsure (1)..(431): unsure at all n locations
cgaggtacttacccgttgaagatcgattaacgattattaacggatgaagaacgtcgaagaacggttgaaacttttgcgaaattcctcacggaaaacgttacggaaacgtttcggaagcgcctcggcttagattttcttcacggaaataatttttccaagcaaattcgaaagagagagaagtgcctaaggggctgaaccccttccttcttcacttcctcccctatttatagcaaaataggggaggtggttgccgcccagctcgcccaggcgagccaggttgcttcctccagaagcaacagccttctggaggaatattctggagggcccaagtgggcctgggtgctatttgcacccnncattttactaagtacacccccctttgctgtttttggtgattctttttttgtaaggtacggaaacttacgaatttc

SEQ ID NO: 11316 - DNA, 344 bp, Glycine max
agcttgaaggtaaactagatgccttggttatcctgttaacctaactggccatgaataaaaaatctgcacttgtcgctagactctgtggtttatgttcctctgccgaccaccacacagacctttgcccttctgtgcaacaatctgaagcaattgaacagcttgaagcttatgctgcaaacatctacaacagacctcctcaaccttaacagcaaaatcagccacaacagaataattaagacctctccagcaacaggtacaatcccggatggaggaatcatcccaaccttagatggtcgaatccttcacaacagcagcagcaacaacaacagacttattttcaaaat

SEQ ID NO: 11317 - DNA, 433 bp, Glycine max
  unsure (1)..(433): unsure at all n locations
ttatgaggagaagcataagatgaagcangagatcaccatgtgactcttcatgttgcaactgaaggagaaggaagaaagtcaaggaaatgaaagaagtcattgaggccgaggtagaggttgaggtcacggtcgaggataggttggaggtggcaatagtgtacgaggttcaaatttcatcaacaatagttacgagaaatgaaaaagctcaagagaatgtggaaaaggctatacaagcacaaggtatgataaatctcaaactcgatgttataaatgtcaaaagattggccactatgcttcaaaatgtagattcgccaagaatagagttgaggaggagactaactatgtggagcaaaaggatgagaagtttcaaatagtgctcctagagtgtggaagtaatgaaggtagccaagaaaacacatggtaccttgacact

SEQ ID NO: 11318 - DNA, 428 bp, Glycine max
  unsure (1)..(428): unsure at all n locations
agcttgtgcaaatcaaatcactcctacatcttatctctagcatgcattttctttctttacccactcctcacgtttggttttttagggaaaacactataactaaacgcgccgcaagggatccctatcgcaccagatccaaatctagaacgatgggtgatcaagaggagacacaggaacagatgaaagccgacatgtcggctctgaaagaacaaatggcctccatgatggaggccatgttaggtatgaagcagctcatagagaagaacgcggccaccgccgccactgtcagttcggctgccgaagcagacccgactcccttggcaactacgcaccatcctccctcaaacatagtaggacggngaagggacgcactgngacacgatggcagccctcacctgngatacaaccgagcggcttacccttatgga

SEQ ID NO: 11319 - DNA, 380 bp, Glycine max
ttctttggaccttgaacaggcaactaactcctctttcatttccatgccatgtgctcgcgactggtccctttcttcccttcgcaacttgagttcactattgctaccccatagagctccgcgaaatttgttccggccatactcttccttgcgagccctcttggtctcttgttcaagggctcttgcggtaattgcattctcttcccgtaacccggcgcactccttccgaacgtgtgtagcagccaacttgaacttctccttggcgagttttgcctttcctaactcgcttttgagagcttggacttcttcgtcctcttccggtgcttcaaaattctctttgctgacgacttttaacttggcgagccaatctaaacctcgtatgc

SEQ ID NO: 11320 - DNA, 442 bp, Glycine max
  unsure (1)..(442): unsure at all n locations
agcttagctacacacccnctatattatctatgctttccccctcgacaaaaaacatgaaaatacaaaaaaaaagtccttactacaaagactactcaaaatgccccgaaatacaaggctaaaaccctatactactagaatggccaaaatacaaggcccagacgaaggaaatacctattctaatatttacaaagataagcgggctcatacttagcccatgggctcgaaatctaccctaaggctcacgagaaccctagggccttcccttggatctctagcccaatctacttggagttttctatccaatgcccttgcggngtaggattgcatcaagatttttattgaagccatagatctaaatattngggaagcaatagaaataggaccacacatacccactgtagtagatgtaagcacaagcactataacccaaaaacctagagat

SEQ ID NO: 11321 - DNA, 169 bp, Glycine max
gtcttgaagtacctttcattacaggtatggaacctcctttttctatatatacgagaatgttgtgcattttgacatctcactcacactcacatccctcatcgctgatagaacttctaatctatttttgtgtgttagagcagaaagaattgttcttgaccaacggagatcg

SEQ ID NO: 11322 - DNA, 390 bp, Glycine max
  unsure (1)..(390): unsure at all n locations
tcctagctnagaatctcctttaagtctcttatgcatgcataaccagtgaaaatttgtatatggtcacatctgatctttagtaacattattgtgcttaatatttagtaaaaatattgctaaaagcttttgtccacatttaaaaaaatgtcacanaatatcaataaatgtcaagaaaacacattaataacatttattcatatttgatgacattttttaaatgttgccaaaagttgttagcaacatttgtattaagtgttacagaaaaaaatgttgctaaaggtcatatatgtactagtgagtatatgtactctttggtcatccttaggttgagcctaaaggcatgaagtgattatcttcatcttgattcgactttagccttttatgtttatg

SEQ ID NO: 11323 - DNA, 391 bp, Glycine max
catacatccaccctttgccaaagagaattcgccgaggactaaccacctgaattctttatgagtctctcttctcccttttcctaaagaacaaaggactaacagcctgaattcttttgtgtctcccttctgccttgtcaaagaattcaaaatgacacagtttgagaattcttttgattcttccctttcccttatacaaaagtattcatatgactaaccgcctaagaattctttcgtatgtcccattcacaaagtatcaaatgtttaaccgcctgacatctttgtattaacacattggacggtacatactttgtggtacacgtagagggtacatctacttgggtttgactgagaacaagaaagggtacatctcttgtggatcagtcctagtgga

SEQ ID NO: 11324 - DNA, 322 bp, Glycine max
agcttcttagtctcggctgttaaatatgaatttctggctacttcatgcactcctctaatgacaatagcatcacttctggcactaaattactgggagtttgaagccatcttctcaattaaacttctggcttcagcaagggtcatgtctccaagggctccaccactagcagcatctatcatacttctctccatgttactgagtccttcataaaaatattggaggagaagctgctcaaaaatctagtggtgagggcaactggcacatagtttcttaaatctcccccacaattcatataagctctttctactgagttgcctaatgc

SEQ ID NO: 11325 - DNA, 415 bp, Glycine max
  unsure (1)..(415): unsure at all n locations
tggactgacctatttaattattatgttatgttcatgtctttntaaaaacctattaaattaaatagatcaagcttaggcttattaaaaagtcgtataagtctgataggcctacctatatatatatatatatatatatatatatatatattatttttcgggtacaattaatattatttttaaaaagctagccgatttcattcctataattaagtaaaattttaattacaagggatgagttagatgttcctttatatttctcattatttttattagttttcctatattctatcatatccttacctatacaaaaatcatcctttgtctatcatgttgtctttgtattaactntcttattacgtttttaaaaaaaaaaatcatatcgctgttacgttcctatacaaaaatcatatactat

SEQ ID NO: 11326 - DNA, 434 bp, Glycine max
  unsure (1)..(434): unsure at all n locations
aagcttnttccattaatatgaatttatacttcataaaatcataagcatgcgtgaattgtatgctaccagcttaacatttacggccagaaaattgattgcagtagtgaacattgttgaaatcaggaactggacactatttccaaaaggaaaatgcttcaatttcaaatttacaatttttttttaaacctcattgctaccttaaatttttttggtgccattaacaagttgatttcattatgtttataccattacagttgtgatcataaatgaaagttttacctctgtggatcaacttcaggttttcccatttggttcttttcctctaaaaacctatcttcctgatggagatatcgacttgacagctcttagtcatgaagatgaagaggaggatttggtacgagcagtatgcaatatacttaanagtgaagatgact

SEQ ID NO: 11327 - DNA, 215 bp, Glycine max
tttactcaagcttactagtggagcttagtgacatttatttaccaagaaggtctagttcagatggttaagagtgtgtgaattgttgcaaatcatctaatatatgacttcaattcttatggataaaaaacaaaagcttagtaatgatgaaatggagaaggtcttttaataagtgttccattatttaaatgttaaaaaaatgacacttgattcgttat

SEQ ID NO: 11328 - DNA, 441 bp, Glycine max
  unsure (1)..(441): unsure at all n locations
agcttagtggattatggggcacccatcatatgtggtactatgtggcgatcaagagatgacgcanatcaactctcccacttccacaagtcaaacataaacacaccatccccagttgtccacctttcaactgagctcacgcactcttacatagcccttatcctcgttcctctcagcactgggtccccatcaacccctccaagcttccaaaatattcaaacaattcaattccaattatcatgaaactaccctaaaccaagaaaatagagtagaggcagaaaactctgcccaaaactcattcaaattccacagttttccctactcaaataccccagtaacattctattagttctgattcgttaaccggtggatcgccttgaaaattntactggtggttcctagtacataaatctacattntgaccgttgggatctgctagaaaat

SEQ ID NO: 11329 - DNA, 440 bp, Glycine max
  unsure (1)..(440): unsure at all n locations
gtactctagagagagcttagcctctttggttnttgaatgttaacattattgattcttatcaaggaagctattcctttgtggtgaatcctcctttgacatatcaatattccatggatcatggtgtcgttctattcatcttctttagcttcttcatcatttctatttttctatcttgtgttctttgaaggttaacaatggtattcttgaatttgcttttggaacaatccaaaccaagcttccatggtttggattgcatcataatccttggtcacattcctttgaaatgtgacaacacaagtattattaatctatctaaaaatcctattatgcgttctagaaccaaatatatagagataagacaccattttcttagagatcatgcatcanagtgtgattgttgcattgagtntgatgatagtgaacatcatctagctgacatc

SEQ ID NO: 11330 - DNA, 391 bp, Glycine max
  unsure (1)..(391): unsure at all n locations
acacttctccatgaaagtgtatttatctaattgtccatgttgatgacatagttattacagggaatgatgttgctacaatttgtctgctgaaaaagcacttattcatccactttcataccaaagaccttgggtgtgtaaaatactttcttggtattgaggtgactcaatcaaacgaaagcattgttatttctcaaagaaagtatgctttggataggtttttttccagcaatacactccatctcccctatttgctcaaaatacacctctttgtatactaatacccaaaatacaactttttctcacctttgagaagttgagactggccaccccgacttctgtacgacgcgccctttttaaatttaatttttaaatttattttaaatntatgttt

SEQ ID NO: 11331 - DNA, 436 bp, Glycine max
  unsure (1)..(436): unsure at all n locations
cattgccattacagccgcggataccccgattctccacactcattccggaatgagtnngtacccaaacaagaatggtcaggctcacaagttctcccaaagagaatgcaaaatatgcagcgttgaagtaggtagagagcttctttaattgcttggggttgtcttggtcgaattggtcgcctccgtaagcaaccatgtttggcttgacacaaccactacctaatgccaccaagtacagggctacgaagaatatcatggtcttcatgccctttgcttctgagcactgttctcctaaatcgttgatattgcatgggggtggcttcaactgaggaacatgagcttggacagaaagcaatatgaaaccctgtaaacataatattatttgtatatatatgtgtgaaggctgtctaaatagtgaataaaaagtaatagaatgagt

SEQ ID NO: 11332 - DNA, 467 bp, Glycine max
  unsure (1)..(467): unsure at all n locations
atccttaagtcacctgcggctgcagcttgctgattacattcntcccctntctatganaattcttaattcttcttgatatcatcaaaatcttcatgatttacattctccccctttttgatgatgacaaccacctgtaggttaggagcaacaacaaagaaaaaatatctatttgcatatagtttactcccccttggttttgcaatgattgcttatatgagacagttgaagatttcatatttttcttatgtaaacaaattgtctcataaacaatagataatttttcttactattttatcttttatctttctctccccctttgtcaacatcaaaaacaaatcatgaatagagaggagtaaaatgttaccacttgttgcaatgtatgagaatcaagtgataccaaaaggcattaaaacaatcattcaatattatcaagcaaaaagaagtacaataacacatcaaccaaacac

SEQ ID NO: 11333 - DNA, 435 bp, Glycine max
  unsure (1)..(435): unsure at all n locations
ctttcttggccaatgctggacttgtttggcagtgatttccttggcaatttgatgctcagaaacagcaagatccaccactccttcagttggtctgcccaggtatttgttgatcacagcaggggagaatctaacacattttcctctgacaaacactttctgataatcatcactttttctgtttgttatgtcagagggaatgctgacaatgaattcccttactagactttcatagcaatcgcccaacttggtgacagttttcatcagtccagcagccttgatgaggtccatgatctccttgcagtccaaggcatttcttcccagttctctttctaaagcaagccttcgttgatatacaaatttccacctttcaacattgccaatggagtggaatgagatgttgtccaatggtgcatcanggacattttcaggcacctt

SEQ ID NO: 11334 - DNA, 444 bp, Glycine max
  unsure (1)..(444): unsure at all n locations
agcttcgtcgatctctttatgggttgaaactatctcctctagcatggntnnggtaaattagtcatgttgttcanatgtttggactaaaacgaagtgaagctgatcactctgtattntactatcatacatctcctggaaaatgtgtctatctaatggtctatgttgatgatatagtgattacagggaatgatactactaagattgtccagctgaaagagcacttattcagtcatttccagaccaaagatctgggatctttgaagtatttccttggtattgaagtggctcaatcaggagatggtattgtgatttctcagaggaagtatgctctggatattntagaagaaacaggtatgcagaactgtagacctgttgaaagccctatggatcctaatttgaagctcatggcagatcanagtgaagcttatcctgaccccgagagat

SEQ ID NO: 11335 - DNA, 452 bp, Glycine max
  unsure (1)..(452): unsure at all n locations
ttgtccgcanaanaaanaaatactaaaaaggattttaaggttctttaccttagtttttcttaccaagtaaaatggatcatttttaaggtccaacgccttaaaatgaccaccttgcaagtaaaaagaatcgcttgattcacccttaagaaagaactacgtaggtctgatttcctcttcgatggagggtatgtaggagcaagagccccgcttttgtcgacctcaaaataaaaaagaaataaaagtttaggtacacaatttcacacaattctaaaattaaggctgttgttctttgggacaaacgtgagaggtgctaatacctttctcaaatgtaaatacaactcctgaatctggaatattcttcatgaccgatttccttcggttttttcgacattttccacaaataaacgttggtggcgactccacgcattntcctcctttggaaaacgcacctg

SEQ ID NO: 11336 - DNA, 368 bp, Glycine max
aaccgccttttggaggaatcttctggagggcccaagtgggcctgggttctatttgcacccccatttttactaaatacacccccagcttttttttggtgcttcttttttcgtaaagttacggaaacttacgaatttcgtaacgatacttgttttctttccgtaatgttacggaaccttgcggattacataatcatcccttttttgacttacggaacgttacggaacctcacaaattgtgcaacgatgcttcctttgtgatttccggtatgtcacggaaccttacagaatgtgcatcaatacttttttttgatttccggcatgtcccggaatttcacaaatttcctaatgatgggtgtcaagcacctcac

SEQ ID NO: 11337 - DNA, 434 bp, Glycine max
tatgcatggtgcctttcattgccccagtgtaggggctattggtttcaatcgatgtcttgttttcacaaccttgtagcaaggaagaatgaaagaagcgattgattctcaaaaaggactttcaaggacaagaaatagttgaaggattttttcagttgatggattaagtcaaatgactcctattcttgataactcacttctctaggaatgataaaatgaggtcacatgaatgtctacatttttacttgaaaacacagtcaatcaaatgcttttttttcttttattttgaaacttattgttttgaactttactcgtcattttacggcacccccaccaacgtgcaagacgagtaatctctgattaagcggtctaggaaatcaacactcaggagcgtaggtcacttgagcaagcagaccaatggcttgcactcacattcc

SEQ ID NO: 11338 - DNA, 435 bp, Glycine max
  unsure (1)..(435): unsure at all n locations
agctntagatattaaggaaaaatgttaaaataacaaatcatggaaaanaaaaacaaaaagtgacacctttttgtcttctgaaacgggcaagaagggtagcttcttggcaatagcagctgcaggtgtaggggataaggagctaaagtgacgtcgttttctgtctgagtcactcatactccccattgaaaccgcacacacacaaacacaaaccctagagagcaccaacttcactcacatcacanaattccaaattcatttgtcgaanaaccatcatccacaaggtgccccanacccaatcacaaactccaattccaaaataaatcgaatttaaccaatccctcagaaccctaattcanacccaaccagtggaacacataacatgaaaaaacanaaaaaaaaggaagaaaanaatctctttttctatttgctatctat

SEQ ID NO: 11339 - DNA, 357 bp, Glycine max
gagctcattgttgttgccccacaaagctcctcggaatttttcccggccatgctcttccttgcgagccttcttggtttctcgttctagggctcttgcgatagctgcattttcttctcgtaacccggcacactctttccggacgtctgtaacgactaacttgaatttttctttggcaagtctagcttttcctagttctatttttagagctcggacttattcatcctcttccggagcttcgaagttctcctcgttgataattttcaacatggagagccaatctaaccctcgtgtacaaactttaagccattcatgataaccaccgatgatgcaattacggatgcccctaagttctttatc

SEQ ID NO: 11340 - DNA, 441 bp, Glycine max
  unsure (1)..(441): unsure at all n locations
agcttcatggtgaatcaagagtgtttcnagttgttttgatgataacaaagatgataacaaaaggtgatgacaaaggtgatgacaaaaaactcaaaggtcaatcaaagaatgagttcaagatattcaagatagaatcaagaacatttcaagattcaagaagaaagttgaattcaagaatcaagaatcaagattcaagagatcaagattcaagaatcaagagaaggcctaatcaagataagtatgaacaggttttctcaaaaacttgagtagcacatggtttttcacaaaacatgtttaccaaagagtttttactctctggtaatcgattatgtgttttaaacttaattactttaatgatatatgactagaggtatgcacttttatttggttattatgaatgactntctggattatatgacattctatgaagtattatcttta

SEQ ID NO: 11341 - DNA, 416 bp, Glycine max
  unsure (1)..(416): unsure at all n locations
gcttctacaaagtgaaggttgtattccccatgaaaaactcttatccattggtactttntttatcatgttcatctccagcccaatcattatcactgtaacctacaagcttatagtttttacttgttgagaaccataaccaaagatgattgttcctttgatatagcaaagaattcgttttgcagccttgtggtgagtagtggttggagtctccatgtatcgactaatgagtccagtagcatataggatgtctggtctcatgcacgtcaaatatcgcaaactacccaacaaactctttaaatntgtagcatccaccttttttgctttgtctaactttgataacttcattttgcactccaccaatgttccaatgggcttgcagttatccatcttgaatttcttgagcatctcctttgcgt

SEQ ID NO: 11342 - DNA, 375 bp, Glycine max
acgcacaaaaacagcaggatccaccattacgtcacccggcctgcccaggtatttgttgatcacagcaggggagaatctaacacattttcctctgacaaacactttctgaaaatcatcacttattctgtttgttatgtaacatggaatgctgacaatgaatccccttactagacattcattgcaatcgaccgacacggtgacagtactcatcagtccagcagccttgatgaggtccatgatctccttgcagtccaaggcatttcttcccagttctctatctaaagcaagccttcaatgatatacatatttgcacctttcaacattgcctctggagtggaacgatatgtcgtccgatggggcttcacgcacattctc

SEQ ID NO: 11343 - DNA, 440 bp, Glycine max
  unsure (1)..(440): unsure at all n locations
agcttccatggctggccctcagcattcaatttctaccccttgcagggaatacagagcctagcttcaatatcttgaggattagtccttaacctgcagaatctagagtaagtgggtaaagattccccctcttccaataccactggcatttgaaggaactcattcaggccgtctgcatctattttgatcaagtgtcctcgtactctggcttgcttgggtgcttgctcctctatggtgtataaattagcataaaactccttcaccatagctacatctatgcttccatcttggagattagcgaggcatttgtgtagattacgcctttccaattccactttanactcgtcatactcagtatgataaatctgcacatttctctccggaaggatattccggccgagaatgttattggtgtatctattccaagcgtccaaagaatggaa

SEQ ID NO: 11344 - DNA, 387 bp, Glycine max
  unsure (1)..(387): unsure at all n locations
ttgtcctcagatccctcttgttggactagacttataccattcatcattattgggacaacatatttaaaaccaaaacttaatccatagatccctcatttaagactaagtttaaattctgcttcattccagttctaaggtaacaatacacttcccaatgataaagtcacctaaccaggcacacaaatggtggatcaggccaagaacatacaaaatttaagctctgaaagaagcattgaacacaagaaacacaatcaatttgatattaaagtaattacatcagatgttctttagaaatccccaacaaaggtgtttagccagccattgcagaanaacccctaacaataatgagattacaaaacctacgtatctatgcaaaagttgctcctc

SEQ ID NO: 11345 - DNA, 441 bp, Glycine max
  unsure (1)..(441): unsure at all n locations
agcttgttagaactatcatcacattatgctttattgtcacaaaataagttgctttctaggcaacttgagattttaacagaaacacttggtaagttgccaactaaactgtctattggtcaacctacacattcttctgttttccaagtgatgttgtcgcaacctacccttcggcgggagggcgacgcgtgacttgtgggtgcgtcttccaagaaaggaatacgtgcggagtcgccaccaacgtttatttgaggaaaacgtcggaaaaaccagaaaagacgtggtctacgaactttaagtgaaaggttcgggagttgtatttacgcacggngaaggtattagcaccccacacgtccgtcacaaaagacgacagcctttaatcaaatgtgcaaatatgacttncaattttggtattttccccttttacgttcttatgtcttttta

SEQ ID NO: 11346 - DNA, 417 bp, Glycine max
tgatgcagctgaattggtttctaccttatgcactcctctaacgactatagcatcatttctggtgctaaactgctgggagtcggaagccatcttatcaattaaatatctggcttcaccaagagtcatgtctccaagggctccaccactggcagcatctatcatacttctctccatattactgagtacttcataaaaatatcggagaagcagctgctctgaaacctgatggagacggcaactggcacatagttctttaaatctatcccagtattcatacaggctctctccactgagttgtctaatacctgagatatacttcctgatgactgtgatcctggaagcagggaaaatgttttctaagaatactctcttcaggtcatcccagctcgtgatggaccttgggcaaggtaatacaac

SEQ ID NO: 11347 - DNA, 432 bp, Glycine max
agcttaggttatggatcactgtatgtgtttttttaacctcagtctatccataacgcaaagaacaaacatgaagaatgccaacattacattcaaaaatgggtcaaggaatcacaacgaaaagtgtacttgggaccttacctaaatcagtaagttgaattgatgttgtagaatatagatattatgtgcattattgttgcctaactaatgtttttcgtcttcaaggcacattggcaacttgttgttctgtgtccacgggacaatattgttgtttggttttgttctttgtgtaagaagcctgatgttaacatcaagacaacaatgaataagttagttttaacattaaaagtcaattgaaatattgcaattgtagggtataaagacaatgattatttgaatatatacgttaacgtcatttttaaactagtgcaatga

SEQ ID NO: 11348 - DNA, 298 bp, Glycine max
  unsure (1)..(298): unsure at all n locations
tggtttgatgcaagaaaacacaagagtggtgtgcatattgtgtgaagctaccctttttggccagcaatcagctataagccacgctataatagtttccatacacatagacgtttaggaattttgttcatcacggacgtgtaagtgtagaataggtagcaaaatacctttggcaatttacactttgggtatgatagcaaaatatttggatgtatgtacatgtaattnttggtagtcaaaatgtctcacaaaaatatatatatgttgcatgttatgtaaagaaataccttacaaagatacc

SEQ ID NO: 11349 - DNA, 365 bp, Glycine max
acatagggttcggttagataaaagtcaatgtatatagatgctctcctttgggtgatacaccaaatacacaccatacaaacatgacaatgctaataaaattcttaacataatttgacaattaagtatgcatcaattagtagtacctatttcctttgggtatataagtaaaactaatgatacacacaaatcacctacaattatattcattaattataagaacaactaatcaacctttgggtgatccataaatgtcttataacaatgaatttcaatatactcataaaccaataattatataatttagcatccattattctatgagtaattgaaataatcattaatatggaattaaatagatttataaa

SEQ ID NO: 11350 - DNA, 352 bp, Glycine max
  unsure (1)..(352): unsure at all n locations
gaacaatacatgaagaatgccnacattacattcaaaaatgggtcaaggaatcacaacgaaaagtgtacttgggaccttacctaaatcagtaagttgaattgatgttgtagaatatagatattatgtgcattattgttgcctaactaatgattttcgtcttcaaggcacattggcaacttgttgttctgtgtccacgggacaatatagatgtttggttttgttctttgtgtaaaaagcctgatgttaacatcatgacaacattgaataagttagttctaacattaaaagtcaattgaaatattgcaattgtagggtataaagacaatgatatttagattatttacgttaacgt

SEQ ID NO: 11351 - DNA, 440 bp, Glycine max
  unsure (1)..(440): unsure at all n locations
agcttctggtgggacatcttgacttgctttctaatctgacattcaccacagattctgccttcttctattttcagattgggaatgcctctaacagcacctttgtcaatgattttcttcatgcctcttaagtgcagatgtccaaatctttgatgccatattttgacttcatcttctttggaggatagacatgtggaggagtaactggtttcttgaggtgtccataggtaacagttgtcctttgatctgctgcccttcattagaacttcactcttctcatttgtcaccaagcattctgactntgtgaagtttacattgaatccttcatcacacaactgactgatgctgatcaagtttgcagttagtcccttcaccagcagtactttgttcagactangaagtccatcatggactagctntcccattccagtgatctttccttt

SEQ ID NO: 11352 - DNA, 436 bp, Glycine max
  unsure (1)..(436): unsure at all n locations
ctgcagctttggcaagaagagagatatgtgatattgtctagagatcaaaggtgtaaaaagtatgtggaaagttgttgtaaaggttgtcaaaattgtatgaatatttcaaaatgcaagtcaaggtcttgcttttatagactcttcaagtctggtcaagaaaaccattagaagagttataaccttaaaaaaaaaactaaaaaccattggaagagttacatcttttgatttttgttcaaaacttgtcactggtaatcgaataccaaatccttgtaatcgattacacaaagcatttttgtgaaaggatgtgactcttcacaattgaatttgaatttgaacgttcaaacacactggtaatcgattaccaatatcttgtaatcgattacaccattntgaaattaattggaacgttgtaaattcagttgaaagcttttgaaaa

SEQ ID NO: 11353 - DNA, 412 bp, Glycine max
  unsure (1)..(412): unsure at all n locations
gactntctcttcataataaaattcacataagctctttgatacataaaacacacgtcatacatatggttcgtttagataaaagtcaatgtatattgatgctctcctttgggtgatacaccaaatacacaccatacaaacatgacaatgctaataaaattcttaacataatttgacaattaagtatgcatcaattagtagtacctatttcctttgggtatataagtaaaactaatgatacacacaaatcacctacaattatattcattaattataagaacaactaatcaacctttgggtgatccataaatgtcttataacaatgaatttcaatatactcataaaccaataattatataatttagcatccattattctatgagtaattgaaataatcattaatttggaattaaat

SEQ ID NO: 11354 - DNA, 437 bp, Glycine max
  unsure (1)..(437): unsure at all n locations
agcttgctacgcangatatgtcgagagcctctatgtatttgtgangcagcatctctggtgaagtgtatcaccaaaggtttgggtttgcttgggcttttttctgccaattgtatacacacatgttgctctcccttgctcgtaacaccaatttcaaatcggccttggtccatcatttgctgtaacaactccttcgctgctgaacattnttccacgtcatgcgatgcatgcagatgcatcaaacaggaatcccatttgtgcccatcaagggaaaccatgctcgcctcttgcagcgcctcanatataaacctcctagaggttaccatgtccttcatttgcttcgacctctacagtctgcactcctctattgcatttactgtcgatcctccatgattggcaagcggatntgtctntacatttgggccgtcttcttggaatgt

SEQ ID NO: 11355 - DNA, 438 bp, Glycine max
tggggtacccatcacatgtggtactagggttctgtcgttctatggtgcacaacaagtgttccacatccacaaagcgcgcataaacccaccatcccctgttgcccacctccaactgagctcacgtactcccacgtagcccatatcctcgtttctctcaacaccgggtccccatcaatcctcccaagcttccccaacatcaaagtaatacaacattcacacagcacaagctatcacagccaagcaaaacagggcaaaggcagaaaactctgcccaaaacaccaaccaaaatcacagcttttcacatacaaataccccagaaacatttccttcgttccaattcgttaaccgttggatcgactcgaaaagtttactggaagtctctagtacttaagactacgttgtgaccgttgggatctactagcaaacattcaatactca

SEQ ID NO: 11356 - DNA, 428 bp, Glycine max
  unsure (1)..(428): unsure at all n locations
agctntagagtttccttttgttaaggctttatgtctttttttcctgaatttataatacaaagatctttcttcatctgttcctacgtctctacccattctcatccatttgcatgtttatttctttacgtttgaaacgccagatccgacgatgagtccctcaaaggtactaatacctgngacccgaccatcgatttcaagcaagaaacgaatcaaacggaggatgaagaggacgaggatgtgggacttcccccagagttggagaggatagtcgcccatgaggaccaagagatggggcctcatcaagaaaagacggaactagtggacttaggaactggcagtgggaaaaaagaagtaaagataggcacgggtatgaccacacccatccgtgaagaattgacagccctgctaaaagactaccaagacatctt

SEQ ID NO: 11357 - DNA, 441 bp, Glycine max
tcttggaccttaggcaaaccttcaactcatccttcattatcaaaatgtctactcgtgattggttcctttcctctctctagagcttaagctcattgttactgccccacagagcccctcggaatttgtttcggccgtgttcttccctacgagcccttttggtctcttgttccaaggccttggtggtagctacatttacatctctcagttcggcattctcctttcggatcttaagagctgctgatttgaacctttctttgactgtttgggcttgctcgagttctgccctaagggcctgcacctcttcgttttcctccggtgcctcaacttcctcccccttagtggttctcaaactcgggagccaatctaaaccttgcatgtgggctttcaaccacttacggtagccgccgatgggcccgttgatactgcctctgagttctttgt

SEQ ID NO: 11358 - DNA, 311 bp, Glycine max
gttaattgaaatgtgaacacacgaaaaaaattctcaggtgcattatgttatggttcaggactatcataactcctgtttatctttatatgacatctgattgatcaatattattaattctcttttcttgtaaattaagaaatttatacacgtgtcatgtaaagatcggttaaaagtatgaaatacgttatgatctcaaattactgaaatgataaaattaattctgtttttgatctggccaagagcagagcgatgaattaccaagttcatggcctaacaaccgtgcaggcatgaaagcaattcatgctgaatcg

SEQ ID NO: 11359 - DNA, 426 bp, Glycine max
  unsure (1)..(426): unsure at all n locations
agcttctcccctattntgctatatattggttggtattgaagaaganaagggttcagccccttaggcatttntctttctctcgaaattgctgagaaaaattatttccgtgaagaaaatccaagccgaggcgcttccgtaacgtttccgtgagtaattacgcgaagattctcgaccgttcttcaagattcatcgttcgttcttcgttttcttcagtcttcaacgggtaagtacctcaaactgagcttttctattcattctatgtgcccgtggtggtccacattttgtttcatgtatgtttattcttgttttcatttactttttatacccccttttgacgtgcttaagccatttatttaagtcatttcttacttaatttaaaaataaaataaatttccaccggtcgtttgaattgtatcatccgctaat

SEQ ID NO: 11360 - DNA, 132 bp, Glycine max
gagcatattgacctcttttacttcttgagttgaagggtccaatgacaatgtcttgatggaagcttctacaagaagagataaccaacaaggatgaaggatggaatactcatcaacggcaaagaaagggaaaat

SEQ ID NO: 11361 - DNA, 424 bp, Glycine max
  unsure (1)..(424): unsure at all n locations
agcttcaagaataatggcctcattttttcttttattcttagaaggaaattcaataaataggcctcctatttttaatggagagggttaccactactggaaaacccgaatgcaaattttcattgaggcaatagacctaaacatttgggaagccatagaagttggaccttatgtacccaccatggtagctggaaatacaacaatagagaaacctagagaagagtggtctgaagaagaaagaagattagtgcagtacaatttaaaggctaaaaatatcattacttctgccctaggaatggatgaatattctagggtgtcaaattgtaagagtgctaaggatatgtgggacactcaacaagttacacgtgagggagcaactgatgtcaaaagatctangataaatactctaactcatgagtatgaatta

SEQ ID NO: 11362 - DNA, 439 bp, Glycine max
ttctgagttctctgtatagaggtgtgacctaatctcctatttcataaagtgatgaaattatcatttaatttatgttatgtaccgtgcgaatccttcacaacatttaatcataggaacactcaatatcaattaaggacccataatcaacatcatttgaatcacaagagagattaactttattatttccaaatgaacaagaataactggatttgtccaaaatagaaatagaaattgattttcgtctaataaacggtgcaacacatgtctcaaccaaatccacataataagtatttaaaaacaacttataagttcctataacttcaattgcaattttatcttcattgccccatatagatgattcttttagcatcacttgacaaatgactccacaagtaaccttacaaaaacatacttatgtgagtaatagcaccaaaatcta

SEQ ID NO: 11363 - DNA, 433 bp, Glycine max
  unsure (1)..(433): unsure at all n locations
agcttcaaccaaaggatggtttttctttgtcttgaaaggataaatgacaatgcatacaagattgaattgcccggtgagtataatgtgagtactacatttaatgtgtctaacttagctctttttgatgcagatggagaagtcaatttgaggaaaaatccttttgaagagggagagagtgatgaggacatggcaaggactaagggcaaggaacctttagaaggacttggaggacctatgacaagggttggaacaaagaaggccaaggaagctcttcaacacgtgttaaccatgctatttgaatttaggcccaagttacaagtggagaagtttcggattgtcaattgcaccatgttccaagaagagtagagggtgccacctttgttgagtgtttttattagcattntgttagttgaaataaaggcccaaacttgtg

SEQ ID NO: 11364 - DNA, 426 bp, Glycine max
  unsure (1)..(426): unsure at all n locations
gcacaaagaagaagaagaagttcaaagatatttatgtcttgtaaaagattgattgaataagtgatcaagatacttgaaatgcaaaacaaagtcttgcttttatagactcttcatgtttggtcaagacaaccattagaagagttatgacttttacaaaaacttaaaaaccaatttgaaaaagtcaaaaaccatttaaagagttacatcttttgatttattcagaaacaatcactggtaatcgattaccaaattattgtaatcgattacacaaagcttttatgtgaaaggatgtgactcttcacatttgaatttgaatttcaacgttcaaaggcactggtaatcgattaccaaaacattgtaatcgattacaacttnttgaaatcaatnggaacattgtaaattcagttgaaaacttntttaaaaaca

SEQ ID NO: 11365 - DNA, 414 bp, Glycine max
  unsure (1)..(414): unsure at all n locations
agcttctcaaggaagctacctagtttatatttatattcatgtgtaacacttgttataactttgatgaatgagagtcttgtgagacacaactcanagttcaacttctctccctttttcttccttcaattacgtgctcccccctctctctttctctccctctttcttttcctccattgaagcatcctctccaagcttcttatccaaggctcatcttggtggtgaagctccttcttccatggcttattccttaatggatggcgcctcctctcacctcctttcctttgtcttccgctgcatctccatggtggaaaatcaccattaaaggaccccattgaagctcanaaatccagcctccatagaagccccacaagcaagcttccatcaagtggtaatcagagcacaagagcttcaagt

SEQ ID NO: 11366 - DNA, 432 bp, Glycine max
  unsure (1)..(432): unsure at all n locations
tttcaatacaaggaagcatgacttactctctggattataagntttggttttgaatgtaaaaaggcatgaatattatgacgtgtttgagaggttgttattagaatttaaatttggctgccccatgaggaatactttgcacctaggtagcatggaaaatacctttcaacagtatgtctatatatgaatacatatagcatgaaaacgccttgcataatatgaatatatatagcatgaagtgccttacaaagtgttggatgggtagcgtaaaagtgtttttcaaaatatgtgtatttgtgagtaggtaacaaaagaagccttccaaaaaatgtgtgtatatatataggatgtagcattgaaaaggtttgtcacataaatatgtacatggataggtgttgtaaaatggttcacacaaaagttttatgtgtgcaaata

SEQ ID NO: 11367 - DNA, 407 bp, Glycine max
  unsure (1)..(407): unsure at all n locations
agcttttggcttagcgagattntactaagctcataccttcaggggctaagcgcgaggaagaatccagaagaagatggactatcaagttcgctaagcgcaccgctccaggtcatcaagcgcaccacatcagctcacccgctaagcgaaacaagcgcgctaagccaaaatccacttatgcgcgctaagcgatccagatctacgctaagcgcacgagcacgaacaaggccacctatttaagcctgaaatcagatttgcaaatggagtttggcacttttcttgagaagctttgcatgcacgaaggttctagagagagaaaggtccaagttctggagaattctgagagattntgctgtgtgaagatctgcagagatgcgagttcgaaatggaagccacttgtgtttgtgagt

SEQ ID NO: 11368 - DNA, 389 bp, Glycine max
  unsure (1)..(389): unsure at all n locations
gacacttcgaaactcaccttcagaaaagaggcctcatctatccttatttcatttggaatnctatcaatagacctccaatctttaatggagagggttaccactactggaaaacccgaatgcaaatttttatcgaggcaatagatctaaatatctgggaagtcattgaaatagggccttatatacccaccacagtagaaagagtttcaatagatggtagttcatcaagtgaaagcataaccatataaaaacctagagatagatggtctgaagaggatagaatacgagtacaatacaacctataagcccaaaacataataacatctgccctatgaatggatgaatatttagaagttcaaaatgccagagtgctaangaaatgtgggacactc

SEQ ID NO: 11369 - DNA, 425 bp, Glycine max
agcttcagaattcaatttttcgcgtctcaatatattacgggactcaatcagacatccaagcaaaacattattgtcgtttgaattagctcagagcttcagaattcaatttcgatggtctcgatatattacgggtctcaatcagacatctgagtaaaaaagttattatcgtttgaatttgctgagagcttcaacattcaatttcgagcgtctcgatgtattacgggacttaatcagacatccgagtaaaaagttatcgtcgtttgaatttggtcagagcttcaacattcagtttagagcgtctcgatatattacgggactcaatcagacatccgagtaaaaagttattgtcgtttgaaaatcctcagagcttcggtattcaatttcgagcgtcttgatatattacgggactcaatcagacatccgag

SEQ ID NO: 11370 - DNA, 303 bp, Glycine max
  unsure (1)..(303): unsure at all n locations
accttgagcaattcaaacgacaattacgtttttaagtatgttcgatngagtcccgtaatgtatcgaaacgttcgaaattgaatgctgatgctctcagcaaattcaaaagacaataacttttatctcgggtgtgtgattgagtcccgtgatatatcgacatgctcgaaattgaatgttgatgctctgagcaaattcaaactacaataactttttactcggatgtctgattgattcccgtaatatatcgagacgctcgaaattgaataccggaactctaagaaaattccaaccgaccataccttt

SEQ ID NO: 11371 - DNA, 348 bp, Glycine max
  unsure (1)..(348): unsure at all n locations
agcttgcctcatagaggtccaggaaggacattgcttttattgaactagttccgctccggagtatgatagtcaccgctttaggagcgcggtacaccagcagcgcttcgaagccgtcaaggggtggtcgtttctccgggagcgacgcgtccagctcagggacgacgagtatactgatttccaggaggaaatagggcgccggcggtgggcaccactggttactcccatggccaagtttgatccagaaatagtccttgagttttatgccaatgcttggccaacagaggagggcgtgcgtgacatgagatcctgngttaggggtcagtggatcccgttcgatgccgacgctat

SEQ ID NO: 11372 - DNA, 444 bp, Glycine max
ggctcacactgaatttacacctaaaattccaccgaatcattatttgactcctcaacacccaattttgccctagaaatggctctttgttcactttgatcatttgttcttctctctagcacagtccaagctttctcccaagtcctaaatgacatttcaagctagtattaactcactttaacctccatttaccacagaattcagacttaaccttccaactctcaaagcctcactctttttccactcataacaccacattctcactttccaaccctaggttaactctacatttcatctctaacagttttccatgggcaatttcagcatacaaacatcacaaacatcatcacaaaaccctaaaacagaatgggtatgtctaactcatccaaacatggcaatttcaacaagctttcaacaagtttcttcacaaataactatcatgaagca

SEQ ID NO: 11373 - DNA, 459 bp, Glycine max
  unsure (1)..(459): unsure at all n locations
ttaagtcacctgcggcatgcaagcttagtaagttacacatttctttatcctttttaattatatatcaaatacttgacagagaaatctccagcacccgatgcatttattacaagtgttgagtcattccgaactaaatgacaaaagcagagggtaggggagtttactataaaatgttgggagaatacgagtggttttttccccactttttagccggtaagattacaagctgtatgtcctcacattttgatattactcgagcatcgattttgaattttgtattacgaatttgtttattaatggagtcatatctcatgaataaaattttcattagtatttatagaaactcctttcatggaattaaaacggattgtttagctttgagttctgtttttcaagaatttactctcactttcactagaagattgngaaatagagttgcccatgaattagcatctttag

SEQ ID NO: 11374 - DNA, 413 bp, Glycine max
  unsure (1)..(413): unsure at all n locations
atgatttatgataattcacactatgacttcgttttataagtagaggtgaccacaaattcaaaccaatctaataatttagtaaactcaatcaattcaaaccaaaaaaatttgattggtttagaccattggtttaaattggattgaagatgcaaatttgattattttgggtaggatctcaaattttgattttgataatccaatctatttcgtatttaatccacccaattacttatcatattttattatatatatatatattaaaacttttagagttcgggccttttggcctagctagtccaattttttttaccctaaattcaagataaaataacattaaaataatcaaataaaatataataatcaaaccacaatcttaaagaagaagagaaanaaactaggtaacttaattatgt

SEQ ID NO: 11375 - DNA, 426 bp, Glycine max
  unsure (1)..(426): unsure at all n locations
ttaagcaccgcggctgcagctgaaataaataaatcaagaaactttatttttcttatataagagacgcgcgtgatctgaaatcgctcgtggcggtggtgatggatgattcattggcggcgcgtgagggtaaccggcaaggggctggcgcgtggcgacctgagaggggattggcttagctgcttcccattcccatcgtaataaataacaccggagaaattcaacggctcacacttgccacccatgagaatctccttctgccaaacgccgccgtttccccacccttgtgcttgttgtgtctcttccacgcttcgcagctgcttcttattattcttcttgtgaccgaaaagcgctntgctgcttatgttgctgagaagcttcttcggccgcgacgacttcttcaattcatcctctttgctcgccttcact

SEQ ID NO: 11376 - DNA, 428 bp, Glycine max
tcttgatatcttggtcaccaagggggatttcacaattcgaatgcacttattcccattctccccgctcaaccactgaatcgaattatctccagccacccaactacacccaaaatagaggttcagaaaggaagcaaactaacactgccaataaccccaagttccaggttttaggtgggaattatactattatcaaaacgggttctacaacctcttatagaagcataactcttgcaaacacttttaatagtaaaaaagaaaaaaaaaactttacgtcacagaactcactaccaagtgaaaaaccaccaacattgtcggtttgtactctgcagtctgcacgtgtttccataaacagaaacacattgattttaaattaattaatcgattaatactaccatcaagtagtaccacccctatattctttcttacca

SEQ ID NO: 11377 - DNA, 354 bp, Glycine max
  unsure (1)..(354): unsure at all n locations
tcttcgtgcgaactgaaccgaagttgtgtttcggccgactggcatgttctcattttgtcggccaagaaaacattagcccacctcggcataaaaaacatgattcaccgatatttgacaggaaaagaaaaatgctagccgacgtcggccaggaaagatgaccgaccgaggtctgaaaaagaagcatgaccggatgactccggtcgaacatttcctaactgatatcatccaagtattattcagggattgaatagaaaaaacaatagccgacatcggtagttaaatagccgtgactgatattnttcggccgacattgcgcaatttcttttacaaacgctggccgttaatatttcttta

SEQ ID NO: 11378 - DNA, 445 bp, Glycine max
  unsure (1)..(445): unsure at all n locations
gagagcattgatggngacccgatgttgagagaaacaatgttatggtgctatttgggagtacgtgagctcagttggaggtgggcaacaggggatggtgggtttatgcgcgatttatggatgtggaaaaacttgttgtgcaccatcgcccgaccgccacctagtaccacatgtgatgggtaacccataatcctacaggcttgagatgaggaagtgtagaagggtgaaacttcctgcttttattcgttgaccacagagtggtacctgtagatatgtcgcgggggtcaggagacaatggggacgtcaggtggggtgctattgcccaaaacctagagggagcctgtgagaccctcgaaggaaacacgaggtgccgatttcggtgcacgattcgatttacggctacttcattggtgcatccagatgaaccggcgcgtacgcttcagcgcac

SEQ ID NO: 11379 - DNA, 439 bp, Glycine max
  unsure (1)..(439): unsure at all n locations
agctntgccgccacggaatttccgactatgttcttgtgtggtggaacaagctacaaaaggagagagcaagaaatgaagagccaatggttgatacatggacggagatgaaaaagatcatgaggaagcgatatgtgccggctagttactcaagggacttgaaattcaagctccaaaaactaacccaaggcaacaagggggttgaggagtatttcaaggaaatggatgtgctcatgattcaagcaaatattgaagaagatgaggaggtaactatggctcaatttcttaatggtttgactaatgatatccgtgatattgttgagctgcaggagtttgttgaaatggatgaattgcttcacaaagcaatccaagtagagcaacaattaanaaggaaaggagtggctaagaggagttttaccaactttggttcttctagttggaa

SEQ ID NO: 11380 - DNA, 435 bp, Glycine max
  unsure (1)..(435): unsure at all n locations
tcaagacacattnttggtggtgaagctccttctttcttggcttattccctagtggatggtgtatcccctctcctcttctcctttgccttccgctgcatctccatggtggaaaatcaccattgaaggacttcattgaagctcaaagattcagcctccatagaagctccacaagcaagcttccatcaatcatgaaagtagttgcttgtaacaacaattacaaaaagattgatcatatcgggttctttattctttatttgtctatttagtaggatttctttgtaattaataaattatcccttttaatttatttgtctaccaacattgaaatccttcattcatggttacactttgtttagagattaagaaagagtttagatttagaaatcttttgtgcaaaaagttaaactattttaataaagtgttcattcttcattt

SEQ ID NO: 11381 - DNA, 336 bp, Glycine max
  unsure (1)..(336): unsure at all n locations
tcacctctcaatgagctggtgaagaaaatgtggcatttacctggggtgaaaaacaagagcaagcctttgctttgctcaaagaaaagcttactaaggcacctgttctagctcttcctgacttttctaaaacttttaagctagaatgtgatgcctctggagtgggagttagagttgtattgttacaaggtgggcaccctattgcttattttagtgaaaaacttcatagtgccaccctcaactaccccacctatgataaagagctntatgccttaataagagcccctcanacttgggaacatttccttgtttgcaggaatttgtcttcatagtgatcac

SEQ ID NO: 11382 - DNA, 441 bp, Glycine max
  unsure (1)..(441): unsure at all n locations
ttcgtctacagatccctcatgtaagactaggcctaaactattagcattattgtaacaacataattaagaccaaaacttaacccgcagatccctcatgtaaggctaagtttcaatcgtgcttcaatcaagttctaaggcaacagtacatttcccaatgctaaagtcacctaactatgaacacaaatgggtgatcagaccaaaagcatacaaacattagcattgaaggaagcattgaacacagaaaacataatcaattagatattaggtatttacatcagttgttcattagaaatccccaactagggtgtttagccagccattacaaagaaacccaaacaataaatgagattaaaagcagagaatgatagttccttacataagaagggggattcctnctcctcttcttagcatctcacactcactctctaattaataatctat

SEQ ID NO: 11383 - DNA, 458 bp, Glycine max
ccgggaccttaagcacctgcagctgcagcttgatgttggttaatgtctaaattatttataccaaaagcaagaaattaggtgcatatagagatacaaacgccttggaattgatgcatacagacatttgtgggccatttcatacacctttatggaatggtcaacaatattttatatcattcataaacgattactccagatatgcatacatgtttcttatacatgaaaagtcacaatctctggatgtgttcaaaacatttaatgttgaagttgaaaatcatctcaacaaaagaattaagagtgttagatctgactgtggtggtgaatactatggtagatatgacggttcaggtgaacaacattcggggccttttgctatgcacctagaggaatgtggaatcattccatagtacaccattccagggtcacctagcgtgaatgatgtggctaaaagatgaaat

SEQ ID NO: 11384 - DNA, 431 bp, Glycine max
  unsure (1)..(431): unsure at all n locations
agagtacattgaagagtcttgagcctttgttcttaatgttctgttggtaaatattagagaggaggtatttatgctttcttctagaattgacgatccattttgtaagtagaataactttcccaaaggtatgatagagagggttcaatataacaatcaaaccaactgaactaatagacatattatgctataagtaaatagtgtcgttatatataatactaaaatttttaatttatatttaatgtatatttaaatttacataataaattttgtaatgattatttttatataataattaatttttttacatatataaattataaataaaaatgataggtttaataagtatttacagatgtaaaaaatatcaaatntatttcattatcaattgctataaaaaaacatctaaatacatcattcaattaaatatcata

SEQ ID NO: 11385 - DNA, 427 bp, Glycine max
  unsure (1)..(427): unsure at all n locations
agcttgaacagattaccccagttgtctttgtgttggcctttgacaaaaatctcttctagtcatctaaggtccaacatgctatggattctgccaaggtctttcttcagctgagtttgacaatcctggaagagaatggacaaaggcaccaaaaggcgctaaacaaggtggtgtcattggaggctgagtttgccaaatggagggctactgctcgcatagtctagcaagtggagtgccctaaggtagctaatgccatcttcgtatttgttgaaattgtgaagtcgaaccaccaactatcttccaaggttggcagtgttttgaccaagttgttgtgctccaggttggatgatgatgaaatgtttgaacgttgcaagggcttgcagaaagagaaaaatgacttggctngcanggtgaagagcattatgatgga

SEQ ID NO: 11386 - DNA, 398 bp, Glycine max
  unsure (1)..(398): unsure at all n locations
ntagactaaatagaataactaaaatgctgaatcttacattttntagcttcatttaatcatcattaaaagttaatcagtggtgcaactagctaccccctgttaaaataattgaccatgtgtatatgttttatgtgtcctagtatagcaaacaacaggaatggtgaaaatggatataagagcattcctcttttgcataagagcattgagtgcagtctatgacaatgactttccctttgaagctataagaatttggagcttttcaagatcaaagttgggtagtgcattgagcgcagtctgtggcaatgaatttccctttcaagaatttaggtgcaaataatgataaacacataacctatgcaccctaccatttagttacaatgaatntccctttgaagaat

SEQ ID NO: 11387 - DNA, 441 bp, Glycine max
  unsure (1)..(441): unsure at all n locations
agcttataattgatgtaaatgttttttntttatttattgngcatanaactgatgtaaaaaaataatgcatgtangttttgctgtccaaatcttgttcccgaccaaaaaaggaacatttcaattttgtaaggataaaaacggactaaattttttatagaaatgaagtctgaacattttcatatttatggagatgaaaaatatattttaaccttctttaaactctgaagtctaagaaattgttgcttgttggtaaaaaaactactttattggaaagtctcatgtgacataccttaattaatgaggtattgttcaaatacttacgagacaacttcacttaatcctaatgattttaaacatgaaatataacataatgatttcaaatgttaataagttaattacatgtntcatgctggacaacaacgtcaaaattcttggactgac

SEQ ID NO: 11388 - DNA, 436 bp, Glycine max
tcatagttattattataacacagctacccatattaaacatacttcatctaatacttttttttggggggaatcaatgagaatgagaaacatccacacaactttgcagggacataagcatgaaagcattgtgacaaaaatactcaattagaagagaagaaaatgagagttaattgacaaagctcgctcaataataatcaatattcattataagaatatttcccagcaatgtttcatcaaattctgctttacacaaaaaaaaaaaaaatcaccaaactttgcttgaggcttcaagcaatcccctaacaaattccaaacacaaacttttgtgtatcactctgaaaaatataaacgaatactatatagatcataacagtcatgatctctccctagaaaaacctaagcttgttcaagacagttctcctttgctggagaaaga

SEQ ID NO: 11389 - DNA, 402 bp, Glycine max
  unsure (1)..(402): unsure at all n locations
ccctatctctaacaaagacaaccatcacccttccaacaatgcatttacaaatttgattgtaagcaaccattaatgtcattgaaggtaatctctttgttgttattttagacatgcattccatattgaagttgtattgttacatattgacaaatgtgtaaggctagctgatgatgtttataatatattcatttgtatatgtttctagaaatgtaaattcaaaacttcttttgtattatttgggttaagtaataagcaaaataattgttttagactacttaatttagcatatgcaaaatcaagttttggatgactntaatatgttntgatcctgtaagttaatgctttttaaatttttgtccctttaagttcatttttctaattttagtccttcttgtaagtaac

SEQ ID NO: 11390 - DNA, 387 bp, Glycine max
tctttgcgtctaatgtgactgtgtctatacagtagattctcatggactaaccaccagacttccttgggtgtctctcttgaccctcttccgcttgaacaatggactaacagcctgaattcttacgtgtctcccttctacattgactaagaatccaacctgacacagtttgagagtgctttcgatacttgccttgctcttgtacataagtattcaaaggactaaccgactaccaatacacatgtgttgccattcacaaggtgtcaaaggtttaaccgcctgatatcttcgtgttaacacattggatggtgcatcctttgtggtacaagtagagggcacatgtacttgggtttgactgagaacaagacatggtacatctattgtggatca

SEQ ID NO: 11391 - DNA, 434 bp, Glycine max
  unsure (1)..(434): unsure at all n locations
agctnttgtcactccaccttaatcttgtctttatgttaaccaaagctagcacagctgataacatagtaaagcttttgcatccaacatacaatggcgtatgcgcatctgtttgaagagcatcgtaaatatctgcatgacattcccgaaagccctcttgcccaagatcacgtatcatgtcttccatgagatctccgctttgtagatcaaccggatgaggtggacatgttgctgtatgaccaaccaactcaccatgccatatccactttgtgtacgtcgggctaaagccatcacatatcagatgcgatctaatgtcatccaacgaatgacgcctcccgttgacacatttaacacaagggcagaaaaagttgccatctgtggttgctgaatgtatnttggcanatgacaaanactcttcaactccatgttgataagct

SEQ ID NO: 11392 - DNA, 331 bp, Glycine max
  unsure (1)..(331): unsure at all n locations
tagtttgttacaactggggtaattatcagtttaatttgttagttatgnggaccaacttatcaacaaatctccaccttggttacataactaaacaaggatcaaagtggttgctcccttttttgacatcagactagctgacattacttcaaatttataaggtccaggcagtagaaaaacttgatgcttggtagaactttagtgatcatatgagagggattatgcttagtggagactttctagacaaacacaactccttcataaataatctctctcacaaagtgtagcttcacatctacatgttatgtcctttcgtgataaacttggttctttg

SEQ ID NO: 11393 - DNA, 430 bp, Glycine max
agcttatcaacatcaaacttggagtatgagttcttggggtcaagacatgagaagcaatcaagtataatgttacttccttcactaaagcggtgatccatctccacacatattttatcaatagcaacataaaaaatctctgcacggtaatgatgaagattagtgatagtcctcccttctgctcttgaacgaccccgaactggtatttcgtcatccatatttggtaccagaatacttttagcaacacaaaatccttggacatcggcaaaaaaattattccagccactctctctcattgtgcccaaccgagctttgacaacatcaactaattccatgacattcacaatattaagatcttttctttgcaatatatttgaaaagctcattgtttcctatgacctggatcacgcacaatctcattggggttaaactc

SEQ ID NO: 11394 - DNA, 274 bp, Glycine max
  unsure (1)..(274): unsure at all n locations
taacatttaccatggatactactattaagtattaacctgtcaaaaatgaataatatcaagagaatgtccagaaagcagtgttctaaaaaatggtacttacccagtaaaactgcactaacactaagtgtgagtgtaagtatgaaaatgatcacagatgctctccccagtatggcaatagcctttctcaccaaatgctgtccaacaagtgcagcagcagtggctatagctacgaagtanagagctgcaagataatatccaaagttgaacattaaag

SEQ ID NO: 11395 - DNA, 443 bp, Glycine max
  unsure (1)..(443): unsure at all n locations
agcttggtgatttaatttgttnttnncagtattttatgtgtattgttnnnnnnnnnnnnnanngaaaggtgattacataatcgctttaatattatagcctttattacataaccatttcaatattatgcgtgaacttattgaagattaaaatagtttttttttatgaattacatatatatatatatatatatatttcaggtggtaccaatttcatgttctctctaccaaaaaaattcatgttctaaattataccaaaaataatatatatatatatatatataaagaacaatggaactgaatggaataaaatatatttaattttttagtcaacttaataatattgtgttaggatgtttccctgtaaaactttggggtaggaagtaggaactaagcaatattgttagggtcaagtcgacccatctttatgggtttgatataaaaaa

SEQ ID NO: 11396 - DNA, 446 bp, Glycine max
  unsure (1)..(446): unsure at all n locations
cttgaatacccaatcgcactaattagaatggaactcggattatcatttattagaaagtgacaaggtgaacctaatagccaagttagttaattatgtaaaatacgcatgtatactgtttcgtattcctctattttcaagtaaatttgggacattaattgcagttgtgaattgtcacatatgagcaataataaaagattaaattttcaattagactaaatattttttttttactataatcggtgattaatttggatttggccggtcaagttatgtaagcatgacagcggctgattgcagcaatccaaaaattaatgttgaaacctaatcaatggactgctaaaaattcttttaaagaagaaataattttttattcgtaagaattgaaaataatatgattntttttttaataattcacgttcaatcaactaagttatatatttttttta

SEQ ID NO: 11397 - DNA, 419 bp, Glycine max
agcttgacgaacaaagaagtagttgaagatatggtagtatgatctcttagaatttagggagttttaataatgcttcagctaatgtaaccattagtcaatcattataaataggacctatcacattctaaaacacacagatatcaacacgcaaaacccaatcattttcttgcctattatttgcattatcttgcttatctaccttatttctcctatctctttcaaattactttattgcttgtagtcgtttattgcttcctttactgcaatttctacataggagtaatttaatttagaaactttagttcattgattgtttgaaagctctttagaggggactaggaacccaaccaaggaaaatattcccttccttgggtcaatcgcctaaagggaatcaacatttaatattcagttgtcagcac

SEQ ID NO: 11398 - DNA, 439 bp, Glycine max
  unsure (1)..(439): unsure at all n locations
tcgagaagaaatcacatgtttgtcatcatcataaagggtttataatgtgaatgtatgtatacatgattttgatgatgtcaaagaagaatctaacaaggctgcttcaaatgataagcatttgcttcaagaataattcaagattgcttcaacaaacaaagccttgtttcaagattcactaaagaccaagccttgccttaaaacattgtgctttcaagacatgcaaggctctggtaatcgattaccaggaagtgtaatcgattaccagaagacagggttgagaaatagctgttgaaaaaggttttgaatttgaattttcaacatgtaatcgattaccatatgtctgtaatcgattaccagcaacgaaactntggaaattcaaattcaaaagtcataacccttcaaattataactgtgtaatcgattacacaaacattgtaat

SEQ ID NO: 11399 - DNA, 360 bp, Glycine max
  unsure (1)..(360): unsure at all n locations
tggtgaatgcatgagctttatacggtcaaggtgtgtgtgaatgttgtcngttactctgttcacaagtgcttcactggcaatgtgatgctatgttgatgtacattgtgaaatcctgtataaatgggaagagggaggaatgagggtggagatagacaaatttttaccatttttatgctgtgatgttttagatagcgattgtggttttgtcgcaatccttggtgttttagaaagttataggcaaatgtgactgatgccagtcatgatgcggtcaaagagacccaaaaacctttgtgccacaattgtgttgtagatagttttttaaaaccttgcctacaagacttcaatcttttatggataaag

SEQ ID NO: 11400 - DNA, 448 bp, Glycine max
  unsure (1)..(448): unsure at all n locations
tggccccaaaatcacttaatttcctaggttcaaaatgtgtcttatggtattctaactagcagtagggaccactccattactacaacaacaatcaagccttgtcccactcatggatcattcaaagccatttcccactaggctttataaaaaaccaagtttgtattacatcatttttagcaaggagtttttaatggttacttctacagttttcctagtttttcctatacccttttaaacaatcacttgttacaccaaaaaaagagaaggtgctgcttactggtgcaggtttttcaaaggcatgtgggtaaagggcacatttcacatttgaggaattaagtgatttaaagttcatgtaatttgaatttatatcaacagaagtaatagacaagagactttttgctagcagaaaacaccacagatgaaatgacacattntaaaggtccaactt

SEQ ID NO: 11401 - DNA, 440 bp, Glycine max
  unsure (1)..(440): unsure at all n locations
atgaggctgaagaagctgctgctcatgttttactaagatccggggacattaatntatctcagcctcatttgtcacaagatagtgacatggagttgatggtaaatattngtcacaacaaagtagttntatcttcaacctaattgttgcagcactccattnttatatattacaattattcatgtttggcatttgcatgtaggtccctgcaactattgttccaccaatagcaaggaataagctaaccataacaagagccaaacaaaggaaggttgctgataaagataatgcagtataaagaaaactgaggacccattttttgttgcattttcaaagttgctgagtttgaaggttgctgatgaagaaaactgaagaaagcatttttgttgcattttgatattangatgtgtagttgtatattttgaaagcttcactggcatgtg

SEQ ID NO: 11402 - DNA, 439 bp, Glycine max
tgtaacacgacaattaaattttgtgagtaagagcatttctcatcaaactttatacaaactaaggagagagagacagagaaaaccaacgaacccgagtaagactactaaaatgtgtggtcattcctggttatgagaaagagtagcttggtgagaggagtagcttggtttttccttcttcctttcacaacacggtactactcttaattttttttgtcctattatgtcatcttatgctttgtcttgaacctcctctctcaattatcccgtgttcactgttgattctgtgaaacctttccttatattgtctcttcttcaaaataacaaagccaactccttatgttgttttggtttgtctaagaaatgatggcaatattggagtgtagtaatagtttccacttcctaaatggggtttacatggtggctgtgttttgtcttggta

SEQ ID NO: 11403 - DNA, 388 bp, Glycine max
  unsure (1)..(388): unsure at all n locations
ctgcagcttgagccaaatcctgactaccatatttttgttcttggtgagaatgtcaatccttaccctcggaagcaaaaaaggaatagaagggaaatttccaatcaaagaaaaagagaaggaaaatttccaatgaaagcaaaaaaagaaaggaagggaaatttccaatcaaagaaaaaaagaaggaaaattccccaatcaaagagtgggagaaagcaaaaagaaaagaaaggaaattcccaatcaaagaatgggagaaagtaaaaaaggaagaagaagaaggaaagaaagccctgatcggngatcgaagganaaaacagaagaaatatgcagagaggtctttggaccggacaatatctgaacaatacagaattgtcaccaaatgaacaaa

SEQ ID NO: 11404 - DNA, 243 bp, Glycine max
tttctggttttctaaaccttgaaaacttgtgtctattctttcttttcatctcttctccctttgccaaaaagaattcgccaaggactaaccacctgaattctttttgtgtctctcttctcccttttccaaaagaacaaaggactaacagcctgaattcttttgtgtctcccttctcccttgtcaaagaattcaaaatgacacagtttgagaattcttttgaatcttccctttcccctataccaa

SEQ ID NO: 11405 - DNA, 437 bp, Glycine max
  unsure (1)..(437): unsure at all n locations
tgcaagcttgcattatttgagagatattgcgtgttaatgttgcgcatgagngaaagggntagtttgcatgacaggaaagtatggaaggagaaactaattgttgttaaaccgatgagttgtgtgaatcttaactgagagagcgactagcattaattattgatttttgcatgaatctttgaatgttgaatggatgcatgatgtgaaaatgatgtangctatgttgaatttgttttagctactaagccaaatagccaccttgtttgagcaaataaagtaaacccttgcaccttgttgagccaaacataattgaaattgtcctgaaccctatgaatgattgcctgacacaccttgttctatgttataggagagcatngtcttgaaagagatgtttggttcannattgggggagtgattataatgagttatgcgcatgatta

SEQ ID NO: 11406 - DNA, 391 bp, Glycine max
acctatgcaagggcatatactatagactgaaacaattttcttattatatgtatgatcggaagttcaaaacataaatttcagtctaaaaaactgagtgttaggggaagaagaactcctcatatggagacacgccattaattatatttcggtacttgattctaacattttgttagtaacattttatattctaatccccccacatatatcaggtaaatgtgcatatgcgcactttggttaaataatactgacatcaattcacgcgtgacaacataatgtaatgacaattaaaagttattaacacaagtgatttgatagttgaatctttttaatttagatctggagtttgatctttgacttgatcattagatcacaattaaaagtataatttatc

SEQ ID NO: 11407 - DNA, 437 bp, Glycine max
  unsure (1)..(437): unsure at all n locations
agcttagcanaagagaaactagctttttnngttgatctgtcgataagnatcccatcccatttgacacaagcaaacaatttgtttaaatcatactttatttctattttttcaatttagaaactcaaataacaaaatagaattttctttgttaccacgaaagctaacagttacatctcanagcattcagactgcaaattcatcactgtgcatagcagctttcttgtctgatttctaatttttcagcaatctaagaaacaaacaccaaccctgtctaggaaacatggatactaacatagtctctatacccatgtcaaacaagtacttgtgttacaaacttcattaacacttgngatattttaagttacattgtgctatttttatacttatnactttttaaaatntatacgaatacaaacataaatacaataactagatat

SEQ ID NO: 11408 - DNA, 438 bp, Glycine max
  unsure (1)..(438): unsure at all n locations
tggctaggacttatactgtgtgctcgagagttttcatctantgattcttaagtccttgatctggatgcttgagtatgttatcacaactcaatttaacccctctgcatcaccttaaccacatcattgttggtatagcatgataaaatgggacaatttttttccttttaacatatattttaccatagttttaactaattcctacatgaaatatagttgaatgttattttttcgtcaattaaaaacttgattatatgtagtaatagtctgattataaggaacaatctataatgccttttggttttatatctaactttccgttgcaagaatatgtatatgagatgttacttgtactcctacacgtgtttagggccatatgaatcaccttaattatatggaataaactgactacaaccttgaatattntatttatttataatt

SEQ ID NO: 11409 - DNA, 424 bp, Glycine max
  unsure (1)..(424): unsure at all n locations
agcttcattaagaggctncctctttatatttcctcgtgacttctttgagaagttttctcaagaggcttctttgagaagctagatccttatctacccacacccctctattaactaaattaacctccttgaaaataattacggataaaaataacgcaacgaatataatcaaacatcaaacataattactaataatatatagatatatatcagggtgttacaattagcaatgcaaattgaaaggatgatgggtttaagtgttgactaacattttgcttaagtgcttcggtgttaaatgtcttaagaacaagtatgttcattcatactcaagtgctcaaaaaggttgtctcagaacaattgtcaggagttaagaactcaagatttcttanagcccatatacattattgcaacctacccttcggcggga

SEQ ID NO: 11410 - DNA, 411 bp, Glycine max
ggttcggtcgcggcaagtgcactggatcgcgtatagtagtttaaaatcgtaagaactgagtatcgaactctcggggaacttgtgttacttggtaaagctacttcagtgaataggtgtctagtatgaaaagaaatgtatggattatgcacaggtatgtaaactaactattaaaaggaaaatcacgtgagtaatgatgcgtaaagacaagtagacaacacattggtcttcctaataggtgcctgatgttaagaggatattctctacttaaaaatgttcatgtgttctatggtgtctcctgaaatgctaaaccttgattcctcataatagtttagcctaatcccgatcaagcatcgtcctcagattcctcttgtaggactaaactcgaccaaaaccgcattaagacaaacatac

SEQ ID NO: 11411 - DNA, 403 bp, Glycine max
  unsure (1)..(403): unsure at all n locations
gcttgtaaaagattgataganaaagtgttcaagatacttgaaatgcaaaacaaagccttgcttttatagactcttcatgtctggtcaagacaaccattagaagagttatgactnttagaaaaacttanaaaccaatttgaaaaagtcaaaaaccatttgaagagttacatcttttgattttattcagaaacaatcactggtaatcgattaccaaattagtgtaatcgattacacaaagcttttatgtgaaaggatgtgactcttcacatttgaatttgaatttcaacgttcaaaggcactggtaatcgattaccaaaacattgcaatcgattacaactntntgaaattaattggaacgttgtaaattcaattngaaaactttntcaaaacaattttgctactg

SEQ ID NO: 11412 - DNA, 411 bp, Glycine max
  unsure (1)..(411): unsure at all n locations
nntttggagtagaaacatgggaccaactcattttatttcttatagtcgtatctagtcaaggtctgagagaccatacaagtttcctagcgatttctaattatgtgggccattaagtctatcatatgctgaaaatagccgagaagcccatgaatttcttcgggggcggagtaggtgtccgccatcgccttggccttggctaacaatcggggaagatcttgactcccgttcaaggtaagagcaaaccgatccatccacatggttgcctcttggtgtaaagagtcgatcacccttcctctagcctctttttccgcgtatacttgggcatactcgtgcgcgaccctatgctcgtgggtcgtggctagacctaactcttcttggtacttggcgatgatagctagcatgttggtctct

SEQ ID NO: 11413 - DNA, 343 bp, Glycine max
  unsure (1)..(343): unsure at all n locations
agcttccccagtccatgttccgntgtagtttctcttctatcgnggggcaggtttccatgtcgtgtgattccccgagatgaaacaaacattcctcacttttgccttcgccacgagagaccatgcatgttgcctgcagcgactggtagatgaaccgtctagacatagccacatcttctaatctctttgactctgacgacctatcctttttgatggcatttatgctagctcccccatgactggctagtggattggttttaacgttggggccctcttcttgaaaggatagtcagtcgacatttattaggtgtagcaccttatacttgaatggcaggcaagagtcaat

SEQ ID NO: 11414 - DNA, 329 bp, Glycine max
  unsure (1)..(329): unsure at all n locations
ggattgaacagttcacttatattatccagtggtttgatgtttggttttgaaattcaatgtttgtgattggtttgaattgatcaattgtatgaattgagtgaattgaaatgcatagatcatatgccttgaatgagcatgcagtcattaaaagagaaagaacatggaattagaatcatgattgaaaatgtttgttggtttgttatgttgattgtgaaggaacacattatccgctacccggtgagagtgtgatctttaattgtgagagaacgactaacattgagtaatgatttttgcatgaatctctgagtatngaatgaatgcgtgaaatt

SEQ ID NO: 11415 - DNA, 435 bp, Glycine max
  unsure (1)..(435): unsure at all n locations
agcttcatggtgaatcaagagtgatttanattgttttgatgataacaaagatgataacaaaaggtgatgacaaaggtgatgacaaaaaactcaaaggtcaatcaaagaatgagttcaagatattcaagatagaatcaagaacatttcaagattcaagaagaaagttgaattcaagaatcaagaatcaagattcaagagatcaagattcaagaatcaagagaaggcctaatcaagataagtatgaacaggttttctcaaaaacttgagtagcacatggtttttcacaaaacatgtttaccaaagagtttttactctctggtaatcgattatgtgttttaaacttaattactttaatgatatatgactagaggtatgcactcttattnggttattatgaatgactttctggattatatgacattctatgaagtatta

SEQ ID NO: 11416 - DNA, 291 bp, Glycine max
  unsure (1)..(291): unsure at all n locations
ggcttctacaaagtgaagggtgtattccctttgaaaaactctaatccatngggactttatttatcatgttcatcttcagcccaatcattatcactgtaacctacaagcttatagttgttacttggtgagaaccataaccaaagatgattgttcctttgatatagcaaagagatcattatgcagccttgtggtgagtaatggttggagtctacatgtatcgactaatgagtccagcatcatatatgatgtctgggctcatgcacgtcaaatatcgcaaactacccaacaaac

SEQ ID NO: 11417 - DNA, 420 bp, Glycine max
  unsure (1)..(420): unsure at all n locations
tattattgtaacaaagaaaatcctccttgcttgtaacattctctatcaagggtgtggagtatggaggttaacattcctcatatgaaaaacactagccaagaccaacttgtaaaaaaatttcaatcaattgttatcaacattgaattgagttcaagatcttttttcaaattcataaatttgtacatagagatgactagcacagtttggtcatcaatttatatatatatatatatatatatatatatatatatatatatatatatatatatatatataatgtgtatcatctataacacaagtaaaccagaaaattgcttccacatgtcttgtctccttaaaagttaaaataatgtcacatgcatccaaatgtgtgcaacatattctaacatcagagaacaatatcacacacatgtatattcn

SEQ ID NO: 11418 - DNA, 348 bp, Glycine max
tctggtgggacatcttgacttgctttccaatctgacattttccacaaattctgccttcttctattttcagattgggaatgcctctaacagcacctttgtcaatgattttcttcatgcctcttaagtgcagatgtccaaatctttgatgccatattctgacttcatcttctttggaggatagacatgtggaggagtaactggtttcttgaggtgtccataggtagcagttgtcctttgatctgctgcccttcattagaacttcactcttctcatttgtcaccaagcattctgactttgtgaagattacattgaatccttcttcacacagctgactgatgctgatcaagt

SEQ ID NO: 11419 - DNA, 410 bp, Glycine max
  unsure (1)..(410): unsure at all n locations
agcttgcttgtggagcttctatggaggctgtttctttgtatcttattgaggtccttcaatggtgattnttcaccatagagatgcagcggaagacaaaggagaagaggtgagaggaggcgccatccattaaggaataagccatggaaaaaagagcttcaccaccaagatgagccttggataagaagcttggaaggatgcttcaatggaggaaaagaaagagggagagaaagagagaggggggagcacgaaattgaaggaagaaaaagggagagaagttgaactttgagttgtgtctcacaagactctcattcatcaaagttacaacaagtgttacacatgcttctatttatagactaggtagcttccttgagaagctctcttgagaaaacttccttgagaagcttctttga

SEQ ID NO: 11420 - DNA, 439 bp, Glycine max
  unsure (1)..(439): unsure at all n locations
tcaacctttggccatcatttctgccccaaatcgcgaaaggtgagcattttcggggtcgtgaggtgcgtggctacgagtgggacttcgaaaattcaggtttgggtggacttctttctcctttgattttcgcgggtatggggttttgggagatatgatgggtagtcttgctaggtttctgctgtatgatgattatttgtgaagaaatttgttgaaagtttgtcgagattgccatgtttggatgagttaaacatacccattctgttttagggtttttatgatgatgcttgtgatgttcatgtgctgaaattgcttatggaaaactgttagagatgaagggtagagttaacctanggttagaaagtgagaatgtggtgttgtgagtggaaaaagggggaggctttgagagttggaaggttaaatctggattctgtggtaaatg

SEQ ID NO: 11421 - DNA, 415 bp, Glycine max
  unsure (1)..(415): unsure at all n locations
tgcagctttattattatttngcttaaagtttggtttttttaattgtaattcttcttctaagtttatgtttttctaattatggtttctatacgcttaaagtaaaaaggactaaaagagaaaacattaaaatattaaaggatgtcagctttctaagacggttattacatcagaatcgtctaagaaagcagggtctgacaaactttctaagactattttgatgtaataaccgtcttagaatgtttattcttctaagacggttctattataaccgactttgaatgtcagttttttaagacggttattatatcagaaccgtcttagaaagtttgtattttagatgatggtgttttttggaaccatcattaattgaaattcacttttaacaacattgattataatgacaattgagaatcgt

SEQ ID NO: 11422 - DNA, 419 bp, Glycine max
  unsure (1)..(419): unsure at all n locations
gggccttctcgtcggcgtcacgtttgagctgttcgatgcttcgacattttcattcgttgtcagatttgaagtgagggtagagcagggagtagaagacgtactcgatctgcgagaagcgatctttggcgtcctgaatcgatgcgacgtggatgcactccttgagacccatgcccaacacgatcacattgtactccttatccatgttcgatcgatctcgatctcactgaaaaagggatttagggtttacaaagatgggaacaacattcaacacaagtgtgatttcacattcaaaaatcattttccagtgaataaaataattaaaaatcacttgaatcgaagacggtttntataaaactgnctttgtaaggataacatcaaatgcggttttataaaaaccgtctttaacacgcataatatta

SEQ ID NO: 11423 - DNA, 387 bp, Glycine max
  unsure (1)..(387): unsure at all n locations
tcaaattgtcattgttataattgcttatttttcatccaacagggggaaaattttgcatgaattcttacttgttagtagaataaaccatatacaaattgaagtaaataggaattgtggttatagatacttaacaagatatgctatgttgtgcactagaaagaaacaaatgagagagttttaactggatgaaatcatgccaggttatcttattgttgtgtgttttctttcattttctctaaaaaaaattgtctaattaaaattggattaactnttttctcatttcagaatgacttanaaagtatatgtaatttattgttgcctctcagacttggttatttcttgaagctggatatangaagctctatgcatgtctaccctataatttca

SEQ ID NO: 11424 - DNA, 448 bp, Glycine max
tgcttctacaacaactcctgaacccttcttttcaaaattcgtagaactcttttggtttttctaacgttttcctcgaataaacgttagtggcgactcttacttattttctccttatgagacgaacatgctttcttttatttgctttcgtcgtcccgtcgtaaggtaggttgcgacaaccatcttaaaatatgtttttttttgttttaaaatattaaaaaaattgacatttctaagatggttctttcaaaaaaccgtcttagaaagtagttatactaagacgattttctgaagaaccgtcttaaaaagtctgttttctaagacaatttttttaaaaatcgtcttgaagagtctattgaattatctttttccatgttaagagtaatgtgctatatttttccatgttatgattcaagagaagagtaaataatcactctatatatatatatat

SEQ ID NO: 11425 - DNA, 409 bp, Glycine max
  unsure (1)..(409): unsure at all n locations
ataagtaatatatgctacaaagtgtttagcaaacaccacaaaccttaacaattctcttatctcttcataatcagggtggacatatngtaaagtcataatctagaaaaaacaaaggaaaaaatttcaaccctgagcccacaaaaacaaagagttntgtcagaagttaaattcaaagacaataaattactctcataggtggacacttgaaaaatggggcttaccataggcaggttcaaatgtccaaatgaccatatattaactctntntattgagaaaattaaaatatagaactcanaaaagactaagatatcanggcacaaaatgataatgatgatgataaaattattgatactttggacctttaacaactcatgggtttaacatggaagatcaacatagtgctcccttg

SEQ ID NO: 11426 - DNA, 447 bp, Glycine max
cgacttatacccaatattctatgtcctaccaagccgctgttgactctatacatatcaacaagatttgttagaagattgcacactaacaaaattttatgatcgtcttactaatggatatatcacttaccacttttagtcttttctctcaaggtatacaaggtgttttgagagctttgtatctttactagaatttatagaaaactttgcaagaaaggataaaagtatgactcttgtaggtaatttgtgtcttgttttttcaaagcttattttatacacagttttcatcttgaagtatctgttgtctcacagtcgttggattcttcactctgatattcgtctaaagtcttaagtctgttatttaatgcaaacattaaatgtacatctcttcttcatgcataatccatggtgataggatatcgtgtcttttacatcaacaggaaagccact

SEQ ID NO: 11427 - DNA, 412 bp, Glycine max
agcttgagatgaggaagtgttgaatggtgtttcttcctgcttttattgttgaccacagagtggtaccgggagatatgtcgcgggggtcaggagaccttggggacgtcaggtggggtgctattgcccaaaaccaagcttgaccaatcccgacccaacccgggcatagtcggtcagtgagaacctgtgatgtacctaaacaggcgagctcctggcagtcaacagataaaaggaacaaagaccacaaagcaaggaggcttgtggtggctggccagctgtgaactttgattgatatgtgggttatggcctctggtaatcgattaccaagggtgggtaatcgattacaaggcttaaaaatgaagacaggaggctaagatggtctctagtaatcgattaccacgggatgtaatcgatt

SEQ ID NO: 11428 - DNA, 162 bp, Glycine max
  unsure (1)..(162): unsure at all n locations
tgagaccaaagtaaggcatattctatgtatctaaaacccttcattntagctgaatttcaacgtttgagaagtgaaaatgacaatggggtaattttggagcctactctcgtctcacacaagtctataagctttaatctaaacttgctcaaactggttttacac

SEQ ID NO: 11429 - DNA, 481 bp, Glycine max
  unsure (1)..(481): unsure at all n locations
nttgatcccctgctatcgctcgacactacgngacacgttagcattcatcactcttgtgacagtctcgacataaaccaatcatggtgttagcgtttatgtgaatgggagatcggagcttttaactctcatacatgngtgtggctcacaagagacactcactacccatttgcgaaactcttttgtgttataatgggatatacaagtgctctgccacacaaaagtacactcgttttttcccaccttatgatctgtgcgtccttgaataatcacacatatgggttagcttgtgcaccttacaatcaggatcctaactgctctcatagctcacatattcacgaagagaacttttatatataaccagaccgctagagaacatgatcagtccctcctaccattaatggggcacttaaatacgcttaatagagtgatcttgcacgtgaatgtacgagaactagcacaaggaagacttccttcaagttaa

SEQ ID NO: 11430 - DNA, 430 bp, Glycine max
  unsure (1)..(430): unsure at all n locations
agcnnttgcttctacatttttagtacttatcttgattgagtcttctcttgattcttgaatcttgatcttgattattcttgaaacttgattcttcaatcttgactcttgaaacttgattcttgaatctttggaatttgcttaactcttgattctttggcatcatcaaaataatcttggaagtcattgcttccacaatctccccctttttgatgatgacaatcctgaaatcaagaggatacatacaagttttgttctaccgttcactcatctctttctccccttttcttttttaatttatgcttaattntaaaacattgaaaacataatatcttgatttctaaaaaataccaattnttctctcccnctttgggaacattaaaaaggccaaagtgtgtaaaaataaaatcataataagcaattttaaaacata

SEQ ID NO: 11431 - DNA, 426 bp, Glycine max
  unsure (1)..(426): unsure at all n locations
ttctccacgagtttcttcacaaacattgcttattttggtttatctgagactcggaatcagatattcaattgctcaaattaaacagagagaagagagaaaagtggggaatggtatttggccttgtgtgataactgatgttttcagaaagagttgttaattactttagtaaggagcatttgattgcagtttcttactttgttctgtatctgatgatggtttggtagtgagaagagacaaccaagtaagtgtcttttataaggggaaaaaaaccaaaggcaaactgtgtatatttaatactattattttttaaagtatgagatctctcttaagctcttttcacatttattttttcaaatattgaatgcaagttttttcttttggtatattatcaatatnttttaatttaatatcatcgtaactaagatt

SEQ ID NO: 11432 - DNA, 431 bp, Glycine max
  unsure (1)..(431): unsure at all n locations
agcttgagatgaggaagngttgattggtgtttcttcctgcttttattggtgaccacagagtggtacctggagatatgtcgcgggggtcaagagaccttggggacgtcaggtggggtgctattgcccaaaaccaagcttgaccaatcccgacccaacccgggcatagtcggtcagtgagaacttgtgatgtacctaaacaggcgagctcctggcagtcaacagataaaaggaaacaagaccacaaagcaaggaggcttgtggtggctggccagttgcgaattttgtgtgatatgtgattatggcctctggtaatcgattaccaagggtgggtaatcgattacaaggcttaaaaatgaagacaagaggctaagatggtctctggtaatcgattaccaaggggtgtaatcgattaccaggcttgaaaacgaagt

SEQ ID NO: 11433 - DNA, 369 bp, Glycine max
tgtcaagaactaattctccttacagataagctctcttatgtgaaaggccatcaatggttttatatctatgcaccctataagcaaaagaatctcaagtttgaagtgtagacaatgcacaaacccaagttattgtatcctaaaatttactttaattatgaagaacagtggtgacaaggattgaattcttgaccacttggtaagagccaactcttctaaaagcttaagctcttaggtggaggtccttgaatgtgacaatgagtttggattggtaccttttcattgtgcatataatttgtttggttatcatataaaccatactatactaactgacatctttgattcaatggtataaggagctcaacatacccc

SEQ ID NO: 11434 - DNA, 424 bp, Glycine max
  unsure (1)..(424): unsure at all n locations
agcttctaatcgattacacacatactgtaatctattaccagaggagtttttcagaaaacattctcaacagtcacatttttttatctgtttcttaaatggtcatcaaaggcttatatatatgtgacttgagacacgaatttaacaagagttttcaagagcaaaaaggtcttatcctcttaaaaagcaaaatagttttatcctcttacaaattccttggccaatacacttgtgattcaataaggaattatttgagtgctcaaattgttcaatctatctctttcaagagagatttcttcctctcttgaaaagggattaagagaccgagggtctcttgttgtgaaagaattctaaacacaaaggaaggattgtccttgtgtgtttagaacttgtaaaaggaatntaanagatagtggaactctcaagc

SEQ ID NO: 11435 - DNA, 400 bp, Glycine max
tctccccttatttgctataaatagggggagatgtgaagattaaaagggtttatccccttaggtacttctttctctctcgaaattgctgaggaaaattatttccgtgaagaaaatccaagctgaggcgcttccgtaacgtttccgtgagaaattacgcgaagattctcgaccgttcttcaagattcatcgttcgttcttcgttttcttcagtcttcaacgggtaagtacctcaaaccaagcttttcaattcattctatgtacccgtggtggtccacattttgtttcatgtatttttattctcgttttcatttgctttttattcccccttttgacgtgcttaagccatttatttatgtcatttctcgcctaatctcaaaataaaataaatttccaccgatcg

SEQ ID NO: 11436 - DNA, 377 bp, Glycine max
  unsure (1)..(377): unsure at all n locations
gctgtgcttttacatttatttatatgtctgttgaagcatggaagtaaccatcttgcaaaattggggcaaaagatggatcgggttacatcggtgcttcgtctactgctaaacacatttaggactgttaatgtccttgttacttccagtttcaccttgacgaagatgtcatggaccatgttgaaaatctaaattgattcaaccccatatcttgcgtaaatattcgcaatacttcaactgtgcatcattcgcatacatccatgttgttcattgcattctttccttgaaaaagaacttaatcattgttataaaaaagaagagaacacgctntacggcgcccttaccgaacccgtgatagaactagagtaatgggtgaagtg

SEQ ID NO: 11437 - DNA, 286 bp, Glycine max
  unsure (1)..(286): unsure at all n locations
tgctgccaaaacaacagaagtttagatattatagacggatctgttggataatatctactgcatataccccctgctaagaatacatactctgtcgacaattatatctgaatccgaaataattactgtagactgtgtgtctatatatatatatatatatatatatatcacaagacgttgggatattgcgatgagaaaatcatacaacaattttgggagtgtgaaaaatggctgttgtantgcatggtggaaggcaattaangctgagtgtgattgacagacacaaata

SEQ ID NO: 11438 - DNA, 416 bp, Glycine max
  unsure (1)..(416): unsure at all n locations
agctntgaaaagtgctatttttcactcttctctctaagtcaatctactggcttagcgagtgtcggctaagcgcaacactcatgggctaagcacgaggaagactctggaagaagatgagttgtacaggttcactaagcgcaccgcttcatctcactaagcgcactgcttcagtccatccgctgagcgagaaagacacgtgctaagccaaaattcactaatgtgcactaagtggtccataattgcgctaagcgcatgagcatgaacaaggccacctatttaagcctgaaatcatattttagagagagagagtttggactgagatttagagctttgcatgtctagagattctagagagagaaaggtccaagttccagagagttttgagagattntgatgtgtgaagatctgcagagact

SEQ ID NO: 11439 - DNA, 314 bp, Glycine max
  unsure (1)..(314): unsure at all n locations
ntagaaagttgtagttctagtctctaatcttagtacactttaattagtatacgctcgtgattctcttattcctatactctacacataaacatatcagtgatatttttatgtgtaatgttctactgttgtttttctttcanatttaaaagttatttgacaaaaaagacggaaggaatgggtcattaaccgaaaatacgatgcttccggggctcaacaacaagtacattggaaaaggttattggcttacaaatgttggtggctctatttcatgaagtgagtttgggaaacttgctgagttagaataattagtcact

SEQ ID NO: 11440 - DNA, 384 bp, Glycine max
  unsure (1)..(384): unsure at all n locations
agcttaataaagtccttagtgatctatattgtatgtgtgngattgcattgaatgagataatgtgcaaagttgggaatgctaatttcagttgttttgatttaaatacacataaccataacacttgtgtgcttgaaagaaacactatcctcatgagaagtgaagcatggttgatcttctttgatgtttgtcatacttgctaacctattttatctccaagtgcattcttcgcatgcttctatcatgaaaactatgtatgacaaatgtgaacttgagagttagaaattgaagttgtttgaaagatatgtagttgtctcaattattggggctgattacattctaaacattgtcattgacctaacttagtgtagtttagtttacttttgc

SEQ ID NO: 11441 - DNA, 296 bp, Glycine max
  unsure (1)..(296): unsure at all n locations
cgccttgngtagaagaatgatggattatcttgatccaatcaattataactattttctaaaaaaggcaagaaagagactgagactttctgatgtagttgttttctcaaaatcacatatttgaccctattttctttggtaactcattttctaattactacctaacaaatattttgaaagaaaataactcttaatatacgcgggataggagcaggtagatccatattaaaaagctgcaaaatttggcaaaggatacatccagatcttatgcgatcgagttctccattgaaaataatcag

SEQ ID NO: 11442 - DNA, 428 bp, Glycine max
agcttctcggctcatgcggggaacgcctttatttaacacccgtgcagcctaaggcacccacccagagggaagctccccaagttccaactccgaacacgactcgaccggccggtaattccaacacgacaaggaacttccctccgaggccattgccggaattcaccccgctcccaatgacgtacgaagatcttctaccatccctcatcgccaatcatttggccgtggtaactcccggaagggtcctcgaaccccctttcccgaagtggtatgaccctaatgcaacttgcaagtaccatgggggtgtcccggggcattccgtcgaaaaatgcttggcccttaaatacaaagtccaacatttaatggatgccggatggctgacttttcaagaggatcggcccaatgtgaggaccaacccgctcgccaatcat

SEQ ID NO: 11443 - DNA, 507 bp, Glycine max
  unsure (1)..(507): unsure at all n locations
tataagaacaaaatttgcctaatcatttccaaatatgcatgtgaattangacgcatcaacaagaatcaagccaatgctattgtgcaagcaatcaatggggcaaaacacaccaaatgattataatgatggatggctcaaattctcacaaaggtaaaatcatcactttcaaattgagctttcaaaactatcatgacatgtagagaagaatcaaggatttcaagtcacaaaatgtcaagaacttttattttcaaaacaattacccatttcttgaacatatcctataattcaaagaaaaacatgcaaagtcgtacgtgcacacaaaattgacccaaaatattaaactaaaaatccgacgaaactaacaacattaacaaattaacacaactaataaattaacaaaaccaacaaaactagcaaaatcaaagaacactcccccccatacttaaacaacacattgtcctcaatgtagcacaattaaaagattaaaaacaattaaatcatcaaaga

SEQ ID NO: 11444 - DNA, 342 bp, Glycine max
gcctcacctcccaatgagctagtgaaaaaaaatggggcatttacctggggtgaaaaacaagaacaagcctttggtttgctcaaagaaaagcttactaaggcaccctgtctagctcttcctgacttttctaaaacttttgagctagaatgtgatgcctctggagtgggaagtggagctgttttgttgcaaggtgggcaccctattgcttattttagggaaaaacttcatggtgccacccttaactaccccacctatgataaagagctttatgccttaataagagcactccgaacttgggaacaatacctgggttccaaggaattttcattcatagtgatcatc

SEQ ID NO: 11445 - DNA, 542 bp, Glycine max
atactcacgcttcatgatgaatcaacaatgattcataggtggtgagatgatttctatgatgataaaaaaagatgatgacaaaggtgatgaacaaaaagctcaaaagatcaaagaacatctcaagtgaatcaagaacaagtcaagagttcaagaatcaagaagaattcaagattcaagactcaagaagaaagtctacaatcaataatcaagattcaggattcaagatctcaagaatcaagatcaagattcaagactcaagattcaagaatgaagaaaagactcaatcaagataagtatgaattcttttttttcaaaactttgaatagcacatgagtttttgacaaaacctccaccaaagagtttttactctctggtaatcgattactatattgtggtaatcgattaccagtagcaaaatgagtttgaaaaagttttcaaactgaatttacaacgttccaaatattttaaaaagttgtaatcgactacaatgttttggtaatcgattaccagcgtccttgaacgttgaaaattcaattttaaag

SEQ ID NO: 11446 - DNA, 311 bp, Glycine max
aaacctttatatcaaaacttgtgctattcatccttttcattctcttctccctttgccaaaaacaattagccaaggactaaccggccgaattctttttgtggctctcttctccctttttcaaaaaaacaaaggactaaccgcctggattcttttgtgactgccttctcccttatcaaagaagtcaaaacgacatagtctgagaaatcttttgattcttccctttgccatatacaaaagatttccaaggactaaccacctgagaattctttggtatccccattcacaaagtttcagaagtttaaccgcctgag

SEQ ID NO: 11447 - DNA, 357 bp, Glycine max
tacgtgacactgtgaagtgctacatcccctgccctattgagctatatggaggcgcagacgcgaggaataatacggttcagcccctcatgcacttctgatgctcctcggatggacgaggagatttgattccgcgaggagagtccgatccgatgcgctctcgtggcgttcacgaaacacatatgggagggcgaacgcgaagattaccaaccgggctctatgaatatatcgatcgaactttgatatcttcagtcttcgacctgtaaacacctgatgacgagctgttcgagtcactctatgttccctactgggaacacattgggccacctgaatttttattcgcgtttacataatatgttt

SEQ ID NO: 11448 - DNA, 249 bp, Glycine max
atcagggattgtcccttaaattgcctccgatgagtcaaaattgaaaccaaactttgcaaccaatgcttaagtcctttgcaaatggaattattaatcacaaatcacgtctaaaggctgcgagaaaagtgtgtattctctagggttcctttactggcccataatctaatattgtactatatagaggggcttaagtagcacaatgactgatagcgggtgcatcatatcatagatttctcaccaatgtatggg

SEQ ID NO: 11449 - DNA, 427 bp, Glycine max
tcccctactcccaaaacatagaaaaacaaccgaagaatctgtctgctcatccagccattttaatatcctatcatgttgggcttgatccaaattttggttaggttgacccttcagattaatcaatggaccaacagcatagatagggggtgtttgaatttgaccatcacataatgcatcaatagcatactgctccaactctgaaaaagagttaacaatgatccctttggagtccttgaacctctgagcaagtttataataagtggcatatccaccttgtttgttaaaaaaagcatcatgcaaaacactagaaggaactggatcagggagacccggttccaaccactgaggatcagaatcattgaatgcatcaccaactttacgtttctgaatggaaaacatgatattcacaaacccatcatttgaaggc

SEQ ID NO: 11450 - DNA, 397 bp, Glycine max
attacttaatcaagcggagcgccccttggtgtaatgttttaaaaacctttcctaaaaaaataacgctctaacgttcccctttcattaggatagataaagtcattttcttatcggggagttgatgattttctaattgtgttagaatcctaattctcatgataatgatatcctttaatttaaacaaatatttacaatatgaaaatcggcgcaatcgatcttttctacttttattttgtatcactagtatggacactctcccgcggatgtcttcctggtgatcgttttttataaatctcactatacgttgtatatgttactatccttcttctatactccaattcattactatcttttaacaatagttggtaccaacttattcctccaattatcttgtatc

SEQ ID NO: 11451 - DNA, 792 bp, Glycine max
  unsure (1)..(792): unsure at all n locations
cggtttgaatccctgtagtatccgccgcggaancanaagaganccgccggcaggcttgcaatcttttgacaaaatgagaaggacattttttttctccctggcccaaaggagctcgtcaaaaaataagacgctcaaaatttgagtccaaaaccggcagaaaatgccggctacaataacattatacttcggatttgcgactgggtcacctaatatattacgacccttggaattgaaatttgaagcttttggcccattcaaacgaccctaaaattttacttcaatgacccactgaatcctgttatatatccagacgctctaaattggataccgcaactctgagaacatcacacgagaatacttttggctggatgttaaataagccctgtcatatatacgacgctcgacattgaatattgagctttgacaacttcaaacgaagataccttttttattgggagcccactgagtcccgtaatatatggagacgctccgaatttgattaatatgctcctaccaattgaaccacattaccttttactgggatggccgattgagctacctaatatatccagacgctcaaaatttgaaaacggaacgctcttggataattccacaacaattacctttttacccgaatgtctgaattggtcccgtcattatatgagacgcttgaaattagatcccgaacttctttgccattgaaactattaaacctctttctcggatgtcatatgtgtccccaaaattgtgagatcctggtatttaatccgaacctctccccacatctaacct

SEQ ID NO: 11452 - DNA, 532 bp, Glycine max
tctcccccaattttctataaatagggggagaagtgatgtttaaaagggttcagtccctttggcacttctctctctttcgaatttgcttaggaaaattgtttccatgaggaaaatccaagccgaggcgcttccgtaacgtttccgtaacgtttccgtgagtgatttcgcgaaggttttcgaccgttcttcgacgttcttcattcgttcttcatcgttcttcagtcttcaacgggtaagtacctcaaaccaagcttttcaattcattctatgtacccgtggtggtccacagttggtttcatgtatttttattctcgtttcattcactctttatacccccttttgacgtgcttaagccattttatttaagtcatttctcgcttaacctaaaaataaaataaatttccaccgatcgtttgaattgtattatccattaactttggttgaaatgaattccgaccgatcggtcgtgccgcaacccctttggaacccaaaaagaagtaaatattatattattatttaaaaataaaaaaga

SEQ ID NO: 11453 - DNA, 806 bp, Glycine max
  unsure (1)..(806): unsure at all n locations
cccccctgatgcatgagnaccgagnacctaagagngagctgcggcatgcaagcttggaacgagcccacgcacccgtagtggtttccatcgcgttgcgcgcacctattgtaacatgatggtgcctttacacaccccgaggagacggaccaaagccatcctactcttagggagaaaccgccaaacgacacaaagacaacacttccaccgaacgtaagaattgcaacatacgaaaactagcgctgaaaacaatgaatagcggccgagttggcgaggagcgcgccccctattggacagcagtgagaaaaactgtagggggcagaccatctcttcgccccctgtgaaagaggagcatatgccggacatacaagcctcgcgacgtgggaacggaaacaggttgccaagaactattgatccataatgcgctacaatcgcggcagggtatgacacgggaaaacaagaaaaacggaaaggccgcaaaaagggggggagccccaaaaaaaatcccacatgtcttcaaccacaagaagggaaaaaaaaaggggcaacttgcatccctcttctagatacacacaatngatggcttcctacgagcccacattttacgaatcggagaccatcacgcgacaatcctgccttaacaggaacccaccgtccccacatctcaccgatattggagaatcagtccccgacacttctactctatctccggcacgaggatatatctatcgctcggaatactataacttctcggaccacccttgctgtgaacggctgtctcgtcacataccgacgtggcgtccccacca

SEQ ID NO: 11454 - DNA, 391 bp, Glycine max
tggtttggaccttgaacacgcaactagctgctcttttaatatcatgccatatgctagcgactggcccctttctttctttcgccacttgagttcactattgctaccaccatataactccgcgaaatttgatgctggcataatcttgcttgcgagccctccttgtctcttgttcaagggctcttgcagtaattgcatatctgtttccgtaacccggcacactcctttcgaacgagtgtagcgggcagcttgaacttctccttggcaaggtacgccttccctaactagattctgagagtttggacttcttggtcctcttccggtgctccaaaactctctttgctgacgacttttaacttggcgagccaatctgatcctcgattctgaacttaca

SEQ ID NO: 11455 - DNA, 430 bp, Glycine max
taaaagatgtttatttagacaagactgggataaccaaattgccacattcaattggaaatcttgttgggcttgaacgattgtacctgaggcaatgcacacagctttatcaactaccaattagtatccatatattgcctaatgttgaagtgataacagattatggtaagaggggatttcaattatttgaaggataccatgaagacaaagaaaaggtgagttcagaaaaatctccaagtgccatggttgactataatgaaggttcgtttatttaccttgatttgtgttttccatacataagcttccataatgtgatcgaagtatgtagtcccaatccacttgagtgtcataatttttggttcttggttaaactgcttcaagctgggagcttgaattggtcaagccaggaagcaggacatcatcaatgcaattc

SEQ ID NO: 11456 - DNA, 455 bp, Glycine max
tcattcttcaaacccttgctgagttagtggtgtggcttctacttctttgaacccttgctgctactgtgtttttgaagctcaactatgatcttgtacactggatgggttctgggatgtgagaggtgactgatttctggtgcctttgtttctgtatgaatgatttctgaatgtactatttttggttggattctgtgactgcaaccttcctctgttgttgcattctggtttctgagcatgctaatctgtttttgggtattaaaattttgagctatgctggtctatgagtgatgcttttgtggctcccctgtttctgccacttaatctcatgtttttcctcatattaatgttgagagttgtaacaattaacttagctgtttaagaaacctttgttttgttataacgcttatccttgataggttaaaagccctttgtttcttacaggcttgtctttgggg

SEQ ID NO: 11457 - DNA, 507 bp, Glycine max
  unsure (1)..(507): unsure at all n locations
agctttttctttgattgctntgataggttttccaagcgttagagagaaggagaaaggattaaagcctctattctactatctatgtgcaatgagtatttctcccttcacagacattattttacaatacccaatggtgaaaatatgagaaaatgaattgccaacctagtgtcccaatttcacgaagatccaacagttaatgagactgggtgatcatttgtaaaatgcttttcttttttttttccaggtgcaaatattgcttcatatgtcaacttagggatttttttgttctgttcatttgggtgtaaacaagaaaatatccttttagtaataatggtgtcacttctactcttactttttgagttccttcattttctattctgattcaaagcctgcttctcactccatgttgaagatgacttantagctgctgctcaaaaattaggaatagaaatcaaggaagaattgtcttctcatgtgttgatggattctttatcattaatgtacttc

SEQ ID NO: 11458 - DNA, 519 bp, Glycine max
ttaagaattatgggctcatcaaactacttgtttcccgagggaaattctataaatagacctcccatctttaatggagtgggttaccactactggaaaacctgcatgcaaatctttatagaggcaatagatttaaatatttgggaagccatagaacaaggaccttatgttccctctatagtggccggaagtgcaacaatagaaaaacctagagcagattggactgaggaagaaagaagattagtacaatataatttaaaggccaaaaatattatttacatctgctctaggaatagatgaatactttatggtttcaaattgtaaaagtgctaaagatatgtgggatacactacaagtaatacatgaaggcacaacagatgttaaaagatctatgataaatacatttacccatgaatattaactgtttaggatgaatgtaaatgaaagttttcaagacatgcaaaaaaggttcacacacatagttaatcatcttgcatctctaggaaaaactttttcaaatga

SEQ ID NO: 11459 - DNA, 466 bp, Glycine max
agctttctagcttttcattggtgtattttttatctccttttggtgctctaaattgtgggaatgtgctcaaatatgtggggcaattttggtttgtattcttgcttgattgggttgaattgggggtttgtatgagatggccctaagcctataatgtattttgaagcaatggggcatgccacattgtccccgttctcttgctattgatgcctaaatgcgcgcccaccaagtgttcggtgaaatgcctcaatggcattagcgcgtgatttttgtagggaaacaagcaatgggacaatttggtttgcacatgttttctattttttgggacatgtattcagtttcgtaagggctatagtaattgccccacatatatcctaagcctaggaaccaaagtttttatgcacgagaacacaagagtgggtgcctattaagtgaagctaccttttttggccagcaatcagctttgagc

SEQ ID NO: 11460 - DNA, 587 bp, Glycine max
ttagctttgtccccaaggcttcatgtagacttgtccattatctctaagtgaacctcggatccctgtcggatacaatactggaaggaattccatgcaaccttaccacttccttgatgtacaactctactagcttctccattctatacttcatattcactgggataaaatgagcagatttggtgagtcgatctactatgacccacacagcatcatgtccacgactagtcttgggtaaactagatacaaaatccatagatatgctctcccatttccattccggaatttccaatggcttcaattctcctgatggtcactggtgctcagccttagccttttggcatgtcaaacaccttgctacatattcagctacatctttcttcatgccctgccaccaaaaacttatcttcaaatcttggtacatcttagtcattcctggatggaaactaacacgacttttatgcgcttcttccaagatcttaactttcaaatcatctcaagatggcacacatattcctccccttgaaactaattaacccggttgtgtccttttcaaaccctacatccttaatccccatttacatccatta

SEQ ID NO: 11461 - DNA, 560 bp, Glycine max
tcaagctgttcaattgcttcaaattgttgcacttaatggctaaggtctgtgtggtggtcggcagaggagcataaaccacagagtctggcgacaggttcagatttttgattcatggccagttgggttactaggttaaccaaggcatctagtttatcttcaagcttcttaatctcggctgatgaacattaattcgtggctacttcatgcactcttctaatgacaatagcatcacttctagtactaaattgttgggagtttgaagccatcttcttaattaaatttctggcttcagcaagggtcatgtctccaagggctccaccactggcaacatctatcatacttctctccctgttattgagtccttcataaaaatattggaggagaagctactcaaaaatctggtggtgagggcaactggcacatagtttcttaaatttctccaatatttatataagctttttcactgagttgtctaacgcctgaatatcctttctgatgtcatggccctgaagcagggaaatttttttctaaaatactctttgagtcatcccttttcaatt

SEQ ID NO: 11462 - DNA, 1183 bp, Glycine max
  unsure (1)..(1183): unsure at all n locations
gccactccgatctgtcgactaacacctcttacagatctaagccgtgaaatatccgtcatctgaacaataaaccccccccaacgcaaccctattttgatgctgctctttcgcnccgggtaccttaaactgccgctggcgggctgcacacttgttgacacttgaccgaaaaattctttttattggggcttagaaaagaggaaaggttggtatacctgctttgaccaatgagaacactggggcccaagatcaaggggagagggatgatgaacccacacctctgtgcgctgcgccttccaaacaagggggttgacaaatcggagcaatcggcacctaatcctatatctactacccactagtttccaaccccttggggtgggccggacgccaccaaacgtaaaacctcaattgtcttgccgtgtctcacaaacaacggcccgagaaatgggaagacatcgacgcgttatgccgatcgtctccccgacaattggcttccgataccatccccaaaggaagggtatggtacccgaattcaactgcacaaacacgaaccgggtgatgggtgagctcctctacaattggcgttgccgaagattcgtgccttaatttccgatcgtccaagggggtagtaccctcatcccctgcggatcccaagaagctgccataggggggtgcgtgtttcatatgcaacggaagacgccacaatgttcacacggcgcgtcgccgcanctaatagggtggtaagagaagtgtgttagagtgccactcttcactatcgtatcacctctgctcgttaagctttcgccaaccgtntgagtgtgcgtggagagaacttcaattggacacgcaagaactgtgactttcacatagtgtgtgtgcgcgaacatctgtcgtgttgactatatcgcgatcacacattggcccatctcncgacagtcacacttctccgcggtggcatctctnttctctcaangacggcgctgggatgtgaacacctctgccatagtcaagacacgcacatatctcaatgcgtgcgcacgtttctaacacgtgttcattangtgagtcgacgcacaatggtctccatctgacctcgatacttacacacgccatgtgactaccacagaatcttctntgntgggtcggctcgaacaccgctgccagtaatacaccactttctctgtcg

SEQ ID NO: 11463 - DNA, 213 bp, Glycine max
gttgtgttttattcagaaaattcgagtttatctgttttatgttaccgagagtgataatcctgaattcttgagtgattcaagaacacccatgctgtatttaaggactttcacaacctttgtgcgttgccctcccctagaaacagcgagactttccttcctttcatatcctacacctgattgttctgccgcagatacaaaaaatccactttttcc

SEQ ID NO: 11464 - DNA, 718 bp, Glycine max
  unsure (1)..(718): unsure at all n locations
ccccccaacccgaaaaaaagccccccaacggcaccatcagcacacgacaaccancnnccccnnnnnggggcatcctcgaacccgacnnaaaagaacgcagcagcagcnccacactgggggggaaaaaatttggaggccacccccccggaaaccccgagaaagacagaccacaccccccacaacggaaggagaaagaaaccccccccaagcccccgcccacaccaccaaagtaaacgagagggcacgggcaacacacgggcgcgccagacgacgccaaccaggcgccccccaccagcgacaacaaccggagcaacaccaaacacaaccgaagccgcgagagacacacaacccccccccgcggcgcagggagacccgaccagcacacaccaccccgaacgcgacccaaacgagggaccccaagaaaacacacacgcgccagccccgcccccacacgagacaccccagaagagccaagagggacggcacacgcaccagaccaccgcacgagacacgacacgacaccgcacaccacaccagcaaacgggcaacacaggccgacacaggacgaaccacccccagaccaaaaaccacgcacccagaccacaacgagacgcccccgaggaaaccagacacagaacagaccaacaggagacgccaacaccacaaggagagaccacaacgagacccaaaagccaccacgaccacaggacgccaaccg

SEQ ID NO: 11465 - DNA, 447 bp, Glycine max
ttgaaactaagcttgcagactagtgctaccaacctagatagaatccctctgttgtttcatgtaaacctcttcttttagatcaccattcatgaacgccattttcacatccatttgatgcaactcaagatcaaaatgagctactaatgccaaaattactcgaagagagtctttcttagatacaggggaaaaggtctctctgtaatcgattccttctctttgagtgaatcctttagcaacaagtcttgccttatgtctctcaatgttgccttctaagtctttctttgtttcgaagacccatctgcatccgatggcttttacaccaacagacaactcaacgagatcccaaacttggttagatgccatagaatccatctcatccctcatagcattgtaccacaaatttgattgcttagaactcatggcttgtgaaaacgtgtcaagatcatt

SEQ ID NO: 11466 - DNA, 321 bp, Glycine max
agcttcccgtatccgtacttggaaggatctgttttctgccttcctaaggcaatatcaagacaattctgatatggctcccgaccgcactccactggaaaatatcttcaagaaggagggtgaaacctttaaagaatatgcgcagcggtggagagaattggcagcacaagtagctccttccatggttgagagagaaatgatccccatgatggtagacactttaccagtgttctactatgagaagctagtaggttatatgccgtccagctttgccgacctattattccccggggaaagaatcgaggtaggattgaaaagaggaaa

SEQ ID NO: 11467 - DNA, 400 bp, Glycine max
agctttacagatttggtcttcgccggcaaaatgttcttagcgggtctaaaaaaatgcaaatttgatcatcctgcttggatgaatgaaaaaactggggcaaatgaagaggatgagaatgaggaaggaacccctgttgaggctggcattcctacatggccaaactttccaccagctcaacaacatcattactcagtcaatatcagcccttcttattaccctccacccaaatcaaccacaaggcctacctgcttaccccacacccaatgcccaaacaccacctttagcgtaaaccaaaaaggaatttttcagcaaaaagcttgtaggattcaccccaaattccggtgtcatatgctaacttgctcccatatatacttgataatgcaatggtagccataacccc

SEQ ID NO: 11468 - DNA, 283 bp, Glycine max
ttgtgttatcgattacactgatttggtaatcgattaccattgtatttttctgaataaatcaaaagatgtaactcttcaaatggtttttgacttttccaaactggttttaagctttttctaaaagtcataactcttctaaatggtgctcttggccagacatgaagagtctatataagctaggctttgatttgcttttaaatacacttttccaatcaatcttatacaagccctgaatctctttgaacttcttcatcttctttgtgccaaaagctttccaaagctt

SEQ ID NO: 11469 - DNA, 219 bp, Glycine max
gctttaactttgtttaagaaaaagattgtattttttgtataaaacctacggaaggttctcttttgaccacttttccagctattggcaatatcgggtgcattaaaaaattcccatcagttcatgggtatgtagagaaaagaggcttcaatgcctttgatgtacgcattacaaatgcattacttgatttggatgcccagtgtggatgcatagctagtgtga

SEQ ID NO: 11470 - DNA, 398 bp, Glycine max
tcagccaaaccgctaagagacaccttatccatggctaatctctactcagtgttgccaagcacaattccttacgaccaaaactgaggttcatgaagctaagcgccagtaatggcagctaagctgaatcccttgcgacaatgttagcactaagcgagtccttatcagctaagcgcatgctcctctgtacttaaaatgcatcattttagctaagctggccatagcctggcttagcgagagttgcagcttttcgaatctgcgaacctcgctaagcggtcttatccttgcgctaagccaagcttgtgtgaaaaagtaaaaaaaaattattgttgggaatttgaaacatcggctaaacgcacgggtccactgggcgagcctcgtttagaaccaaacgtttctct

SEQ ID NO: 11471 - DNA, 443 bp, Glycine max
agcttaataaaggccttagagatccatattgtgtatttgtgattgcattgaatatgatgatgtgaaaagttggcgattataactttagtcgatttaaatgaaatacacataaccgaaaacacttgtgtgcttgagagaaacactagctttgtgaggagtgaaacatagttgatctttatttgatacctggcatacttgctaacctatttcaaactctgagggcattctttacatgatcccatcatgaaaactgtgacaagtgtgaacttgagggatggaagctaaaattgttctaaaagtacgcaattatctcagctgttgtgattcattacatcctaaacattgtccttaatctaacttagtgtaggattaaattactttcgattggggacaaacaaagctctaaaattgggggactttgataatatgtatgcttacgtaat

SEQ ID NO: 11472 - DNA, 457 bp, Glycine max
taggtttcatttttcagattcatgcatggtgccttatcccatgggtttcttgtatttatgcttcttgtggatctaatatgtaattaattcagaaatgtgtgtatatatatatatatatgtatatatttgcaaccagctgggtgctttaacactcaagcatttgacaaatttcagtcccaatattcaactgcaatgattcacactagcttcattcaattcctgagtttattagggtttttttctgagtttttagagagaaaatgaaatcaggaatcagtaattgtatatcagaattatgattttgcctcattgatctttcatgattgaattaaatttatatgattgtacacaaggttgttggacaagctgaaacctatctgatggttacatcattacagcttgcataactaactataacagaaacccaactcacttggacactctataatagaaagag

SEQ ID NO: 11473 - DNA, 487 bp, Glycine max
  unsure (1)..(487): unsure at all n locations
tgcattccagggcgggaatttttttttattgctgaaggagcgccctggaagcccttgatgaaagacttgactaccttggcccaaacatggagtgtgttatcatactccaaccttggccccacttcttatacgtccgatttgaatatggaaaggacgaggttagtctattggctagtcatgaagatggacatggatgtgggcttcctcatctcgcatcatatttctcagatggaccaatccaactcctcgaggctcggttttccagcctttatttccacactctgtgtggcctgaggagtantcttagattctctgactttcgagtctctcagtcctgccattaatttggcatacataaagaagaactattatgaccttgacgatcccaccatcatattttcagggacccgcaaggcacgggcttaaagatctgaaggtccatctttctctgctacccctgctcttgctttctctgcacctgctccct

SEQ ID NO: 11474 - DNA, 324 bp, Glycine max
tatctagattatgtgccagatattcgcgaattacattttgtctatgcggaagatataattcatcggcaaaatctgcctcccaaagaaaatatttgggcattggtggctaaattaccacaagtttttcctatttctcaccttgacgacaacgagagtcctttacgtgcggaattgattatcttaagcatcatccacacatcaccattgtgttcactcgttcactccactcaatataaacgataaccgtggaccagcaaccttatggctgacaacaccgcttgggtgcttaccaatcgacagttaacacctacccatatggcgcaa

SEQ ID NO: 11475 - DNA, 862 bp, Glycine max
  unsure (1)..(862): unsure at all n locations
aatgacgagctgaacgaggcgaacacnccaaacaaacccnacacataccaacaaaacgacggaatatatactcaacccacacaaacacaccacaaggttatgccttcataagcccgaccccnannaaanaaagcaggcaggcagcgagcccgaatacaaacaaagaaagatctttttattgtcctactaaggcaatatcacggcaattctgatatggcacccgaccgaacccaactgccgaatatgatcaagaaggagggggaagaccctaaagaatatgcgccacggaggaaagaatgggcagcacaaagaagctacccccaagggtgagaaaaaaaagatcaccatgaagggcgacaccttaccagcggtctactatgagaagactagagggaatatgcccggcaacttagcggacccaagaaaccccggagaaaaaaaacaggtcgggacaaaaacgagaaatgttgaaaacgctaccgccacgagaagcgaagcacaaaaaaatcaggacacaccgggccaaaaggagggagggaaggcccgagcgaacgtatgaacccaaggggactactccctaaagaagctatggccccactgggccgacaagggcaacagggcatcaccacaatacggaaacacccgccaccaaaaacgggacccacgagaacaataacgaagagagcgacacccaacgaccacaccaaaaaaagagcgcaaggaacgataatgctcccgaaccaaaccgggtcaaagacgccagcaagcggacacaaagcacacacgcggccgacgcacacccccaaagcagcccgacgacgaatcatgctgaagataccacgaccgccgaacacaaacacgc

SEQ ID NO: 11476 - DNA, 844 bp, Glycine max
  unsure (1)..(844): unsure at all n locations
ccgccgcgcgccacganaccagccaccntgtctcaaggaaacaccaccgtatcatgccataactanaaatcctccacacctaccacccacgccccannnntnnntttgattctgtggcatgacgcgcactananacaacagcagcttggacgagagtcatccagagaatatacagatgcgaccatgacatgagccccaaacaaacacaaccacaaatcatcgtcaaacatcaatgaaccacctgccttgcgaaagaaacaatcatcccctaccacaaaaccgccagaacgccatcgccatccaccccgaaaaaacaaatgaaaaactcgggctccccccataaacaagtcaatggcaaaagaaagggtccacctccccgaaccccaaacacaaacgccctggcgcgaaaaaacaaaaagaagcccagccgccaacacccctaaagaagcgcgggacccccccgagtgcgacggcgcaaaccccccggagagaaagactagctacacccctagcccccggaatgaaggagacccccctctccccaccaccggagaagaaatggcccccccccgnntntcccccggttggaaatccaaaaagaaggggatctccccagccactgggccacggcccacacgcgggggggctagccctctcgaaccccggggatccccccaacccgcagaggggggaagacccccgaacatcccccaccgggagataggcgaccccccccccaaaggcgcccagcagaaaagacgaccaaaaggggaaacccgccgcaaaaagaccccgcccacgcgatgacccaaccaacgagccgggaccccccaccgcccgcacc

SEQ ID NO: 11477 - DNA, 338 bp, Glycine max
aaggatatccgagtcatcaaaatcatcgttcaaactgatgaagaaaggatattaagaatggaaaaccgaaaacactatttacccattaataatcgagagtagatatatctggctggcgtgctaataaaagctgcctcacctgcgaaacatgtgtattattgtgcgtatattttgagctacaaaaggtttaaacatgacgtagaaagtaaattcccgtacggagtaaagatttggatcttcaattatttattatagctagcagacaggcatgtaaacagcccgtagccatcaaaaatgaattactacaagaagaacgagactgcatccaaaaacaaacg

SEQ ID NO: 11478 - DNA, 452 bp, Glycine max
  unsure (1)..(452): unsure at all n locations
ggagaaagagacaccttttggttgcaaacaatgtatttttttaagtgtgacacctaaattccaagcatgcaaaggttcaacatagaaataacaaaactaagataaataaataaagggggggaagagttgaatttaatgaatggattacaattaccaatggtgggggaaagatcttcaacagaacttgaaataaagctgacaagtaggctactttttcccaccccggaatctccaatcaacaagatcttgaaagagagatcatagccactgctctgacctgaggatgaactcattctctcttcctctgatgaatgtcttangtgtgtgtgtcaaaaagtacagtgaaagaaacgtatgcaagggtgagagagagaaagaagcttatggtgttgggctagggaaggctaaactgtaaagaagtgcaatggtgcaagccctttcttttatttggg

SEQ ID NO: 11479 - DNA, 421 bp, Glycine max
agcttcaattctggtgtggttggctggatttggtagaaagagatgatttctcagcctttacctcataaagaaagtcagaggtatgtgtacttcttgaaacatggatagtcctatctgactctataaaatcaatctcgagaggtaaaacaccaccaccagacatgcaatcaatatcactcttagattcactctcagcatcaaattcagacatatgatcaagtacaatttcacactcaatgcatgaagagtgagaggcatgcataatagagtaaagatcagtcatgtattaatcaacaacatggtcaataatttcagcatgaaatacagaaagatcttcagatgggtatttcatagcatccagaatattaaaatgaacatttatatcaccacactccatggatagtgtgcctgcataaacatc

SEQ ID NO: 11480 - DNA, 378 bp, Glycine max
tgagatgaggaagtgttgaagggtgaaacttcctgcttttattgttgaccacagagtggtacctggagatatgtcgcgggggtcaggagaccttggggacgtcaggtggggtgctattgcccaaaaccaagcttgaccaatcccgacccaacccgggcatagtcggtcagtgagaacctgtgatgtacctaagcaggcgagctcctggcagtcaacagataaaaggaaaacaagaccacaaagcaaggaggcttgtggtggctggccagctgtgaattttgtgtaatatgtgagatatggcctctggtaatcgattaccaagggtgggtaatcgattacaaggcttaaaaatgaagacaggaggctaagatggtctct

SEQ ID NO: 11481 - DNA, 379 bp, Glycine max
agcttcctcggggccattcctgcgaaggtttatatttggaaagctagtttttaccaagaaatgctacccttaaaacaaaaatggcatacaaccccctccaataaatacaaacatcaatgtgaatttagagcaagcttatgcgcccacttctttacgaacgttcacttgcacaagacattcttataactaataaaaatgcacccatatacaatcaaggcaccttcgttacctagattattcacatgttcttccaaggtgtatttgttacctacatcacacacactttcttcgctaaattacaaacatgcatactctaagcactttggctatcaaaaaatgcatacgggcacaatcttggtatttctaatacctatacata

SEQ ID NO: 11482 - DNA, 594 bp, Glycine max
tactcaagcttgcatttggaattgcgaaagccccactccatcattttgtttttttcctgacatctcaaacaaacaaatcaaacgtaacaagacaattatagttgctgtttgaatacctcacccactcaagtgtatcacacaattatggcttttctctaatgaaacactcttgccttttaccactctaattccccttgagttcttaggcaattcaagagattatggccacaacaaagaacaattcaccaatatgtgtaaggtaaggctagagagacaaggaaaaggttaaccaagaaaaaggctaacaatgtttttaggcacaaatgaaggaaataaaattcagaatttaggaattcaagtaacaatccttcatgcaaccaatatattaccttaaagagatttttttttttaaaagttcttcaagcatgaaccattcagcccaatttttttttttttttaattttgcttatacgaaattctgcttctttttttttatatcaaaagaaatcaaaaaggctgaactttttgcaaaggttcagcctaaaaatatatatatatatatatatatatctatctatacacatatcaattata

SEQ ID NO: 11483 - DNA, 488 bp, Glycine max
gagcttctcaaaagacgcacaatcgatttctttaactacgaatcgaataaaacagagtttatgccttatacatatgatgatgcctgatggggctatggatctattaagactaagatgcaacaaccaatacaaatgtcactcaatgagttgggcatgtaaaaagacaaaactcttcaaacatcaaggcttaatcttcatgttgccccctatctctaacaatctcctttttttgcctagatgatgcccaacttgaattgtcatttaagtgcatttggagagtcttaagagtagagacttttcttgagataaacttgaaattatctaaaccctattgccaagagatgtgtcaaatcatatcatcatcatcatcatcccacagtagagttgtcaaatgactgaataagaatgtatgtatgcaatgcactacttcttccctaatgcaatgcttctctcccttttgcataacagggccaaaagtgacaacactc

SEQ ID NO: 11484 - DNA, 441 bp, Glycine max
atcatcatcaatcatctatctttcaatcttctctcaacatcattcaatatctttcattctcttcttcctttgcccaatgaacgaaggactaaccacctgaattcttttgtgtctctcttttcccttacaaaagattcaaaggactaaccgcctgagaattcttttgattcttcccttccccttaagcaaaaaatttcaaaggactaatcgcctaagaattctttgtcccaacacatttgagggtacatcctttgtggtacaagtagagggtacatctacttggggattgttatactcagaacaagagagggtacatctcttgtggatcagttcaagtggagggtacatcaacttggtttttcaaagcgaacaaaggaagggacacttgtggatctttggcttgtaaggatttaccacgttaaaaaaaatctcaaaaatcca

SEQ ID NO: 11485 - DNA, 930 bp, Glycine max
cccaaacaaccaggcacgcgaacagatgcatgacaccgactctcataatgcatccaataattgacacacgcactcccccaccccccaccgagggttaagctcccgtaccgcgcccgcgatacattaaactgcagccggcgagcggcaaggtgaactcgggcgaccccgtgttttttgtaaagaacaacggagagcaaacaccacgacgacaaatgagaggacgaatgacccgggcatactctaagcacatgcgccgcgaatcgaagaaagaacatgagatgccgagaaaaacacccaatactacatgacccagcaataaggaccaaggtcaataatttagtttctagatgcaaaaggtctataatcccaacataggatggctcatggagactcacacaataaaacaagaatgaatcgagaaatgtccaccacgccccctcataagttgagtcctcgagaggaaaacgcaaagatgagcacccaaagagaactaacggtctggcaaatcagcaaaccaaaaagggtagtcgacaacccatgccggaagagggcctcgacaacagcaccaaagtgaagcttggaacatgccaactgaagggcagcaaggttgttctccatatacaagggtctagagaaaaagactacaccccgccactcgaaggaaagaattcaaatcgacaaaagaagacggccacaccctttccaaaacaaagccgcatggtaaacggcgaacaccggcctagtgatatctccaccccaaggcagtgttcccactaacgacccccggatggaacacctaccaaacgacccattcatccaacgtctcactcgatcgacacatccggcggaacacacgatcacatccaggcggtgcgtcggtgacatacggcgcggcgacatacacctttcaagacgccatgccgactcccg

SEQ ID NO: 11486 - DNA, 774 bp, Glycine max
  unsure (1)..(774): unsure at all n locations
cggcnttgtgatgaatccctgtacaacccnccnnnnnnnnnaancccgcgccacgtagcgccgcaaggggagagctgcagcttttttctttttcaccaaggggcccctgcagatttatcgccttggacgaaagaccttgccgacgttgtggggggtgcattttcccaaatcccctgtggccccattctgacacaacccgggcacaccttgtcagtgttaaccggggatggtcctaaactcgcgagctactggcactgcttggtctaaaggatcacgagagccccttgcacagaggcttgtggcagctagtcacctgacaactgcgcgtcatatggcatatctcgtgagtggttagccaccaccacacgccggcaatatggtacaatggttaagaaagacaagacgttgccaaaagcggctctggtcttgctttatcccgaagactttccttttatctctgggctgaacgcctgaacaccaccttgctttttccccatctaaatcccacctacgagagggacttctaccccccttgtttaaatttggtaagggaggagaccaactgtccacctctttataattttggaaacccccgctcacatttcggccattttaacccaaatgaaaaacatggttcccataatggtgcccgaaatttcctgggtttctctcctaaacgcataccctataaggttttctcctctaaccccaactgggatgtaatcctcatggggtgtgtcgagccatctgccccctaaaaaatgccgtcacact

SEQ ID NO: 11487 - DNA, 233 bp, Glycine max
agcttgtaatcaattatcaaaagtttgatatttttatacaacctttagaaatttgaatttagatttcaaagtctgtaatcgattacatagagtgcatgtaatcgattactagagataaaactcaaaatctcaaatatgaagaggtacaactcttcagaaaataactgtgtaatcgtttaccacccaagacctatatataggggacttgggcaccaatttactaagagtttttt

SEQ ID NO: 11488 - DNA, 455 bp, Glycine max
ttaatgtaaaccttactctcagattcaatgcactttatcttctaacaacgcttcaatctcctcttaccttttgcctttggtgtctgataaaaataaattttagaaaagtgtggcacacaccatcaccccaccaagcacaaacaacatgcctccaaatgttattgcctctaaaacactaaggaatgtcatggacacaatcccacttatcaaacggttcacaaaaatggccaagttggaaccttgggccattagccttagagggaaaatcttagaagagtagacccaagttgtcagcccacgcccaatacaaaagcatgatactgcaacatagacagcaaccacccacaaagcaatgacccattgatccttgttatcaccacataacttaagcaaggtacattccaagcccatcacaaacaatgagattgccatgctacatgagcctaacaacaaca

SEQ ID NO: 11489 - DNA, 454 bp, Glycine max
tagctgtagcctccagttgcatgacttgttaagcatcttgaatgatccccacttcctaatgttttgtttttttctctctcatattcttatcatatgtgttagatttcatcttaaaaccaattaacattaagtgaagttgtccaacagatctataagttgcactctaagacagccgatgtcggacttccaatgcacccccttcacgcccaacacttattaagcttggtgcgtgaacaacaaatggtgggtgctcatcggaggcgagagcgatgtcgcaggtcaaagcatgctttgatatcatgttagatttcatcttaaaatcaattgacattaagtgaagttgtcaaatatatgtatataagcggtactccaaaacaaataatatgagacttggatatttttcaataatatggaaacaatttgtgatacccgggcatcataaattgatggtttt

SEQ ID NO: 11490 - DNA, 401 bp, Glycine max
  unsure (1)..(401): unsure at all n locations
agagtcacctgcggcatgccagctncatggtgaatcaaaggtgattccaatgtgttttgatgataacaatgatgataattaaagatgatgaccaaggagatgaccaaaagctctaagattaatcaaagaacaactccagtgaatcaagaacaggtcaagaggtcaagataagaatcaagaagaattccagactcaagaagaaagtttaaagtccagaatttagattcaagattcaagatctcaagaatcaagatcaagaatcaagactcaagattcaagaatcaagagaaggcttaatcaagataagtttgaaaaggttttctcaaaaattgaatacaacatggtttttctcaaaaaatgtttaccaaagagtttctactctctggtaatcgattaccata

SEQ ID NO: 11491 - DNA, 501 bp, Glycine max
tgtgcttgttttatttaaattccaaggatcatgagcaactatgtgtgttctgctatgacttgaaaaacaagagtgatcaaataacaagcagagatttaaaaggtactaggttgcctcctagtagcgcttctttaacgtcttgagctggacgcgtcatggcttgtcagtcacggacctagtactttgcttacctttggctttggacttggtcgcctattggtcggccatgggtcgtaagcaacgctctaacctttttatggatgagctgaggtgaactttaaaggtgatggcggtgcgtctgttgtccgctgccggccatccccaggccgctgtggtgtttcgccctgcgcctgcctggggacgcagtacttcttgatgaaagctcaattagtaaggagcctgatgaccttgctggaggtgacagacacttccgagaactgacagagacccgtaattagagcttgacaacctccagaccctgttggacttttctggtccact

SEQ ID NO: 11492 - DNA, 521 bp, Glycine max
ctcttttggtacaacagagacggcaataacttcgccacaccataccctgaaacgacgatcatccgatcattctaccgccgaatacgcataagctaccgtccgaccaacgcgcgatgcccacgccgcgccactacctcgacaataactcgtcccgccaaccacacaggtagaaatccacgctcaacacgccggatgtccaccacatacagacccctaccgtaaacgtctagcataccctggactaaaacacaccaaaccacccaacagtcctcggcaccctcacatcccccccgatcatacacatctcatacccatcgtgctaactctaaccctctccgtctcacacgctgccacccaccccacaaggccttgcgacacatatcgcacccctcacatcaaacactcaccatcatgcttcatatccatccacgccgtaacataacacgagcacaacagcacgaccagcccatgattggtcaacagttgtaccacgcgagacgcactgcacacgaagtaacccg

SEQ ID NO: 11493 - DNA, 415 bp, Glycine max
tcccgagttcaaggtcgcgaaccatttttacaagacatcaacaaaaagtaaccacagccttctcactggatattgggtgtgaatgatcccctacattataagaaattaaactcagttgaatatgactggacagtgtcaacaacacaaggacacaagtgaaaatcggtctcctacatacagaaagagcaattagaatgggcaatctatttcgacatcttattgttatagatttagagtatattcaggcagccacggaagtagtatcaagcgcaagcccagtgtgcaccagatgacaaacaggaaacaataaacagagaatagataggcaacaaactagagaaacaaaatgaaaaggtcctgagggcctgacaaaccccatgaaccaaacggagacaaataataacatggggaaccc

SEQ ID NO: 11494 - DNA, 582 bp, Glycine max
  unsure (1)..(582): unsure at all n locations
tcaggttcaaagacgttaacttgtctttccaatatttatttttattgtatcataattggncaggtctgcgacaccacaccgataaggtttccacaatgctttgttaattaattattaatttattcacaatttttagctgatgccacacccactggcaatatttctttaggtgaagaaatcacgtttaggagttaaaaaagctataataattgttagtttctgtgcaaattgcatcccaaatgtgaaattagtccaccaccacagacaagccgacacaacagacattcacctctttatgatttttttttacctcgtatccaatttctaaacctagtactactattatgctaagtatttcttttgtgcttaattaccaccttacatcttacgtgttgcagttttccataatactttccacatgggtttgcatttttgactaatggaaaaacaaattctttccttatattggtatgtacaaagttgcccttggaatcgggtgcaatgattgagtgaatggttaaaaaaattaaacgcaaattccttgtttgttggtggagataaattagtccctggttgttttgt

SEQ ID NO: 11495 - DNA, 474 bp, Glycine max
agacctgctggcaggctagcgcgtatcatttgatacaaatgaggatttttttgtttcctacttcactcaagccaacccccataaaattttgcgtaaaaaactcggcccttggcatatttcaagaatggttgacctgaagaagaaagacatgactagaaggctaatgggtgttttctcgccaaaatgcaatgcttgccactttggtaaaccaaaaatataatgccatttcccaaatcaacttgggagaagcctcttaaagaagcaactaattcaccactaatgtgggagaaccctcaagaacaccatcactaccaggtaggtcatactttattcttttcatagatgatattacaagaatgtgttggatttttttcttaaaatttcagcatgaagtggctagaggattttttaagttcaagaagatggtggaaactcaaagtggctgcatgaatcaagttctaagatcccgatatg

SEQ ID NO: 11496 - DNA, 497 bp, Glycine max
taccaataagtataatttatctaaaagaaaattgttttctatgtcgataatcactttagaaaacaaaaataaatatcacaccttgagataccatagattgatatttcttgcatttatttatcataattattcagacgttgacctatgatgctctattgcactaacttcaaatcattttgagcctttttttgtcatttttcccttgatttgccttagacttgtgtagcaaccactttattagcaacaatgtttgagagcccacatcaatcatattttccttaattccatttataatataaaatttgttgttacaatacttttctattatttttccttccatcgtcaacaccttttattatcgatactcattaattgcttggattggtgtgtccactttccttttaaaaccataattcaatattcattacgttattaatgtcgttattttcatttgcagccctaagatgatcaggttttcggggatcatgtcacattga

SEQ ID NO: 11497 - DNA, 328 bp, Glycine max
cttatgacataataacgtaaacaaattttttcttgtgaatgaataatgggaccgaacttgaaaggatacacctcccttttttaatacgactcaatggtagtagagggaatctcttttttaatcaccacagttagcttttgttagggataaaattcaaaaccagacctctacctcagtccctcatactttctcctttctccctttgccccctaagttagtggaagaaaaataatagaaaaaatgcattattaaaaattagatatttatttgtaaaatcagacgcacttaaaggggcatgttccgaaagtataaagttgctaatgaaaaa

SEQ ID NO: 11498 - DNA, 405 bp, Glycine max
tataagaagggaagagagaggtttttttttgatggggccatgcaagggtaacccttcacataaaggggaagctactttggaggtgaagttgcaactcgagtgtcgtcccaaattcttaaacaagggaccaaagctgacgtctcaggtagttttaaatcaatgaaatgagaaatcatttcttttttgggtagatcttgcgcacatgttctgtgttcatttgtcctcttttctttttagtcttcatttaacatcatatatttaaactaaataagagttaacaaagacttgtatatgtactatcgtatgttgatcactctctggcttattatacttaatattattgagttatttaaccaaggtatataatatttgaaagattacagaccatttacctaaagcttttta

SEQ ID NO: 11499 - DNA, 947 bp, Glycine max
  unsure (1)..(947): unsure at all n locations
cccccaccactccaagcccagtccaacaacaacaccgcccaaagtcaacttagaaaacccacaaccaccaccacaccccncaagaatgaccatcgtagacgcgaccnnaagngaccgcagcagcaaccnaccaaagccaagacaccctttttggaaggaagcaaccgactcaaacgagggatataagcaacaacaggtcgctatccaccccctcacaggggagcggaacacaaacagaaggcgccaggaaaggggtctgagcgaaaggcacgaaccacactattcgaaaccggccgcgggaacagcactttcaaagaggtaacaccaaaacacagaggcgggcccggaactaggaaacgagcgcgaccacccgcagaacctcactggaaaaagaacaatgggggtggaactgcaccacatgcaaacaaaacaaatgagaataggcgtgcggcggcatgaatgaacacaacccgaccgaaaccaacgaccgggaccactgccacggcgggcccacatacacaccacccacaactggaggaggacgcccaccaacccaaaacgcggcacaacggcgaacgcccccgccaaacaaaacacaggacccaacctacatccacacccaccccaaaaccccagaccacacgcccaccacaccagaaccaccacaacccacattgatcgacgaccgaacaccccacgacccacacacacaacagacggaacacccaaccaacaaacgcccacctatacaacgaacgaccgacacagcaagcaccacgaacacaacaacaccccaccaccgaactaccacccacccaccgacgaccgaccaccaacgcgacgaccgcaacaagaacaccgcagcagcagaccaaacaagagccaccagcatcacacaccccgacaactcacacaaccacgcgcacgaacgacacacccacaaaccg

SEQ ID NO: 11500 - DNA, 169 bp, Glycine max
atcctcgcacgcagaatcaacacgcacgacacgtccttggccttccctccttccctggcggagacatccgtcatcgcaatcgatgggggcggcgccgacttctcaaccaccttcgcagacttcacccacccgcccacgaccacgcgctgccccaccgccgactcagacc

SEQ ID NO: 11501 - DNA, 182 bp, Glycine max
agcttcttgaggttgggcagtgtagcattattgttaccacttaaatctagcctttgtaagcaacacataattccaatagcatcagggatttcaactaaattacagaaacttagatcaagttcacgcatacatggaaatattggggaggaaggcattactcaacttacagattttttatgttc

SEQ ID NO: 11502 - DNA, 535 bp, Glycine max
cttcttggctgttgccttgaaggacaagaagaattacttttttttttatacgtggctaatggcagccttaactccttcatatttggtatgcaataaatgaagaatgcttaaattaggttcacttgtgttctttcttttctttgagttatacttagcagcttattaatcttgaatatctaatattgaacaatactttttaactccttcagatcaaataaaaagtaaattattggattggccacgacgcttcaacataatacttggaattgcaaggggactattgtatcttcatcaagattctcgattaaggattattcatagagatctcaaagcaagtaatgttctactagatgaaaagttaaatccaaaaatatcagattttggaatggcaagagcttttggaggagaccaaaccgagggaaacacaaatagagtatttgggacttactgagtgtctgtctaattataatatacaccacatttactatttatctattcatttatatttgggttaatgtgaattgattgctctaat

SEQ ID NO: 11503 - DNA, 884 bp, Glycine max
  unsure (1)..(884): unsure at all n locations
cgccactgaacagtcagctctgtccgacactccgcacacctcccaccgtttaacctacgtgcatctcacacactccacnacacacacccccnnnnaagttgatcgtgtagnacagccgaccnnnagaatnnaaccgcaagcatgcgagccttaccctcaccaacacataaacacattttctttttaatgcatcacaccggacccctatatgaaaatggaacttttaccctgggcccgcaaggactggtgaccctttcacccggaaagtcatcgcctgcaatagaccaaataatatcctaagatataaagcctaaagtgcataaatagagagaggcccccatggcaaggtagctaaccagccacgaatgcgaaaacgaatattgtaacaaagaatacccctcatatgcggagtgcagcatgtccaaatcttgacccaaactgaacgggacttggccatcaccgtgagagcctgtagcaaaggcaacactggtattaatgaaactccattgggagaactggggataaacccaaagtgacagacaaatagtcattataatacgcccactcaagagggaccgaaaaaacgccctaagacaaagtctatcaacaatcaccagggagttacgattaaacgggaccgttcaggccccagaaataacgaatacataacggcaagctaccaacgcccttcatactgggatacaacgctcaaggacccccagccataaccaccgacaagacagacatgacaccttcacaacccaactcagtaaccaagatgccagcgccggaccacactgtatacggacaccccacgaacgagaagagctagatcacactaacactccaccttcaccatgagacgtcaccacctcctgcaacgc

SEQ ID NO: 11504 - DNA, 514 bp, Glycine max
  unsure (1)..(514): unsure at all n locations
aactcaagctttaccaccaagagagggccttggataagaagcttttttttttttcttcaatggaggaagagagtgagagagagagtgtggcatggaaattgaaggagaatacggagagaagttgaactttgaagtgtgtattacaagtttctcattcatcaaagttatgacaagtgttacacatgtttttgtttataaccaagcacatgggaaacttccttgagaagcaaggaaggtagtttccttaggaagcaaggaataaagcttccttaagaagctagagggggggctacttacacccctccaatagctaagctcaccccatgcccaaatacatgaaaatacaaaaaagttcatactacaaagactactcanaatgccctgaaatataaggctaaaaccctatacttctagggtacccttaacttgtacccttatttgtaaggaccctacaaacctaaaatggccaaattccaggccccaagaaggaaacctattctatatttacaaaaaa

SEQ ID NO: 11505 - DNA, 395 bp, Glycine max
agcttgcctcaaagaggtccaggaatgactttgcggtcgaaggaactagttccgctccggagtacgacagtcaccgctttaggagcgctgtacaccaacagcgcttcgaggccatcaagggatggtcgtttctccgggagcgacgcgtccagctcagggacgacgagtatactgatttccaggaggaaatagggcgccggaggtggacatcactggttactcccatggccaagttcgatccagaaatagcccttgagttttatgccaatgcttggccaacagaggagggcgtgcgtgacatgagatcctgggtaaggggtcagtggatcccgtttgatgccgacgctatcggccaactcctgggatatctgttggtgtggaagagggccagaaat

SEQ ID NO: 11506 - DNA, 373 bp, Glycine max
aacaagacaacaaaggaagaaagaaggttgtcttctaacccggagattgggtttgggtgcacatgagaaaagaaaggtttccggaacaaaggaaatcaaagcttcaacaaaggggagatggaccatttcaagtgtttgaaagaatcaatgacaatgcttacaaagttgagcttcccggtgagtataatgttagttccaccttcaatgtctctgatttatctctttttgatgcagatggagaattcgatttgaggacaaatccttctcaagagggagagaatgatgaggacatgaccaagagcaagggcaaggatccacttgaaggacttggagggcctaagacaagggcttgagcaaggaaagccaatgaagc

SEQ ID NO: 11507 - DNA, 499 bp, Glycine max
  unsure (1)..(499): unsure at all n locations
agctttaccttcacaaacacataaacacattatttcattaatgcatcacacggtactctatttgaaaatggatcttttactctgtgcctgcaaggactgctgacccttccacctgatagttcatcgcatcaaatagacaaaatatatcataagatataagtctcaaagttcataaatagagagagccacacagtcaaaataagcaaactaaccatgaatgcaaaaacaaatattgaaataaataataccactattatgtgtagtgcagctttccaacttttgtacctaactgaaggagacttgtcaatcacttgagagcctgtagcagatgcaatactgtaattaatgaagcttcattgtgagaactgtggtaaaacctatagtgacagacaattagtcatcattatacgcctcctcaaagttgacggaagaaacgtncataggacaaagtctatcaacatttacctatgaatttattatttatagcgacagttttttg

SEQ ID NO: 11508 - DNA, 472 bp, Glycine max
tctaggtatttttagagaatcaacttatgatatttgaggatctgattatagtctcagaatgtaactcgaataaaaaagttcattgtaaacagttgaaccatttgttgctagagaacttgattatctttgattcacagggttcactcgggcagagttggctttaacaatttacaaagtcttcaagccattattgacaatgaaattaatatccggtacatgatcaagtctttcaacattttatcagtacaaatattggcttcacgtgaagatctttatatatatatatatatgtaaagtagatgtgtggacatttttgtaaaatcaactttccttcctatttttagaccctattttagtaaaaatgcatctcatatctaaatatatgtgcttattaatgacatttaaaaatttgttctctcttcttacggctgtttactttaatccaattatacgtacttttcaaatatttgtt

SEQ ID NO: 11509 - DNA, 369 bp, Glycine max
tatctatgctttttttttcttattctgcagagtttctttcacttgcttggtttatgtcaaaccaggagaccagtttcgtgaccattggccaacgaattttggcaaatcctttaaggttagtcccaagttgtgtgttatttgatacagcatgtaagtattattatgaatcccttgggattttcatcttgttttcacacctttttcactttttaccctattttctattttgtttcatccatttggtcattcaaataaaacgggaacttgtagttacaagtacatgttagtagtaaataagcaagagaggcttctatttactgtatatcacttagaatttggacttgggacctaacttaactccacaaaact

SEQ ID NO: 11510 - DNA, 508 bp, Glycine max
  unsure (1)..(508): unsure at all n locations
tgttcttgattnttcctaagttctgtaacaagcttagaactttttacttggccttctcttaattgtctttgggcttggcgaccacgatcaacaaagtactttcggcacctactatatgttgacttgaccaacgctgttattggaatgctgcgacaatctttcaacaccttattcacacattctgataggttggttgtcatgtgaccatattgtcgtccagatgtatcgtaagccatgctccatttttcctttgaaatgcggtcaatccatcttgctatggctggactcaattgacgaaatttttataagttttgatcaaacacatgcttgcaaggagtgtacgctgcatcaaatttgttatcatcaaaagttgtacgtagacatcaaactcaaattaaattaatgtataaaataaaccttacccaaattcttgaacatctctttttgtttcgcgttggtgaatttgcgattgaaattgttgctttgtgtctgacgcagtacacattat

SEQ ID NO: 11511 - DNA, 824 bp, Glycine max
  unsure (1)..(824): unsure at all n locations
ngggtagaanattgtagtacaccgncgcaccctctagaagtcgaacctgcagggcatgcacagctttcttcaaggaaggtgaagcaataagtcaattaatatgtgtttttttgngctcncatacaagcgcaaagctctgcccaacagaagtcttataaaagcaagtttttcttcaacaacagttctcctcaagggacgcctccctatgatcttataagaggatagagccgtgttgtaaccacgtatgcgatgcgcacttctagttgcaatggaaccagaccttaattgtacatcgacactctccgacagtgtccatcatggccgccccgatgttggtaacccccaggttacctgccacgcaccttctctctccctatatcatcccttgaagcatactctccaagcttgttcaccaaggcaggctgtgcgggacaaaaatccttcgtctgggctgttgccacccagacgcccccctacctcagttcttggattctgagcgtctcgaagagggaaaaacccttaatgacctcatggaagcctcaaatccaaccttcatataacctccaccaccatgactttgtcaaaaagcccccttatacaacccccctcagagaacgtctgcgtcaacaccctaattttttccttccaaaccactaaatccttagggtctaacctgagatctctcccttaaccaaataatcgtcattggcactaccattaagttatccccgcaaaaaagcacaaggatttaggccaaccccaaaatcatgtcgcttataaaacccatcctgaacaacacataccctcacccttcaatacatccg

SEQ ID NO: 11512 - DNA, 820 bp, Glycine max
  unsure (1)..(820): unsure at all n locations
cgcaccagtccctgtgcctttttagcgcccncaaactccgcttctcaaggaggtgagcttcatcttgacaggggtgcgcccttttttttcctagctccccaatgaaaccctttgcacagataatcctctatgcaagttgttctcccacaaagctctcttatcgcccttatcctccctttcacccatataaccccagtgtcaacattggtcgcataatcccatgtaaccaaattctctggtgagacacattctcccgaatttccacattctccccactttctcttgncttcaataagcaggctacccacatgccttttttccctcaaatccttcttttaccccatttgacgtatcaccctgttacgctttttcccatacaaccggtcatccgccacaacactagctctcctgtgggcaatgtgaccttatagccccatttccgcgatgttccatatgaagaaaaatgcgcccgactctccactaccgtttattcgctgtaaacctttttacaaaaccccactgagatcccttattccccaatttcccaagttgcctgagagcccncccacttcgnctatgtccacatattncctttctncgtgtctanngacactcntcagccttctctcacatgcataagcagngctccctgnnacttacganagcctatctctcttccatactccccccggtcttcccgctcctcctcanctcgccctcactctatgctctaccaccgnccccgcgnactccgctncnacattcgcntctcccgnntccctcgtgttcccgtacctncacctcaccanncccctacctc

SEQ ID NO: 11513 - DNA, 504 bp, Glycine max
gctttatctgcgaactcaaggactatttgctttttctccctaaatcccatggataagtattattaatttattatgataagaatttaatctttaatttaaattgttatttttaatttggtgggtctaaaatgtatgttttaaagggataagttttagcttaaaaaatgaaatcaaattctttcttctaattttatacattttttactttttaaaaatattatttttataaaaatattttttcaaattactttttggaccacgccacttatccataaacttttgcgagctaaatacaaaccatgaaaaaatccctttatattatggatcaagcttattccacacgcctaaaacttatgctctctagttcataccaactcgtatagacacccttaccacagaccctttgatagtggataaaaaagccatgaggttttccttgtttatttcacttaaagtgggcagaaaatatttttatattaatctcctattaaatactcaaaaaaa

SEQ ID NO: 11514 - DNA, 470 bp, Glycine max
tgtagctgaagttcttgagaggtgctgaaattggttaggttttttctaaagacatattcccctgctttcatttactggaagttgaaaggtacttcatctctctcttattttgattaaacattgtaatctttatttttatgtgtttacaacgtacattacattttcatgatagtatttttatgttacgacctctactagttagttaacaagtataatttattataattttttgtaattcatttttttttgttggttccattggtttttattttaaatacctattcttattttataacatatatggtagtagctgtaacataaaaattggtattgaatcttacgttatgcttcttcccccaccaattattctttttagttagaataattattatagtttttcttcttaatatatattataattttgggggggacttacttttttttaatacaaataatactatgttatatta

SEQ ID NO: 11515 - DNA, 474 bp, Glycine max
agctttagggttgaggacctatatacagcaccattgttttaatttaaagagggtttggagaggagaagaattttagggatttgcaattccagtttttactatttatgcgcactgttcacgtagcaataaaattcgttttctgctttaatctgcaaattcgctttctacttcaatctgcaattttgttttctacttcaatcagcaatttcgttttctactgattaatggaaggctaagtctccaatgttgttttctcttgaggatcacgcacagctctctttgaggttttggtattactattgaaatctgatcagtttttcctcttcaccaattgctctctatttgtcgctattaatccatgcatgcttattgctgattaattgtctctgccttaatttacgttcatgcttaatgatcaatttcgctcatgaataattgatgtatatgttgcttaatcacataatgacaacccta

SEQ ID NO: 11516 - DNA, 533 bp, Glycine max
  unsure (1)..(533): unsure at all n locations
ntgcggatttggccttcgctggcgaaatgatcgaagtgggtcttttttaggaaaatctgatcatcatgctttgataaatgcaaaaaaactggggcaaatgaagagggtgagaatgagggagaaacccatgctgtgactgccattcctatacagccatgtttcccaccaacccaacaatgtcattactcagccaataacaaaccttctccttacccaccacccagttatccacaaaggccatccctaaatcaaccacaaagcctgtttaccgcactttcaatgacaaacaccacctttagcacaaaccaaaacaccaaccaagaaatgaattttgcagcaaaaaagcatgtagaattcaccccaattacggtgtcctatgctgacttgctcccatatctacttaataattcaatggtagccataacctcaaccaaggttcatcaacctccatttctctgagaatacgactcgaacgcaacgtgtgcttgtcatggagaaaccccggggcatttcattgagcatggtgggccctt

SEQ ID NO: 11517 - DNA, 327 bp, Glycine max
agctttacctttgcaaactcataaacacatttcttctttaatgctggacacggtactctatttgaaaatggatcttttactctgtgacagcaaggactgctgaccctgccacctgatttttcatcgcatccaatagacaaaatatatgttggagtatgagaatctaaggttataatttgagagagccgcgcattgaaaataagcaatctaaccatgaatgcagaaacatacattgaaataaataatgccgctactctgtgtagagcaaaaaatcaacttttgtaccttactgaacgagagtttgttattacttgagagcctgaaaca

SEQ ID NO: 11518 - DNA, 502 bp, Glycine max
gcttggcgcgggttgcgtttttcatatatttgcgagatgaggaatgaagaaatggatgatgagtggaggcttcagatcttcgatgatgagatgctgccggaaaatggaatacgatcttctgcttcccttcacgccagggatcatattgcgcactatttgttgcaccatgggagggctgggactggctttttctagtcttctaggttcttcttttcgggttttcttgctttttttagaactttactactatcttattctttttcgctatgtcacgttgaataactacagattaactggatcgcatagattgaaatatgggcatttgtatacaacaactattgattgtttgagaatttttgctgatcgagaaatggaattaaatcaattttgttcgagccctggtggaatatcaaatgtcaacatatatctagacaattcttttttaaactatttgagctattgaatatcaacatatttcttaatgaagaggatacaaaacttt

SEQ ID NO: 11519 - DNA, 391 bp, Glycine max
gcaggcaagacagaagagaaacatattaacaatggtgctgtatcaccaaccctgaagagacaagggtaatgctggcaccaaataaggagagtggaccatcttctaaccaacggccaaagaatttcagcaaaacctttaaggttaagaccaagaggtgcgttattcgatacaacctgtgaggaatattaagaacccctcgggatattcatcatgatttcacacctttctcacttattaccctattgtctaatacgatacatccattggggcattcaaacaaaacgggaacttggaaccacaagaacatgttagtagtaaataagccaaaaaggcctctatttactggatatcacttagaatatggacttgggacctaactcaactccacaaa

SEQ ID NO: 11520 - DNA, 784 bp, Glycine max
  unsure (1)..(784): unsure at all n locations
ccgcgccctattgatgcgatgcatcgaccccnccnntngnnannnaangcgnacagattaanaagccccccaaagggagggggcgaacaatttatttataanccgagagagacccacgaaagcactgccaaagaaaaaacatcaaacacaccctccaagaaacaagacacgccaaacgaaaacacacgggacatataaaaaccaaaggctccaacgaaggggaaggcgacaatccaaaggaacgacaaaaaaaaacaggaagggaacctaaagccattccaaaaccccccaaaaccacggaagaacatcccaaaaaggcaaccagaagaacccccaaaacaatgaaagatacgaatgaacacagggaccaaaccccagataaggcgaccgacataggacccgaatccgaaagaagaaaaacccgaaaaaacgaagccaccggaaaaacaacccccaaaacaatcaaaaccggccaaacgccccggccccctatcggaaaaaagagggggaacccttccaaaacgtgacgggccaacaccccccgcaatggaccaaggaccccaaagggcgggtcaccctcggaacccctcccacaaggaccagggagccaccccccaacacaaccccccacaaaagggaacaaacaaacacccacgcacacgtcgacggcgggcgaatccaaaaagggcggggcgggaaataactcccgccccgcggccgaaaaacgaaattgcccccccccctccaacggctcccaggggaaagcccgaaaacaagcacaacg

SEQ ID NO: 11521 - DNA, 337 bp, Glycine max
ataaacatgaaattgtaaagttgatgataatgactcaaaagaaataattggtactaccaatattaacaagatgcctatatttttgataactcatcatttaagaattccataattaaacatgcttaactcagagtaactttaagaagggtgaccttttgagaaatttttccataaaacatataattgagaaaaaaaacacactaaaaatattgtgttagtttggaggaataattaagaatcctaaaagtagttggcgttacataccacccattacatgattcacactagaattttgcttattttaaaattaaaaaaaaacattttaaaataactttta

SEQ ID NO: 11522 - DNA, 541 bp, Glycine max
gggaatttttttatatggtatctttataatttcctctattcatgaaacattgtcatgtgtgtgtagggcacatactgaatccagcaagacatttgaggtcttgaaatctcggtatatcacttttgtttcagcactgtgaagaaatgcaagccctttggcagcgcctagagcaactttcaaacgtagaccccaagaaagaggttgaaagtatgaccctcctgttacagcaattaatcatgtaaatgttatgcacacacttctcaagttcaacaatgtgaaaagatgggagatgaaaaactcactcatgaacaagtgattctccaagctaccacgaggcataaattcatagaccagaagtcggtctttatcttcaaagcaatacccaattaatttcactagatgaggatgagaaagctggcctaaatagttcacttcagcctaaaatagaaaagaaattaaaacaatgtaaggcaaacccatataatggtagcacttaaactcttctctgtttccaaatattcataacattattaattatgaa

SEQ ID NO: 11523 - DNA, 342 bp, Glycine max
taaccattggacttaacccaatggaaattgacggtatcactactagaaaaggtgttttctacgacagcaaaactacaatgggtccctaagaaccgccttagtttattagagatgacaattttgtaaatatatatttttcaacaaagacgggtgtaacaaaacccgcttagaagattgtccttctaagacattctaagaccgtttttagaaaaccttcttaaaaagaagtgtccttttggctccccatcttattatatctctatgactctcactctcattcaattttgaaaaccctaacctcctttctcttctttgactccacccggcttatctcccatggga

SEQ ID NO: 11524 - DNA, 483 bp, Glycine max
tcaggctgctcaattgctccaggttgctacatggaatgtttttgtctgtatggtggtcagcagaggagcacaaaccacaaacccttgcaacaggtacagatttttggttcaaggccagctgggttaccaagttaaccaatgcatccagtttgccttcaagcttcttagtttcagatgatgcagctgagtttgtagctacctcatgcactcctctaatggctatagcatcatttctggcgctaaattgctgggagttggaagccatcttctcaattaaatttctggcttcagcaggagtcatgtctccaagggctccaccactggcagcatctatcatacttctctccatattactaagtccttcataaaaatattggagaagcagctgctctaaaaattgatggtgagggcaactggcagcatctatcatacttctctcccagtattcatacaagctctctccactgagttgtctaatacctg

SEQ ID NO: 11525 - DNA, 497 bp, Glycine max
agcttgccttgccctttgataatatttgatgtgattcatggccactatgaatgacaaattccttgggataaaggtagtgctgccatgttttcaaagcccgtactgagacatacaactccttatcataagttgaatagttaagggtaggaccacttaaattttcactaaaataagcaattggatgaccttcttgcaacaacacagccccaatcccaacatttgaagcatcacactcaatttcaaaagatttttgaaagtttggcaatgcaagtatgggggcattagttagcttttgcttaagaacattgaaatcttcttcttgtttctctccccatttgaaaccaacatttttcttgagcacttcattgagaggtgctgccaatgtgctaaaatccttcacaaatcgtctataaaaacttgtaagccatgaaaactcctcaccttagtcatagacttaggtgtaggccattcttgaatagccctaaccttttcctcat

SEQ ID NO: 11526 - DNA, 385 bp, Glycine max
ttttttactctctcgagctctaactctgagtggaacgcgcactgtggaggttccctatccctcgaacctaggttcaccatcactgagtttcccttttcagcttgtctacgatcccactctaatgcagccttctgcttggacctaagcaaacagaaattttgcaacttttctggcattgatcatgcaccttccaccatcttgcgtgagccacattacttgcaaactcctgcagatgtcacgttccagttgcagtcgtagtctcggagcaaagccatggcttattacccagtaatggatgacataaggattggggatcactcaaagaacgagttttattgctttctctcttctcatcacttcccaaaggcttaagaaaacatgtgtt

SEQ ID NO: 11527 - DNA, 499 bp, Glycine max
aactcagcttaaaaaaccttaaactagggaggccttttttttatagttgaggaagcttcgccaagcattcccattgaaaaaccattattcaaacctttcaaagttagtgagaaggctaaacgaaaaattagggaacttagaaaaactaaatccttaattgaaggggtaggtgataatcatagtgaattactaaacaaaattggtagtttacttaaggtcattccagaaactccctaaaccttggaaaatacttccaaaatggtaacaagaagtacctccaaattaattaatgttattaatgaagatagtgaccaaaactcagataatgcaaccgagataggatcagtatcggaaaagaatataaatccaattaattccaagcactggaaaacaacctctaaattatattatcaacgtccaactgcccctgaccttctattagaagaaagaggtgaaaacaattttaaagttttagtgcacacacatctatgaatggaca

SEQ ID NO: 11528 - DNA, 462 bp, Glycine max
  unsure (1)..(462): unsure at all n locations
agcttgttcactaaggcactattatccaaatttatctctcttcgcacaaatttttttcttggtttccttttctcataacaaacttattttccactttcatttatttatttccaaacctcaaaggtcaaaacattttttccttctattttcaaaaggttttctttttgatatcaaaatagcccccaagacattgaaccaaattaacagtgtggtaccatataaatttaatacgcgtgtcatacatatcctaagcaaatgtaagtacgtagtattcatccatgtaagtatgaactaagtcactaaccaagcaccactaaggaaacaatgagaaattagagaccccgtgaaattttgatcaaacttgcaggggaggtgcacctggaattcttatatcccctattaaaattccatatctgtcaaggtaggtgaaaatgtgacataatataactcanacgctatgct

SEQ ID NO: 11529 - DNA, 258 bp, Glycine max
tttttttgaatggcgggcacgctaagagcgctgaccgtataccttagccgcaggtactcacttttcgcataaggcccacttagttacacattaaacgcatgcaccctctctgccttcaagctgcatatgaacagatgatgccactgatttagaaactgccagaagctcctctctaaaggctatctcatcatgactggcgctacaatgctggcagagagaagccttcttctcaagaaagatgctgagcttatcaagaat

SEQ ID NO: 11530 - DNA, 267 bp, Glycine max
ttctgcttttaattgtgaccacagagtggtacctggaaatatgttgcgggggtcaagagaccttggggacgtcaggtggggggctattgcccaaaaccaagcttgaccaatcccgacccaacccgggcatagtctggcagtgagaacctgtgatgtacctaagcaggcgagctcctggcagtctacagattaaaggaacaaaaaccacctatcaaggaggcttgtggtggctggccaactctgaattttgtgtgatatgtggattat

SEQ ID NO: 11531 - DNA, 293 bp, Glycine max
tcttgaacgtgatcaatatatttattggcatagattgaatgatgattttgtggtacgcgatctgttttggtgtcacccatatgtaatgaagttatgcaacgcatgtcatttggtgtgattgatagatagtacctgcgaaacatataggtacagacttcctctacttgactgtgttgggatgacaccaacggggatgacattctctgcgtggtttgcatatcgtggagggtgaacatgtccataattttggatggactttggaacagggtccaagaatattcctcagacttaat

SEQ ID NO: 11532 - DNA, 473 bp, Glycine max
  unsure (1)..(473): unsure at all n locations
agcttgggagaaattgaattcaggaacaaataatcagaaagcaatgcattctgttgggacgctattgatgatcgtcaccgagctctagataccataaaagagttcttaacagaactggagaagattaaagataaagagtaaaagagagaaagaactttagaatcagaagttgtttttatgattgggtaactgatttctgttacaaagagaagtatttatagagttctagaacaattaggtattactgactcttaactaactgagtgactaactcagtgactaacatagttaagtgagtgtgcagttgaatactgcacctccctttatactactctaatagtcgtatgcctaatgtcagtaaacatcaggaagagggaacaggaagcaagacaaacttcccttgattattcaaaatggaacttgattcgtcatgtaagaggatgatatttcagaacaagaantacaactttatt

SEQ ID NO: 11533 - DNA, 489 bp, Glycine max
tacggaccttaatctaactgtgaacaaagccgcttggttttaaggtggattttgaaaaggcctatgactcaatcttatgggcatttttggattatatgctgcaaagaatgggtttttgtcccaaatggagacactggatttctgcctgtcttaattcagcaagcatttcaattcttgtgaatggcagtcctacaaaggaatttactcctactagaggcttgaggcaaggggaccctttagctcccttactctttaatatagttggagaaggcatcacaggattgatgagggaagcagttcataagaacttatatagaagctatatggctggaaagaaaaaggaacccattaatattttgcagtatgcagatgacacagtatttgtgggagaggctgcttgggagaatgttgttgttttgaatgctatgctcacgggatctgaattggcctcaggtctgaagattaattatgcaaaaatccaatttggga

SEQ ID NO: 11534 - DNA, 358 bp, Glycine max
cattaaataacttggtattatatttatgaatatgtatggcaaaattcacataaataagatattcgctgatggattatttactaatagacattaacctatattttattatagatatatactaagatttaatcattttatttattagtacaatgcggcaactaattactaaaatgtttgtgtaaaaatattatatattaacacatgaatttaaattaaataaattttattatgtcgttttttttaaagatcggcgcgtattattattgttattaaaaaatattgggcaacaacaatacattaaattgttaaagtgacgagacgacctgattaggaactcctcaatccacactctcatgga

SEQ ID NO: 11535 - DNA, 547 bp, Glycine max
taaacaaggatctttaattttttggtacgtaggaaagctttttaaattattctaacctgaaaaattaacccactttgtgaaatgtttttattttggtatagtcacttaattgaatcgaggagttaatatttcttgattatctgaaacaatcaaaattctacattgcttcctgacaagcttgctccacccggatcacctctcaagtaaactaatgggggggaaatatagagatgaataattgaaaaataataagcactagttattggggtgcacagtaatttccattcatttcatgtatcattcaatacctaattcacacagtaaactccactcactctctacatattaaatattctcaatgtataacagatattttttgtgacactggattccattcccacgtcttattggtagtattatagaagatgtgcagtaatacgggtagtctcttgacatgtgtataccgtgtacagctcccatataataaagagtaccacataatcatatgatcaatttcactgattctctcatgcttctattttatctt

SEQ ID NO: 11536 - DNA, 396 bp, Glycine max
tgagatgaggaagtgttgaagggtgaaacttcctgcttttattgttgaccacagagtggtacctggagatatgttgcgggggtcaggagaccttggggacgtcaggtggggtgctattgcccaaaaccaagcttgaccaatcccgacccaacccgggcatagtcggtcagagagaacctgtgatgtacctaaacaggcgagctcctggcagtcaacagataaaaggaacaaagaccacaaagcaaggaggcttgtggtggctggccagctgtgaattttgtgtgatatgtggattatggcctctggtgatcgattaccaagggtgggtaatcgattacaacgctttaaagtgaagacaggaggcttagatggtctctggtcattgagctccaaagg

SEQ ID NO: 11537 - DNA, 543 bp, Glycine max
agcttggtaaatttcggtttaccaattattctttatgaaaactcatttattgaccattataaatatagtacaaggttatctagcaataacttcaaaagctccatttaaacaattatatggacaacaaaacacaaaacgaacaagctgtaacacaatcataattgctatttgttaatcacacttaaacaaaagaatagctaggcaaactaaaatcaccaacaatcacggacaactaacacctaccatttggtaaacaataaataatcttgcatttttattcaataaataaacacttaaaattttttcctgaatttgaataaataaattcactaaggtaatgttgtcatatttatatcgggcatcgactcgattaagatactaagttactaaatcatgcatcaacccaatgaatcactaattgactcccatgattcaacctatattaaaaaattctaaataatttcataacctgcaaacatgtatacttaaagtttatcaaaattcatgacaagttttgaattgtttaaaattttgacaacatat

SEQ ID NO: 11538 - DNA, 599 bp, Glycine max
cgaaggcgaactggatgcattggttaacttggtaacccattatgcttttaatcaaaaatctgtacctgtcgcaagggtttgtggtttgtgctcctctgctgaccaccatacagacctttgccctttcatgcagccacctggagcaattgagcagcttgaagcttatgctgcaaatatttacaatagacctcctcaacctcagcagcaaaatcaaccacagcagagcaattatgacctttccaacaacagatacaaccctggatggaggaatcaccctaacctcagatggtgcagccctcagcaacaacaacagcagcctggtcctttcttccaaaatgctgctggcccaagcagaccatacatttctccaccaatccaacaacagcaacaaccccagaaacaaccaacagtttaggccccttcacaacctttcctctgagaacttgtgaggcaaatgactattcagaacatgcacgtttagcaagagaccagagccttcattcagagcttaaccaaattaatgggacaataggctacccaattgtatcaacaacagtcccagaattctgacaagctgccttcttaagctattccaaaat

SEQ ID NO: 11539 - DNA, 260 bp, Glycine max
gacccgcggcaggcaagcttgttataaattgtggtggagaacaattattcgtacagctacgccttctgacgcgactctatagatgatcgtggccgaggtctatataccataaaggagggcttaacaaacctggcgaccatcaaagacaaaaaccattatatggatacaactttagaaacaaatcttgatgttatgaacgcgcaacggacttctgattcacagaggagcccttatatagtattacaacaactaaaaattcc

SEQ ID NO: 11540 - DNA, 432 bp, Glycine max
tgcatgttagctcttttttatttatttgcatgtagcttttcttatcctccctccgatattatttagaagacccaaatttgaaatgatatttttttttttataagaatcaatttataatatttcttatattaattatttttagactagaaatgtctctaattaaaattgaaagaatgtattgacaaacaattaaaagtgaaaagagtattaatgacaagaatagttttggaaaaattataaatttaagataaatttattgttatgaactaaaataatcatttttcttaattgtgataaattaggtacttgggtcttatatataagatcagatggattatttgaaaaatattgttgattctctcatgatatcaaaggtaaggtgggatttttatcattttgttacccatctcttctgaataactagcataatgg

SEQ ID NO: 11541 - DNA, 350 bp, Glycine max
ctcaattagaagggggcaacaggggatggtggggtatacccgaattgtggaaggggaaaaacgttttgcaccattgcccgactgccacctagtaccacatgtgatgggtaccccataatcccacaagcttgaaatgaagaagtgtacaagggtgagaacttctgctgttattcgctgaccacagaatgggacctggagatatgtcgcgggggtcacgagaccttggggacgtcaggtggtgtgctatttgccaaaaccaagcttgaccaatctccacccaacccgggcatattcattcattgagaacccgtgattgacctaaacagacgagctctcggcagtcaacagat

SEQ ID NO: 11542 - DNA, 474 bp, Glycine max
  unsure (1)..(474): unsure at all n locations
tgctacgaccctaaatgggccttcctagttgggtccaagctttcccttagggatcttttctggcttcacctcagactcgcgacactaggttgccagattgaaaggctccaagttgaacctttgtattgtatctccttgatgctcggagcttggtttcctcttctttgattttggaaatctcttggacgtcatccttggtctctagttccaccctcatgttctctttgttgtgttgttcttggaacaacaacctccttgtcgacagttccccaactttgatggggattatggcatctctgttgtatgtgagtcaaaaagtagtttcgttggttgttgtctggggtgaacagtgataggccaagagtatactatggagtccctccttccatagacccttggactttgtgagtcttntgcgcacggcgttaatgataaccctattatctgccttcgcctgaccaataattttggggg

SEQ ID NO: 11543 - DNA, 829 bp, Glycine max
  unsure (1)..(829): unsure at all n locations
tgagcctttacctttcgcagcatcggaagaagttaatgaaaagatgctcctttgtctgagcattgaaagaaaaagagggcagcgacaaagccagcaaatcctccgtagtaccagcatgaatgccactttaaatcatcggtatcccacccatttattctttagnncgannnnaggctcaatacaccatcctttctcattaagtttctttcctttgcgagagaatctggatttttattcagctggccatagacataattccttttttttctatgggatgaaggttacacatacgccacacccataggtgtgttgaaagaggatcccctgggctaaaatcaacaaatagaccacgaacataaaatatagtggtcataaaacttggtcaattttttgggaaaacaaatattcccttaagtttttgaattacaaaagacaatgcaanaattacgtggctctcatatttacaaataaaaacccttgaagggggtttttggaagaaacattattttatatgggatctcttttagccgaatttgaccaaaattttgggagaaatgagataccaagaattttatttcaaaattccaaaataattttttggaatatcgatccatccattctaacaaaaagggggggtggggataaaccataaaaccacaaaaaggtaaaggataaactctttgtatttgggaataaaaattgcccaaattgcccacgtgggaaatccgcccaataaatattgcttgggacaacgacaaccccccgaagacattattgaaaaacagtctcattaaaacaaaactttttatttttcttattcatctccgcc

SEQ ID NO: 11544 - DNA, 521 bp, Glycine max
  unsure (1)..(521): unsure at all n locations
aagataatcctcaggcttggccaatgcagactgtttattggaaacggattggactctatcatttattatcagagcctgtgacatggataacaaaggagagaaatttttcacaatctatagattcctcagaccaaaataaaaaatacaattatgacgttgagtactcagtttaagaggatatatctttcagagaggaagggagggaaagagaaatacagggccaagtttcatttttgaaacaatagttgttgtcatgtaatataatcactttattagaagtgcataacacagcatactcacatggcccttgtatttgtgagctcggaggaaatcaagcaagggctgcaaggaatctttgttgcgaaacattattgatgaaaggtggcgattaagaaattggacaccattgccaatggatgctgagcgggttgggcgaggaaacgtggcattaaatggctcaaaatcaagctccaatacaaaattctcattaattcttaagcacaatacanaacagaaacaga

SEQ ID NO: 11545 - DNA, 365 bp, Glycine max
agcttgccacccaactcgcccaagcgaacaatggtgcttccttcaaaagcaacaaccttctggaggaatcttctggcaggcccaaatgggcttggttgctatttgcacccccatttttactaaatacaccccctgcctttttttggggattcttttttcgtaaagttacggaaacttacgaatttcgtaacgaatacttgtttcttttcgtaatgttaccgtaccttgcggataacataatcatccctttttttgacttacgggaatgtacggaacctcactatttgtgcaacgatgcttccttttgaattccggtgtgtcaccgaaccttaccgattgggcctcaatattttcttttgattttc

SEQ ID NO: 11546 - DNA, 525 bp, Glycine max
gctttgagaaaacttccttgagaagctagagcttatcttctctcacccctctcataactaggctcacctccttgagaagcttccttaggaagattcctaaagaaggttgagcttagctacagatacatctctaatagctaagctcacctccttgagatgagaagctagagcttagctacacaccccctataatagctaagctcacccccatgacaaaaaacatgaaaatacaaaaaaaattccttactacaaagactactcaaaataccccgaaatacaaggctaaaaccctatactactagaatggccaaaatacaaggcccagacgaaggaaatacctattataatatttacaaagataagcgggctcatacttagcccatgggctcgaaatctaccctaaggctcatgagaaccctagggccttcccttggatctctagcccaatctacttggagtcttctacccaatgcccttgcggggtaggattgcatcaagtgccttcttggatttcaagatttgaat

SEQ ID NO: 11547 - DNA, 470 bp, Glycine max
agctttgtggtagcctttttttgcgtgtgttttttactttacctggcatggactttggacttccatgcatatactttatcagcttaacttcatcctcaaacaaaccaggaaagtctgaacaagttaacaaatgccacataagaagtgaaggacttcaatttttatcgagtgcttcatgcttaatatttaggttcctggtaattcattatatattttggactttgtatgtcgcttgttagtcaattttcttttttcttgttccactttgaaattattattttaaaaggattgtaatttcttcagcattttaccatcaccttaacctttccatggcttatccctcttgttaaatgcttttttgagttgtgtatttgctgtcccaagggcattgcttctttagtatgcgatgctttcagcttcttagacaccaattgttccgttcttttactttttggttgagcatgtgtatt

SEQ ID NO: 11548 - DNA, 266 bp, Glycine max
acagagccgcataccgcgaaccaccagaccacactcgaccaaagcaccggacgcaagcacaaaagagcaaatagaaaggactcactgagcatgcagaacgatacctatgcacaaagaccaccgaaggcgaaaagaatactcaaggaccagaccaaagacgatcaactgccccggaaaaccacacacatcagcttgtcatccccccctatgaaccccccgggggcagcaataacaccctaaagcactagcgatgaccaatgcaggcc

SEQ ID NO: 11549 - DNA, 499 bp, Glycine max
  unsure (1)..(499): unsure at all n locations
agcttgtggtgcaaaagattacatctattcttaagaatttttgatggggcagcctccaagactccattaagattccttgggtgaggtgggacatagtctgcctacctaaaagtaaaggtgggttatggatcaaagatttgattaaattcaacgaggctttgcttgctaaatgggggtgggagttggcaaataatcagaatcagttgtgggccacaattctattgtgtagatatggtggttggagggatttgatttctcataggaactgcagtttagactctccttggtggaaagacctcaagggtatcttcaagcagcagcaaaagcaacacaatttgtaaaaatagctttatttatgccataggtaaggacggtccatggaatacanaccaagtacttattggttgaccacaaacaaaacactcattggaatatatatgtttaacaattaacataaactcgctgacaggaatggagaaatatacatattaaatttttc

SEQ ID NO: 11550 - DNA, 299 bp, Glycine max
actaacgacaattattaagatgaaacaagatgtttttcacctggttatttgacaaaagaggaatgattaagtaataacataatactgacctgcttgcatctatgaaaagcacacttaaatcatatgtaattgatgcactgagagtcattatccaaagcatgccaacatgttatcctcttactcactctttcttcaatgacccacgatatatggttgcatcctaattctttaatggcacctttacgactatcattaatctagttcacttggcttaacatgataaattgataagtgagcta

SEQ ID NO: 11551 - DNA, 400 bp, Glycine max
agcttataatattgcagcaatattatattccatcagcccgagaactatcacgcttagttggagtctgcaaagccccaatcattcaacactttgctgaaacaatttctggtacttcaactattagaagctttgatcagcagtcaagatttcaggaaacaaatatgaaactgactgatggatattctcggccaaagatcaatattgctggtgccatggaatggttgtgtttccgcttggatatgttgtcttctatcacatttgccttttccttaatattcttaatatctattccacagggattcatagatccacgtgagttattcctatctgttacaaatcaaaatttaatctgctattctaatatggaattgaacataattgtttctcttttataactttt

SEQ ID NO: 11552 - DNA, 225 bp, Glycine max
ttatacactaaacttaccttcttgagatgataagcttgagcctttctactcaccccctataatagctgagctcccccccccgacctgaaacatgataatacctaaaagatttcttactacagacactactcgaaatacaccccaaatacaaggcttaaaccctatactactagaatggccggaactcaatggccagaccaaagaaatacctattttatatttaca

SEQ ID NO: 11553 - DNA, 845 bp, Glycine max
  unsure (1)..(845): unsure at all n locations
ccgcaccggccggataaacatgtccggacgactcgaccgttagcctacgtcccggcgcactcgntacattcttcgccacccccagccccccacagatttgtacctgcataccgggcnnnnaaaaaaacccccggnggaggaatttaaaaaggggagtgggagttttttttaaaaaaatagtggagaaggtagtgggggaaaaattattaggaaaaagaggagggagagtcccgcccccaatcaaaaaagcaaaccggcccgctagagaaagctcactggaaaaactcaggccaagcgcccacacgccaaagaaaaccaactcccccccctggggaagcctccttgaaaagcaggagctaactacacaccccattacagcacgcccaccgcgtgacgaagcaacggaaaaacgccgcaaggcgaaacaaaaaccacgcaactgccccgaatacaggggccaaaccgtgacaagggcaggggcggaggcacgggccacaaacaaaaacaacctaatcgacgattatgacgaaagaggaccccaggggggcctaggggggaaaaaacacccctagggggagggcgcaccctaggccccttgatcaacacagcccccaccccttgggccccctagcagaagggcaaggaaaaggaccaccccaggggggagggggccgaccagagacacgggagccacatgagataataagccgggaaggggcagcgggcacaaacggaagacggaacccccaaccgntcgccacccagccccacggggaaccccaacggtgggcggccccgcatgaaacaaaaaaagggagaaaccacaatagggtgaaaaccggggc

SEQ ID NO: 11554 - DNA, 228 bp, Glycine max
aagtttttaaggaacatttttattaagaattaggccaaaaaaaaaaatgttaaacatcacatgtataggttgacttgaaattacatttattatctcatggaaaatgctatgacaatgggttaaggagcctaaatgaaaaaaaaatttattggattgccgtaaaatatgccacatatgattttttttgcggtggacaataatttccacattaaaaaatttctcccttta

SEQ ID NO: 11555 - DNA, 595 bp, Glycine max
  unsure (1)..(595): unsure at all n locations
ntaatgtgttctcccttatagaactactaactgtagtaacatttgcagcccagctatccggtagtgatgacaatagaatcaatgccttcacctcatcctcaaatttaatctgcactgactccaattgggcaagaatagtattaaattcattaatatgattagttacagagataccttctcccatcttgaggttgaacaatcgacacatcaagtataccatgttggctgcagacgacttctcgtacatagctgataatgccttcattaagtctgcagtagtcttctcatttaccgtattgaatgtgatattcttggctaatgtcaatctgatcacgccaagagcctgtcaatctagcaagttccatttttattgccttatgttgtctggcttatcccctgacgagagagaataatgagaagagaaaggaataatgagaagagagagaagacacaaagtttttacatggttcaacacacaatgtatgacctacgtccatggctaccttagaaaaatttcttgttgttgcacattttaaagcttacaagtgttctattattatacactaatgagacacaagtttacaaaccaagcgat

SEQ ID NO: 11556 - DNA, 851 bp, Glycine max
  unsure (1)..(851): unsure at all n locations
caccgccctcaccgacttctacgatcatgctcaacacttcaggttgataaactaccacccccaaccaacagaattgatccttaaacggaccttaagagacgcggctgcaacttatttgaggcaaaggaagagattttttttgatcacccttttcgagaccctccgccatattaatacctatcgtactactactacccacaaggatgggcaacaaaaatataaaagggctccgcccaactaagatgcttaaacacatggtgaggaagaaataaacaaaactacttcccagaatggaaacttgaaagggtaaaaaaaaaggtggcgggtaacattagattccgcctttctaaaacgttaaaacattaaccctggatctcggccggatatatctaaataagtggaccaccctgaagaattaaaaaaaaaaacaccttttttgttggcgagatactaaaaaaataacatattaacggggggtgaatacttgactgggtttccaaatatgaacctaactcgggaacatttatcctggttgacccttccttacggccgcaaacctgcgtaaaaaattatttattctatgataaatataaataaaatataggcgaagctgaaactcgagcatcacaaaaattataattaaaacatggccggcgaagtggagcccccatacctaaaaacaaaaaaagaatccagacgctccagatctacaattgttaaggtcggaacaccaactaaaatggagaaacactaattgactgacatcaggtaaccactcaacgtcgacaaaccacctatgccagtgacgacgaagatggacaaccggtactgccctgatcataagaaaaacn

SEQ ID NO: 11557 - DNA, 486 bp, Glycine max
tgaacttctatcgaatttgggctggcaaattattaagattttttttttatttagatctgagatcacactctaattcaaaatcttaagattcatgttcatggatcttctccttaacttatatgatgtttaatcccttatacctgatgttatggtgtttaatctcttctaatcgatgtcaaatttcacttgacacttgtattaaaaatatgattaagcaaaagtttcaattatacatcataagaggaagtcgaatatctaatcctttaaaatggctgaattttaagttattcgaaaatcggaagtgaatgttttgctgaatctgctatgtttttttttttaacttgtctccttccaatttccaaactcccatttttatctgtattataatcagagcttccttcaatactgaattcaatagtcaatagttagaaataccgcccgagaaatgtttgtgatactttccaaacttgaattcaaacatttgac

SEQ ID NO: 11558 - DNA, 814 bp, Glycine max
ccccgccgcccacgaccacccacggccccgcccgcaccccaacgaaccacaccacaccgcccccccgatgagcgtgaacgcaccctaagaaccgccgcagcagcttgccccaaaaagaacagggaggaaaattttacccgaggaaccaatccccgtcccgaggaagaaaccccacccgcttacggacccccgaacacacccagccgagaggaggcccaccaaggaggacgactaggcacgaacggcaagccaggaaccccggcaggccccaaacaagatctcgcgcgcgacagaaggccaccaccgacctcgcgggccactgcccgcgcaatgcccaatcgaccagaacaaaaaaaatcgtccccccgaccgacccctgaagaacacccgacccgcccatgccccccacggaaccctcgccttgccaccggggtgcgcccccacgcacgccaacacacggcaaaacgcaccgccgaggagaacgcccacagctagagagcagccgaagaaaccacggaacacccaacccagccacgacacccacggcgccgaagacgcgatgcaacacagagtgccgcaagcgaggaacccccccccggcccggagacagggtacgacacgcaggaagcccccccacccacgacccacgccacaaacagacaggaggcgcaaaccacacccaccaacgcccgcaaacgcggagcgccaggaccaccccgcagacccaggcgaccgcgaccggcgcaccagcacacaatactagcacgggcaacacacgagacgaaaaacgccccccgaccatccacgccacccc

SEQ ID NO: 11559 - DNA, 579 bp, Glycine max
ttgagccaaaatcctgactcaccataaaccttgacccattgtgataatgtcaatccttaccctcggaagcaaaaaagaatagaagggaaatttccaatcaaaaaagaatagaaggaaaatttccaatgaaagcaaaaaaagaaaagaaggaaaattccccaatcaaagagtgggagaaagcaaaaagaaaagaaaggaaattcccaatcaaagaatgggagaaagtaaaaaaggaagaagaagaaggaaagaaagctcctgatcagggatcgaaggaaaaacagaagaaatgtgcagagaggtctttagaccggacaatatctgaacaatacagaattgtcaccaaatgaacaaaaagaaggaaaggaaaccacgacctaaaatggtcttctccctttgattaccaaccaaaatcccgtgcgctagcgactttttcgccccgcactaaacaaaaaaacagaaaaagaaaaagcctacaaaaaatcaaaagccaaaaacacacaaaagccgaaaaacccaccaaaagaacccattcccaagggaagtcctattgatccatgatcacacatgtaatttttg

SEQ ID NO: 11560 - DNA, 215 bp, Glycine max
atatataagcactaacggataagttattttataagttatcccacaagttaactgaaataagatgaaaatggcttatggacacatcataagctaatttttataagttctctcaaacacttacagaagtgcctgtgttataaagtcaaataggctatccatatgcattttcaaatgcatattatattttgaccttttttgagtggatcaattacagg

SEQ ID NO: 11561 - DNA, 460 bp, Glycine max
ttagataccctgagactaggctcaggccctttgatttactctatattacaggtgagcgagcctattagcagtgacccctttgttctaataattattatttgtgttgttgctcatgaagcactatctagtatgaattttaattggttgcaataggatttcaatgtaaaggtgaattttttggagaataattttcctttgatcttacttcgtctgctgaattcctaaggataattgttggtctgggtttctatataagcctaaggaatcaatcctgggaaaccctatgatccggattcccatcggatctagggtgaaccaatttggcgttcctgctttgcacatgataaagaatgttggcttgatagttacgttcatggttgagataatggatcacaacacaaattgcatttctcatagaatacatgcatacagtttttgttacatgttcaaatattatttg

SEQ ID NO: 11562 - DNA, 463 bp, Glycine max
tggaactaagcttattttctctaccacttgtcattcttttactgatgggcaaacaaaggtagtgaataggtctttatctacgtttttaagggctcttctgaagggcagccataagtcttgggatgagtatcttcctcatgtagaattagcctacaacaggggggttcatagaaccgccaagcaatccccttctgaagttgtctatgggttcaatcccctaacacccttagacctcattcccctcccacttgacacttcttttatacataaagaaggggaatataggtcagagtttgtaaagaagttgtttgagagggtttagcgcctaatagagaaccaaacaaaggtgtattaaactaaacgcaattaaggaagaaatgagctatttcttaatgaacgggactgggtttggctcatcttacagaggatagattccatactaaaaggaaatccaagctaaccc

SEQ ID NO: 11563 - DNA, 865 bp, Glycine max
  unsure (1)..(865): unsure at all n locations
cctactgaattacctagaaacgtcatccattcactctctaccgctcgcgcaccgttagattagatcatcacacttaaccctatacatctnnctacacgccccccncaccgcnttgataccttcctctgccccggcgcaactctataatagacctgcacgcgtgccagctcaatctagaccttggatgaagagactatttttctaaggggggtaaacaagtcattcaatttattttcgagaaaaacccatattagctcagctagttaacaatctctaatgggattttaaaacataactaacattttggtgtgatcaagaccattttataaaaagaaaaaacccaaaataacattaagaagatacccaaaactactgagggagacaccgcataaacatgcgaagagtttacttcgtgaccttttcagcccatcccaaaaaaaaataagcctagtgccctcaaaaatagtgagaagaataaggaaacaatacttggacaaacctaaaatggttctgtaccacaaccaaagaaaccaccatgtccgaaaaaatgaaactaaaagacaatagggggcaccatcattccaagagtaggacacagttggaagacataaaattgagacttgtccttcaaggggcttcttgaatatggtctccccacaatgccattgacgcttattcggagaaagataatctcctgtgaacaaactggatattcgaaacgaagtcaccattcctaaacgtcaagtaatggaaccaccacattcaaccccccaacaaacacgccttctcaaactaacaaacctgactaacacaaaatagccggacttaacgaagagtaacatagggaccatcacctgaacaggcg

SEQ ID NO: 11564 - DNA, 542 bp, Glycine max
  unsure (1)..(542): unsure at all n locations
tttagtgaagttaaacgagagaaataagaacttaaataattgtttagtgcataagttgattttaacttgtgggagaagcccaattcattctaacttctcattatcttcttttcctgtaggtgtttagggagaggtttatctaactagagccaaattgaagcttatgaaaacatatagactttcaaattaccacttaagttattaggccaaacaatgcctaaataaaatagcataattagtcatcacctcttaaattcgaaagagagtttaatagctatacactatcatccaatcacaaatcattgttgttgtttttttttttacttttaagatggttaanataaaagcaacaaatttatcatatatggtagtttaagattggattttacaccatcagtgcatagtctttttttctcggtggaaaagaataccaaataaaaataaacagagagttgtgtatcgggcatacttatttttattccaaatggcctatctgatccaaaacataaaaaatccctttcaatcttcaaaaaaaaaaaaat

SEQ ID NO: 11565 - DNA, 401 bp, Glycine max
cagctttggagtttccaagtgcccattctttttcttctttagaccaatcttcttctggcttcaattcatcagagggctttccttctgtgtccagcatcttgggatgttcccaacctttgaagacagctttccaggttctgctatccagtgatttgaggaaagccaccatccttgctttccagtattcatagttggttccatctaagattgggggtctggtcactggtcctccttctttctccatgttcataagaatttatctccctagatctcactcagtgatttcgagtgcccgctctgataccaattgaaattctgatactggggacagatgtcgcacaagattgtacgacatcacgctgcagattgtgtttgactgtgtgaacacattaaaccagctc

SEQ ID NO: 11566 - DNA, 553 bp, Glycine max
ggaaggacttggcaactgccttttttatgcagtaccagtacaatacggatatggctcccggtcgaaaccaacttcagtgtatgactaagcgagagcatgagtccattaaggaatatgcccaaagatggagagatctcgcagcccaagttgtaccacccatgacggaaagggagatgatcacaattatggtagatacgttatccacgttctactatgaaaagctgataggctacatgccagctaactttgtggatctcgtcttcgccggagaaaggattgaatctggactacgaaaaggcaagttcgaatatgctttcaatgtggtccccaacaacaacagaagagccccagtagtgggcgcgaggaaaaaggaaggagacgcccacgcggtcaccaccgccccgacgtggatgaaagcaccccaaaatatccaaagctcataccagcccaatcccccaaattttttaatccgagacgggaattccctcccgactcagtaaaaagaccacccgcagcagaaagaacgttggcccacgcacagctccagccgttc

SEQ ID NO: 11567 - DNA, 385 bp, Glycine max
tgcagcatgcaagcttattccgcacaatgggggccgcttttttattaagcggctattcctccttctgaagagccatggacacttatccctgaaccaagtacaattcgggcgaaaggtcgaccacaatcaacaaggataatgaatgagatggattggctggaaccatctgagcaccaacaaaaatgtagttgatgtggaagagaaggacacaacagacgtcgatctccaatgcaatctgaatgtggaaggtgctaaactaattgatctatgtattttgcgtgtctactcgaatgaaatggaacctatcaatgatcaatttttttaaaactagctattattatatttttgtgcacgccataagcctgaacaattggttaatattcat

SEQ ID NO: 11568 - DNA, 457 bp, Glycine max
taattctggagcctttttttttttttcatgccgtacccgcggtagcttacaagcatagaactgaatgtgtcgatctaaagatagtttcttttaaaacctcctggaatggaaatttattggatagtgctatgttcccgaacagattgtggtatggtgcagtagcctgacatcagattgaatggaccttgtctgctgcatgtgtatctgcatctgttggtattgcataaagacatgctttgttatctgtaaatttataaaggaataattctctttctattgattcatgtaaatctatataatataaccaaagattggtctaatgggtcaaaaatgaaatgcaccatgctggccattttaggtgttggttcgcctgaacaatttgaagcttgtgatgagctcaacccttttatcacacggtaatggttccttttgcaatgctgataggactttggggggg

SEQ ID NO: 11569 - DNA, 508 bp, Glycine max
agcttctctagaagcacttttacgaaatgtatttgtgaagaaaaaataaaataaatttttttataagttgaaattaattctccattaattaatttgtagaaattttcacataatttctttgaaagatgaaaggatatttgtaaattagttaatggtgagctaattttatcttatgaagaaatacatttcatttttatttatttatttctctcctaaaaatactttcttaagaaatttatccaaacaggtatttatcagattaaattttgaaagccctaaacctttttggtcttgaactcattattctagttcaaaggaggtcctttaaaatttccttaaatgtaatgagtcctatacaactatgacatggggccataaagtatctccccaaaatcttagttattaatagattcaagatcaattatgcgtgtacggtttttgccaaccaatttgatgtagtctatcacttggcaccgatgttttattttttaattttgttttcagtggc

SEQ ID NO: 11570 - DNA, 862 bp, Glycine max
  unsure (1)..(862): unsure at all n locations
cccgccccacacaatccccccccacccacacgcaacgccgacacccccctcgcgaaaagaccccccccccccaccagccaaggggttgtgatgcgctcgatgacacacgnngaananannaaacccaagcccgagcgaagagggnaacagaaaaagaccaatattttttttgcagtggacaaaccggtaagcgcagaccttgcgctaaacacacaacctgcacgcgccaaggccagctcgcgcacaataagcgcgacaacacccggagaggtggcgggataggcaaaataagcgcacatcactacgccaagcccaacagctgcaccgcacaagaaccttaacaagggggcgaatcccccggaggaagaactaagcaccaccccacccgagggaaaatctaatagcagcaccgcgaacgcgaagggcacagcgctaaaacgccagaccactccgccacccgaagcggagacagggcccagagggagaagaagcgcaaggactcatcccagcacaggaacagagtgctgagagacgcgcaaatcaagcatgctccaagaagaccgacagcaacaaagaaggagagacggaacaccgctaagcccaccaacaaaagcaatgacgacccccgaaaaaatggggcgaaacaagggccgccaacccccaaaaacccacgggggctacacactntcaagggccgcgaaacaccaaggcggggcaaggggatcggggggaagaaaacaaacccgcagaggggcgccccaaaacgacgcagcgccacaaaccccgccaaacaaaagcccggaagtaaaaacccgaacgagagaggcccatggcgggcccccaaaaacccaaacccggagcg

SEQ ID NO: 11571 - DNA, 451 bp, Glycine max
agcttaataaatgttgtgaaggatattctttcttatgctgaagtactggtcaatgcaagttatttgacattaactattgacataactatgtattctattcatacttatttcttttgcatgggatgtgttaccatcaatgtatggcttattcagacatcttgaaaaatcaatatcccagtctctgattccaatcattctacccaacatgaatctatgagtattgatcatcactctcattttttaatatgatctttcttgcaactcttccattttgacacttcatgactttcaacttagtattcaacttattcaatgttatttgttttatccaacaatccgtgtctgtgacagcaaaccatgatccactgcttgggcttccgttgacacctacaaagcggcaggcattttcaagattgtgatgatgaaacagggacctctcatattttacatg

SEQ ID NO: 11572 - DNA, 179 bp, Glycine max
caaccgataacatgcgtgaggaggccgccgtccattgaggagtatgccctgacataaaagagctgcaccaccaagatgagccttggctcataagcttggacggatgctttaatgggcgaaaagaatcagggagagaaagagagaggggggagcacgattttgaatgaagacaaagggag

SEQ ID NO: 11573 - DNA, 360 bp, Glycine max
catgccacttgccgggctgcgcttcccgttctttgtatcttcctggtctacaaaggaaaacccaaaatcaaacaaaacataagccatttaaccagaagccaccaaaaaacaaattatacccaccacaaaaaattgaaaaaccctagaaaatgaacgcctcaatcaaacccaatggcacaaaaaaaaaaagcagaacctggcggaaacgcttttgttgttccccgcgaagaagttcctgctggtagcggtcgatggtggcgcggagcttgacgcccttggcgggcaaattcttgccggtaaccgcgagggtcctctacttgctctgaatcgactccctgagcttgtgatcgggaatagcgg

SEQ ID NO: 11574 - DNA, 828 bp, Glycine max
  unsure (1)..(828): unsure at all n locations
caccggctcaccccagaaagagcggacntccgccaacccgaaccaacaccgaacctacaataaanacccgctcacncccccacnccacaggnnttgagatgagtcgtcggaaaccncnnnnnnnnnaangnaccccanngaaccnggnngngagaagaaagcggttaattttttttcccacaagccacgaacaccaacaccccgcaagaaaaaacaacgaacacaagaaaagggaaagacaaacggcgtgggcagccaataagcactgaagtaaccgcaccagcgtgacacgaacaccccgccacaccagaaccagcacaggaccaaccgggaggacctacgacgcgagcctcccttccctcaacacatgcacccacagacagacatcgcggccaggaggaaccccggccccaacgaacaacccaaaggagaactgctgatcagccatgaccaaccggagcacggtctaacgcgaggaaaccacacagcccgcggcagacaagaaagggaggcccagaacgagacgaaagcccgcatccacacccaaaccagacaacacaaagagcgggaaaaaatgcgagcacctccaccaacgggggcacgacccatacggcctgcgaggaacgacacccaacaaaggggacgccaggggcacaaatcacccctaaagccccgacccggagagaggcaccaaacaaaccacccccaagcccgagagcgtggccaacaaaacccacgcaaaaaacgaaaagcgaaccccccgaacctagagccagggggaaggcacccggtaaacaaaaccccaaagcccgccaaacacaacgacac

SEQ ID NO: 11575 - DNA, 425 bp, Glycine max
cagcttgcacgcctggggttaattaagcatgtttttcttctaagtagatgtctgccttttgagggggggcccttggctaatgcacaaccttggtaacccacaaaaaaaataaaaaaaaataaacgaagaacacgtacaaacgactatgtctaaaagatatttttagaaggaaatttcaagaaaaagttataaagattttttttttaaacttcacaattaaatctcaattaaataaagctattaaacgagacaattaaaaagatggttgcacatgatatatagggtttaatgattttttatcaacggatcaatgttaatgactagtattattaatttttattaacaagagtatttgaaccgggatctctgtcttttttttcgtctgcaatcatgactagattaaatttatatcttataaaaaaatt

SEQ ID NO: 11576 - DNA, 565 bp, Glycine max
tagcgagttcatcaaattccagaaaaattcaactaacagcttatactttctaagccttaaagcactggcttagcgagttcattcccaaaatgcagaaaacaaagatcaacttcatgaactcccttagcgcacaaagcgggcttagcgtgttcatcccaaaacccaaaaattcaaagaaacgtatgaactcgcttagcagcacaggctcgcttagcgagttcatcgcaatcccaaaaatggaggcttgcgagcctcaactccttaagccaccaaacaagcttagcagcttaaagctgagcctagaactctaaacattcatatactaacctagagatacttactaattcaacacagatataatcatttacacagaatcaaaaacttcttataacagaaaacatggcttctatcctagggtttcatattgacaaaaattttaaatagaagaaaggatcacttacttgaaatgcagccgagagtgaaatgtgtattgatagcgacatgctaatgatgaggaagtgatgagagacaattcccgttttagaatggcaaaagtacttgccct

SEQ ID NO: 11577 - DNA, 874 bp, Glycine max
  unsure (1)..(874): unsure at all n locations
ccgccggacgcattcacctactcaatgaacgaatgatcggcggaccaacgcatcgcccacccanactaacaacccaccccacccaaacagtttgagnaccgaggaacgccgancnnanagngaaccgccggctgcaagcccccacaatccctagaagagggggattttttttaatcctcggcctaaattttcaggtattcaaaaggtataatcccataacatgggaaagaaaaaagagccgcataccctccaattccggagaccggagactgtaaaaacgaaaaccgccactatctcaacaacaaccaagacaaaagattgatttatcgatcgaaaaaaactaaccaggacgagagaggaaattacggaagccgctttctattcctacttcttataaaaaaataaaaagaaaacccagtctatcggataagacaaactcacaatatggactagaacaataaaccgctacaccccgggatacaacaccaaaaggtaaccccttccctgcccttttcggggacaatggggatagggccagaccatccatgggaaaccaacgcaaatctcaacatagacgagcagatcaccgcccccccccccaactggtagtccccccgcccccaaataacccgcccaaccgcccccagaaacaacacccgcccctgcacaaaaacgggacacgacctcacccccacgaagggaaacacgcggggcaccccccacacgggcccgcccggcagacctaacaaaaaaacacgcacccccggcccacacgcgccccgcccacgacacggcgacgcctcatacgggccccccccaatagaggagcgaacacgccgcacacccccccccacgacagtggcccccccccccc

SEQ ID NO: 11578 - DNA, 242 bp, Glycine max
aaaagcctgagtttgaccctaatagaggacaagccaagctgagccttacataagtcgagccaaaggccctcgacaagctgcccggctcattggacacccctacttggagggcgaccacccctgggcatgtatcgctggaggagttaacgaaacaatttcggaaagattaaaaaacacggtataattataagaaaaacgatgctaagaaatgtagccaattatagcacaatagaagcgaaaat

SEQ ID NO: 11579 - DNA, 493 bp, Glycine max
agcttataaggaactgggtctactaaaagttttcttcttgttacttgactaacattttaacattaaggttgatgtggaatttggattatattcaatgacatttgtaatttttttaggatgctgtttctgatctgagcatggcacttgaagtgtcccctgatgatgatacaattacagagcttttacggtatgatcttgctcccttctactacatacttgcatctatattagaaacagaactatttattggtctacttattacatatatgacacatctgctgttgtaactgatgagtctctaattattatttaagattgattttgcttcaaattaatgtaaacaattgattgtatgctgaggtaagtatatctgtgagctgtttaccattctgtttttccttgatgaatcttggataacctataatgaaggaattgatattttggaaggaagctgatatgaaggtgtttatttcacgcatacccaaggaaaaat

SEQ ID NO: 11580 - DNA, 560 bp, Glycine max
tgcatattatgacaatcttattctgatcaaagcaagttatttaatatagtttttttagttgtaaaataacaaagttaaataaaaataaaaattgaaacaacggtgtaattaataaaatgaccaacgaatatgatgaacagaaatatgaacataagcaagtttttgtatacaatcccagaccacaaattgaataagagaagtggtgaaaggttagaagaaatttcacaaattgaaaaatatattctacaaacaaattttaatagaaataaaaaaaatcatttcaaaaactgaacaaaaaatatggaaaagtttatcaactcccaaccaaaaataatcaccatatggggtatgaaatcaagattgtcctttgaatctaaaaaatatttgagtagctttttttttcttttctagttaaatttgagtagctttaccacaataaggctcgggatcaaacttaaattcaatatcacatgaaagtgttgttctccaattaaacattggagttttacatcggtaaacttttatctttttaattaaaaatttcattgaacattatcgag

SEQ ID NO: 11581 - DNA, 393 bp, Glycine max
gcctttactctgatttgctctgacaggatttttcttcttaaaaaaaaagggaagagattaaagtctgcattttatattgtcttcgatcgattcccttttctcttttgatgaatattatttctcaaatcccaatggtgaagtagtgtgaaattaaatttctaaccaaggggctaaatttcatgatgatccaacggttattaagtccgagatcatagctttataggacaggttttgaatctctatgggaaaagaaaaagttacaatgcgaaagttttttatctctaacattgtttcacaatttacaacagcgagaatgctaaaaatgcgtctcaaacctagtgttaaaatatcacgatgatcaaaccgttaacaagtctgagattggtcgtttac

SEQ ID NO: 11582 - DNA, 545 bp, Glycine max
tttattaggcataaattcataacttagcatcttttcatccttgttcagatctttgcgatagcctctttacatgcaggcagtggaaaaggaaaacttgttggtaagttaaatgaaaacagaataaagtatactagttagtgatttctatgcaatgtcatcataaaatttttatactgtgaatcaatcagaagtcataatctgactttcaacttataatatatgacaacatgtgattgacattgtaaaatctatgatatgccttgtaaaccggctcaaagccaccctcaccaagtttatttgcatcagaaaaattattagttgttgctgcaacactcacaaaactgaataatggtaatttgacttctttctaacttttgcacccctttgtgcttctttaagctcagaatctttgactattatgctgaatcttacatcaaaatgtagcagatcttcccttacaattaaagtgaggagtattaattaacaagttaaaatactcataagccactgcgaaaacttattttccttcttaccttttctccttt

SEQ ID NO: 11583 - DNA, 375 bp, Glycine max
aaaaatttttttttcatataaagaaacacttgcccatccacattaacaaaaataaacccaccaagattcgatagaaaccacctgaatcaaaaaataagagagtacaaatatgaattcctaaaaaaaataaaagattgccactaataaatgaaagaactcataccgtgaactttagaaaatatgaaaacataacggagatgttagcctagcatttataaagaaccaaataaataaatgtaaaaatattcgcagaacgtagaaacatgggtaagcacacggaaaaggaaggtctccaatatgctcccccagaaagaaaaaagtgaaggcggaaagagggggcagccaaatggacaaagggactgcgtaccggaaaaa

SEQ ID NO: 11584 - DNA, 538 bp, Glycine max
ttagtttcaacacaagcaggttgcccaagtatacaaatttttatgtatggctctctttattttaataaaatctttgtagttttcttaattttaataacaaatttttcaaaagctcccatcaggaactgtccctccaagaagttgacgcactattgatgatgaatgtttactataggcagattagaaattcaaatattcaaattcaacttttaaacaatgtgtatgaacaccaaaagcagtaaaagggttaaacacatacagaattttttagctgtgcaccagacccaaagcttaaatctcctgctggaattggcaaaaccttcgaattcacaatagggtctgatatatgatcagtccggatctcaagggccgactcccgaagaagagcattgaacatggcaacatctagtctagctatgcattgttccatgacctggtaaaggaatttaatctactttaatctgaccaaaagaaagggaagttatttacacttgcagaatggaacgatatcattaataataaaaaaggcccccatttt

SEQ ID NO: 11585 - DNA, 478 bp, Glycine max
agcttgcctcaaagaggtccaggaaggtttttattgccgaaggaactagttccgctcctgagtatgacagtcaccgttttaagagcgcggtacaccagcagcgctttgaggccatcaagggatggtcgtttctccgggagcgacgcgttcagctcatggacgacgagtatactgatttccaggaagaaataaggcgccggcggtggacatcactggttactcccatggccaagttcgatccaaaaatagtccttgagttttatgccaatgcttggccaacaaaagagggcgtgcgtgacatgaggtcctggggaaggggtcagtggatcccgttcgatgcagatgctatcggtcagctcctgtgatattccttagtgctggaagagggccacgagtgcgagtattggccagaggaggaacccggctgaagggttccaaaaggaggccatcgcccaactgctatgtataccggggcagg

SEQ ID NO: 11586 - DNA, 468 bp, Glycine max
tctggtaggacatcttgacttgctttccaatctgacatttaccacagattctgccttcttctattttcagattgggaatgcctctaacagcacctttgtcaatgattttcttcatgcctcttaagtgcagatgtccaaatctttgatgccatattttgacttcatcttctttggaggatagacatgtggaggagtaactggtttcttgaggtgtccataggtaacagttgtcctttgatctgctgcccttcattagaacttcactcttctcatttgtcaccaagcattctgactttgtgaagtttacattgaatccttcatcacacaactgactgatgctgatcaagtttgcagtcagtccctttcccagcagtactttgttcagactatgaagtccatcatggactagcttttccattccagtgatcatttctttagagccatctccaaatgtcacatacctagtgg

SEQ ID NO: 11587 - DNA, 455 bp, Glycine max
gagcttataaccaagacttgcaaaattttctattttttataccccatatttacaggagagctcaaagaatacaccagcttattgcctaacacccatgactagcaaaattttttacacccataattacagtggaactcaaagaatgaaccagcttatatcaatgccttgcaataaagaggcattcacctttaatcttgaagctacctgcaaaaaaacacaatttattaaacatacatcaaagataaactcattatcaaggtatgtaaggcagaactgcgagtatgggtctcagttctcaccactgaaaacagtgcagaaagcccaacaccaacaccaatccagaagagaggtgaacctctagaatatagtaaataggaccaataagaatggaactaataagcaatagatatcaacaaaattaaatcaataaagtatcgatcaaccacccccacccc

SEQ ID NO: 11588 - DNA, 657 bp, Glycine max
tactagctagctactagaatggcttaccaaatactatatctgttttgtttaattaaaatacagctgaaaaaaaattatggagacacaccttgattgaagagatcaattgatctagttctttgctcttgtgccccttcttaattggactctcctcatccttgttaaaatcactcgagtcttccagtacttccattgttttcttgccttttcctttatttttgatgtcattgttgattgagttgttattcctttctaactccaatgccaaatttctctctctttcttgttgattcttctcttccaaatcaataattcttctacttcttcttttttctgtaaaatctatttcatcttaaaatctcacttggtttcttgttgacactatatgtatcaagacatgaagttgagaagctaaactctatactcttcattctattttagtcattgggtgattttttttctaaatatttagtcaattttggattaaaaagatttggacctttagtctctctccttattttggttctattaataatgtgatataatcatgttatacactatatcaatgaattatttggcatatcttccctttttttaagtccattgtagttgaaaccctaaatcatgacctttccttcccctttttcctttaacccc

SEQ ID NO: 11589 - DNA, 800 bp, Glycine max
ctccctacccgtccgttccaccctctgctcagcgcccatgactgttggcgaccacgacaaccccccccccccctgattgacctctgaccccggatataagacccggcgggagagctactgggcgggaaacagcatttttatgacaactcggagaaaaaaatcggccgaggaatacagaaaacccccaaaacctacaaaatgccacggtctcaaaaaaagaccagaagtccatgaaaactgaaagtaacaacgacctcatgttggcaaaaagagaattgataatcctagctggaccctgagtggaaagtgaggcaaacgcatgggccatttgttgcactaaagatttccttatgggacagctgagatcaaaagcgactccactaaaaagaacttcaggcccacggacatcgaagtaaaccattcctcacgaacccctcttttaatggccgtagagggggaagggactttcttactcccccctactcttgctcaacaagaaataaggtgggagtctttacttaacaccactcttgacgtgataacactggccgaaccaatttgaggataaaatgggctaaactctcaattgtcgcacacggggaacccgggtcgttaaaataggggggcggggtcgaccacccaccctccacaaccgaactaaagggagcgcagtccaccccccataccgaatcacctgaacagcgtacctccacgcacaccaaagaccgacgacctcgtcgtatatcaatgatcccacaacaaccgacgcagtcgcccatcatgtacttaccccacaatcg

SEQ ID NO: 11590 - DNA, 467 bp, Glycine max
  unsure (1)..(467): unsure at all n locations
tctaaatanacattgatgtttgaatatatgggttttttttgtatgtcatttttgtgctaagagcagtgtcccactggtaaaactaactttccaaatgtttgccttctcaagaaatggccccgaggaagcttgcctcaaagaggtccaggaaggacaaggcagccgaaggaactagttccgctccggagtatgatagtcaccgctttaagagtgctgtacaccagcagcgcttctaggccatcaagggatggtcgtttctccgggagcgacgcgtccagctcagggacgacgagtatactgatttccaggaggaaatatggcgccagcggtgggcatcactggttactcccatggccaagtttgatccagaaatagtccttgagttttatgccaatgcttggccaacagatgaaggcgtgcgtgacatgaaatcctgggtaaagagtcagtggatcccgttgatgccg

SEQ ID NO: 11591 - DNA, 912 bp, Glycine max
  unsure (1)..(912): unsure at all n locations
gccgatctgttatttacagactagcctcaaccgtcggatccgatcaacccatcggtttagcaaacaaccgtacgcaccatcaagcnacnacaggttgtacgcctcgtgacaccccgannnnaaagaaagccggaggctgccagctataaaaacagcatgctaggattttttttacttaaacaaagaagcatgacctacgatgagcacatataaaacgttacatgaaggaaacatgcactaaacagagggcgtagaatccacaaaaccaagagtatcgtaacaggcaataacacatcaaacactgaggcagattcaataatcaaccccagaatttaaccacctaacatcatcatcactaggacaccaatgggcaacactaggggaagaaaaaactccacagagaactcacccttgtgagatataaatctaaggacatcctttgaacataggcagcactctatgagcgaaccaatcaggaagattcgaaataaccccaagaaagaagtgtggtttataaaaaaggagggagattgagaaatgacttaccccaaaagggatcgcaaaaaccttaaaccatgtaggaggttagccctacatccagtggaaaagaccactgtattggttagccaccagccgacaaacgtgcaacaataagggggaagggtttcttatacagccccgacttagggggccaaattaaaaggaatgaacatcgggggtctctgggggttaaagaaacgacaccatggggacccaccaactgtagtattgggcgggcgtgggggagcaaaggttctaccacgcaatggaaacaccaattcactgtgacccaaacgggtgatataacccggccgggaaaggaactaaaaaaacatgcgcaagttatttgtaaaacacaagggacggggtggg

SEQ ID NO: 11592 - DNA, 782 bp, Glycine max
  unsure (1)..(782): unsure at all n locations
acgcgccccngtgaatgcctttgcatagcccnnccnnnnnnnnnnnnnnncncccttcccgcatnnancccacancacacgcagccataaccatcnnattgtttttatgacaggaccacaacatcttttctgtgatattataaccataaccatacgcctgttggctcacccatatatacaaccgaatataactgaatctgaccagcagacatttcttgatcggggatcaaaaaagactgagagcgtacatctgacctcataaaatgaccgtgttaacacacaaaaccccagtctacaggttgtgatttgtaagtaacttatgctagaatgcaatatacggagcatcaatcatcataaaagcctacaaaggtatactggcatctattgcctttgacccggatatcctggcccaaccaccagagattatgaagtgatttagtcatgttgaggcctataatacccttacaccagcccccatattgataaaaaaaatcataaatttccatttgcctgtaaacaatgaaccctaaaatgtatttgcataaaaaccctatatagaaaccgaggctatcagaaaattggttcgattcaactattcaatagacatattatttgtatgctaatatatcatgaattaatttttgttggagaatgtgggaaaattaaatgaccaagcttccttcgaacctaaaattcagatttttttcttccagcattgtcccccttatagaccattttttagcatttcccaaattgactcgagacccccacccctcccccct

SEQ ID NO: 11593 - DNA, 523 bp, Glycine max
agcttgccaccgagctcgcccaggcgagttatgttgtgccttttggaggaacttcctaaaaggcccaagggggcctgctttctagttgcacctccctgtttactaaatatacccccctgtccttttttgctgattcttttttcgtaacgttacagaactttatgaatttcgtaacgatacttgtttttcttccgtaatgtttacaaaaccttacagattacgtaatcatccccttttgggcttttggaatgttacggaacctcacggattatgtaacaatgcttccttttgatattcggcatgttacagaacttcacggatcgtgcaacaatgctctcttttgacttctggcatgttatggaacttgatgtattgttcaagccaaggttgcatgccatcaaacattgctccccagacgaaattaggggatgacagccgcccctctttacttaccttttatcagagattgggaggaaagaaagataatcccttgatttcatcccgcttatccctctccgaaaaa

SEQ ID NO: 11594 - DNA, 250 bp, Glycine max
  unsure (1)..(250): unsure at all n locations
gaccacacagngggaccaggaaatatgtcgtgaaggtccagagaccttggggacttcacgtggggcgctatagcccaaaaccaatcgtgagcaatcccgacccaacccgggcataatcgggcagcgagaacctgtgagggaccttaacaagcgagctcctggcagtctacagatgaaaggaaaacaacaccacaaagcaaggaggcttgtggcggctggccacctgcgaattttgtgtgatatgtggatt

SEQ ID NO: 11595 - DNA, 142 bp, Glycine max
agccccaaaaacacttggaaaacttggaaaagagggaaaaggggccgcctccctatgaccaccttgggagaagagaagaaagaacaaccctggtgagttttggaggctaaatgaacttatagaagaagcttaaagcatgggc

SEQ ID NO: 11596 - DNA, 894 bp, Glycine max
  unsure (1)..(894): unsure at all n locations
ccgggggcttttgattgacattcgattganacgnnnccnncnnnnnnannnnnnnnanngncnnncgctcagctgaggccacctanacacaggcgttatgcaacaggacaaatatttttgngtangttttaaaggacaaacacacgctcgacaaaacagatttatgtgtagaccacacccttgtatttgaacgaagattcaaattagatcctaatattctttgcgtcattggggccaccattctctcaagttggacctcactccttcatccctttggcgtaatagtcacactctaagtccttcccagtaccttctcatttgattgtccttgacctttatcactttaattattttgatggacagttgtttgatttgaggttggttaaatcccttttcatagactcccacaatgcgcaaaacattggctccgctgcttttctatagtcgacctcattcatcattccaaacactaataaattctgtctacatttattcattcttctctcgacccaaagttgttttcatacttaaaaaactcgcctcggttcttttgttgtccactttatgtttctaagactttgaagatgaaaaaactaaaccccttgcgcgtccattatttttttacattgggggattttttttcttaattatcttgccaccttggtttaaaaaacattttcctctaaccccccccattatcctggcttatacaaaaggggtttaatcccgttttgcaccctctcaaggattgtttggcccttcatccctttcttaaaagccacgttagttaaaaccctaatcaggacctttccgtccctttgtttttaactcccgaaccctatatatctcgcattgagcttttccaaatttcattacagaggctgctgcggaagt

SEQ ID NO: 11597 - DNA, 472 bp, Glycine max
agcttctttgagaaaacttccttgagaagctttcttgagaaaacttccttgagaagctagagcttagctacacatcccctataatagctaagctcacctccttgagaagcttccttaagaagattcctaaagaagctagagcttagctacacatacctctctaatagctaagctcacctccttaagatgagaagctagagcttagctacacaccccctataataactaagctcacccccatggcaaaatacaaaaaaaatccctactacaaagactactcaaaatacctcgaaatacaaggctaaaaccctatactactagaatgaccaaaatacaaggtccaaacgaaggaaaaacctattctaatatttacaaagataagcgggctcatacttagcccatgggctcaaaattaccctaggctcatgagaaccctaggcctttccttggatctcggcccaatctacttgga

SEQ ID NO: 11598 - DNA, 850 bp, Glycine max
  unsure (1)..(850): unsure at all n locations
ccccgccaacaacaccaccaacaccctcccccccccccctcgtgccgcgaaccaaaccaccgcccccccccaccccgaaggnttttgatgcgtcatcgacaccccnannnnnanannnagcnacaaaggannnnaaaggggacgccgctatgtatgtttccgaagggccccaccggaacgtgatagagatcaacacgattctcagccttgaacatgaagagtaaagacaatgccatggcttgtgttcaaccccgagcaaaatgagttacatcttcaagggctgtgtgaacacattcctataacactctctccttcttaacagagtccgatccctaaaataaggatgtttagggactctgccgcacgatccaacacaagagtgagcgtactctcacaaggccgtagacttgtagggctgagctatgccgcgagagagcgaaagcgagcgcaacaccaaatgattctaggggaaagaataggccaggggggagacatacaacttcatatccctatccccccctacatggcgcgaatctagccacccgaaaggtgggcgcaaaagaaactcgcatcacggataatcggcgaaggggcctcaaggggcaaccccatccaaaaatccaaatttgcgggattccaaccggctccacccggacacaagaaaagaaggggagaaaaaaaactcccccaaggaattcgaaagggctgaaaaaaaccaataaccttcattcccacccccccccacagtggttcaaggaccaccacaccccccggggaagggccacccccattcccaaaaatacaggagttgattaaaatggggtgcacctccacaaaccggccccaaccc

SEQ ID NO: 11599 - DNA, 357 bp, Glycine max
tcggccttgaatctaagcttaatggagcttacatcatgtggtattaagagcatcttcatctatgttatgttcttttgcttcctctatcttttggttcggggaattctcttaaattcctttttcttcatgatgcaatcctaccccgcaagggcattgggtagaagactccaagtagattgggctagagatccaagggaaggtcctaaggttctcatgaaccttatggtagatttcgagcccatgggttaagtttagcccgcttatctttttaaatattagaatatgtatttccttctgctgggccttgtattttggccattcttagtattataggggtttagccttggctttaacggg

SEQ ID NO: 11600 - DNA, 398 bp, Glycine max
ggcccgaagaggcaatttgtcatcccgactagaccaacgggaaaaccggggccaaagaaaagggtgagaaaggaggagaaacccatgctgggactgccattcctatactgccaaagtttccaccaaacccaacaatggcattactcaacccataacaaacctcctccttacccaccacccaggtatccacagaggccatcccttaatctaccacaaaggctttctaccgcactttcaagacgaacccacctttacaaaaccaaaacaccacccaaaggaatttgcagcgagaaagcctgtaaaaatcaccccaattccagtgacctatgctgacttgctcccatatctacttgataaatcaatgggagccataaccccaaccaagggtcatcaaccct

SEQ ID NO: 11601 - DNA, 480 bp, Glycine max
taaagtatgcccgagtcattcatccctatgagatgttgttgttgtattggcgatcagaattgccattccttggattatagggttgaaccaagctcatgcttttacaaaaaggttcatcaagtcaagttgaaatatggaagtaaccgtcttgcaaaattggggcaaaagatgagtcacatcactgcttcgtctactgccaaacatatttattgatgtccttgttacttgcagtttcaccttgacaaagatgtcatggaccatgttgaaaatctaaattgattcaaccccatatcctgcgtaaaaattcgcaatacttcaactgtacatcattcgcatgcatccatgcttttcattggttgcattgctcattgcattctgttcttgaaaaataaaataaaataaaatgaacttatcaaacggaaagggacagcgcttacgacgcccttaccgaactcgtgctagagctatagtcatgggtga

SEQ ID NO: 11602 - DNA, 955 bp, Glycine max
  unsure (1)..(955): unsure at all n locations
cccacgctcccacgctaccaccctgaccgcgacggacgctggcagcgtcaccgccatcctcagcccccgattttgactctgcacggcccnaaataaaaaccccgcgggcgccgccaaatgaaaaaaccactgagatttcttttggggaaaaacgccgggagaagcgtgagcttagactccgcttcccctataatgagcgcaaacccacccccccttgagaaggcgcccctaaggaagacccaccaaaggaagcaagaggcttagcggacaccataccgcacccctaatgaggcgatacccctaccctttcactaaagaggaaggaagnccagaaaccgctaatctcccacccctccagctatttactaaactacagtctctaggcgcacatcggcgacacatacaacacaataagaccccctaacctacagaaggaccaccccacaaggaccgcccgagagtgacaaccgccaaaaaagtctccctactgacatggacatgaccaaacattctcggggccaacgaaagaacaaccccaacccaacatttgccggagatagagcgggcataaacaataagcccgtgggcgggaaaaacacacctaaggctcgcgaaaacccctaagggcgcccctggggtgctcggacccggaacaacaggaggtctctctacccaaagccctttgcgagggagcggaatgaattcaactctcccgccaccgttgtgaaaaggaatcggggaccacacaaattggggggggactcataccttggggcgccctccctcaacccccgggagaaggagacaaaacagttggacttaagggccgcgggtgaaggatggagtaaagaaagggccttcaaacccatantctggggtcctccccacgagaggaaagggggacccgacgacccaaggggggggctccagggacgagaaacgggggcagaccgcc

SEQ ID NO: 11603 - DNA, 584 bp, Glycine max
  unsure (1)..(584): unsure at all n locations
ttttacagaagtgggtctctctttattgagagggttgaaacatcaatgacaaatttcccacagagagaacttgctcgagtttctctctcttggaaggcttaaaattcagttgaagatacttcttgttgaccacttatagcttcaaagaagaccattgaactagagcccactcaactgacaaactttttgaggaagtagacacaaatgatagtggtcatttcatgactactaacaaggttattctaaggttactattttgaggaacctttctgatgggtattttgaagtaacattagaattgtggttctgatgttagctaagaaaggatctatacttgaagtagatccttttttatgaagataaactaatatgtctttctcaagtagcataacttcatcaaccttaacacaccttcacaacacaaagcattttgaagtaaattgcttcataaaatcaaagtgaatgtatagttgttggtgtgttagtattttgtccaacgttagtctatcattttgatgattcatatantgtcttctcatggacatcttcaactttcaacttaattgcatcatctaatgtagttg

SEQ ID NO: 11604 - DNA, 269 bp, Glycine max
ttctgcttttattccgtgaccacaaaatggtacctggaaatatttcccgggggttaagaaaccttggggacctcaaggggggtgctattgcccaaaaccaaacttgaccaatcccgacccaacccgggcataatcaggcaatgagaacctatgatgtacctaagtagacgagctcctgacagtcaacagattaaaagaacaaagaccacaaagcaagggagcttgtgtggtggctggccagctgtgaacttttaatgatatatgggata

SEQ ID NO: 11605 - DNA, 575 bp, Glycine max
tcaagctgctcaattgctccaggttgctgcatggaagggcatatgtctgtatggtggtcagcagaggagcacaaaccacaaacccttgcgacaggtacaaatttctgattcaaggctaactgggttaccaagttgaccaacgcatccagtttgccttcaagcttcttagtttcagatgatgcagatgggtttgtagctacctcatgcactcctctaatgactatggcatcatttcaggcgctaaactgctgggagttggaggccatcttctcaattaaatttctggcttcagcaggagtcatgtctccaagggctccaccactggcagcatctatcatacttctctccatattactgagtccttcataaaaatattggagaagaagctgttctgaaatctgatggtgggggcaactggcacatagtttcttaaatctctcctagtactcatacaggctctctccactgagttgtctaatacctgagatatccttcctgatggctgtggtccttgaaagccaggaaatttttttctaagaatactctcttaaagtcatcccacctcgtgatggacc

SEQ ID NO: 11606 - DNA, 399 bp, Glycine max
gcttgatgtgagaaagcggggaaataatcatttcttcctacttttggttggtgaccacagagaggtacctggagatatgtcacgggggtcaagagaccttggggacgtcaggtggggtgctatattccaaaaccaagcttgaccaatcccgacccaacccaggcatattagtcagtgagaacctgtgatgtacctatacaggcgagctcctggcaggcaaccaataaaagaacaaagtccacaaagtaaggaggcttgtgtggtggctggccacctatgtatcttgggtggtatttggaaattagcctctggtaatcgattaccaagcgtgtgtaatcgattacagggcttaaaaatggagatagtatgttaaatggcctctggtaatcgaataccaat

SEQ ID NO: 11607 - DNA, 452 bp, Glycine max
tgtgtgaagagataaagagaaaaagacttagaaaattcttgcaattgtctatccgctaagcgcagaccttgcgctaagcactcagtcttcacgcgctaagccgagcttgctcacaataagcgcatagacccctgattggttggctgaatagttcagctaagcgcacatcacttcgctaagccctacatcttcacggtaattgaaccttaaccagtgggcttagcgcgtggatgatgtgctaagcgccacttcttctgtggaaaatttttattgtagcagtgctaagcgtagtatcctgcgctaagccccagatccattctgtaacttgagtttttaagctgggcttagtgggacaagaagcgctaagtgccaatctcttacaggttctgaattcttggaagtgcgcttagcgcgcctgttgcgctaagcctgaactactctctgtaagttga

SEQ ID NO: 11608 - DNA, 412 bp, Glycine max
  unsure (1)..(412): unsure at all n locations
agcttgtaggattatggggtacccatcacactttgtactaagtggcggncgggcgatggtgcaaaacaattctccacattcacaaatcacgtataaacccaccatcccctgttgcccacctcaactgagctcacgtactcccacataacccttatcctcgttcctctcaacgccgggtccccatcaatcctcccaatcttccacaacatcaaagtaattcaaaatccaagaatcatgaactaacacagccaagaaaatagggcagaggcagaaaactttgcccaaaacacaaaccaacatcacaacttttcacactcaaataccccagtaatattctcttcgttccaattcgntaaccgttggatcgactcgaagaatttactggacgtctctagcacataaatctacatta

SEQ ID NO: 11609 - DNA, 487 bp, Glycine max
ttataagcgcgggtctgggagacgaaggtcaagtggtctttatatacgaagatgatgttccgagtacattggatttggtacgaccatgccctcctgatttccagctgggaaattggcgagtggaggaacgccccggcatttacgcaacgagcataatgtaaacctttacggttttaaaagctctatagttgggcctaggctttagagtttttcctattgttaaggctttgtgtcttttgtttttgaatttataatacaaggatctttcttcatctgttcctacgtctctacccattctcattcatttgcatgtttacttctttttctgaaatggcagatccaatgacgagtcccccgaaggtactaatacctgtgacccgcctatcgacttcgagcaagaaatgaatcaaacggaagatgaaggaaacgaggatgtgggacttcccccagaattagaaagaatggtcgcccatgaggaccaagaaat

SEQ ID NO: 11610 - DNA, 1006 bp, Glycine max
  unsure (1)..(1006): unsure at all n locations
cagtccggaggcgacacaacgtgtgcgtatcgcacccacacccaccacggcncgacacccatcagagaagcaacccacaccacgacccccacacccccacgggatgtgcttcgtagcccgcccgnnaananaaacggccggaggccgcagacaacagaggagcggaaccctcgtttgtttgagacgcaccagaacagaaaaagaaaagggagcacccacgcgcggggaaggaaatgagagcactaccacgagaggaaaccggggcctacaatagcagaaacaacaaaacaatgcctgcagaacaccctctataacacaagcaagaagcctcgcagaagggacgcaagaggagagaccagaaagacagacgagcagacaaatcgccccgccgaaaccgggcacggaagtacacaaaacaacaagaaatactacgaaggcactctcgaaaggaagacgccgacgcgggggaacaaaccacacaaaataccaacccctaccactcctcaatatcaaggcgngcaggggagaagaacgtctcaccaacaacatccaacccttaaggaagaaaacgaccccccaccagggaccaagcgggaaaggcccctttggcccccaacccccacaaaaaagaaaaaaagccccgccaacagaagaaaaaagggacccatgaagcgaaatggcaagggggaggaacaccccccctatctatagaaacaaaaaaaaaaaggtcccacccacaaaagaaaaaggcccggagggggtttcccaaacccacccacaaggacggaaaaacaaggggactgagacgcccccacgcaaaaaaaacaaaggcaacctccacccgaaaggggggcacaggggggcaataaaggggcccaagcccaccaactcttcctttaattccaacaaaaaggccatcacggcgacgtggagccctccccaaaaatcctccccaccccaacaggcgagagcggacaaaaagtgggcgaacacaccccaccccccc

SEQ ID NO: 11611 - DNA, 473 bp, Glycine max
ttgcttctcaagactcttgcacaggagtagatttctatattatggcaagctgagttactaggttgaccaaggcatcaagttttccctcaagctttttattttcagcagatgaagatgaatccgtggccacctcatggactcctctaaggactgttgcatcaagtggcctcagaataattaagaagggggggttgaattaatcattcctaaacctttactaattaaaaaattactcttctaaggcttttactatgttgttaagtaaataaagagtagaaaagaaacttaaccaaaactaaaagcaggaattaaaatgcacagcgaaaattaaaagtgtagggaagaaggagacaaacacacaagagtttttgtactggctcgacaacaacccatccctacatccagtcctcaagcgacctatggtccttgagatttcttttccaaccttgtaaaaatccttttacaaacaaaag

SEQ ID NO: 11612 - DNA, 479 bp, Glycine max
  unsure (1)..(479): unsure at all n locations
tcaaacattattgaaaatgttttaaaagnttgtcaagctgtgaacatagaaagaaacaaactgaaatattttgccaaacataacataaatagctttttgtttggatgaagatcatctttggacaaataaaaatccaaaatgagatctacaaatagagcatctttagcatgggagtataaatagttgcgtaacttgaaaaggtaaagtcgaagtaactactaagagcatgttcggctaaacgttggtgaagtcaaatgtaatcttgctagcgttaattttgcattaaaccgttggataggccaaacatgcactaaccgaagttcactctacaagatgtgtttgtgttgcatcccctaacaaaaaggactcggcaagtttaaatctatttttactgaatcataccagacagaaaagaaaattgtatcgtgctcaaatgtctacatatggaataaacaggtcttgtaacaacaatgataaac

SEQ ID NO: 11613 - DNA, 819 bp, Glycine max
  unsure (1)..(819): unsure at all n locations
ccccacctaaccacctcaccctccccgacacaacaccaaccgatcagaacggaccccccacaacaagggttgacctgaaacgccccnnnaaanaaccgcagcagccggggccccatgcaggggaaggaggtttatcttttgcgcggggccacaacagagcggagggaatgtcccacacaaccataactaagatgccaggaaaaggtacaagaggtaggagggccaacagcatcaaacccacctggaaaacacttgcaaaattcataagagagacatgggagggtacacaaacagaggacatcgtcaaggaattggacgaaaagcaaggtgcaaagaggagaatacaagacaaagcaccggatcaggtgataacctgcatgacaaatgagggggagctcactgtgatacacaaaaaccagcaagtgcaaaaagcatctctacttgatcccgaaaagatcaaggagtcagaccaacaagcaccgctgagaattaacgcggaagaagatgcaaaaatggaccaaccaaagaccggaaaagattgctccctgatacacccaaacttgagaattacagcaagcaagacgttcacgaaaatcggacgaatctttcatcatcaacggattgggccctaatccaagaaaaaatggagaaaagcaccatcacattctccccaaaaagggtatggagataatacaaaatgcaaaagccagggaggcccgactaaaaacctttcaggaagggaaacaaacggggaaccgccccacggcgaaacttaccacatagcatccaaatggccgcccgggaaaaaatcagcccccc

SEQ ID NO: 11614 - DNA, 343 bp, Glycine max
aaaataacgcgattccccttttgtaaacacaaaaaggccatagtctagaattaacaaagaaacagaaaaattcacaaatgatattcaaaatcaaaacatgcggtactgttttagcaatccaatgtggtagtgaaaagacagataaagcataaaagaagtaaatcgaacaagacagtaaataccaccacagtgaagctgctttgagttaatgaagtctaggcacttcgtaatcttgctagtttcgaacttcacaaaatgaagccttccaccaagaataggatagcttctcctgttaccatggggcggaaatcccagtcgattattcacatttatcatcctttta

SEQ ID NO: 11615 - DNA, 198 bp, Glycine max
cctcaagccggcactgatcctctaacgaatcaaagactgaaggtggctactacactccgtgaatgaggatggcaaaaacacaagaagcaaacgaagggaagttagaggcagctctatcactttgacgtagggacatctcgccagtgaggatgcctgcaagtcgcacccacattcggttaacgataaagcacaacatag

SEQ ID NO: 11616 - DNA, 948 bp, Glycine max
  unsure (1)..(948): unsure at all n locations
acccaaccacaaggaacgcgcacaaaccatcccacccccgcattgcacgaatcataaccactcacgacacgacgcaccccaccncccccaggaaaaaaagggttgttgaaatcagtggcaacnccncannnnnnnnanaannnanccgagagcaagcaagcgtncaaaggagaaaggaggcggatttttttaccttagacgccaccgacgaggcggagggagggccatgacctcacaacgcgcacaaagcagacagcgcagaaccagaacgcgtaaaaaaacaaacgcccaacgaccagagaagggcagaacagcactccaaaaacagagacgcaccagagtcaaccacgatatggaaggcccacaatgatcaaaaggaataaaacgacgccgaaccaagccaggaaacggcccatctatctcaggaacacaggcggggaagacagaaggatagccgctaagaatacactacaagcagcacgcacaccaacaggtgccctgccatgaaaataaaggggaaaaggttgaactacagcaccccccaagaacccaaacgaagtgaaattttgtgagccacccctaacaaaagatgagaaagaaagcacacacaaacttccgacaaaagagtcaaaggctacccacgaccagcgaaacacgggagggcaaagaaaaaccaaacgaaaaaaacctgggaaaaaaaaaacccctgacatacacgcttgttcttttataagaagggaaaccccagacggccaaagggatggcgccaacgggggaagagaaacctactactcaccacaccaggccaaagacccaacaaacggtaacgcccacgacacggaagacacaacccaacagtcacggacagaacgcaaacaaacacaccagcaccacgccacaacgagcggacacgctctcgatacatccacctcacacgatcgcacgaag

SEQ ID NO: 11617 - DNA, 466 bp, Glycine max
tgtaccggcttcaggttttttgttttaaaattctctgcttccttattttaccaaagtaaatattattcgcctctatgtatctctaacagctgtgtaccaagtaattacaggatgtaattactatgttcaatccctataatcaagggagcttgattttatattgatgaaggaatcttatcatataaattgacaaggttgagccaacctctcaaacattttagaatcaatttcagctttatttttatagttcagaaacacccatttgcatatgcatataatccagtgaaaattgaaaaagtatgtaacaccaatgttatgcacagacagatctcaatagttacctctcttctatattctccgagttatgatcttttccttttcaaaaaaccggagagttcggcgaaacttgtttgtgtgtaagttgagatcttttgccaagtcttcttctcggacccattgtcgcctg

SEQ ID NO: 11618 - DNA, 378 bp, Glycine max
cccctttttttgtagtccataggcaggaataacatgtctcaccatgctggggatttcttgaagctttactaatgaattcctgggcttaattatagataattaaattgttaagacctttattataacgaatgtccatgactatatagagagtgtgaagtgagaattcttcactattttcataaataaaaataatgaatatagaagactcgatgatatttgagggggacaattaaattcacttacctttatttactttaggaagacttcataaattctacttaagatatcgatctccattgtacaagtggaaatccttttgctctaacacacgaaaaaacatacaaagtctgacaaagatgaagaatgtgactatgagtg

SEQ ID NO: 11619 - DNA, 860 bp, Glycine max
  unsure (1)..(860): unsure at all n locations
gccccgccccactaatcaagcaaccaccctccaatcctctacgaaangcgttattggaatatatacagactcccccnaccgcccaccaaggggtttgtgtgagttcgtgcgaacacccgnagganaacacccnctgcccgaaggagcaatgaaggggggaagagacgaggattattttttgtcaggcccgaaagcacttcaggagcgccccgatagggcgacgagaatcgattcatcgaagaaagaccaaggcgaagcccgcgcctggcaatcacgaaacgcaaacggggagggagaccgctgggataacagcccgtgcacgaggggggttcagatccacataactgatccttaaccattgaaaagacaacaccgcgaaagatgctgctaggaggacacgcacgacccgacgggaaaaaaagttggcccacagaggatcgaagggccgataaaggcacaggccaggccacacaggaaacgctgggtgtccccgaatacaagcatgactggactggaggaaaaactaccataacactgccaccggacgatgggagagctaaatgcctgatagtggtttaacaaaattctggccggacaatcttgccggaaccccggtggggaacgaaaaacgacggggatgacagtataaaagcgcgccgagggaccgccataaaaataagaacggcggggaagcactagcaattttcctatggacccggggtccaaaacgctataaaaacacccaggggggactcgagcagaaacaaggtgacaaccaagcccggccaaaaagaggcctagaaaaaaaaaataacaacctcatcctgggggaggaagaaaaaccgggcggcaactggaac

SEQ ID NO: 11620 - DNA, 420 bp, Glycine max
agcttaacacattgtttgcttctgtctattattgatggtagccctaggtacttgcgtcttcccaattgattagtgacccccaaagatgagatgttttgcttgagagcttgagaggtgttggtgctatagaatatttttgatatacaaaggttaatcgtttgccctaatgctttctcataagtgttaaaaatatctctcaaataatcatcaacaaataaaaggtgtgagaggcttggaatccctctatacaccttgacaccatgaatctatccctcactttttgctctccttaagcgtgtggaaagcctctctttacaaataatgaacaaatatagtgatacttggtgaccttatctaagacctctcccatgaaaaatatttctcataggattcccatttattatgatagaatagtgaact

SEQ ID NO: 11621 - DNA, 771 bp, Glycine max
  unsure (1)..(771): unsure at all n locations
tggccctgtgactgtaacctgnananncncnaannnnaganngggccgccggnggtcngcnccaaaggatggcggggactcttttctttgatttccccacgcaacgagagagggcagctttttatttgactgccatctacacagacaaaatgtgtgatactcctggccgtacccaagttcaaaggccttgctggacaaccgctcataccgacctggcagagtagcgaacatgggcttacagatcgactctatccaacaattgtacaggcagaatggagaatggcccctgatacagctttttctacttagaaaattatgcagtctatcacacgcgatatgatgcactctgtgtgcatccacgtctggagccgcatggttaagccacgccagatatccgacaacacccgttgacctgatacattccgatccttacccccgcgaaggctcggaaaggacacatgcctccgaatcttttcacccgcagttgcccgagtatcttcatctccagcaagttcaaccgacagcgggggcgaaatgaccagctccttttgttttgtctgtaactccctcatgtctaccacatgtcgaatgccccctctaaatcattgcgctgctatcatatttctctggctccgccaccgctgtcgcgcctagagcttgatactacgctgcgttttcttcatgtcatgggactacactcttgtactctgggaacaactcttctgttagaatctcagttactttacgccccccttcactaccagaaaaccc

SEQ ID NO: 11622 - DNA, 254 bp, Glycine max
gccagcttctcatcaagtgacattcatgagattctctccccggccttcttgacttccctttccttgctcttagccctgggacacaatttaatgatgacccctttgacaagtcctctccttcattggggaactcatcagaggaagatatacccatcactgaaagggcttctacttgcatcccctctcccatgctttaatgccatagaagacctcaagaacacactagcctctttgcgcctcttttttcccacgcc

SEQ ID NO: 11623 - DNA, 916 bp, Glycine max
  unsure (1)..(916): unsure at all n locations
acccctcccccttcctaatgtgagttactactactcctctcattgcgccgtcagcttcactcacatcantcgttcttacctattctctcattttcctcttacgcagccaggcgtcggtgtggtattccttggactatcgctgaccatatagaatacttacatctggaggggttgatggggacccgttgcttataggaacttgataacggctacgtatgagtacgtgagctcagtcgaaggtggacaattggggatggcgggttcatgattgatttgtggatgtgggaaagttgattatgcacatctccttattgccatctattaccatatatgactggtaccccatgttgctacaaactttattttggtatatcgtggaagaatcacaccttctactttagcttgtagactacaaatttaacattggatatattctcctggcggtacctgcatcctcgttgacggctagttgagttctattatgctcaaactaagtttgatcaatcccgaacctaccccagccttagtcacgccattgaaaaccatgtgatgtaacttaaaccaggggaagctttctataccagttctccctctattaaaaaggaaaccatagtttcctccttaagacacagtgagggtctctggtttcggcacacacctggtcgcccccctcttattaaaacgtctctgagatatgggcatttacttaaaaaatttcggggnccctcatggggaaaaatcggatatttcccttaagggaagaggtgggtcaaatccgcaatttaccaaaagggcgtttataaaaaaatttggggaaaaacacgggggaaaggttttaaaaaaaaattgccgccctttctgtggggaaaaattccggatttttaaccactcaaagaacgtcttggtggtggtttcn

SEQ ID NO: 11624 - DNA, 527 bp, Glycine max
gttctcctgtggtgatttgcacccatggatgtgccaccgttgataaatgacaccaagtgagaggatgcttccttcactatagaatacgtcatgggaggataagcttctccaccaagagagtgccttgtataataatcttcaaacgaagcttcattggatgaagagaatgagatattgaggcatgtacattaaaggagaatagggagagaagttgaacttttaagtgtgtctcataagtatctcaatcatcaaacggagtgactagttgatacacatatttttatttatagccgaggtgactatactgcgaatgtcattttctttttatgtgaatttaagagaagtcttcccacaatgtgctaaatgtatcttaacatctttcctttaaatgccacgtgcattggaagtgtgactctatcacatgtgaaatttccctgagaagcacagaaggccccttccttgggaagcaagggagaaaatattctttgataaccttcaggggggggggggggggggacctattggtc

SEQ ID NO: 11625 - DNA, 315 bp, Glycine max
  unsure (1)..(315): unsure at all n locations
tggaggggttgatggggacccggtgctgataggaacgatgataagggctacttaggagtacgtgagctcatttgaaagtgggcaactggggatggagagttcatgtttgatttgtggatgtgggagagttgatttgcaccatcacctagttgccacctagtaccacatatgacgggtaccccataatccaacacgcttgatgtgagaaagcgtggaagagtcagtcttcctacttttgtttgttgaccacagagtggtacctggagatatgtcgcggnggtcaggagacccttgggacgtcatgtggagtgctat

SEQ ID NO: 11626 - DNA, 966 bp, Glycine max
cccccgccccgcctatgtcatttcaccctctataagtctcccttactcgtcactcgactccggtatcaactattattaccgtagtcaaggctaggacattggtacttcgtttacctccgaatcacttaagaacccccgtgcttgccgtccttacgtgtctcatagagattctacatattctctttgacttcccactcagccggaatgttgcgcccttctcgctaaattacgtgatccgtctgactcgaacgatacgcttctgctgtgtccgcctagccatcaactgttccaccctggtgctggcagttagagttggtcaaatcgcaggtaatacttgagtagttccacctgatccgtttatcatgccttcaatacgagggctggctcgactcggatgtaatgtaactgtattgttacgaactcctctgaggtgcacactgtcgccccgtaccttgtcctagccgtcgctaccgttacttcgtcgcatcgcacccctgccgcacgaacccatcgtgctaccggaggaatggccacaccaactctgctgggtcggaaccaacgtacaggcctgtggtgatcgatgcaacgaccgactctgaagaacagcctgcgtacggaagggttgatcgatctctagataatcaacgccattgattcgcctctactaactggacgtaatctactgtttgcaacgaatggacggacaagcgcctatggtccgaacgatctaagagtgtccctactatccgaccctggacgcttgaagctactacttaccacgactgactacactctaacgttgtagcaatacatcaaatcggtttggacttaacgcgatacttcgtattctcatccgatggtattcgttcgcacttcatatgactgccctctatcgaccaacaccgagtggagatctgagtactgatgtcatctcggtcgctaccgcaactgtcatgtctaccgacg

SEQ ID NO: 11627 - DNA, 587 bp, Glycine max
gctttacaagaacattcctttggtatctgttttacccaaaatgggaaggcctattttcgtagaagtacagctagaaagatgctaggttactacaaggaaacaattgatggtaagatcttatcatttcactaagaaaattgaggaatgtcaatgagcaatttctagtattatttacaaaaaagctatcaacaaaccaacaaaccactagtgtggtcaaccccacatttccgttttgttagagtcatgcacgaatttatcttttctataagttctccaatatatatatatatatatataacttgaagtgactttgggtctattgtttcctatttttaaaactatcttctgtttttgaaaataaaataaaaacacaaaaaaaaatcttttaaaacaacttgaaaactgtttttaaaaaagccttttttttcagtttttaaaataaaaaaccaggacatctgtccatttttttagttatattaaatagtgtttaaaaaaaaaaaaacaattgagacaccactcctagtcacacaactgggtatattaagaaataaattttgtcccaatgcccatatatactttgattttgg

SEQ ID NO: 11628 - DNA, 502 bp, Glycine max
tgccttgaattatattaatagttgaattacttagaaattttctttgctttattataattttagtatttttttaatttattggtctaatagttttaaagtaattacttagaaattattatttattatttatcatcttttcattttcataaaatattgaaactttttctatacctatgtaaatataatttaattatatattgatatctatatgtaaatttaccagtataaaaattatgtataaataaaactcaagagataaacatctttttatgaaatcaaatcagattttttttatccgtaatcaaataggaaaatttaactttaacttaagagaatgaatattttctacaaaatttttatatttaaacttatttgtcaattatattaatgaaaataaattcttatatataataattaattatactacccgtgcattgacaatttgttgctcatataattgaaagttatttgcatagaaaatgctaattcttatagttaatat

SEQ ID NO: 11629 - DNA, 365 bp, Glycine max
acctgcggctgcagcgtgatgattacatctggctctttctgaagcagattatttttgatatgatcaaaatctccatgatattattttctccccctttttgatgatgacaaccacctgtcggttatgagcaacaactgagaaaaaatatcgatctgcatatcatttactcccccttaattttgtaatgactgcttatatgatacacttgaatatttcatattttttatatgtaaagaaattgtctcatatacaatatataatcgttcttactatgtgatcttttatctttctctccccctttgtcacgtctaaaacaacatatgagctatagaggagaatgatgttgccacttgttgcgatgtatg

SEQ ID NO: 11630 - DNA, 449 bp, Glycine max
ttcgaattattgccagcccaaaccatcgacccctaccaagtttgaaaactttcatctttttttctttctttctaaattacaggaatttggtgtggggtttgggaatttgtggtggaaaacctggtacggtgttaaatttgtgtgatttgaaatacattgattggtgggtttaggttagttgcattgcattagcattacattcttgggaatttgctacccaacttaatttttggttgctatactgaatgctcattttggggtcaatgtggaattaaggttttggccaaactgatttttgcttttgtttatcacatcaccgaagtttggtttttttctttcttggcttgatagtatctagcaatgcgctgtggttcaatttgaagaatattcatttgtgagtttttgacctttattgtattcgaacgtcgaaacctgaatgagaaaaaggt

SEQ ID NO: 11631 - DNA, 594 bp, Glycine max
agcttctcatcaagtaacattcctgagatcctctccccaggccttcttgacttcccttcccttgctcttagccctgtcacacaatttaatgatgacccatttgacaagtcctctccttcattggggaactcatcagaggaggataaacccatagctgaaagggcttctacttgcatccctctcccatctttaatccaagagactcagaaccatagctcttgcctcttttcccagttactcacctagagtctcatcggaatcaccttcttgaggacattggagaatagattgtgttcctgagttatggatgatttaaatagagagagaatggttggtggttaattacatcatgggtatcttttttatttgaatggttcatggtttcctccatcaacaagaactattgtagtggtactactggtggtgacagtggaacaagaagcagtagtggggaattaaggctttgtgaaagacaggtagcctttcattttctttattatggatttttgtttgggagagtaaagtgcataaccttcttttggtacttgatttgaagaataattgatactgtctaatactaaagaacacattttc

SEQ ID NO: 11632 - DNA, 303 bp, Glycine max
tggaggggttgatggggacccggtgctgagaggaacgttgataagggctacgtaggagtacgtgagctcagttgaaggtgggcaactggggatggtgggttcatgtttgatttgtggatgtgggagagttgatttgcaccatcacctaattgccacctagtaccacatatgacgggtaccccataatccaacaagcttgatgtgagaaagcgtggaagagtcagtcttcctacttttgtttgttgaccacagagtggtacctggagatatgtcgcgggggtcatgaaaccttggggacgtcag

SEQ ID NO: 11633 - DNA, 635 bp, Glycine max
gctttgactgtgggactcttttagttcttttgttgtcacaaaggctacgcatgtgtattataatcttttatattattaaaacatcgtgacatacgaagagcgaggttaagataatataattatatcagccgtgattgattagtggatgactagaaaaattattttgggtttattatttgttggttcctaaactttttcagatttttatttttaatttctaatttaaattttggcaggttaaactttttgattctttttatttatgaattttctttattgagcataagtgcgtaacaaaagatttttttaaataaagatgttttctttatttgcgaattcatgattcatccatagctaaattacaaaggtactattgggtattggcaatccctaattcctaatatgtacagaacgtcaaaacttttccgaaactgtttttttttaagttcagaaccatattttttttttctgacccgatgtggtcaaagtcccaaaccccttaaaataaaaactattttggtattttattttatttatttattaggtcacaatgaacttttaggtttaaagaattactttatcattaatttatttaaaaatttaaatgataattatttttaaaagactacttagta

SEQ ID NO: 11634 - DNA, 180 bp, Glycine max
tgtatgcggatgactgtccactgctgatagaaagttgctaatgtttccttggagaacacgagctcatatggagctgacgcctgagcatagtgagaatcatgtatgaattgtgcatgggatagaggagatttgcatatatatctaaccgacccaactaccacatatgacagaactccatag

SEQ ID NO: 11635 - DNA, 327 bp, Glycine max
tgaagcttattaccaatgcgggacacaagaaccatgcatggctgtaatgcaagtttaggattaagtgattagcctgaaggttataaaatgaaggttaacatacctatatgaggttaacattcacatcccttcttcattcgcctcaaaaactaaggtagaatgtctgactatatctcaacagtggcaccatctattgagaataacatcgaaattgaccaaaatcagggggatgatacatgaaaagagatacatctagtggactaaatgagccttagacatttcactagtcaaaatctgcctccctctcaacaaaataaaatgaaaaat

SEQ ID NO: 11636 - DNA, 553 bp, Glycine max
agcttgtttcctaaattttaagagttgtacaaattcatttcatgcaaattttatatcaaatactatgttttaaaacataaggaacttaatttcatggtcaaaatctatagaaatcaagcctatatgtacaattcattcaaaacagtgcatgatttaccgaaaaagcacaaaacttgaaattatggttccataggctatactaactcaaatggttgtatttatgtctaaccctaggttattggacccaataatttcaattttaaggtccatatcaacagattccaattccaatttcaaaagttctgaaaaacatagcatgagaagcacatattttgccctaacttgaaagttaaattcccaaggctacacaactccaaatgagacatatcatgtatgattttgagggttttggggtcaaggaactcaactttgaacccaaaattcataattcaattcgtaccagacatagtttcacaaatcctattacgagatttgggtcaacatgcaaaaatcatcatataaatgaagttcaagtgcctaacaacatagcatg

SEQ ID NO: 11637 - DNA, 295 bp, Glycine max
ctagtactgaatcatggatggaactgggagactggacaaaatagaactgctttattatggaaaaaggatgatgattcctactagatggagaaattattgtaaaaatgggcctcagaagatattctcaaatattaatcatctgggacctaacataaaatatagagaggggtcctggaccggcgtgactgtaattggatattctagtgcagttcttgctgcacctcaccaatatgagatctatgtatggaagtgcttatgagattgacgtttttgcttgaacggacatcataatatt

SEQ ID NO: 11638 - DNA, 452 bp, Glycine max
  unsure (1)..(452): unsure at all n locations
agcttcctcggggccattcctgcgaaggcaaacatttggaaagttaattttaccagtgggacactactcttaaagcaaaaatggcatataacctcctcccataaatacaaacatcaatgtaaatttagagcaagcttatgcgcatatttccttacgaacgttctcttgcacaagacattctattaactaagaaaaatgcacccatatacaatcaaggcagcttcgttacctagattatttacacgtacttccaaggtgtatttgttacttacatcacacacatcgccttggctaaatttacatacatgcatactcaaagcattttggggtaccaaaaattgcacatgtgcacatcttggtatttctaatacctatacatacacaaacttcatgatgaatcttgactatctacacaataaggtgctacatntcatgctcttttcagttttttt

SEQ ID NO: 11639 - DNA, 483 bp, Glycine max
tgatttgtgagttgattttagccttagtttcactttggttattagtcaattcaattaaggaaaatcccaaagaaaaacgtccaattgatttttttgattattttattcaaaaatacttcgattattttattgttattttgcctcttttggttttaaacgtggttacggcatgaaagatcggttggattttattttaacggagattaaacgatattacaactcaaatgatcggtggaaattcattttattgtttattaggcaagaaaacggcttaaatgaatggttaaagcacgtcaaaagggggtacggaaaacaaatgaaataaaaataaaaacatgtgaaacaagtggggaccactaagggtacatagaatgaattgaaagattcgattttgggaactttccggttgaagaccgaagaacgacgaaaaacgaacgatgaagaacggtgaagaatcttcacgaaatcgctcacggaaacgtc

SEQ ID NO: 11640 - DNA, 508 bp, Glycine max
tgcttcccagaagtagtgggtaagacggataaaatagaagatgtttatttagacaagactgggataaccaaattgccacattcaattggaaatcttgttaggctcgaacgattgtacctgaggcaatgcacacagctttatcaactaccaattagtatccatatattgcctaatgttgaagtgataacagattatggttagaggggatttcaattatttgaaggataccatgaagacaaagaaaaggtgagttcataaaaatctccaagtgccatggttgactataatgaaggctcgtttatttaccttgattagtgttttccatacgtaagctctcataatgtgatcaaagtatgtcgtcccaaaccacttgagtgtcataatttatgtttcttgtttaaactgcttcaagctgggagcttgaattggtacaagccaagaagcacgacatcatccatgcaattcttgttccggaagaaattcccaagatagctctatgttttagtgt

SEQ ID NO: 11641 - DNA, 398 bp, Glycine max
tatctagtgttcaagatgactttgtaactgctcgatgactaagctgcggagattttcttgctgagcacgagtgatatatggagctgaggcagaagcagaataaaattgaatatgaatttggcatcgatatgatgtaaatgactatatatatatgacctattaagctttcataagatttcataactttcaaagcctgtaaaataattaattaaacttcgagatcacattgtctaatgtaaattaaaaatcccactgatgggtgtgtgctgaattaagattttaaccttgcgttcaaatttaacaatgatccagtaattaataaatctaagaccattattcttaaaacaagcttaagtatatgctagagaaaaaaaaattttgaataaaaaaaaaattac

SEQ ID NO: 11642 - DNA, 421 bp, Glycine max
tagcttattaagggagttttttttgaagcttcattggctataaatagaagcatgtgcgacacttttaggaactttgatgaatgagagtcttgggagacacaaatcaaagttcaacttcactagagggatcttgtgttgagtagtcattttcagcataaaacgcagaaacagccttaaatagagaaaaacacttaattacatcattttgttcaatagaaagacccaacgttttaatcatatgtttttctctcatatttagatagttaattttgtagctaaattagaactgttgacacaacttctttttatatttactggctctataaaaatgcttacctactaaatgaatgctctctgaatgaaacaagttccttgtggatatgatactcggtcttacccatttatattacttgtgtgactc

SEQ ID NO: 11643 - DNA, 378 bp, Glycine max
tgaagaaacaaaagtgtttttctttgtgatagctaaacaatagattggtgatatgtcttaacaaagaaataggatacaaagtattgatgaatctatgaacaagttggaatgtgtgacattgaacaatacaccttacttgaggggggtcgatataagtcaaatgtgttatacgcataattatggcgatagagatattggtggaatttgaaaaattatataattgagatcatttttatgatataaacttttttatgatcaagaagagattgtgttaatctaataattgtcacactaactctattgagactcaattgatctgtcaagctaatatggttaagtcgaatacaaaaataatgatgttttaagttacctttttta

SEQ ID NO: 11644 - DNA, 466 bp, Glycine max
ggctaaattaggctaaactttcgtgagctgcttgagctgagtctagtcttacaagaggaatctgcggatgaaactcagtttaagctggtctagacctaggagggccgtctaagttgtgcctaggccaacaagacggatctgtggacgaagcttggattgatttggaccgatgagggatcgaggtttaataatttaggctacagcatacatcacacgagctagctaaaattagcatattttaagaacacgaagggatcataatgtatgtcaaaggagggcaataacaggaaatgcttcgtctatgagactgaagagcatgctatgagagattgccctaaatagacgaaaaaaaagagacgtgggacatcacaggagtcataatggtgatgctatgttgtgttaaaagggtatgaaaatgccgatgtgatgtatgttttagaggttttcttacaaggacatttcatat

SEQ ID NO: 11645 - DNA, 134 bp, Glycine max
ctgtgcagcaacttttacgatggaccttctctagctcagcagcagtatcacctcgggctaaagattgtgacctcttcagctacagatacaaccctggatggaggaataaccctatccttatatggttcaaacct

SEQ ID NO: 11646 - DNA, 476 bp, Glycine max
agcttgtccacgtcaagagccagcgctaatttgaccatgttgatacaagagcacttgtacgcccaatgtttggtaaattcaccgcccagttgcaaggtaagagtgacaaaattggcaacatagccctttcttaattgactaaccgtcccgtttgctgctcatatggcttacttgaccgatatcatccctcagtcggctgtccatcagatgaaatccagcttccgaggatgcctgaaccacctaaggatggctgattcgcatccctatacaccgtacttattatgtgatcactattttggcaaaggcttgagcgtctctttaaggatatcatcagcatatgttcttagtgaaaagatatttcgatctggcttgaagcactaatatgtatgccggatgtgttaaaattgaataacgcttttattatctgaaatactatgctcttgattatctatacactgtggcaaactgtattgagt

SEQ ID NO: 11647 - DNA, 385 bp, Glycine max
tgccacttcgtcctctttggtatatcaccctacttgagggttccattcatcactggactttccttgtgtgtccatcctcttgggatgttcccaacctttgatgaacaggacctcagggtctgctatccagcgattcgacgaaggccaccattcttgcttctcagatttcatagccgcttccatcaaaaagaggtggtctgttcactggaccttcttcattctccatgctcatcacaatttatctccccagatctcactctgcgatttcgagtgttggctctgataccaattgaaattctgagtccggggacagatgtctgacacgatgtcacgacatgacgcttcataacatgcacatagtgtgtggccgtatgaacatattaaa

SEQ ID NO: 11648 - DNA, 403 bp, Glycine max
agcttctagccaaatggacttaccttgaattaattcctttgatagcccttttgagccttgtttccctttccttgtgttgaagctcactacaagccttaaatgaaaaaccatgatatcaccatatccttaaggaattttggagctttggaattgctttgggaataagtgtggggggtttttgtttcattggataacttgttttgttggctatgcttcatgatgtattttgggccatacttgatgtacattgtatattggctaaatgttcgacatgctgaatgaaatgttgtttctcaaaggctatagagtaaaaaaaaaaaatcggaaaaaaaattcgcacaaagacaaacatacgcggtgaagttgagtgaataacatcttatttggcaccagaatgatgaaa

SEQ ID NO: 11649 - DNA, 293 bp, Glycine max
tttacgtgccctatctaatactctagctttgaggcaatacttctccataataattcagatgcttgggtggtgacaaatttgcctgccaaggtacctcataaagtggacagaggattcttcttgactgaggggctacggactagttcttaggccaaaatctccacctgccaaaggccatgtaatcacaccaaattcgcagcctcggattacaacatatttttggccgtacatcatctggacacatgatgcatgcctactattcatgccatgccaatggggattgctagactgat

SEQ ID NO: 11650 - DNA, 444 bp, Glycine max
ctcatcttatgttttccttagaagcatggtattttcctttatgaatcaaatccaatcgtgcttaatgtattagcgattgcggaattgtcttgacactcacatcagttgagttgtgatgctgccagttccatccaagcctttccaacaagaaattattgtatgattcgagaatatcaaatattttgtggtttcaaccaaatctgcacgtgacatgcacataactgagtttttcaatttataagatataataaaatttgactatatatcacttgaagattgatcagaactatagatgggtactaattaatcttggaccatacaataatttcccctcccaattcccaagaatcatgtaatacatggtgatcaattttcagatgatttttaagttcccttaaacacaccacacgcaggctaaaactctcttaagattttaaaccatac

SEQ ID NO: 11651 - DNA, 374 bp, Glycine max
atccatctagacatgttgagaattattcagaaaaacagactcatcctttttaacgaagagagagagatgctcgtaaagtcctgagtgattcaagaacaccctggcggtatcaaaggactttcccaacctttgcgaggagccgctcgctggaaagagtgagacatccttactttcatcttcacccttggtctttcaaaccaccaatccagaaaatccacctctgcccaaaattatatcgtggccataacttccattttacgcactcacattaagtgattcttgagcctaaatagactttcacaacgagacctgtcacactcgtttggaatcacctcagttggagccctgtagcttcagttattgccatctctata

SEQ ID NO: 11652 - DNA, 278 bp, Glycine max
gcaagctcggtgtatatgatatatatgcttcatcttgacaaacagcgtttgatatcggcagacatgtctaattaatgcaattctaggatctacgtaagttgatagactaagcacataaggtatctcgccgcattggatgcgttttctttctccactcaacaattggcgaaagccgttctaaatgggatccaacaacaatttcactccagcttgtttgataatcgagatctaaatgtgcactggaaggtaggcatgaatagttgactacaaagataaac

SEQ ID NO: 11653 - DNA, 1037 bp, Glycine max
  unsure (1)..(1037): unsure at all n locations
cctcccccgcaaanaaccgaacggtccnncacgtgcgaacacacaaacacaccggcgccaccatntatgcctcaatntacccagccgcacgcgggngggctgtacacttgagacctggtgaannccctaggaaaacccgggaancagaagatctcaagcataacggatgcccaagtggcgccatccctttgaagaagcttttgaaagactggcgaacaaaacaaggcatgcacatgggatgatgaaggggcgaaacccaacccacatgctcgctgacaaaaagaagggagcaaccacacggccacagcgacgaacatactgaggaagatagacccgccgcttcgccgaacaatcagggagccgacaagagatggaaatcggaaagacacaatctggctggctttgtgttctcacgtcgcgcaaagacaccgagtctcacgaggcacttagaacgcatcgctgggtacatggcccaggactacacactcagaaaagacgactggtcgatggacacaacgggcgaaaaaaccgtaaacccgcattcaaaccgccacaatcggtgcaggagaacaaacaccaattacgtcngacgtggaccataaaatcggcagcgcatcgccggccatatcacacgggagggatggcgccacccgcgctaccgccccttgggaaacgcactatgaaagaaacacgcaacacgatcgcaacggaataagagcacgcgtcacgcggggccgtacacaagactagggcgcagagcgcaaacaaatggggggaaccccagggagggccagaaaaaaacaaagcgcgaaaaggaggccaaaaaaagacaaagggccaacgttgaagggcccaacgacctcaaaaaaaaaagggagacccaacggcggctactgccacgacacaccntcggtgcacagagaacacggagacgcagcgggaaaggtgaagaggacacgacaactgaaggggggcgaaaactgatacacgcggacgcccgaagaggagaaataattaaaggggcgcccagcatatgc

SEQ ID NO: 11654 - DNA, 651 bp, Glycine max
ttgggcttgagcctcgacattcacgagccacctgaggctctacgctcggctgataggctaacgcttttgctgcttttatacacgcacttaaagaccaatcttggatattcatcgcctattcgtcgtaacactgcaaactgcaaaatatgccgttttaattgaatggctgccccgattgagctcatattgctgctggaaatagaacctgttattatgtatgttaatgtacaacacttaggagtctaatcaacattttagaacaatacgcgacctttcccgtcttagaggcgagaataagaaggctactctttgcagtgattagggcttaaaagattgcctttattacaactaatggatctgcatgaacataaaatacagcgatggtttaatttcaaaggctttattgttgagtactagttttaaagtcatttcccggacatctttattgtcaacaggattatgcaatctctgtctaagcgatgaaggcatgactgcatgctcctcctgttgtatatgttgagctgaagacctatgccatccttccctagtactttcatgccgtttttctaaatgtgaaatttcataagggaattttgcacctccccttctcttttgttccccgatgcccttcactaagaattttgaggcttc

SEQ ID NO: 11655 - DNA, 428 bp, Glycine max
tcttatccaaggctcatcttggtggtgaagctccttcttccatggtttattccctagtggatggcgcctcctctcacttcttctcctttgccttccactacatctccatggtggaaaatcaccattaaaggacctcattgaagctcaaagacccagcctccatagaagccccacaagcaagcttccatcaagttccctgcaccttggaaaggatgtgacctcaaatcccgaggttcttcatactctgggctccttccctcaacaccagtaaaaagaacaaaaacatatgtattagtggtgcttggtatgccgaagtaagataaggtctgaaaacccaattgctgggcctctttccatgaaagaacactgtttatcaccaactcaatgagtggcgctacaagtctagaaaaatatgggacaaacccttt

SEQ ID NO: 11656 - DNA, 561 bp, Glycine max
agcttccatcaagtggtaaatagagcacatgagcttcaagtaggtgctccttaaacctccattaattatttgctttaccttttcttcgattgttgtttcttcattttttctccatgtatctcctcacatgtcttgtgataaatgtttttaacatgattatttagagtttccactgattaaacttgctatagaagctagatttgattttctatggttcaaatttcttgttcttgttcttgaaccatgaattgtgttgagtttaggttcctttgagttttgtcttgttattttttgtggctgaaacctaaaccataaaattcttacaaaaatattaaagtagaagaaaacctcaaaaatctagagtgacttgttcacctattgtagttttgtcatagaagtcatgtctagtcatgaaacttgtcacataagatttcttatgttgtgctgaatttttttttcttgtttctttgtctaactcatttgttcatgagtgaatgaaattaatttagcctattatttgatttaagttaaatctttcatgttaaatagtccttaacatgt

SEQ ID NO: 11657 - DNA, 296 bp, Glycine max
ttttctccaacgtgtaacttaccaaagtgtgaccacgatcttttctatgattactccacggactggtgccttagctatctacgtttttgtgcttgggcgtgacttaccgatcattcatttgaaagagttacgcattgtctggtccaccatgaaacccccatatgtccaagacgatcacatctttctgacagcttttcctcattcactagaaggagtggcgaacgactggctggattaccttgctcctacgtgcatctcgagctgggacgaccttaagagcacattcttatgcaaaa

SEQ ID NO: 11658 - DNA, 756 bp, Glycine max
ccccaccagtccgaaaggaaagattggtgatataacaacccataagtcggtatttagaacccgccagagcaccgaaaattgagcttgagacctgactcccggccccgaaagacgcggctgcagagggggacgaagtttttatcttaaaaccggattccgtagaagagaccaaggggccgaagatcaaccatgaaaaagacctgcgctacacaaaaaagggggggccggcaggtcaaacaaccctaaaaaaaaaatatggtagatgccggataacaaaattttgggggcatccatcaacaccgacaggccagagcgggtgataatagatacaaaaagggacccgcgatggaccctggaaaagatcaaaacaaccaaggaccattagtctgggcacacaaaatggcccccccaaaaggcaagaataagtatcactgggggaaagagccgacgggttaaaggtcccgagaacaaccccgcgccggccaaaaatcgtccgggaatttgaacacaaaggggggcgcccactggaagggatatctaagacaatgggctaaaggggccaaaattctgaaacctttcgatgaagaaaagccgtaggaaaaaagcaagccacaaaaaacccaaaatcccttacttgataccatgtggagaaagttccgcgggctacccaaccctctgaagagggcacgcgggaaaaaggagaaactcgaccgcatcccaagggggggggtgataacaaaggcgcaaccacagtcc

SEQ ID NO: 11659 - DNA, 229 bp, Glycine max
tcaagcttgcatgatttacatgtgcctatctctcacagcaaattcttattgctaggttttgacactttatgatgccacattctctccctttttgatgatgacaactacctgtctgttgggatcagcaacaaaccatgtctctattagcatatatgttactgccccttggtttcaccatgattgcttctttgtgataaacgattattttggctctttcatatttggaaag

SEQ ID NO: 11660 - DNA, 370 bp, Glycine max
agcgtttttccaggatcaagtcaacaatactaggcgaagccagcctgtcggaaagcacatcaaggaaagcagagagaaaggcaccacctaccactgctgctgccattatctcaagaacaaaagatgatcagacgtgaaagacaaaggcagggaattggttgctatgaactgatgtgatgagagaaatgtaattgatgtgctaaatactttgttttttaatccaaacctgtttgaatatgatcaaaactcacctaatgccttatggttatgggatcgttaaagtaaatagtcaaatagtcagatattgacttagattcgagttcttttatatttcaaccggatgttttatgatcaaatgtgaaatcgaaca

SEQ ID NO: 11661 - DNA, 382 bp, Glycine max
agctcgcatgatttacatctccctctttctgaagcaaattctttttgatatcatcaaaatcttcatgattaacattctccccctttttgatgatgacaaccacctgtaggttaagagcaacaacaaagaaaatatctatttgcatatagattactcccccttggtgttacaatgattgcttatatgtgacaattgaagatttcatatttttcatatataaaaaggtgtctcataaaacaatagataatttttctgactatttgataaataatctgtctctcgcgctgggtcaacattcaacacaaatcatgaattgagaggacaaagatgttgctacttgttgcaatgtatgacaataagtgagaccaaatggcatgaaaac

SEQ ID NO: 11662 - DNA, 509 bp, Glycine max
agcttggtgtatatgatttatatgcttcaacttgacaaagagcgttggatatcgttagatatgtctaattaaggtaattctaggatctacataagttgataactaagcaattagggtatttgtagttttggcatgtgttttcttttccactcaacaattggcaaaagccattttaaatggaatcaaacaacaatttcactcaagtttgttttagaacgtcgatataaatttgcagtggtagttaggtatgaatagttgtctacaaagataaacacaatgggtatacatccattcattattgttaacaacaaaatgaaaggagatcacgaaactctaatttgttcatcacttgcattccaatcacagatttcaggaatccccatatgatatgtttcttaattcgagagaagagttttcccaagttcccataaacttcactcagtgaaattgatccatcaataatttctattactcgcaacaaatcttgacccttctatgtaatacataat

SEQ ID NO: 11663 - DNA, 616 bp, Glycine max
tgtaactagatgctattgtcctacaacagatgttgcgtcttagggcattgaaagccggactgcagcaatcccaaataaagatttttggtctacctgtccgaccttcctttgttaagcctgtccggccaaaggtatgcaatattcttatagccatgaattattcgcaaatttatttacaattcttggaatacaacatgctgtgctatatatattattcccaaataaatgtaagtggattgtttgaaatggtgtaataggataataggaatgatccagcctcaattaggagaagtaatttattttacgtttctcaagttatttttagagaaattatagccacttgcatgttccatgccaatagtgctcacttgagctaatagtaatgggtgcctgtaaacaattatttcttcccttgtcagcatatgaataagtgaatgatggcgtttaagccataatcaaatacgaaatagcaaataagttaatgctaaaattaatagctttggtgttgttccgtgttccgattctatgactgcaagctgtagtgcaggattggaaccttttggtcgcgtatgtcattacagttcctcaaagctttaaactacctgatgcatattca

SEQ ID NO: 11664 - DNA, 599 bp, Glycine max
ctgttttatgcagctataattatgggccgggttatgttggggaacggttactaacccggaatgggtttaggcaacgacaacgacggcttatctagcttgataaatgccaaaggaaattgtggggagtatggcttaagctataaacccactcaggcggatataaagagaaacatcgcgggaagaaagagcggaggtcaaagctcgcagatgaagcgggaaagtgaatgaagcccgccctgccacataagtagaagctctataagcgcgggtctgggatactaaggtcaagtggccgcgttatacgaagatgatgttctgagttcattggattaggtacgaccattccctcctgattgccagcttagaaattggcgagtggaagaacaccccggcatttacgcaacgagcataatgtaaacctttacggtattaaaagctctataattggggcctaggctttagagtttttctttttgtaaaggctttgtgacatttgttgttttataatacagagacctttcttcatctgttctacgtccctacccattctcattcattggcatggttactttttttttctgaaacggcagatcccatga

SEQ ID NO: 11665 - DNA, 738 bp, Glycine max
  unsure (1)..(738): unsure at all n locations
attgaaccccttgtgatttccgntggttatatccgtgacactatctagtgctctagcttgtgcatccactaccgttgagaggatgtgcgatatgatcccaaaactgtaccgttgccttagctgtcggagcttggtggccttgcaagagtagaaccttgcattcatgtcaaagactttcacattgtatgctccatcatgaaacccccatatgtgcgatatgatcacatattgatgaaggctttgactacttcattataacgattggctaaggacagggtcgatgaccttgctgcgcggaacatcattagctgagctgactcttaaagagtactattttcaaaaattttccctacttacatgatcaccaccatctcgaccgattgtgattgtttatacactcataggatagatcctgtacgacttatgggagagatttaatatctttgtgacagttgaatggagcatcttacttcttaacaagattccttttccgcaatttttattaatggcctcaactggtaaggaacaaaaaggattgaagtattgccgccccccgggtgtgagtcccattgggagcacaaaggggttcctttcttaaaaatcccaaaaaacctttattttttgttaaattatttgttttggggattttcccccaagctgtttttaaccccctccccgtaattttttttttgcacaaattaacccttttgccccccccctttttaccattaaacgggg

SEQ ID NO: 11666 - DNA, 488 bp, Glycine max
agcttgatcaattttggtaccctgcatttgggacaaaatctgtgggggcaggatcatctttgtgaggtccatctatctcctctggatgtctatggtcaccaccattgttgaaaacaatgatgaccacaggcaactggtaccgaaccaacgtctggatagaagatgaagtgtcacaaacatgcttgaaaccagaaaattaattgcaacagtagcaacaaatgaaagcaaaaacatatggaaccatatggtcatattaatggagagagaatttacatacacatatagtaataaaaagtatttaaaaactaaaaaaaatggttctaacaaaattgaatttctcacagttatataaacaaaagatccattttgatcaactaaaatccacaagcactggcttttaaaagtcaaagaaacttattttcccaattcacgctagaacaagagatataaaaaaatttcacgtccttgtgaaaagataaacccgaaac

SEQ ID NO: 11667 - DNA, 821 bp, Glycine max
  unsure (1)..(821): unsure at all n locations
cggccnccccatganccccttgttttaccgngtcttgtncccctctctatctcgaggctcgattacttacttggcggtgacgtatttactcgctaaggggtttcgggtttgcaaaaaaagataagcttggggcctctaactcatgactgccgggaatgagaaattttacttgcacggcgtttcattactaatccccacagaggatatgtgacgaaatgaatattgaacctggtgcacgaatttctcgacgatctaacggatcacgaggtctagatcgatactttaatgagataagtatgagtggatgctgtataaacaaacagcttgtgcgacggatatttttttcgccaacgacattgtctaagaatcccaacaatggaggcgtgaagaactgagttccgaaccttgtggtgaatatcatagactgtccaaaggttaacgagtctgacatcattgctttactgctgacgaattaaatgcacgcatgcatgatagaaacatcttagaggaagagaacgagagactaccttgagagtctcccaagtgtcctaatatatgtctacttttatgggggatacctccctctgtatattaaccatcccttttggtttgattattatcccattaacgaaaaacctttggtatttcttatcaaagggctgagcaagaaatcttttttaattttcctccaaacagaatcctaaactattaaaaatccccgccttctctttctaacaattttttttagttcttaaaaaaatttattttccatactttttaccacaccaaaaaagagagtttcacacgataccgggttttcc

SEQ ID NO: 11668 - DNA, 613 bp, Glycine max
agcttaaacaaacacgctaagatctcttttaatattttatatatatatgtaactaaacaaatgatcaatcttaatcaacacattttttttggaaactcttactcaacatatttaaagaatttaacttcaaatttatcatttaaggatgtatacttaattagcacgttcaagagttgaagatttagataaatttgcctcaaatattaatttaacttaaaaatgacaaaaggaaggtcaaatgtcttgcttaggttaagtttctttgaaaagttctaccattagagaaaatagtattttctagtgtagtgtctctctagtgtagtgttttactttctactatttaatgttataatttattatattatcaagtatgtgaattaattggtgtgaaattattttaatttaattagaagtctcagatttgagtgattgcttttggtggagaatatctatggtttaagccaaaaaaataatattatattttattatactaaatactactaataagaatgatgtagtggcataggaaaaaaagaatgagagagaatgtgggttcaaaattctccactaacaaaaattaataatactaattattaatatttatcgataaaaa

SEQ ID NO: 11669 - DNA, 177 bp, Glycine max
tttgacatttcgtcacatacaaaagtgcttccaagatttttcctacgatgactgcactttaaattgccttagacatcgacaaatgcacttgctgctgacatcgacccagtgattgatctcaaagggtgatccattctactttcccacggagaaacccctccagttcaagaagacccc

SEQ ID NO: 11670 - DNA, 486 bp, Glycine max
  unsure (1)..(486): unsure at all n locations
agcttgttgncttgtctattcgttttgggttctcaattattatatagtaaatcaatgatgcaactatcatattcgtcttggatggcgtattctaaactttcttaattagcatgttttttatgtatgacgtgtatcttttatgtttaaattaaatttcaaaataaaatatcattattatttaatatgaaactgcatatatcgaaagtttaattaaagtagtgttttcaacttctttttgtttcttttgagtggtacactaacccggctacatgcatgcttataatgcttaagattgtgaatgtatatatcatgcatttgctaacctttttggtagggcagtttcgcgttttttggaagatcaaacatattanaattgcactagatatagatagtgtacaagaaggtgttggaaattttccttaatcctcatacagcctttatgtgaaagctaaaagaaataaggtggtgctaatctaaaataattac

SEQ ID NO: 11671 - DNA, 405 bp, Glycine max
tctgacaatatgacacagaagaaagttctttagactattatcaagcggtggaggcagtttaaatctgatttgacgaggaaataggcacttgcagctgacaaggacggtgtggaggacactatctgtgaaaaatacgacattagcaaggagaaatgggtccagttttgtcagacccacagagacccctcgtgggaggtatgcttttgtcatttaattgttttccacaaaaaattcacttcttataattcattgtagtaatgtttttcattaatgttcaatttttgcaggatgtgcagaaaaaggcattggccatccagaagcaaaacaccgccccccacatgttgtcttatgggggttatgactattcaaaacagaaactcatggctgagaaagacaaaaaaagac

SEQ ID NO: 11672 - DNA, 523 bp, Glycine max
agcttcttttggaccttgaacaagcaatctactcctctttcagaaccatgctatgtgctcgcgactggtccctttcttcccttcgcaacttgagttcattattgctaccccatagagctccgcgaaatttgttccggccatactcttccttgcgagccctcttggtctcttgttcaagggctcttgcggtaattgcattctcttcccgtaacccggcacactccttccgaacgtgtgtagcagccaacttgaacttctccttggcgagttttgcctttcctaactcgcttttgagagcttggacttcttcgtcctcttccggtgcttcaaaattctcttcgctgacgacttttaacttggcgagccaatctaaacctcgtatgcgaactttcagccattcgtggtacccaccaatgatgccattacgaatgcctctaagctcttgatctttccttaacggggttttccatgccttatggattctttgtatagtcttggaattttgtgcgccgagatccctcac

SEQ ID NO: 11673 - DNA, 197 bp, Glycine max
ctaatgatggacttcgtacttgctggtgacgaattacagcgctaaagggcatcttgcgctgctattaaaagatgacctctacggcgtggaactctcaaatcccgtgagtcctgcatctgtattcatgcgtgaaccatttattgactgcacaaccgttctgattactcagaccaataggctctgatcactagaatctc

SEQ ID NO: 11674 - DNA, 450 bp, Glycine max
agcttgttgctatcaagaaatgaacctttctcaattttagggtggtctttcatcctatctatggctgagcatgttgcaaatggagcagccacattaaattcattttctacagcattagcagggtgaactggttgtgttgcgcctaaattaatcagacaaaatttaatagatgactcacattgggccatgtacaagttcgagatgaaaaatagtggtttcacacagacaagcaatgtgagtgaataacttaccattattgaggttagtctcacgaacgaagctagtgactgacgccccctcaaaatatactggatctccctaaaattgaaaacaatttaaggaaaaatatgttacaaaaactgcatgttaacattgaatcattataccatcaattaaaaatgacatttacctcaataacctcacatattggttttaaaaaggtcataaatt

SEQ ID NO: 11675 - DNA, 482 bp, Glycine max
  unsure (1)..(482): unsure at all n locations
atccaacgctcatgttggtggtgaagcaacttcatccatggctgattccctagtgcatggtgctgcctcttacgcatggtcgattgtctgccactgcatctccatagtggataatgacgattactggaccgcattgactctcacctatacggccttcatacactctccactgacaatcatacatcaggcgatgcgtcggatctctggcccaatgtacttaggagtctaaaagcaaactgctagattggcctaagcgtttcaacattatctgcggaattgctcgaggtcttctttatcttcatcaagattctagattgaggataattcatagagacctcaaagcaagtaatgttttgctcgatgaccagatgatccctaaaatatcaaagttttgcattgctagattatttggaggagagccgacagaaggaaatacaaatcgagttgttggaacttantaagtattatcttaatatcaatct

SEQ ID NO: 11676 - DNA, 412 bp, Glycine max
gagcttctagccaaatggacttaccttgattttattcctttgatagcccctttgagcctatgttcccctttctttgatttgaagctcattactagccttaagtgaaaaaccatgataacaccttactcttaaggaattttggagctttggaattgttttgggattaagtgtgggggggtatgttacattggaagatatgatttttggccatgcttaatgttttattttggccatgcttgatgtatatatatattgcctagatcttgctttaatcttcaaattcatactgtctaaaaaaaatttcaattgctgtaaattctacaaattcatactgttcaacaaaaaaagagactaataaaagaagtgaagttgaatcaatgatgtctgtaacaccctgacatatatatatcta

SEQ ID NO: 11677 - DNA, 371 bp, Glycine max
ttagtcaaacagaataatccgaaaatgtctaagaattgggagttgaataagcataacaagactttatgtgataggtttaaagatacaatctttgcggatgagaatgcttcagaaacattaagactgcttgcagatgggccctagagaaatgttataacctgtcgaggagtccacgtaaacagtgtttcattttacaccaaagcacttgacgtcctgggtactatgcaccacaacggggtcacccgtatggctgaatctccacacgtttgcaagagtcgatgacgccaatgcctgtgagcacccatcccttacttgggagaattgaagaaatagaggagcttacctgtgtgaaatatactgcaagtgttttc

SEQ ID NO: 11678 - DNA, 593 bp, Glycine max
agcttaaacaaacacgctgagaacgcttttttatatttatatataaaggcaactaaacaaatgatcaatcttaatcaacacattttttttggaaactcttactcaacatatttaaagaatttaacttccaatttatcatttaaggatgtatacttaattagcacgttcaagagttgaaaatttagataaatctgcctcaaatattaatttaacttaaaaatgacaaaaggaaggtcaaatgtcttgcttaagctaagtttctttgacaacttctacccttaaagaagataataatttctattgtaatgtctatccattggacagcttactttctactcattaatgctataattaattatattatcaagaatgtgaatttattggtgtgaaattatttttattttaattacaagtctcatacttgagtgattgctttttgtggagaatatctatggttcaagccaaaaaattaaatttataattcattatcctacatactactaatacaattgatgcattgctctatgaaaaataaaatgataaaaatgtgggtttcaattcttcccctaacaaaaataatcatacttaactat

SEQ ID NO: 11679 - DNA, 373 bp, Glycine max
tctgacaatatgacacagaagaaagttctttagactattatgcaagcggtggaggcagtttaaatctgatttgacgaggaaataggcacttgcagctgacaaggacggtgtggaggacactatctgtgaaaaatacgacattagcaaggagaaatgggtccagttttgtcagacccacagagacccctcgtgggaggtatgcttttgtcatttaattgttttccacaaaaaattcacttcttataattcattgtagtaatgtttttcattaatgttcaatttttgcaagatgtgcagaaaaaggcattggccatccagaagcaaaacaccgccccccacatgttgtctcatgggggttatgactattcagaac

SEQ ID NO: 11680 - DNA, 430 bp, Glycine max
agcttatcatcatttgtctttacgagcctcactgcacatttgaccatgctaagggtgaagctgggatatgagatttgccttctccaagaaaatgaagggcataagggtgccatttcgatcctgggaattgtggacagggacttctccatctctctcgttgatctcaacccccaagttattagttttgaagtttgtagagggcgtttgtagtggtgctactcctccgtgtatgggagtcctcatcttgggagcaactttggtcccaccttaagcagcttgaggctatcatctccttcccgtggttaatgtgtggggattttagtgaagttgtccttccttcggaggatagcggtggctatttctcgacatctacggcagagaagtttcttgatgtcatcaatacctgtggaatagttgggattgaagctga

SEQ ID NO: 11681 - DNA, 408 bp, Glycine max
ttatgaacatatcagcaggattgtgtagagtgctaatcttatgaactttgattcttctttctaaccgaatgaagtgatatctaacatctatatgcttggttctatcatgatgaacttgatccttggccaagcatatagcactaaagctgtcacagtagatgttagcatattcttgattaattccgagatcatttatcagacctctaagccaaattccttcctttgcagctttagtaagagccatatatttagcctcagtagttgagagagcaaccgaaggttgaagtgttaccttacaactcaccaagccgccaccaaaggtgtaagcataccctgttatgaccttctcttgaccagatcagcagcgaaatctgcatcagaatagccagtgaggcagcaatctgggtg

SEQ ID NO: 11682 - DNA, 918 bp, Glycine max
  unsure (1)..(918): unsure at all n locations
ccaccccaccacgtgcaacctccaaacataaggacancgcgaacagaagcgacaggaactcccngtggagcaatcaaagaatgaaggaaagangtgaaacctgaaggcccaggaaccccaggaaacccacagggacgcacgccatgcaagcccggggaacaaaaaatttaaactctttcaaatcaaaggcagacggcgcacacaaacgaacggctgataccgcccccaaaagggaggaccaacaataggaaccccaaaaaacgcacgcaaaaagggggaacgggcaagcgttgcgcctgaaagacatacaacaaaaattgaaaagagggcacccgaaagaggcagggtccgagtgcccgaagaaaagaacagggctctacaaaacagaggagcgcgggagaaaaaccgacccgtggcgaggggaggcccagggaacaaacaccgagacagagggggcaccgcaaaaagaaccggaggcggcccaaaaaagaaaaacaatcggaggggaaaagagggacaaacaaaccggggggaacaatggaagaaacatgcgtcagtcagagggaaagggacatgggagcgcgacaacaaacacggaaggagggcaacaagacccaacaagaggcgagggcgcgacagcccccacggagacgcgcggaaggggagagcacaacaacggaggccggacaagactcccaatagaaaaaaaacaggcaccaaatggcggagacagcccgaaacagaggggcacacccaatgatgaagaaaagagaggacgcgaggagatatccaccgggctacacttaaaacggaagcgaacggggcgacgcgccttacacgacaacaaagggatccaaagagtaagcgggcacgaccccgagggacgaaggcccaccggaaggacgagacaacgaagcc

SEQ ID NO: 11683 - DNA, 383 bp, Glycine max
tcttatccaaggctcatcttggtggtgaagctccttctttcatggcttattccctagaggatggtgctgcctcttacctgttctcctttgtcttccactgcatcgccatggtggaaaatcaccagtgaggacctcattgaagctcaaacatccaccctccatagaagcatctcatgcgagcttccatcagcgcattccccttgaatctctggcccaatctacatgtaataaagagtttttccctaggcagagcttaactctctaacacctgattctaacactatctcttagggtgcctcacaaaggggacgaggactcctttaaatatacccaatctgtactgattatacttctcgggcctgtttaccagaactgttcaggaa

SEQ ID NO: 11684 - DNA, 393 bp, Glycine max
agcttattctgacatcagaagattccaattattggaagcctggaaccgatgtaccgacaacattttgctggaaccgatataccgacatcattttggaccacaagatcctttcggaaaggaatgttaaaagttatcatactgagttcgacgagtttaaaacataattggagaggcgaaactatcacaaacgcctctccaaccttcaagaacggagcatagatgttgcagtggataaagaaatttatgcaaagatgtatagtccagatgaccaagctcccaagtgtgctagagtaagaggccatttcatctatatagatgcttatagactgaatgaagctctttatactctagtgctactagaggagggggaatctttacccacttactctatat

SEQ ID NO: 11685 - DNA, 338 bp, Glycine max
tcttatccaaggctcatcttggtggtgaagctccttcttccatggcttattccctagtggatggtgctgcctcttacctcttctcctttgtcttccactgcatctccatggtggaaaatcaccattaaaggacctcattgaagctcaaagatccagcctccatagaagctccacaagcaagcttccatcaggcattcccttggatctctggcccaatctacttggagtcttctatccaatgcccttgcagggtacgatagcatcatacccttcaccttgaaaaggagttgacctcaaatcttgaggttcttcatactctaggctccttttctcaacac

SEQ ID NO: 11686 - DNA, 427 bp, Glycine max
tggcgtctacccacatggactaaccttgtgtttattcctttgataacccctttgagcctatggacccctttctttgatttgaacctcagttctagcccttacagaaaaaccgtgataacaccttactgttaatgaatatgggagctttggaattgttctgggattaactgtgggggggtatgtgtcattgcaaaactttattgacgtgcatactataagttttgttttggccatgctagatgtatatacatattgtctaaaaactgctacacacttcttgaacatactgtctaatacaaagatcaacatgtgcatactttccagctctctactgtgcaccaaaatattagactgagaatccgattgaacttgcatcattgacgtctgtaccaccctgacatatatacatctccatcttatctagcat

SEQ ID NO: 11687 - DNA, 559 bp, Glycine max
  unsure (1)..(559): unsure at all n locations
tcttttggaccttgaacaagccatcaactcctctttcagaaccacgctatgtgctcgcgactggtccctttcttcccttcgcaacttgagttcactattgctaccccatagagctccgcgaaatttgttccggccatactcttccttgcgagccctcttggtctctcgttcaagggctcttgcggtaattgcattctcttcccgtaacccggcacactccttccgaacgtgtgtagctgccaacttgaacttctctttggcgagttttgcctttcctaactcgcttttgagagcttggacttcctcgtcctcttccggtgcttcaaaattctctttgctgacgacttttaacttggctagccaatctaaacctcgtatgcgaactttcagccattcgtggtacccaccaatgatgccattacgaatgcctctaagctcttgatctttccttaacggggtttcccatgccttatggattcttgtatagtctcggaattttgtgcgccgagatccctcacaaggtaaggagacatgctttcttncgtcggtgctcccctca

SEQ ID NO: 11688 - DNA, 352 bp, Glycine max
cagaacttgcttaggaacttagcatctttatctagaccactggtcctaagcaaaccatggagtcacacagcttccctccaataaagatttgagatatgggaaacgtcctccaccttgtggcatggcctaaagtgtgccatcttgctaaacctatccaccactacaaagatagagactacacctctatgggttctagggagcccaatgacaaagtccatactgatgtctacccaaagtgcaaatggaatgggtcaagagtgtgatagcccatgaggcatcaccctaaactcaggctgttaactagccacacacctactgccatgcttatagacatttttcttcatatgggggc

SEQ ID NO: 11689 - DNA, 775 bp, Glycine max
  unsure (1)..(775): unsure at all n locations
atganncccctgtgatttacgctagttgattacgctacactatcaagtgccactatctaatacccgaggcgcgaacatctaagtagcgtgctatagagacatctcatagattccaaatgcgcgaactctgtacaagagaactctgacattctatactggaatagggtgtaccagcgaccgaacatacccccgctgcaacagcacatatggaatgtattacatgcacataatctgggttatcatttaactcgcttctttcgttcacaacaagagcagaagaggtgcacttgatgacctttgacactgtgctagcaaacctgtcagcacaccttctattggaggatttcacatgcataaacactgataccttcgcacctagaatgctcgcacaaattgcatattggcctagcgagaatgagataattacgactttatcaatgtgacaatgttaccgagaattggcagacatgtggtaatcacgcgacagacctacagcatgtataatttttagcctcattcaccaatctggaaattttatattactcacatatcaatttcacttgaagaagtttgggaaccaaacctaaccaaattttctccccccaaaaaaaaatcacggtatcccaacctggaatgaaaaaagaaaacgtcgttacattgggaaaaccttctccttttcaaccaaaggggggggttctgggagggtgtaaacctccccaaaaaacgggggttttcccccaaaaactttaacccccgataaaaaaaaccttttaag

SEQ ID NO: 11690 - DNA, 447 bp, Glycine max
agcttgttagacatctaaatcatatgatatggacttaaatgcgtagatgtcagtgttggcccattaggggataatgagaaccctattaagttaacacgctataagaaagatatggtccccaatatattgagtcgtcacacatagtttctcttctccccatctgaagagttacgaaggttctattgaggaataaagagattctggttgagaaagaaccatgaagccaccaattatgcttttagtcagttattcattgtctctgcaacatttcatagcagatcctaagaagagcgcatacataaaaaatcacctatggattcagattttgctgcgcttgtttgatcaaacattattgatccaagtattcctaaaactcttcttgataatctaacgtaatatattctgagtgattgttgtattttataaagatcccctaaaattcaacac

SEQ ID NO: 11691 - DNA, 464 bp, Glycine max
tcttgcgtagccgctcttggtgctcagaaaatcccaaaaacaaatccctcttattactacctattttgaattctttagttcctgaatgtacaaccttcaagttgttgctcgttcccctctttgttttatgccaaaaagaaaatcaaagtgaaacaaaacatagagagaaatgtcatcgttattattacttgaaccacaacgaataacatctaaacaagtcattttgatcttagaatgtgaaaactctggatatttatggagaacatggggtatggaggcacgtaaggatgtcaataccacacgtcattttctccaagtcaagggcgcttgattaattgctataggaaaaaagcatacatctggtatattgtttgggttgcagctgtttggaccatttggcaattcaaatagctttactataatgtcattagaattcccccttgtacttggtctttgcatttgtt

SEQ ID NO: 11692 - DNA, 602 bp, Glycine max
  unsure (1)..(602): unsure at all n locations
agcttgcttgtggagcttctatggaggatggatctttgagcttaaatgaggtccttcaatggtgattttccaccatggagatgcagcggaagacaaaggagaagaggtgagaggaggcgccatccactaaggaataagccatggaagaaggagcttcgccaccaagatgagccttggataaaaagcttggagaggatgcttcaatggaggaaaagaaagagggagagaaagaaagaggggggagcacaaaattgaaggaagaaaaagggagagaagttgaactttgatttgtgtctcacaagactctcattcatcaaagttacaacaagtgttacacatgcttctatttatagactaggtagcttccttgagaagatntcttgagaaaacttccttgagaagcttctttgagaaaaattccttgagaagcttanttgagaaaacttccttgagaagctagagcttagctacacacacccctctcataactaagcttacctccttgagaagcttccttaagaagattcctaaagaagctagagcttagcaacacacacctctctaatagctaagctcacctncttgagatgagaagctagagc

SEQ ID NO: 11693 - DNA, 471 bp, Glycine max
tcggcctgatcgctaagcggcaacttctccttggctattcacgacttattgtcgccaagctaaattccttacggccataactgaggtccatgaagctaagcgccagtcatggcagctaagctaaattccttacgacaatgtgaacgctaagcgagcccctatctgctaagtgcatgctcctctgtatttaagatgcatcattttagctaagccagccagagcctgtcttagcgagaattacagctttttggatctgcaaacctcgctaagcggtcttatccttgcgctaagccaaacctgcgtgtaaaaaaaaaactgattttgaatttgaaacgtcggctaagcacgtgggttcgctaagcgagccttgttgagaaaccgaacgtctctctagctcgcttagcacagtgttccactaagcgaaaggggtgaaaactgcttaagtgagtgtaacagcagttccacttacac

SEQ ID NO: 11694 - DNA, 474 bp, Glycine max
agctcgagcacaatggttttatcagtagcaatgagcacactaccctcagagcgatccaaaagaaagccaaaaatcaaaacaaaactgaggaatcccactaagatgagaaagaaactctagccaacacccactccaacccccactgtgggccccacataaaccccaccaaactcgaagccctcatcactaaataactccatgaagacattgtctgtcaatcacagaaagttctcattcgtcccacgttcgattgaagacctatacaagccaatggtgagcgtctgtacaatggtgatgtgagaaacaatgagagagagtgttgggctacaatggattacttgtgtgtgacgtgggctaacagcggaggtgcaatggaggcacgacagacgcggaggcacagcaggttacgttatcaagttgcaaaggggagtgacacaatgctagagttggaggcatattatttggggataattt

SEQ ID NO: 11695 - DNA, 274 bp, Glycine max
taaagtgcttacgcccatcactgaggaccatgatgcgtaagcgccattcaaggggcctattcttaactgcttactacaatgtgaacgctaagagagcccctatctgctaattgcatgcagtagtgcattgaacatgaattattccaggtaagtccatcttagcctgtcttacctagaaatacagcttgttggatccgcacaccattctaagcggactgatgcatgcgctaggccaaacctgcgtgtagaaaaaaaactgatttcgaatctaaac

SEQ ID NO: 11696 - DNA, 418 bp, Glycine max
agctctgatcgagtgctataaagcaaaatttgtgaaccattggtgcttcatcccaaataattagacttggctgatttaacaattctgctaatagactcccttgatgtatgttgcatgttgagttttcaaaacttggtacaggaatcttaaatttggaatgtgcagtcctacctcttggcaacaatagagaagctatgccgctagaagcaaccacagtaacaatttgattctttgctctcaatgaactcgtcaatgttctccatatgaatgtttttcctgttccttcaaatccatataggaaaaacatgccgccctcgatgttgttgacagcttgcataattcgggtgtgaattgatctttgtccatctacaattatggatcagttaacgttatatacaaatgaacaataattaatttt

SEQ ID NO: 11697 - DNA, 360 bp, Glycine max
ttcacatatgatcccactcttcgactcctcaaagacgccctattcattcggattgagagggaactatccaaagagaatcagcctctatcatgatgtgcagaaatttttgctacttcatttgccttactttcttgcaaaatgtgtggaaacgctattatttttttggcatcttgattctgtttccttattgatttggctgatcagtcattttactaccctgatattccacagatgcatgttagaattaacttttcccaaaaaactataagcattatagctatatacggatgaacttcccacctgaacattaacctcattgtatatggcccttactttagcaacattttctggatctggctt

SEQ ID NO: 11698 - DNA, 485 bp, Glycine max
  unsure (1)..(485): unsure at all n locations
agctttgcctcaaaacaaattgtttccaagacatccaaggctttggtaatcgattaccaaaagacaattttgaaaaaacagtttttaaaaagggttttgaatttgaattttaaacatgtcatcgattaccagatgttagtaatcgcttaccaacaacgaaactcttgaaattcaatttgaaaagtcatgacccttcaaaatataactgtgtaatcgattactagtgtagaatttcagaaaaagctttttgaaaagacacatctcttcaaaccattttgaaaaagcacgaagggcctatatatatgtgtgtctgactttcaaaagcaagagagagatatcctatgagaaattcattgccaaatactctctcaaaaactcttgggcaaacacttgcaaatctattgagagttcatccatgaancttaatttgtatcatccactctaaaggagataaatctttatgtttatctcagaaagttagttgt

SEQ ID NO: 11699 - DNA, 324 bp, Glycine max
gtgctctgcttatgcctgagcgctccgcggcaacttggccttggctaagctctagctattgtcgacaacctagattactcactgccatcactgatgaccatgacgactcagccgcctaatcgtggctcactgatctggactccttactacaatgtgaacgctcttcgagcccctatctggtaggtgcatgcttctccgtctttagagatgcatcattggagctaatccaccctgagcctgccttagcgagcattacagatttttggatgtgaggacctctctaatcgggcatatccttgcgctaagccgaacctgccagtaaaa

SEQ ID NO: 11700 - DNA, 492 bp, Glycine max
aaaccaacttcattttaatggggctaagctgaataattaatgaaacctacactattttttctatttaccgggtttgttaaaaaaaaaatgaaatggcatgtgtacccatatgggcatatatagtcttagaacttctttttcttgcttatatatatatttggtttcgcttgaatgggtaaagttaaaacagacttagaaatgaatttagacaaccattgcctgaatgcccaatattaaaatgcacaactacacaaaaaggttttttactttttgaaattttcgttaacatgcctcgaaaatgaaatctaacctaacgcagtgtggacttgctttacctacagaaaccatccatgttgaattgccgatggaattaaattcgtatattaccgaaacacaccagtatcttgatctgctatggcttagggggggaagatggaaaagtctatttcaataacgattgaatactagatgcagcccctcccttttttttga

SEQ ID NO: 11701 - DNA, 666 bp, Glycine max
agcttgcttgtggagcttctatggaggatttatctttgatcttaaatgaggtccttcaatggtgattttccaccatggacatgcagcggaagacaaaggataagaggtgagaggaggcgccatccactaaggaataagccatggaagaaggagcttcgccaccaagatgagccttggataaaaagcttggagaggatgcttcaatggaggaaaagaaagagggagagaaataaagaggggggagctcaaaattgaacgaaaaaaaagggagagaagttgaactctgatttgtgcttcacaagactcttattcatcaaagttacaacaagagctacacatgcttctatttatagactaagtagcttacttgagaagatttcatgagaaaacttccttgagatctttctttgataaaaattctctgagaagcctatttgagaaaactttcttgagaagtctgagcttagctacacacaccccttctcaaaactaagctctacctcctttgagaagctacccttaataagattcctaatgaagctagagcttagctaccactcacctctctaatagcttaagctcaccttcttcagataaaaaagcttgaaccttatcttcccccttcctataatactatgctcacccccttgacataaatcatgaata

SEQ ID NO: 11702 - DNA, 471 bp, Glycine max
tcggcctgatcgctaagcggcaacttctccttggctaatcacgacttattgtcgccaagctaaattccttacggccataactgaggtccatgaagctaagcgccagtcatggcagctaagctaaattccttacgacaatgtgaacgctaagcgagcccctatctgctaagtgcatgctcctctgtatttaagatgcatcattttagctaagccagccagagcctgtcttagcgagaattacagctttttggatctgcaaacctcgctaagcggtcttatccttgcgctaagccaaacctgcgtgtaaaaaaaaaactgattttgaatttgaaacgtcggctaagcacgtgggttcgctaagcgagcctttgtgagaaaccgaacgtctctctagctcgcttagcacagtgttccactaagcgaaagtgttgaaaaactgcttaagtgagtgtaacagcagttacactcaca

SEQ ID NO: 11703 - DNA, 538 bp, Glycine max
atgagtggagggaaaaaatgactggagggagaaggagcccaaaagaggtctgaactttgaagtgtaattctcaaatgatcaaagttagaaaaatgcccacacatggtctctatttatagcctaagtgccacacaaaaattggaggaaaatttgaatttctattcaaatttcacttgaatttgaaattgaatttgtggagccaaattttggaaccaaaatttcactaattatgattagtgaattttagctatggttcaaccccctaatccaagatcaaaccccaaattctccactaagtgtgcttacgtgtcatgagacattgtaagcatgaaagacattcccaaagtgttactatatgatgtgaccattggggtgtagcatgcaaatgctcacctccccctctataattcaattggattggacttctcccaattcaatttaatttatttcccaccacccacattcaatattcacttaacgcctaatgaaatttaagcctacccataatacaaaaactagtcttagggccctaaaatac

SEQ ID NO: 11704 - DNA, 464 bp, Glycine max
tgttcgcacatcgtttgcgtgtatgatatccactcgataaggttagaagtagaggagaccttcaatcctataacgcaacgtggcggacgaaagtgggcagttaacttgaatggccattattgtcaatgcggaaggtattctgcacttcactatccatgttcacacattattgcagtttgtggttacgtgagcatgaactactaccaatatatagatgttgtttacacgaatgagaacatcttaaaagcatactccgcacagtggtggcctcttgggaatgaagcggcaattcctccttctgatgaggcatggacactaatccctgacccaactacaattcgtgcgaaaggtcggcctacatcaacaaggataacgaatgggatggattgggtcgaaccatctgaccaccgacaaaaatgtagtatatgtggagcataacggcacaataggcgccgatgtccaat

SEQ ID NO: 11705 - DNA, 471 bp, Glycine max
tcggcctgatcgctaagcggcaacttctccttggctattcacgacttattgtcgccaagctaaattccttacggccataactgaggtccatgaagctaagcgccagtcatggcagctaagctaaattccttacgacaatgtgaacgctaagcgagcccctatctgctaagtgcatgctcctctgtatttaagatgcatcattttagctaagccagccagagcctgtcttagcgagaattacagctttttggatctgcaaacctcgctaagcggtcttatccttgcgctaagccaaacctgcgtgtaaaaaaaaaactgattttgaatttgaaacgtcggctaagcacgtgggttcgctaagcgagccttgttgagaaaccgaacgtctttttagctcgcttagcacactgttccactaagcgaaaggggtgaaaactgcataagtgagggtaacagcatttaccctcacac

SEQ ID NO: 11706 - DNA, 280 bp, Glycine max
agcttgcttctatcgaaggtggggcaagtatcaatgcctaggtccttccatggatcatatgctctgacgatatgcaattcatgcacaaatgactgtagaaatatgaatcgccacactctatggaatatcttttggttcacagaccctaaagcttaaggcttgccttcattatcaaattagaacagggtgcttcaaggtgtgattttatcgagtgcatgcaaaaataactgaggtcatttggtttttgggaaaagccttggttggttatatacctaatgtt

SEQ ID NO: 11707 - DNA, 508 bp, Glycine max
tcggcctgatcgctaagcggcaacttctccttggctaatcacgacttattgtcgccaagctaaattccttacggccataactgaggtccatgaagctaagcgccagtcatggcagctaagctaaattccttacgacaatgtgaacgctaagcgagcccctatctgctaagtgcatgctcctctgtatttaagatgcatcattttagctaagccagccagagcctgtcttagcgagaattacagctttttggatctgcaaacctcgctaagcggtcttatccttgcgctaagccaaacctgcgtgtaaaaaaaaaactgattttgaatttgaaacgtcggctaagcacgtgggttcgctaagcgagccttgttgagaaaccgaacgtctctctagctcgcttagcacagtgttccactaagcgaaagtgttgaaaactgcttaagtgagtgtaacagcagttacactcacacttgccagaattcggaaactccttctctgcactctctc

SEQ ID NO: 11708 - DNA, 629 bp, Glycine max
agcttgtaattgattaaaccgatacgagacacttttttgcaagattaaaccaacttgtgtaatcaattaatgtaagggtgtgatcgattaaaatagaaagttttaccttctaaagaaaattttgtaactttagaaattttctacttactcctacatgatgatgcatgatgcatatatgaaatgatagagactaagatgcaacacacaatacaacaatcaataaaaatgccactaaagagtgttgggatgtgaaagaaaaaacttcttcaagctcttctttaagcttcaaggttaagtcttcatgttgctcccctatctctaacacaaataacaaccatcatattaagattaaaaataatagatgattgagattcacatatttaaatttcaaattaaaattgaatatatcatcaaatctttgaaagattaaccagaaaacaaaccaatctattaagatcttagttatcacattctaagatatctgaattaaccatcaccctgattataacaccctgagatattataagttataaatcgacatttaattttatttattgtgtggttgactatatgatagacttgaatgagtcgaattatgtggagtcttttttagctaagttgaaattatg

SEQ ID NO: 11709 - DNA, 503 bp, Glycine max
tgaaaagagagcatggagctaggttatgaccaagtgaattaattttttgaatttcaaatgattttagaaagacaaataaataaaaactagttgtgccctctgggttagatcccaaatgtggtaattgattatcttgtttcacagagagcttctcaagcttttgtggttctagaataatcaattaccaaatgtggtaatcaattattttgacacacaaagggctcctaaagtttctagatgcaatctaattgattactaaatgtggttataaattatctttagttattgcgacttccttcttctgaaactggattatgtaattgattactaaaattggtaatcaattaatttaatgattcttgcaaaatttcaagtagaagggagttctgttgcttggtctaacactctgtaattgattactaaactttataattgattacactatgttgaactcattgcatctaataaactttgagatcaatcattaatctaccttggtttct

SEQ ID NO: 11710 - DNA, 402 bp, Glycine max
agcttctcaaggaagctacctagtctataaatagaagcatgtgtaacacttgttgtaactttgatgaatgagagtcttgtgagacatacttcaaagttccacttctctccctcttttattccttcaatttcgtgctgccccctctcttttactctccctctttcttttcctccattgaagcatcctaccaagcttcttatgcaaggctcatcttggtggtgaagctccttcttccatggcttattccttaatggatggcgcctcctctcacctcttttcctttgtcttccgctgcatgtccatggtggaaaatcaccattaaaggatcccattgaagctcaaagatccagcctccatacatgccccacaagcaagcttccatcaactggtgaaaggaaaact

SEQ ID NO: 11711 - DNA, 730 bp, Glycine max
  unsure (1)..(730): unsure at all n locations
atganccctgttttacgtaatgttacgtacgcttctgtgacctcctagtcccagcattgctccgagatttaccgcagatctccttagactaacctcgaaactataccccaccgagcagtactgacctgtgaacacaatgtgcatggccggtgggtgattgctcccaagcttatagtgccgcactatccatggactcacatcctcgcacttcgtcgttacatgagcatgaaccaggcccaatataaccataccattctcctgtaatgcagcatcttcactacaaacaccgctcaacggcagtcacttgaggctgcaacagcaacttcacttgaagatcatggacggcactggttgtggacacatgcaaattcactcgagactgcaggcttcattcacagcttaactaatcagatggactggtggtacacagtgccatgcacaactatgtcgtatgtgtgacagcataccgtcacaatttgcgctaatatcccaccaacgtgagagcgcgtgacttcatatgtctaaaagaaaatatgtaagggaccattaccccaatncgcatttgtcctaaagcggtgaaacgaaaacttgccaaaatttgggggtctttcttcccgaaaaaaagaaagaatggaaaaattttgggaaattggggggccaaaaagggggggaaaaaaaggaattcttatccaacttagaatgccctcccccaaaaaggtggcggggagaa

SEQ ID NO: 11712 - DNA, 274 bp, Glycine max
agcttcttctccgcgagcttctccgacagcccttggacccatttgcttcgaggtaggtggccttcttcttagctttggttttgttatgcactacattagggtaggttagtgtaacgttaggttagtggaaccttatggtagaagacgaaacctagggtagaagacgagaggggagaagacgagaggacgccggaaaaaatggcggaaatcgctgacggaggagtcttccggaagaccccttaggggttcttccggaagttccggaagaacgttt

SEQ ID NO: 11713 - DNA, 428 bp, Glycine max
ttggcttgcaagctggttgctttggatgcaaatcctatgcaaacacaccctaaattgagtaagtgctttaattagcattgagtctctggtaagggtcaaagggtaagattggagctttgtcctcattccagacctcatcaatgtattgcactataattgcagattcacaaatgggcttgccattatggatcagaactggaattttcttgagaattgagttcatttgcgaagcacaggactcttgttcctaagaatctcttccttgacaccctgttcagctaatgcaatcctaaccctcattccaaacatgctagcccatgtatcctacagaacaacctcgtctgccatcgttgcaaaggatcaccaaaacaccaactcatgttatgaacttgccaaacagtgtagatatgttgtggactaacacgaca

SEQ ID NO: 11714 - DNA, 588 bp, Glycine max
  unsure (1)..(588): unsure at all n locations
agcttttagactcaggcgtgaaccctacctcaccaatattgagagacaatttttacaattaaattaagaagtaccattcatataatatctcacattaagtacaataatgcaaaaagaagaaattgaaaatgggaacaaagccaagatgaacctgtatcgaaaagagcaacaattatgtcactatttgatttcaatcttctcttagcaattgtaggtaacccaatgaagttccatgatcttgttgtgtgcagctggcagtactggttttgaaacaccaagagcacttcatccatggatacacatgcaaaaagggttaataacataatatatagtatttcaaagaaagatgaaagagctagagaaaattgaaaactatctataccagataactnttttgcttcatcctctaacagttttgcagcaaatgcatttaaggtatttgtgtaactatataccatgaattcttttgcttcaaggaagctaagtaagcacaaaccanaatccaaatgatttaagccaaaaggataaaaatagagaattcaaaaaaatgcttctcacatggtttaagagggtggttttactttttta

SEQ ID NO: 11715 - DNA, 602 bp, Glycine max
tatacatactaagcttcataatatcctagaaatccaattccaactatcatgaactaccctaaaccaagaaaacagagcagaggcagaaaactctgcccaaaacacattcacagattacaactttccttactcaaataccccagtagcattcccttcgttccaattcgttaaccattggatcgacttgaaaattttactggaggttcctagtacataaatctacattttgaccgttgggatctgctagaaaatgtgtagaacccactatgtactaccttttccataaccagcaatgcataagcattttctgcacatgaacaaaattctgctgcacaaaatttgacagctttttgctgcacaatttggcagatttcgaaatccatcttacccacctccaattttgctcaaattggatcctacaagtcctaaatcatgtataaatcatatctaaaccaaaacaagcttcaaaccaagacaattcaaaatctaggtatcttataacccctcaatttaaagggaaatttcgagggtttggagaaattgaaaaattgagaaatgggagcaaatttttgggaggcaaaactttttctatttttcaaacc

SEQ ID NO: 11716 - DNA, 421 bp, Glycine max
agcgcgtagaggatgcttctatggaggaaaagatagagggagagaaagagagaggggggagcacgagattgaatgaagaaaatgggagagaagatgaactttgagtcgtgtctcacaagactctcattcatcaaagctacaacaagtggtacacatgcttgtatttatagactaagtagcttccttgagaagctttcttaagaaaacttccttgagaagcttctttgagaaaacttccttgagaagctagagtttatctacacacacccatctaaacaataagctcacctccttgagaagcttacttgagaagctatgacttagctacacacccctataatagctaagctcacccccatgacaaaacatacatgaacatgcaaaaaaaaagtcctactacaaagactactcaaaatgccct

SEQ ID NO: 11717 - DNA, 411 bp, Glycine max
tccataatatcctagaaatccggtgacaactatcgtgatctacccttatctaagagaacagatcagaggcagaaaactctggccaaaacacattcacagattacaactttccttactgaaatatcacagtatcattcccttcgatccaattcgttaacaattggatcgacttgaaaattttactggaggttcctagtacataaatcaacattcagaccgatgggatcttggctaaaatgtgtagaacccactatgtactaccttttccataaccagcaatgcataagcatgttctgcacgtgatcaaaattctgctgcagagaatctgacagctttttgctgcgaaatgaggtagatggtaatttcatcttaccatatgggtcttatgaggtattaggattctacaagaaa

SEQ ID NO: 11718 - DNA, 125 bp, Glycine max
agcttctgacgctaggggattagccgcctgtatatgctgcaaactgccacttccaactggcatccacagtacagacccaccctctatgtcgatcacatcctccactacgactagtcggatcaatg

SEQ ID NO: 11719 - DNA, 207 bp, Glycine max
ttattattgtaatatgcgtttaacgcctctgtcgcactgtgtgcggtcctgctgatgtttcacttgatccttgatcaacttcgggcgtagaaaaggacttgcacttccattgtgtattaccttcgcatgaaagagcttttctttcgtatgggtcatttacacccttgatttctgacttctggatgactacgttgcctacaggactga

SEQ ID NO: 11720 - DNA, 416 bp, Glycine max
tgcaagcttataaaaaggatttcaactttttcagaattcagagagctctcaactaattcttattgaaaagtgttcaataaactataatccatgtcaattacccaaagacacctttgataacctagtaatgtgaatttcaaaatgaatttcaacatatcatgaactatatcatatgccctcacatttttattctaacaagcattctggccctttagttgtatctgcatccaaactcccattatcttcataaatattcacaggataaagtaactatgaaccattggtcaatttgcatttaaactagaaaaatcacaccctaaattttactactacaaattgaacagggaacaaaaatacaaaattactaacatgacactcccttgatttgaatcatcaacaacccttaaaggatgttg

SEQ ID NO: 11721 - DNA, 707 bp, Glycine max
ttgaggccactcctgaatagcgtataacttttctggcgctggttcaactccggtgccggagacgacatgccccaggtactccagttgggactgggcaaaagtgcatttggtacgtttcaaagagaacttccctgaaagcaagagtttgaacgcgctttcgaggtgacccaaatgatccgccattgttttgctatataccagcacatcaccgaagatgacgatgatgaacctgcgcagaaagggttgaaagagctgattcatagttgcttgaaaggtagatgggtcgctacacaatccaaagggcattactcgaaactcgtaatgcccttgatgtgttctgaatgcggttttgcgaatatcctcttctctcataagaatttggtggtacccttgcatcagggccagctttgaaaaccaccgtgccccgccgagttctctaacaactcatctatagttggtataagaaacgtatcgcgaatggtttggcattgagagcctataatcgatgccaaaccgccatgacctgtccttcttcttcaccaataacacaggtgatgaaaatggactaaccgttgggcgtatgatttctttgtccaacttagaacggatttggacttctaatctctttctttggtaatggggggactgtattggtttcccctttactgggggtggttcaaaaaagatgtttatggcttgccaaagct

SEQ ID NO: 11722 - DNA, 498 bp, Glycine max
cttttagcttcaatgcgaggaaacatacttatggctaagattctaaattttggttttgaaagtggaaaggcatgaaaattaggacatgcttgtgagggttttactcgaatttggctgccccatgaggggcactttgcacctaggtagcatggaaaatacctttcaatggaatgtatatatgtgtgtgaatataggtagcatggaaaacacctttcaatatatgtgaatatatggcattaaatgtcttgcaaagtgtgaatgagtaactaaaatgccttttaacatgtgcgtatttgaagataggtagcattaggagccttttagaaaatgtacccatgtcaaaaagggcctgaggacgcttcctaaatgaatatatgatggcatggaatttccttttcaaatgcaagtatgtgcatgacgtaataagcttccaatgtgcatataaataaatgtgagtgaacaacaaaaatttgtatgataaatacttcaaatatgtgt

SEQ ID NO: 11723 - DNA, 548 bp, Glycine max
agcttttagactcaggcgtgaaccctactttaccaatattgagagacaatctttacaattaaattaagaagtaccattcatataatatctcacattaagtacaataatgcaaaaagaagaaattgaaaatgggaacaaagccaagatgaacctgtatcgaaaagaacaacaattatgtcactatttgatttcaatcttctcttaacaattgtaggtaacccaatgaagttccatgatcttgttgtgtgcagctggcagtactggttttgaaacaccaagagcacttcatccatggatacacatgcaaaaaggggtaataacataatatatagtatttcaaagaaagatgaaagagctagagaaaattgaaaactatctataccagataaactttttggcttaatctctaacagttttgcagcaaatgcatttaaagtatttgtgtaactatataccatggaatctttttgcttcaggaagctaagtaagcacaaaccaaaatccaatgatttagcccaagggataaaatggagaattcaaaaaatgct

SEQ ID NO: 11724 - DNA, 704 bp, Glycine max
tccataatatcctagaaatccaattccaactatcatgatctaccctaaaccaagaaaacagagcagaggcagaaaactctgcccaaaacacattcacagattacaactttccttactcaaataccccagtagcattcccttcgttccaattcgttaaccattggatcgacttgaaaattttactggaggttcctagtacataaatctacattttgaccgttgggatctgctagaaaatgtgtagaacccactatgtactaccttttccataaccagcaatgcataagcattttctgcacatgaacaaaattctgctgcacaaaatttgacagctttttgctgcacaatttggcagaattcgaaatccatcttacccacctccaattttgctcaaattggatcctacaagtcctaaatcatgtataaatcatatctaaaccaaaaacaagcttcaaaccaagacaattcaaaatctaggtatctaaaacccctcaatttaatggaaatttcaagggtttgaaaagtggaaaattaacaattgggggtatattttgggagaccaacctttttatttttaaaaaaaagtgttaccaaaaatttaaaatttaaactctgggcctaaaaactgggggttttaaccgggggaaaaaacttcttcccaaattccaaaaaaattttgaacccccttaataaaaccccccaaa

SEQ ID NO: 11725 - DNA, 426 bp, Glycine max
agctttacagcagattttatttatgaccctctaacctagaattaaaataacttaatgccattaacctagggaattaaaacaaactaaatggctgagtgtaactgaaattgttggcaaccaaaagtcacccccaacagccaacaagtcagccaccatttggtctcccaaaaggctgatgcctaggttgccaattgggcccttattacaacttgaactaaagcccttttagttgattaacccaaaacatatttttggtcagccaactttacaaggattgggccattatttagacaaactaaacactctaaaattgaaataaagtggtgtcatttaatcctccatttgggccatgatacaactcacaaccttggacttttctccttgaaacttgggcttgtattaaataatatggacaagacttgttga

SEQ ID NO: 11726 - DNA, 496 bp, Glycine max
ttggcatcatcaaaacatcttggtgaatcatcatggttactttgcttccataatctccccctttttgatgatgacaaacctgaaatcaagagatgcatacaaattattttctagtcgttcactcactttattctccccctttctttttgagtttaagattcattttaagttaagctaataattgtatgaattcttgatttatatgaccccacatttttctccccctttggcatcaacaaaaaggccaaagtacgttgtaacataaaatcatacgcaaatggataaacatacaagaaatgtattcatacaagaaaaaaggagaaacttataaaaatcaagcaagataataaattatccacaaatcataataaaaacatatgtatcaaataagtcataagtcatcaacagtaaaacaaatcatttgtctaagtcactagcatctagaagtcctaattctcttctaatggtggttgaaagaatctttgggtagtgggtt

SEQ ID NO: 11727 - DNA, 814 bp, Glycine max
  unsure (1)..(814): unsure at all n locations
ccccccccgaagaacttcctctcatacccaaaatcgactatatattcctctgaactcacaagccaggcgnnttgaacctgtagcccggacctcaagcaccgcagcagcaatatatgaacatagggaaagaggttttatctatttactacaccttcagagggacgcacgaaggacttaagatctaagtgactatcacactagatacgacagatggaacaattagtgatccgttaaactacggaatcaaggtgtcgaagaatacgacaggagacacgagtcatacggaatacaaagtttttggagttataatacggctactgcaatataatgtgatatgcaattgaatcacgacagaattcagttatggtcacacggaggaacgataactcaccggtcatcgaactctaattcaattgtcaaaacaagcccgccaggaaaaccactctctagtgaactgtgaccgaaagattcaagatctaaacgggcatctcgccataatgaatacacaaaatacctctagcaagaatcgtctttaacaaagaaatcttctagttctgtaagcatacatcaagacaactgacgaaacaacaagggcttccaataataatcattgtaaaggaaggaaggaaataacggaaaatcgaatgagcgcttactcacagtcgcaaaaagataatagtcttataagataacatagattcgcacaaacatgtgaaagacaagattatcttgacaacctatacgattgcgtgacgagacatctcggaattaacttcttccacaaatatcttaaccactaatgcgacaagtagcc

SEQ ID NO: 11728 - DNA, 470 bp, Glycine max
tggagataaactttgtcgtgagagctaaaagtaacagtttcgaatacttgttactattgggaaattagtgaaacttgattgctaacccaaaactgaacttattctgaatggtacagacaaaccaatgtaaatatgggtgccactttctttttacttatattgcgacctaaactgacatagtatttgaaattgatctcatttaaaaaactgattcttttttttaaaatatgtatgcatcgcataagcttgaccttgcgcatatctgttctatggttataataagactatactacaatgagaacttgagtttttactaagaaagacttaataacaccctccacctacgatttaacccactaagatattacccattgtacttactcaatttgagactttatttttgagcacttcctaaccttgaagtttagtgtataatccaattattatctaattatgctaataatcgcacc

SEQ ID NO: 11729 - DNA, 170 bp, Glycine max
agctttaatttcgtgcgaatgtattgctcggataacactacgcgctaggcctttttgctaagactctacccagagattcttgatgtattgaagaaagagataaccgagcttatgctagctggaatcatttatcctatctctggacaaccaatgggtgaggtccgcccagg

SEQ ID NO: 11730 - DNA, 527 bp, Glycine max
tggcgataaactttgttgtgagagctaaaagtaacagtgacaaatacttgtaacttttgtgaaattagtgaaacttgattgctaaccaaaaactgaacttagtctgaatggtagagacaaaccaatataaatatgggtcttactttctttttagttatcttttgtcttaaactgacatagtatttgaatttgatcttgtttgaaaaacatattctattttttaaaatatgtttccatcgtctaaacttgtttttgcgcaaatttgttatctcgttttattaagttatacttcaaatgataactttaattttcacgaaaaaagacttaagaaaattctaaaattacaatttaaccccttatgatatttctaattgtagttactttttttaagactttacttttgatcacttaataacattgaaattcatagtctattaaatttattattaaataacctaattattgcacagagtttttgtggagacgactctatttatcgctattgctacctgaaggatttaatactc

SEQ ID NO: 11731 - DNA, 490 bp, Glycine max
agcttcttagtttcagatgatgcagatgggtttgtagctacctcatgcactcctctaatgactatggcatcatttctagcactaaactgctgggagttggaggccatcttctcaattaaatttctggcttcagcaggagtcatgtctccaagggctccaccactggcagcatctatcatacttctctccatattactgagtccttcataaaagtattggagaagaagctgttctgaaatctgatggtgggggcaactggcacatagtttcttaaatctctcccagtactcatacaggctctctccactgagttgtctaatacctgagatatccttccttatggctgtggtcctggaagcagggaaatttttttctaagaatactctcttaaggtcatcccagctcgtgatggaccctggagcaaggtaatacagccagtcctttgccactccctctaatgagtgaggaaaagccttcagaaatatgtgat

SEQ ID NO: 11732 - DNA, 572 bp, Glycine max
tttagttataatttatttttattgtaattttggcccaaactgtttagaaggcccatgtctatttttatctttttgttcagctacactttaagtatgggtttttgttttgaatgaaaaaaacttttggcatttgataaaatttggtgagagtttctctccgggttccttgttgaaccaattatcagacttatcaaggtaatccttgtggcgtctacccagacttatcttccttcactagaagtggcgtctactgtgacttatcttccttcaccggaagtggcgtctaccctgacttatcttccttcaacggaagtggcgtcatccaaatcttcgtagcctgtatcaagtgatcccttcctagtcaggttcacatcaaaacgctcgttggccgataatcttttttttttcggcagaagaagttttcttgttttggtgttgcatataaaatgtacaatgtacgtcgactaagtttttttgtgcgagcctcaccgacgtgttttttcgggcgaaactggcatcgcccatttattccgccatgaaaaattagcccatctcggcaaaaaatattttca

SEQ ID NO: 11733 - DNA, 771 bp, Glycine max
  unsure (1)..(771): unsure at all n locations
atgaaccttgaanctcggaccctctcggcccgggaacctctgaacgacctgcaggctgcaagcctgatcattttttttcctgcaagaccaacattttggaaggtttatttacaagggagaaaccatcgttttgaacagaaaccgaactgcgcttatatggggcgagggtaacttgccctttacaaaacaatccacattgggggcatggtgctaatctatatgaacatagtctatatacatgaattatcccacactgattttttttggtgaaaggcaggtgatgagacacaatcgtgtatgttttccagaagcatatttatgctgcctcccacatatatgtgcctttttgagaagcgacttatgctacccacttaccaatatacagatattgaaaagcatttttttttgctgcctatacaaaatattctaatgtttgaaagcatttttgctacctatccaacatatacaaacttttgagacgcatttttgctctatattcacaccctttgcaaggccttttttcaagccttgtatattcacatgatttaggaaggtacttcatgctattcttattcacatatgcacatactaatagaaagcatttttaaagcccccaagggcaacgttttcctctggagcagcataattcaagtctggcggaaaaccctctcaacatggcctaaaacttaggcctctttttatttaaaaacgaaaacttaaatttcttagggtagccccttctttcagcacttaagtataactttaacaaac

SEQ ID NO: 11734 - DNA, 422 bp, Glycine max
caagggtgattggtgagggtgactatggtaagatgataccccactgcttgaggatgacaaaccggacatccggagatgcgtaccaatcatatgggtgtgcgccactcactgtagtctacgcctttgggctcgagtaggagatgaatgttaaggcatgcgagtgatagaatgaagccctgatttatatgaccctacatttttcgacccctttggaatcggcaagaaggccaaagtacgtggaagataaaatcctacgcacgtggattaacagactagaaatgtaatcttacttgaatttaggagaaacttagccaggtcggggaagagactaatttatcctcaaatggtaatcaaagcatccgaatcaaataagtgatgagttgtcaacagtaaaacaaatcatgagtgtcagtcactagcat

SEQ ID NO: 11735 - DNA, 502 bp, Glycine max
agcttcacgagttgtcttctccagataatctctagcaatgtgcattttctcatcagtaatatacctagcaatagcaacatcctccattctatccaacaggggattaggtatcatttccacaaaatttgtagtgcaaacaaaaagaacctgcaccgagaaaaacaatacgttcaagaattacttgaccatcctaagaactacctatcaacaatgaacacaactaataaccaaacaaaaatgttgactatatcacaacctcactattaaggctccaaattatcaaataaatacctttgatagatcaatggtgacatcaagatagtggtccagaaaaatagcattctaatctggatccagaagctctaacaaagcacttgctggatcactaacatgtgctctgcccaactacaattgaataaaaagataatagcgctaaaatcataattttttccttgatatttacaagattataacccatgggtaaattaatgaaactgaaatg

SEQ ID NO: 11736 - DNA, 325 bp, Glycine max
tccttcatttcccaggtctaatcaagtttggccttctttcttgattcaaccaatgactttttcttggtggggctgaagttggtttatgtggaaggcgaaggttacgtgaaagttgaaagggtttgagaatgcaaacgttgggaggtacgaacttcaaaaataacaacatcagaatttgctcctttggtggtgaggctggttgacgttgtgatgactcaagaatctaatatgcaaattcttgttgtttgggaggtgacgatggggtatattgaagctgtgtctaacgatgtttaattttaatggctggtctgttatgtgcaagttc

SEQ ID NO: 11737 - DNA, 588 bp, Glycine max
agcttatcttcggcctttggggaatctctttgggcttcaattagccagaaattaatttgtagttttcgaaaggtgatcaatggttgaaatttgaaactgaaccccgaaagtggcaaagtgcaatttatttccttgtgggaggatattattgattattaacgggaggactgcacatagtcgtcttacggaagcatatgacatggcttttgcgtcaggtttaccttttggtcgggaaaatgtgataatagggctcgttttttaagtaaaaccaatcatgaattgttttttctgccctagttgtgtgtgtggtcgtcctacaatgggagaacaaatggttcacctgaacccatcaaaaagtggcaaatgacaaattaaccccctaaaataattgaaaaactgtgactggaaaaactttttcccccacctgtccattcccggtcctagggccatcatcatttatcggtccatccataaataatgttttataccatgattctttgcattgcatgcttttgattcatttaccatgtaaatgcttaaaaccgaatctgcttataaaaaaacccccgaatacacattttttttttt

SEQ ID NO: 11738 - DNA, 409 bp, Glycine max
ctcaagctcgggcgcattcaagacgtcgtggtgatgcgcgagggtttttctgccttgattatcacgcaataaaagatgaagacttaccggtgctcactatagacagtccatatcttaccttgtgtaacactcgctttattctttccatctgtgtatgagtctatgatacgttatatgttctactgataatagcttgaagtcatgatttagacaacccaccctttctttacacctttgccgtctgccaataggccatagttaacagtaacgtaaattcatcgcagtggtgacatactaaattattttacccatgcaatgatagactctaaaggtcacgcaagactatactttttccacgcatcatagataatgcatccgaaaatcactggaatttacactgacgcgcaag

SEQ ID NO: 11739 - DNA, 327 bp, Glycine max
agcttacaggcccatatcaatatcgaaaatgctggcgacttcctcgccaatggcgccggggctggatgcccccatgccggtgaattgctgcatgtccgccgttcccatcacggcgatatgctgggctctgtagcgggcgctgcgcacccgcgcccagggatagagcaaacccaggcttaccagcaccgccgccaggttggtgtatccgatccagatcatggcccatggcgatagggtggattcgaagcgaagcgtcccgtccagagtggtagggttgatagcggtattgaaggtgcgtgtgccgacataggccgacatgaacacaaa

SEQ ID NO: 11740 - DNA, 286 bp, Glycine max
ttaccgcgcctacctgaagcaagtggttgcctgttcagtctgcggcgaacgcttcagccatatccgcgccgatgacgccgcgccctggctgaccctgatcgtggtcggccatgtctttgttccggtgatgctgatcttcgtcgccatgagcgagatgggaacctggacccaagcggttatgtggtcggtgatcttcgacgccttgggcctggccatactgccgcgcgtcaaggctttctttatcgccctgctgtggctgaccggcgccggcaagaggaagaaaaag

SEQ ID NO: 11741 - DNA, 498 bp, Glycine max
agcttttaacatcaatattcatgcaccctttgctggtaaaatcatttcatggttcccttcgctatggtaggttatttcatgattactctggtgctttcttaggaggatatgttttatatgtgggtatctttctttcttttcagctgaactggaaggagttgttttggctatttctatagctcattccaaaggctggggcaagctttggctacaggtggattctcttttagtcctcaaggctttcaatgttatcagcgtggctccttacgatttaagaaatgttcggatgaatactttattctattggggcccaaatggagtttcgtgtctcccatattttacgagatagtaatgtatgcgctgatcatttggctaactatggtgtagaattactctattattgtgcaagataaacttttaatttggatgaagtgttctaagggagatactggtgttgctaggacagaaaaataaaagtaatctttgtttttggatgga

SEQ ID NO: 11742 - DNA, 245 bp, Glycine max
ccgcatatggaagtgcgaaagccccactacatcattatgattagacctgacatctccaaccaacaaatcttacgtcacaagacaattattgttgctgcttgaatacctcacccactctagtggatcacacaactatggctactctctaaagaaacactctcgccttataccactctaatttccctagagttcttaagcaattcagagagattatggccacgacaaagaacaattcaccaatatgt

SEQ ID NO: 11743 - DNA, 513 bp, Glycine max
  unsure (1)..(513): unsure at all n locations
agcttcctcggggccattcctgcgaaggttatacatttggaaagttagtttttaccaagaaatgctacccttaaaacaaaaatggcatacaaccccctccaataaatacaaacatcaatgtaaatttagagcaagcttatgcgcacacttctttacgaacgttcacttgcacaagacattcttataactaagaaaaatgcacccatatacaatcaaggcaccttcgttacctagattattcacatgtacttccaaggtgtatttgttacctacatcacacacatttcctttgctaaattcacatacatgcatactctaaacactttggctatcaaaaattgcatacgtgcacatcttggtatttttcatacctatacatacacaaacttcatgatgaatcttgactatctacacaataaggtgctaacattcatgcttttttcagtgttntactacctaaagccgatgcaattgaatatatttttttttgttactaaattgtattcaaataaa

SEQ ID NO: 11744 - DNA, 327 bp, Glycine max
ttgcatcgttggctacaagactcctgttgtctgtctatccatcacccctaagtatgatgcctccacctcaacgagcatctggtattatagcgaggctactacacatggggccctcaccaagagctgcctttacgcccacataatcactggtgtttactatgttgcctacaaagccgacgaccgcacctgcgtgcgggtggactctaatccgggcgatctcaggcctattataacattttcactacactatgttattggagactccctgttcgatgaggactgtggactgcatttgattggtcatgatgttgcgaacctccatgggat

SEQ ID NO: 11745 - DNA, 262 bp, Glycine max
ttacactagagacacaacttaaaaccaaggaggggacaagccacaacaagcatgggacaaggaacaaacccaacttaacagagtcttatgaacaagagtgaacaagcaaattcaacgccatgattcaggtctctactcaaatgaagatcttataattttaaggagaggaccaaactaacgcacaagatatactcggccgaaactttctaatcgaacaaggatgccatagactatatgtaaccaaaaccatacgatgcacaga

SEQ ID NO: 11746 - DNA, 556 bp, Glycine max
ttgagccaaaatcttgactcaccataaaccttgacccagggtgagaatgtcaatccttaccctcggaagcaaaaaaagaaaagaaggaaaatttcaaatcaaagagaaagcaaaaagaaaagaaaggaaattcccaatcaaagagtgggagaaagcgaaaagaaaagaaagaaaattcccaatcaaagaatgggagaaagtaaaaaaagaagaagaaaaaggaaggaaagaaagttcctgatcaaagaagcagaagaaatatgcagaaaggtgttttgaccagacaatatctgaacaatacagaattgtcaccaaatgaacaaaaggaaggaaaggaaaccatgagctaaagtggtcttctccctttgattgccaaccaaaatcctgtgcgtcggtgacttgctcgccttgcgtcaaacaaaaacaaaaaaaggaaaaaagccaaaaaagggccaaaaaaaaaagaagaggtcaaaagccgaaaaacccaccaaaagaacccgttccaagggaagtcctattgatccatgatcacgcatgtaatcttttgattgat

SEQ ID NO: 11747 - DNA, 158 bp, Glycine max
aaatgctgcctgtcctccgatcccataacggcgatatattgggctctggaacgggagcttcgatccctagcccaaggatagagcaaaccccggcttaaccaagccgacgacaaggtggtgttttcgatcaaattatgggccatggcgattgggtggaa

SEQ ID NO: 11748 - DNA, 486 bp, Glycine max
agcaggcatccatgtcgctgcgttgatgagcgagtgttttctaacttgaattcaatgaaacaaaatcctgatagctgccgatgaatactctgcatagctgatattaaaccttgtgggacacttgtatttccctttacaccagagaattttcctattgactgctatatgatacctatagaactaacacttgttgtcatttaaatgacagattacccggtcattacaaatatgtcgactgtcaatgatcaatatctaacagtaatgagaattcaatttctgcagaggaagaggataacatcatagtttcagcccatgcaatccatggaaacaaatgggcaataattgctaagcttcttccaggtagaacacactatgcaatcaagaatcactggaattctacactgacgcgcaagcgtatggaaaagggaaaatatgtcccagcacatgctgatgtgatcgaaaaaggtactggtaacttttaaaaaa

SEQ ID NO: 11749 - DNA, 500 bp, Glycine max
agcttattccgcacaatggttgtctcttgggaatgaaacggctattcctccttctgatgagccatggacacttatgcctgatacaagctcaatttgcgcgaatggtctaccaaaatcaacatggataatgaatgagacggattggctggaaccatctgagcaccaacaaaaatgtagttgatgtggaagagaaggacacaacagacgtcgatttccaatgcaatctgaatgtggaagttgttaaattaattgatttatgtattttgtgtgtctacttgaatgaaatggaacctatcaatgatcaatttttttaaaattaagtattattatatttttgtgcacgccataagcttgatcaattggttaatattcataacataaatgatagtacaagtcttaaatttaaattaaaaatattcaaaaaaaatttaaattctaaaaagaaaataattgtcttgatgtcggtgatgacataagatgtgccccatggatgatcccat

SEQ ID NO: 11750 - DNA, 495 bp, Glycine max
tcttttttcgatcagtatcgcgtgaatcaagcatgttttcgacggaggctatcgttctaattgccgaggaaatgaaaacattccggtgtcggtcaaaccacaactttggttgaggtcgaaagaaaaaacctagccgacgtacattgtaaatttttacggcgacaccgaacaaaaaagcatgctctaccgtaaaaaaatattatcggccaacgctcgttaaaacaattgggtaatgtctgcaggaaaatatcagtcgcgactttacaatgaccgatgtcaattattatattttgaattcaattcctgaataataataggatgatgtctaataggaaatgttcgatcggtgtcatccggtgatgcttcttttttaaacctagaacgttgatctttcctcgccacgtcggctaacattttttttgatcagtatcggtgaatccaagttttttccaaagtgggctagagctttaattggccagcaaatgaaaacatgcc

SEQ ID NO: 11751 - DNA, 198 bp, Glycine max
ttaatatcaatctccatgccccctttgtctgggtttataatttgaaggttccctttaccaagaaagttatttcttgataacacaggggctttatccggaggatatagatcatatcatgggtgtcaatctttattttcagtttacccgcacggagttagaaacggttatcttctacaacacattcctaaagctgagaaa

SEQ ID NO: 11752 - DNA, 420 bp, Glycine max
actcagcttataagcaagcttccatcagtggctacaagctcgtatatgtcttcctatctatcaaaccaaaatatgatgtatccacatcaacaagcaaaaatcttattgtgaggctcctaaagagttggcgctgaccgaaagtggtcattaaggccacatagcttctggtgtttactattttgcctacaaagccaaggagtggaccatggtgagggaggacaatattcggggagacctcaagcctatgaaaaggtcttcaatacaagatgtccgtggagtcgccctgtacgatgaagactttggacaccataaagtttgtgatgatgatggagaccaccatgggattgatacccttgaagtccctatctgtgaaagcgataacagggagacattcctataatgacgccttgactaaactga

SEQ ID NO: 11753 - DNA, 359 bp, Glycine max
gagcttatagttaaatatgaaggtcatttatcttagcttggtgaaagaaggcctgaaaacacacttggaaaagcttggaagaaaaagggaaatggtgtctgcttacctattgactagcttgtgaaaactaggaggagtgagcacctttggtgaggtttggagtctaacatgaacttataccagaagcttagagcatggtgcatcggattattgtgtacgctcatcttaatctctcaattttgacgcatgaatgacccttgctcagccatggaaaatgtctacgtcactaccaaatgtggtgtgcttcacttctgaaactttacttaaagaggataaattttactttggagattgtgctt

SEQ ID NO: 11754 - DNA, 537 bp, Glycine max
tcaagcttctcaagcaagcttccatcaatggctccaagctcgttttgtgtcttcctaccaatcaaaccaaaatatgatgtatccacatcaacaagcaaaaatcttattgtgaggctcctagagagttggcgttgaccgaaagtggtcattaggtccacatagtctctggtctttactattttgcctacaaagccaaggagtggaccatcgtgagggtggacaatatccggggagacctcaagcctatgaaaagttctccaatacaagatgtcggtggagttgccctggtcgatgaggactttggacaccataaagtttgtgatgatgatggagaccaccatgggattgatacccttgaagtccctatctgtgaaagtgataagagggagacttcactataatggtgcgttgacaaagctgatgtcccgaatggcatgaagatggcatcttcgagactaactggactggcctccataagagaatctactcccactggagctgattacacctcttgattgcttggcggggtcctattct

SEQ ID NO: 11755 - DNA, 550 bp, Glycine max
agcttcttcagagccattttctgcgaggacaaacattttggaaagttaatttacaaggaaataccaatcattatgaacaaaaaccaaacaacacttatatggtgcgagtgtcaacatgcactttacaaaacaatcacattggggcatgtactattttatgacatatctatatacatgaatttacacacacaaattttttttggtgaaaggcagtttatgacacacatccatgtatgttttcgacaagcattttcatgctacatcccacatatatgtacatttttgaaaggctccttatgctacctactcacaaatatgcatattttgaaaggcatttttttttgctacctatccaacatattcaaatttttgaaaggcatttttgctacctatccaacatatacaaatttttgaaaggcattttttgctatatattcacacactttgcaaggcattttttcatgctatatatattcacatattttgcaaggtattttcatgctatatatattcacatatgtacatactattgaaggcatttttcatgcta

SEQ ID NO: 11756 - DNA, 701 bp, Glycine max
  unsure (1)..(701): unsure at all n locations
atcttctcaaagatcccaacggtcagatcatggacaagtgtcttgtaaaattgtagaccaaatttcgagaagatccaacgattaacgaaggctgggaagcatttttaccaaggaagcttcatgtaacttcctcaagaagcttcattaagaggcttcctccagaagcttcatcgtggcttctttgagaagctagatccttatctatccacacccctctattaactaaattaacctccttaaaaataattacggataaaaataacacaacaaataatcaaacatcaaacataattactaataatatatatatatatatatatatatatatatatatatatatatatatttatatatatatatatatatatatatatatatatatatatatatatatatatatatatatctcggggggggccaaacgacaacatctttttttttctctaacataggggtgtttagatcttgttccacctccctctttattttgtgggccaccctttcttttcaaataaaggatcttttttatatcactactcggngtgttagggggggtgggggcgccccacatggtttttcccttctatatttttattggggtggacccagtaaaaattggtgggtttagcagtttccccccacccgtgtttacaggggcctcaaagtgggttttaaaagtggtggggggcggtgcctccatg

SEQ ID NO: 11757 - DNA, 331 bp, Glycine max
agtgactctagctagtgctcaagcttttggattgatattacgatggaggataccctgttccttggcccacgtagacggttgtgtcctgctgtaagctgacacgtgatgatatattgacgatgaattaaaaaccttagaaggggaagattgtcgcttcctgctttgatgcggaacaaaaaagcatagggtgccgtaacatgggaatagccgtcagggcccgtttcagccgcaagcacatctgtctccgtagacattgcctagaaaactaccgtgtactcatgaaattaatatacgaacaactctatctctcttgattcatgtaaatctatat

SEQ ID NO: 11758 - DNA, 385 bp, Glycine max
agcttggcaaactattgttgacacagaagggatatcttctctagatagaagcataatatcatctgcaaaagccaaatgagatagctgaatacctgcacagttgggatgaaatttaaaattggcatcatccttgaggctgctcatatctctggaaaagtactccaaacagagcataaacagataaggggagagaggatccccttgtctaagaccccgctaccctttgaagtgaccataaatggatctattgactgccacactaaaagaagtggaagaaacacattccatgatccaagttcagaactgggttaggaaagccatggacttaagcattcaatccaagaattcccggaaatggaatcattagctttatgcaagtcaattt

SEQ ID NO: 11759 - DNA, 760 bp, Glycine max
  unsure (1)..(760): unsure at all n locations
cgccnncncnaattgaaacccctgctagttacgcgacttgatagcgcttgtctattctggtgacactatcggatactcaagcatctgctatgactttgtgccgaaaaagtaaaaaaccatcatgcataccgaaccaagccgaaaaggaacagcttataacgtttatgatcaaagagctcgaagctcctgcttttgttttgtgcgacaaaagtcaaaatccgtgatacatcctcaaccgagcgaaagacgaactacttacttcgtttatgagcactaagctcgaacctttcaggtttcgtattgtgcgtcaaaagtgaaaaaacatcttacatgccgaaccactgctgattacgacacacaaaatgaggaataaaaatggatgtgctgactattgctgacagacagacccatgggatgaaggaaccatggagagccatgcaatgggagagaatgattagcacaatctgatcggaaaatgcaatgcttcacacgctgacccagcggaactcgagaggcaaaccctagttaacctgccctgaaacacatacatgcattgtactgaccggcgtcaattgcatatgataatctcgcgaaagacatttggcagaataggtgttggacgcaacgtagcctacatgctccgtgaatgcaagcctgtggatccgaacagaaccccgcctcaatttagcgctcccgaaaatgactacgatcacgagacgaatttttaaataaaatggtccaaagttttttatctnnttaa

SEQ ID NO: 11760 - DNA, 483 bp, Glycine max
agctttagaccaaagccattcaaaatctatgtttctaaaaccccttaatttagtggattttcaaggtttgacaagtgaaaatgagaatggggtaaatttggagcaaactctcacctcacacgagtctatatcatcaatctaaacttgctcaaactggttttacgaccaaaattctaccgaatcaaaatttgactccttaacacccaattttaccctagaaatggctcttgccttcattttggacatttgtttttctctcttgcacagcccatgcttcctcataagtcctaaatgacatttcaaactacgattaactccctttaacctccaaataccactaaatccagatttggccttccaactcttaaagtctccctcttttttcactcataacactacattctcactttctaacccttagttaactctacccttcatgcctagcagttttccattcccaatttcagccattaaactcacaag

SEQ ID NO: 11761 - DNA, 466 bp, Glycine max
tgcctcaaagaggtccaggaaggacaaggcaaccgaatgaactagttccgctccggagtatgacagtcaccgctttaggagcaccgtacaccagcagcgcttggaggccatcaagggatggtcgtttctccggaagcgacgcgtgcagctcaaggacgacgaatatactgatttccaggaggaaatagggcgccggcggtgggcatcactggttactcccatggccaagtttgatccacaaatagtccttgagttttatgccaatgcttggccaacagaggagggcgtgcgtgacatgagatcctaagtaaggggccagtggatcccgtttgatgctgacgctatcggccagctcctaagatatccgctggtgctggaagatggccaggaatgtgagtatggccagaggaggaaccggtctgatgggttctatgaggaggccgtcgaccagctgctatgtataccg

SEQ ID NO: 11762 - DNA, 348 bp, Glycine max
agcttgagtaagcctctcttttagagaatattaatagcttaagaagtctctatcctcaagcttgagtgagccaccgtagagtgagtcgatctcaagacaagagtgaattcactccttggagtgaggaaactagaaagttagagagcctctttgggagagaagattaatattttgggaagtctctatcctcaagcttgagtgagtcaccatagaatgagtcaattttgtaaacacatccttgtaaccctactatcactttgtatagtggaagaatctccatattggagaattataatcgggtgctcccattactacttttaattactaagtgcctatcttaacttcacg

SEQ ID NO: 11763 - DNA, 339 bp, Glycine max
ctgcccatccatgattgagagacttgtatccatcattgtgcccgctactttgaccaaaggagttatcgcagaatcatacactatacctgcacaatgaacacatgtgcataaccgaacattgagagtcaacacacagttctacgacgcaaacattacccaccatcacgtagcaagacaccatgatcattacacctacggtatgcaccatatatgctaacactcaacactatattgacatgtgagatctaggccgagaaaaataccgctaaggcacctatgagtgcatagttaaatacaccacacagtgggtgaacagcgtcactcttatgaaagaaacac

SEQ ID NO: 11764 - DNA, 480 bp, Glycine max
agcttctgagttaaaagttattgcagtttttatttgctacaagcttccgctttcaactacgagcgtctcgatatattactggactcaatcgatcatcagagcaaaaagttattgtcgttagaatttgttcagtgcttccgttttcaatttggagcgtctcgatatattacgggactcaatcggacatccgagtaaaaagttattggtgttagattttgctcatagcttctatttgaatttgctacgagcttgcgttttcaatttggagcgtctcaatatattacgggactcaatcggacatccgagtaaaaagttattgtcggttgaattcgctcagagcttctattctcaattttgagtgtctcgatatattacaggactcaatcggacatcggagtaaaaagttattgtcgttagattttttcagagctcccgtttcaatttggatcgattcgatatattacgggactcaatctgaca

SEQ ID NO: 11765 - DNA, 421 bp, Glycine max
tgctctatctaatattaagctgcacacctcaacacacaaacacttggtgtgcaaaacccctaaaataaggatttctagtttgcaaggaaatgaaatgggaaatttgagtgaaacctcacctcccacgctgctataacagacatttacactcgctcagctggatttacaccttgaaatacaccgaatcaacattctgactttttacacccagttttaccctacaaatggctctttgttcactccggccatgtgcttatctctcttgcgcagaccacactttttcatcactcctaaatgacatgactaactaggattaactgcctttaacctccagataccactccatgcagatttggcctttcaactgtaacagtgtcactctttttacagtcacaacaacatacttgtaccttttaaacct

SEQ ID NO: 11766 - DNA, 285 bp, Glycine max
atcctctgaggcaccctgccgcgtgctagctttgagccaaattactttctcacctttatttttgaccccggtgagaaatgccatacttaccctcgggagccaatagaattgtacgaatgtttaccatcaaagagaaagcatatatgaacatacggaacattccccatcccagagtgggtgattgtcaaaagaaatgaactataattcccaatctgagaatgggagataagtaaataggaagaagaagaacgaaagaaagctcctgatcagggatcaaaagaaaac

SEQ ID NO: 11767 - DNA, 512 bp, Glycine max
  unsure (1)..(512): unsure at all n locations
actccagcttttccttcttgttgatcttcttcttcttcttttgttctatctttgcttttatttctacaccttttaggaaaacttatgcgtgtgcattagtccattgctaattaagaaaggggacaataaaatacttgcattttacctggtcaattaaggaacatgttctctgaattatgactaatataaatattacttcacttgggacatttcactaaaccaccgtccataaaccaaatttgacaaatttaaagtatgtttagattaaagtttgcagacttaaatttgaatgaattttgttttgcaaagtgaatttgcaaaaacaaccatattgctttcaattgaaaattggtttcaaatcaagtataaccgtgcaaacgtatttttgaaagaaaaccaaacataaccttacaatggtgacccgaaaaaaagaagtaaaaaatntaagctttgtttattgaaaaataaaagttttttatattctaaaatttagttgtcccttcttatatttg

SEQ ID NO: 11768 - DNA, 570 bp, Glycine max
  unsure (1)..(570): unsure at all n locations
agcttgtttgaaggacaaattcttattatgcaaagcttgcaggaactagctcagcaaaggccaattatgagtgtagagcaattcattgagaaggtggcctagcctggaacccgaccttcttttgtagggaataatgaaagttttacagcccaggcacctcaacagcatgagctagaactagaaaatgatcactcatctgaagccatcatccctggagctgttgatttttcaaaaagaaaattagagacgagatccaatgaggctgctcatcctggaccagtgcccataccagctaactcttccactcctatcttagaaatacttgagggccagaccatactagtcctggttctgggcacttctcctccaactactccagtattgcaccaaacagataaggaggatgttcaggcataggacatctaggactagtaacaggaattttgatttctgatgatactttttggcttttaatttattattattattatnttggttgtcgtacagtatttcctttaggtctacatacactactagttntatttatggggtagttagttgcttattctg

SEQ ID NO: 11769 - DNA, 476 bp, Glycine max
tacttggattgtggtgaaagatgttatattaccagcctgatatgctgagaatagactcaaagcacacgctaaaaaatgcacacaagcacaacggtaggcacaaacacaagagagtaaaagcttctgggttctgttagcctatgaataccactaacttttgtgtaagaaatttgtgcaaattgtatctaactcctcccatttatggatattctttattgctgaaattactttttgctaaatatacgtaataagtacttagtacttccattttgtgtatttaataatcatttgctttcaatttcaagttaataaagcaagtttgtgaagtgctgatttttagcttctcgctaagccaatctgtcggaattttaaaatgatgttctttttgtagaatctgaaacttccttagccttttcatgtagtgacatgagtatttgactcaagaaaattgttgtcaccctatttctcaaatccat

SEQ ID NO: 11770 - DNA, 862 bp, Glycine max
  unsure (1)..(862): unsure at all n locations
gcgagaagaggaagagaggggggataaaaatgagaaggaaaaagggaggaagtggatagaaaggagagagggatctaanaggggagggaggaganaatgatacattggaaggaacnggggagntnggagagaagaaccgaagggngcaaggaggaggaaaaaggaaaaaagaggatttatgtaaaaaaacaccagaaaaaggagggaaaagggaagagaagggaaaaaaagaaaggggagaagaaggaaaagaaggagggagatacacgaaatgggaagaggaagatgaaaaaggagaaaaccgggttgaggaagaaaaaggaaacgaagggaaagatgaatcaagaagatggaaagagaaataaaaaaggagcgagagttgaaaaaggaaaaagggaaagaaggaaggaacagggaaaggggaaaaaaaagagataaggggaaatagaaaagagggggaactaaaaaaaaagtaaaaagaaagaggaaaaaagaaaggggaaaaaaaggaaaaagggaggagtaaaaagaaaggaggaaagaaaaaaaagaaaaggaagggagaggaaaaaaaggaaaaaaaagggaagaagatgagatgggggaaaggagaaaaaaaaaggaaaaggggaaggaaaaaagggaaaaaaggaagggggggagagaaaaaaggaaaagggaaagtaaaaaaggggaaaggaagagtagaaaaagaaagggaaaaaggaaaaaaagaagaagaaggagggaagaaaagaaaaaaggggaaaatgaaaagaaagggggaagaagaagttgaaggaaagaagtaaaagggggggaaaaagaaaagaagaacgtaaagaatggaaagaaagagaag

SEQ ID NO: 11771 - DNA, 435 bp, Glycine max
tgcctcaaagaggtccaggaaggacaaggcaaccgaatgaactagttgcgctccggagtatgacagtcaccgctttaggagcaccgtacaccagcagcgcttcgaggccatcaagggatggtcgtttctccggaagcgacgcgtccagctcaaggacgacgaatatactgatttccacgaggaaatagggcgccggcggtgggcatcactggttactcccatggccaagtttgatccacaaatagtccttgagttttatgccaatgcttggccaacagaggagggcgtgcgtgacatgatatcctaagtaaggggccggtggatcccgtttgatgctgacgctatctgacaactgctaagatatccgttggtgttggaagagggccaggactgcgagtatggccagaggaggaaccggactgatgggttcgatga

SEQ ID NO: 11772 - DNA, 503 bp, Glycine max
agcttctttagaagcacttttacgaaaagaaaatgagaagaaaaaataaaataaatttttttataagttgaaattaattctccattaattaatttgtagaaattttcacataatttctttgaaagatgaaaggatatttgtaaattagttaatggggagctaattttatcttatgaagaaattcatttcatttttatttatttatttctctcctaaaaatactttcttaagaaatttatccaaacaggtatttatcagattaaattttgaaagccctaaacctttttggtcttgaactcattattctagttcaaaggaggtcctttaaaatttccttaaatgtaatgagtcctatacaactatgacatggggccataaagtatctccccaaaatcttagttattaatagattcaaaatcaattatgcgtgtacggtttttgccaaccaaattgatgtagtctatcacttgggaccgatggtttattttttaattttgttttca

SEQ ID NO: 11773 - DNA, 517 bp, Glycine max
ttagtttctgctgcccatcttcctttgagagatatgtatccataatataacctgctattttgatcttctgacttcaggtagaattagcagtggaagtgatgaatgaactctcgtgtaaatttgcattttgagagtgataaaaattgttcatatgatgggaaagtcaaacaattcaatcaacaaagactcccttctaattttcactggggctttatggatataattttgaattccacatgaaaagacatatgaaaagtaaaccaatagcagcctgttagaagatttctgacttggaagtatgaaatagcaacaagtattgtgaagggttgtgttaaatgtggaagtacacaacaagatatcagaggtaatgcattctttttatatacttttttttgtgggatccgttcatttgtatacgggtcatttggaatcactatagacctttaatgagagtgcgctttgttattgtaatgtaatatagggagttttattagaattcatagaatccattctactg

SEQ ID NO: 11774 - DNA, 882 bp, Glycine max
  unsure (1)..(882): unsure at all n locations
accccgtaactcgtgggatacaatttattcgaatcaccatcgtgttgaaatacacatgatatattcacactatgaaggaaacagnaagtttgagccttggtaanacctgtgtagaccccagagaagacccgaaggcatgcgagcggctgagacaaaaggtatcgaaatttttattagctttaatcttccgccatgggggaaaagcgtctcgatctcttcgcaggactcaaacgatcatggaagggtaccgttattggcgaaagaattagtacagagcggacgattccaattcggagcgggggggaagtctaacgggactaaatcggacttcccagtaaaaaaatgggagaaggtagaaatggctcataactaatataagaatgtgcttcgaccgtggcgaaaaaaaacaggagcaaatcgctatatgggggtttgtacccggcaattcgagaaaaaaccgaatggcccccgaaggacaaaaagacggaagggtcacaccacggctgtatgggttttttccctggacttaccacgcacaaaacccgtgcgccggcgtagttttttagaccccctccttgaacctccagttatcaataaaggaaagatccctaaaaaaacaggacccaacaccgccctccgacttacaaaatcaccgcaaaaaacctttgccaaggggaatgcgtttaatcccaagcgccccggatatttctattctgaagggaacaatctggaaaaacgatcttggccttatatatgttcgaaactgggaaaaacaacacccacccggcaaaaaaaaacaacctcaggtgatatctcccatttggaaggacccggggctnctctttacgggagtttcaaactaaatcgccgccccaaaaatcc

SEQ ID NO: 11775 - DNA, 124 bp, Glycine max
tttacttcaggtggaccatcttatcaatcaacacatgtatagttgcattacataaaatcacagtttatgaaaacttatgcgtgagcagtgattccattgcttatcttgaagagggacgatcacc

SEQ ID NO: 11776 - DNA, 375 bp, Glycine max
tgaggcatgcgagcgcggatttgcaagcaggaaagagatattaaacgctcttttttacacccccatttgcaatgccagacgttagttagtgatcctctccatgtatactctgcatgaccagagtaacagaccatatttcgacatgcataactttgcgctagccaggaacctgcgtaacagaaaaatttgactgtgaacataagctgaggaatgcgtcattgttaataacttgaaaagaaacacagctcagaatcataataaatacccgattcagagaacacacctaattgatgagaacctacatgcataccctctacgtaacatgctaaagcatatgagaggaaagacacttagtacccctaaaaaagatatgtt

SEQ ID NO: 11777 - DNA, 528 bp, Glycine max
  unsure (1)..(528): unsure at all n locations
tcaagcttttccttcttgtttgtcttcttcttcttctttttttctatctttgcttttatttctacaccttttaggaaaacttatgcgtgtgcattagtccattgctaattaagaaaggggacaataaaatacttgcattttacctggtcaattaaggaacatgttctctgaattatgactaatataaatattacttcacttgggacatttcactaaaccaccgtccataaaccaaatttgacaaatttaaagtatgtttagattaaagtttgcagacttaaatttgaatgaattttgttttgcaaagtgaatttgcaaaaacaaccatattgctttcaattgaaaattggtttcacatcaagtataaccgtgcaaacgtatttttgaaagaaaaccaaacataaccttaccatgttgacccgaaaaaaagaagtaaaaaatttaagctttgtttattgaaaaaaaaaagntttttatattctaaaatttagttgtcccttctatatatttggtagtgtttgtctcatg

SEQ ID NO: 11778 - DNA, 447 bp, Glycine max
  unsure (1)..(447): unsure at all n locations
agcttgtgcaaatcaaatcactcctacattttatctctagcatgcattttctttctttacccactcctcacgtttggttttttagggaaaaacaccataactaaacgcgccgcaagggatccctatcgcaccagatccaaatctataatgatgggtgatcaagaggagacgcaggaacagatgaaagccgacatgtcggctctgaaagaacaaatggcctccatgatggaggccatgttaagtatgaagcagctcatagagaagaacgcggccaccgccgccactgccagttcggctgccgaagcagacccgactctcttggcaactacgcaccatcctccctcaaacataataggacggngaagggacacactggggcacgatggcagtcctcacctgggatacaaccgagcggcttacccttatggattgccgcccaactattca

SEQ ID NO: 11779 - DNA, 472 bp, Glycine max
  unsure (1)..(472): unsure at all n locations
taaagtatgcccgagtcattcatccctgtgagatgttgttgaagtattggcgatcagaattgccattccttggattatagggttgaaccaagctcatgcttttacaaaaaaggttcatcaagtcaagttgaaatatggaagtaaccgtcttgcaaaattggggcaaaagatgaatcgagtcacatcactgcttcgtctactgccaaacatatttaggattattgatgtccttgttacttccagtttcaccttgacaaagatgtcatggaccatgttgaaaatctaaattgattcaaccccatatcctgcgtaaaaattcgcaatacttcgactgtacatcattcgcatgcatccatgctnttcattggttgcattgctcattgcattctttccttgaaaaataaaataaaataaaatgaacttatcaaaaagaaaaggacacgctttacggcgccctttacgaactcgtgct

SEQ ID NO: 11780 - DNA, 758 bp, Glycine max
  unsure (1)..(758): unsure at all n locations
tttganaccttctgagattgtggaccttctgggacccgcgatcctctagagaccacctgtcagcatgcaagcgtggctcagagagtccccgtaggacaaggctggcgacagaactacttccgcccctgaggacgacagacacccgtttaagaacgttgtacattttgctcgcttcaaaaccagtaagggagggtcgtgtctcccggagggacgagtccatctcagcgacgactagtttactgatttccgagagaaatcggcgccggcggagggcaccactggttactcccatggcccagtccgatccagaggtagtactggagtcatacgcctatgcttggccaacataggaacgcgtgcatgacatgaggtcctgggtttcgggtcaaaggatgccgtctgatgccgacactattatacagatctgagatactcaatggcgtctgaacaaggccaggagtgccagtatggtctaacgaggagccggtcatgatggttcgacgatgaaggcctcccccgaccgctatgtttaccaggccagaagatgcccgcactgctccaggatgcgagtgagaaatatgctcccaccttgacccccatgcccacatttgatggggtcggttctaattacttcctgcccccgactttatttcccttttcccttgctcaatgcactttgtgttccccttccgtcccgaggagccccactggttaagagatgttcagccttttttttttacaatttgcagcccattcgc

SEQ ID NO: 11781 - DNA, 367 bp, Glycine max
aacctttttggaggctttaaactatcagatattttttttcatttaattatttgacaagcgagaaaatttgctgcattcagcacttgaactttcctatgcctgatccgcgttctattattcaaaagaatgtaaaatgtcaggggatgcacaaaatcctcaggcaacactatcactgcatcactggctgagcccgacaatcattttgagataggggttaatctggctatggcaaaacttctcacaaaactacccctttggcgatataatattttatttctgattgagacgggcctaatttaaaatgtatggcctactttccttccaagatctgtgcacaatatccttatatggatccattctatggact

SEQ ID NO: 11782 - DNA, 501 bp, Glycine max
agctttgatgcaacatttggagaggttaatgaaacaactagatgatgcgctccatgagaggttggatcaaatggtgaatagagatcataatgaataagaaaggacgagaaaagggaatgatggtgttcctatacaaaaccgaattgatggtattaaactcaacattcctccatttaaaggaaagaatgatccggaggcctacttggagtgggagatgaaaatagagcatgttttctcatgctacaactatgaggaggaccagaaggtgaagcttgccgccacggagttttccgactatgctcttgtgtggtggaacaagctacataaggagagagcaagaaatgaatagccaatggttgatacatggacagagatgaagaagatcatgacgaatcggtatgtgccggctagttactcaaaggacttgaaattcaagctccaaaaactaacccacagcaacaatggggttgaggagtatttcaaggaaatgattgtctcatg

SEQ ID NO: 11783 - DNA, 802 bp, Glycine max
  unsure (1)..(802): unsure at all n locations
cgccccccaaatgancccctgctgatngcgtgttgtttccgccagctctttcagtgacactatcgaggactcacgctccatgatgcatcaagaatgaacaaagtagtcctgatgaccacaaaggggatgacagatagcttatatatctagaacaattcatgatcacccccatgatgatttcccgaatcatagactgagttccagacgttcaccattgcatctatagctcttcactgtttaagaggacatttcgattctagaatccagagtcgagagtccacgttcaagcttcctagattcaagatcgtgattcatgactcacgattcgcgaatcaagagacgaattgctcccgataagtatcaacaagcttatgcataaactgagtagcacatgggctgtcatcaagaccctggtgaccactgagttgttactcttttagcattccgattacctcattattgtcatcgattcccactcccangaccgttttgcacaaagctttctactgagttgcgtaccgttccaattgatagacaaacattgcttccttttccaatgctttggtattccactccctgtggagttggaccttgaacttcatatcgactgagataactccttccttgccgtagaccttttggattcatagcctagtccgtagcctttgcctgaaaatctggacaaccaaaagcctggcctacaggttatgcgttggcggtggattaacctcccttacaccctgtttctggcctttcccacttgggtccgtgacccgtttttttcttgttgcgctagttttcc

SEQ ID NO: 11784 - DNA, 787 bp, Glycine max
ccccgtgttgtattgtttgatattaattaacttgcttcggacgggtcttctcatctcaattacaagcgtagagcagattgaacctgaaactagactcccgagacccgaagctccggcgcttgaagctgaagcagaaagattatgtgctttagttctccgggaagggaaaagacaccgagtggcgatacgctccagaaacgcgcgctgacctaaggaacgactaagaaaggagggttccctgcgagggcttgagggggaaaaaaccggataaaaatctcggcgcaggggaaaactgaaccaaaaaaagggatcagaacaaattacttggcacagcccaataggggggaaagggagggttgccctaaggttggtcaaaaagaaggagggatgacaaaagaactcctatggggtagaagaagccaatgctgagccatactttgggggcggggccgcgcttggaagtgcgataaaacaggggcgggagttcacggggatccaaaaagggacccttttggggggcgaacttaatgagggcctcccccaaaacaagggaaataggggaagagaatgcccagaacaacgcctgatgggatggaaaattaatatgttaaccttgtgaggcaaaaccgagatgggggaagcagtcccaattaagtaacggttccaaaaagtatgtcatttccctatgccaaaagcagattggagatcgaatcctacccaaggaatccaccttaggatacaagataaaaggcgcgaatgtgtttttacagataggacggccctaaac

SEQ ID NO: 11785 - DNA, 240 bp, Glycine max
ctcaagcttgtgccacccacatagcataggtttttcatggttgatcaagctaggctgttgttgcaaatttgagaatctctccaataacaaaatatgaaccaagtagtaaaagggtttccccttacttatccctcattttttttttaactgattgttgaatggtcggggcgacattcattattttccatgcctttttgagttattttttccttgaccatattttctcttatgggtttgggc

SEQ ID NO: 11786 - DNA, 378 bp, Glycine max
agcttgaaaaaaatccaattctttctccttgttgaaattcggtattatcccacctaatatggtgttttccctcatcaccatgctcgattgtttcatggaattcaatttaaaagtctcttaaatagattatttgatgtaaaggttttcatctaattggtttttatcataaacaagtcatcaggtcaatggttagacccctaatcataatcattcaattgggaagaaattatcttgatcagtgggtaaagtttgaaaatgttggttattgacaatagacaaaatgctggactagttttgctattttttgaacttttgatgtgtaattaacacttgagttactttactttacatgttaacatatttcacatttttaatctt

SEQ ID NO: 11787 - DNA, 184 bp, Glycine max
tctcaagcttgagccccccgcatagcatttggagttcgtggctgattactctacgctgtcggggcatattggacaatctttccaagaccataagatgaaccaagaagtaaaaggtggaacctcaaccccttgctagatatctatgagacagatttctgggtggctatccaagaatagaattttt

SEQ ID NO: 11788 - DNA, 377 bp, Glycine max
agctctgatgcaacatttggagagggtttttaaacaactttatgatgcgctccatgagaggatggatcaaatggagaatagagatcataatgaataacaaaggacgaaaaaagggaaatgatggtgttcctatacaaaaccgaattgatggtattaaactcaacattcctccatttaaaggaaagagtgatccggaggcctacttggagtgggatatgaaaatagagcatgttttctcatgcttcatctatgaggaggaccagacggtgaatcttgccggcacggagttttccgactatgctcttgtgcggtggaacaagcttcttatggagagatcaataagtgaagagccaatggttgatacatggacagagatg

SEQ ID NO: 11789 - DNA, 519 bp, Glycine max
  unsure (1)..(519): unsure at all n locations
tgtaatagaagaaggaagtccctggaaaattcacatggtcataattttttgctcggatgtccaattgaggcccataatatatcgagatgcaggaaattaagaattgcagccccaagaatttagacggccataacttttgactcagatgtccaattgaagcacataatatatcgagacactcgaaagtcaacaagaaagccccgggcaattccaaacaaccacaacattttatttagaagtccgattggacccataatatatcaagacactaagaaatgaacaaaagcctcctggaaaattcaaacgggcataacttttaactcaaatttccgattgaggcccataatatattgagacactcaaaatttaacaaggaagcatttggaaaattcaaaacggccataaatttttactcagatgtccgattgaagcccataatatatcgagatgctcaaatttgaaaatgaaagtgatgcaatcctacctccntagggcattggatacaagactctatgaaga

SEQ ID NO: 11790 - DNA, 374 bp, Glycine max
atcctctgaggcacgctggcgcatgcgagcttgacttcgacggaagctcgagcctttcttgtgtgaaaagacgcgtgttaagacctgcctcttagcctaacgaaaaagccggggcccttgaaaacggtgccaactacgttaaaacgaatgctttcactggaggaaatgtccactccaacactgccccaccccatgttggagaacatttcaccccttgctttgcttgtgcctcacctcccacccatgatgcacgttggccctcgctctgtcacatccagtgtttgaataacgaacgtatcatgacgaccgtcagctttcacgcgatgaccgctcaccacctcctcagagctttttgcatctggataacatgcaca

SEQ ID NO: 11791 - DNA, 525 bp, Glycine max
tcaagaatcaagatcaagattcaagactcaagattcaataatcaagataagtatgaaaaggttttttcaaaaactgagtagcacatggatttttctcaaaacatgtttaccaaagagtttttactctttggtaatcgattaccagatggttgtaatcgattaccaatagcaaaatggatttgaaaaagttttcaaatgaatttacaacgttccaattgatttcaaaaagctgtaatcgattacaatattttggtgatcgattaccagtgcctttgaacgttgaaattcaaattcaaaagtgaagagtcacatcctttcacataaaagctttgtgtaatcgattacactgatttggcaatcgattaccagtgattgtttctgaataaatcaaacgatgtaacttttcaaatggtttttgactttttcgaataggatctaagttttataaaagttataactcttctacatggtgctcttgaccagacatgaagagtctatacaagcaacgctttgtttgcatttcta

SEQ ID NO: 11792 - DNA, 479 bp, Glycine max
  unsure (1)..(479): unsure at all n locations
ttcataccggttcttttgctaatggacacaaattcaaacattacatttacttccacatatttgaaacaaacaaaatttcgtgaaaaactataagtaactaatactaattttgcattgaatcatgttgcgaccgaaacaagtcgctttacattgccattacctatttactaaaaacagctcaaatttctattgggccaaatttgatcgaggccggacccgaatcatataaacatgaaaatgcagtcactaggaagagatcctacgtcgtttgccaacgagcagtgacaaaccaaatgtggataatatacttgcattaacaacaatgattggggggggggggctgaananatggaaaaagatttggttcggcctaatctcattacctatagcacagtcattgatgggctgtgcaaagatagacttatagccgatgccctccgtttgtttctctggtcaacttaagggggattttggttgat

SEQ ID NO: 11793 - DNA, 440 bp, Glycine max
tcctcggggccatttcctttggctttggacttggtcgcctattggtcggccatgtggtgtaggcaatactcaaacctttttgtggatgagcagaggtgaactctagaggtggtggtggtgtgtctattgcccgctaccgaccatcccaatgctgctgtggtgtttcgccctgcgcctgcctagggacgcagtacttcttgatgaaagctcgatcagtagggggcctaatgcccttgctggaggttacaggtactctgtagaactgacagagacccgtaattagagcttgacaactcccaaaccctgttggacttcttcgggtccactgggtgtcttgcacgtgcgatccctgcacacaattgatgaaatcagaaatcagttgagcgaagtgcatacttacctatgatgacataaccttgccgggggggtacgggcaccct

SEQ ID NO: 11794 - DNA, 739 bp, Glycine max
  unsure (1)..(739): unsure at all n locations
ntgaacttgagacttctaacccggatcttgaggcacgccgatcagctgtgccgtcaagttgtggtttagccattgtgcgggcaaagaggctcgagctgcagttatccctttgaaacctgcgcgcttgacctcaatgactgcacttatgaatgggaagcttaccctggtgacgttcttgtgggggattagagcggtattcatactatttgtctcatgttttattctggaccaagacaatgcatttttgaacatatttacttagaacttgccaatgtgacagagttttggaggcgtgctcatgaattttgatttaccacatggggaggacttgaaatccttggaccacgctttatggtgctattaatgggagcgtttctaactgtcgactattgctgcgcttgaacttacccccaacgacggtgcacccgatgggaggggatcattaccgcgacctgtgggggaagacatccctaacacccttgcagaaaattacgactttttatggaagcgaagcttttaccggttaagcctggttttaaggtaaacgagtccccttttgaggggctccgttgggaaaggaaccccctctctccaaaatattagcccgtaaaaaatggttgcgtctttcacgctccatctaaggatgtctaccccgctctcaattgttttttttccactgcacgggtcttcccttacggttatcgtcttattatctatatctacattgtctttctaaccg

SEQ ID NO: 11795 - DNA, 350 bp, Glycine max
aaacacctacgcatgtggtagattttgagtcaacttccgcgctcacagcgtatgcacgatagtgataccgatttaaaactcaactttgatctacagtttttcttaattgatttcggaaatgcaagtgcgaaattcgattagatccaatactctgcggtatcatattcacgagaacaataattactacaaggttatgaacacgctgcgaggagttaaacgaaaattgcatcgcaaaatagcaacgaagcgtagcaaacgaaaaaaaaaaccgtgagaaggtataatgatttagacagaaacaaagaagaaagcgaaaggatctgcggtaacgaacctgctgctggcgagcg

SEQ ID NO: 11796 - DNA, 576 bp, Glycine max
agcttgacgatttaacctttctgctatggtgccaacaggttgaacctgttatcaaatctcatcgtgtccagtgttttgtggtatatccataaattccaccatgatttctcactgaagcagattgcgcagctggaatcgaaaatcctacatatgaagcttgggaaaagcaggatcaagttctcctcacatggcttctattgacgctttcaatgttgattttatctcgtgttctgggatgcattcattccaatgaagtatgggaaaggattcacgattattttcacaagctaacccgagccacaaatcgtcaattgcgcataaaattaagagttatgatgctcggaggaaaattgatgtgagaatttttgctttaaatcaaacaaatctttaactctcttgcttcggttggaagtcctaacgtgcttcaagagcatgttgattcgatccttgaaggacttccacctaattatcactcaattatttctgtcaatgaaatcaagtggaacccctaccaattgtagaggtagaagcactttttttagctcaagaaacacatatgaacatgtttcacaaaca

SEQ ID NO: 11797 - DNA, 322 bp, Glycine max
tcgtgctttgttactacacgctgtcatgccatactgcccataggtgacgcgacactaggtcctttacggaattttccgctggatcatgcaccacttgcttgatgtctgtcgaacaaatgattgaagcgggttctgcgtctaacctgattttctaacaatatatctgttatatatagctcatcttcaactagccgcatggtctgagattcaggggccccccaacagcggggctactcataccattctggagattctgagagccattttgcatgctactcgtacaagaaagccgtcaaaggcaccataagatttttatatattt

SEQ ID NO: 11798 - DNA, 338 bp, Glycine max
tgaggcacctggcgctgcgagcttgtaagagaaaggatttccagcgtttttccccatcttagtatggggaaaagctattgaattaggtcaattatttagatccgaagcatgcttttactgcctatgactcgtccatccagatgaagaaactgtcgggtataggaatttcttcacataaccatccttaaagtgtcggttctttgtcgattttgacaaacttctttaagcctatctgatattgcacctgcggccggtccattggaaagcacttggggggatttacgatattaaattgaagatctgattttgatgaaataaaattgtcaagtggctatgtc

SEQ ID NO: 11799 - DNA, 244 bp, Glycine max
gcagtttcatacactgtacctgccgcgtcttgtgtttaaccacagggctctgcgaagaacattactcttgggtagctcgacacgagagaggcttgaggaccatcctttgaattgacatactcgtgctctgaggctcatgcattctgatagactctatttgcactagatgtgagagatgtctgacctagagatattggtgaatttacactggctgaggacagcactgtcctattttgagaactac

SEQ ID NO: 11800 - DNA, 102 bp, Glycine max
gaacacggtgcccacgagggctaatttctttcctacccgtgtgggcgtgtaacctcataatgactacccacacccctttgccatggctacccgcctaaccaa

SEQ ID NO: 11801 - DNA, 187 bp, Glycine max
aattttcttacggctttttttatagtgacttgatgagaaattcaatatgttctgattaagaaaacaattcctttattggttgaaatcaacaccgacaatgacgagagcctaagttgagaactgcgatcgacgtggaggatgtctggcaagacgtggcgatcatgttgatgctgccatagcatgctta

SEQ ID NO: 11802 - DNA, 525 bp, Glycine max
agcttctaaactttgtacaagaatgaagctctgataccacttgttagacaagtggcctcagatatcttaagaaggggggggttgaattaacatattcgaaactttttcccctaattaaaaatctatcttactttttacttaaattatgaattcccttaatgacaatcttcttaaatattaattcaaatgaagcaacttgaatatgaatataaagcaataataaataaaggagattaagggaagagaaaatgcaaactcagttttatactggttcggccacacccttgtgcctacgtccagtccccaagcaacccgcttgagagttccactaacttgtaaattccttttacaagttctaaacacacaaggacaaccctttctttgtgtttagagattctttacaacaagagactcacagtctcttaatcccttagagaatgagatgaagaagaggaacacatctctcttgagagagatggatgttacagattgagcactcaattaattccttaatgaattgcaatt

SEQ ID NO: 11803 - DNA, 432 bp, Glycine max
  unsure (1)..(432): unsure at all n locations
tctgaggttatggaataatcaattatcatatgtggtaatcgattattttaacacacaaagaactcctaataaagtctccaaacaaaatctaattgattactaaatgtagtaatggattatctcgagccataaagtcttcattctactgaaacatacatatgtaatcaattattgaaactggtaattgattaattcggttattcttgccaaatttcaagtagaagggagttatgttgcttattctaacactttgtaattgattattaaactttgtaatcgattacattatattgaactcactgcttgtaagaaactttgagatcaattcattaatctcccatgtttgatttctactaagcatggatatgagaaaactaagactaaatcatccatcatgcctagnctagaaacatcccatacaaacaccacatc

SEQ ID NO: 11804 - DNA, 1373 bp, Glycine max
  unsure (1)..(1373): unsure at all n locations
cccgcgctgtcgtcgcattctaacgcgatatacagtataagtgactcggtanctaatcatantactacacaaccgctntctacaanaggtagtatcgtgcatgtgagcgtcgaacgcgtgtangctatgtcatcatctantacaagagtttaatacagtaggcagataagctaatgaagacagtgttgcnacattgtggagaccgtctgtgtaatatcacatcgctgacatactgactatgagaatgagattagtagggcaacgcgtagtgatatccgaaacgtgaaagcataaccttatctaaataatagtcatttctgatatcaaatcacgcacatcgattttagacaatagatatatgattggtatacatgagtgacgtacatatggagatgtagaacactcacgataaatatcgcaatcacgttggaaattgcggcatgagaagacagatacgtgatagcatcgtagcatcgggtattgtcagtataatataactactacaattcatgacaacgctatctggagagcaataagacaatggatattcacatgctaattatagttcagacaagagtgggatattaaattgggaacgagctgccaagtgggtaagaaagcaatattgtagggttaatacgggaacggaaacggccacgattacgatgaatgagacggcgaaaaagactgcctctagcgcactggcacgacaggcaagacatagatgtgctcagaatgcatgttaaatgtagtgggagttgtcaaggtataaataggcatagatcggatacgaacggaaaagatcgatacgagaggaaacaactcttagtcgtaccgagaagtagtaagaaatacacaagtcgatatcgtagtgtcagagggatcaacatgtgggaaagagaacatacatctgacatctttctagggagacgcgggcggatgatggagaacgcgatggagggacagctagcaacgtgaatcatatcgtacaacaatattgaatgatgctgctgtgtcacgataagacgtatatacggagttgaacacgccgaacaattacgcggcgagatgtggcgtattggcactctctatacgtatgtcgctgaagagaagatgtaccgcgattcagaaaggagtttagcgaataagagaagaaaacatggaggagggcagcgatcaagagcataggatatgagacacgaagaaacgtaaanagtgacctaggtntacacggcactcgcaatacttaagatgctggtacacagtacatacgggtgtatccgagagggtaaataaggtaagaatgtatcattcgacataggtgatacgacgatgaggtgatactgcgagtgcagggattacgcagatcggga

SEQ ID NO: 11805 - DNA, 431 bp, Glycine max
  unsure (1)..(431): unsure at all n locations
attttctacttctcanggctcttttaacaaaatctttctttctacacttaaaaagatacctcccttcacaaccacattacacaaaagaacttctttctctactacccatatggggggcaaaccccataatgactacccaaaaccatttttatgggcaacccgcacaagcaaactttcttgcttcatgaagaagaatcaagaatgagtccatggttttttatgaaaaccaagatgatgacccaaagccctagataatgatttcaagaatgagtcaagaaccatttcataatccatagaaagaatttagaaaaaggttcattatgaaaaatcaggattcaagaatcagaattattcggatccagattcagaactttaagattaagaatccagagaagactttatccgaaaagttttaaaagtttttaaaacat

SEQ ID NO: 11806 - DNA, 912 bp, Glycine max
  unsure (1)..(912): unsure at all n locations
tcgcgcgcgcttcgccgtgactttntttaggtgtatntatgtgtattgacancgctctcgtccntatctgtctgcgctcgacactcgctctacctaccaccacagacctagtcgtntnnnnnntttgattaccctgctatatacgccgctctataacattctcaatccctgggaaccttgaacaccataacctacccacngggccaggattgggacaattggccctttgttttttctggaaaaaattaccgaaaggatttttcgggggacctgattacaaaagacaaacgtctcattgggaaaacatctccagattggggtgagactagccacgcgcgctgacggagagctgaattggatactgaaagccttctcgaggatgcacgtgaccacgtggcgatcatgtcgattatcccatagccgcgcttcgattgcaaagcgaaaaggagcgttgcgaggccgcacgaaaaagttgattagttatatagaatcccacaccaggggggatgcccttctctgggtgatccggccagggcactggagggagcgtgccactagcaaacaatgcaacgaccatttgttgagggtgttagaatgtgtaggccagacctgtttaaaacaaggtggggtccactctcatgggcctgacgacctccatgaccagaaaccatacaactgaaaatttttattaaaatatccattctcatgaacagaggggttccctccccaccgagggggggagggtctacacctcttcctcacacacattggggggctcccttttacacccccaaacacacggctccctcatcttatatgcacttatgcccaagatatctagggtgggccgtaaatttccgggtccctgtgtgggtcaaataaaaggccaagtgtacacatattcttactttc

SEQ ID NO: 11807 - DNA, 438 bp, Glycine max
gcttctttgatacaactgccacgagatgttttgttttagctacacacacccctctagggctaatctcacctccttgagaagattcctaaagaagctagagcttagatacacacaccccctataatagctaagctcacccccatgccaaaatacatgaaaatattaaaaaagttccgaatacgaagactactcaaaataccctgatatacaaggctaaaaccatatactactagaatggccagaatacacggcctaaatgaaggaaaaatctattctgatatttacaaagaatagaggacccaaccttggtccatgggctcataaatctaccatgggattcattagaaccccatggccttatttagcaactttagcccaatgctcttggagtcttctaccaatacccttggagggtatgattgcatcagacactgaagt

SEQ ID NO: 11808 - DNA, 248 bp, Glycine max
atactgatgaaataagcgcatgtacaagtgaaaaatacgctaaggaccgaattgcagaatgtagcaattgggctaagctgaacaggtgggctcagcgttgatttagcgcgattatcgcaaaggagaatatggcagagcatcaggaccaaagttgcgcgctaagcatgagatcattgcgataagtgcagcaggtgccttcatccaagctaatctcgagactggcgctaagcccaatctcacttacccgc

SEQ ID NO: 11809 - DNA, 441 bp, Glycine max
agcttatgttagcacgtcagtcgtgatgaactttgataagtacttgtgtgatttgatttcttttgcggtatccaatataataaaaatatgtgattatattacaaaatcaattcgaatacaaaaattggtgtgaatatttttatttgaacccgtgggttgcatgggttgttggactactatttgtaacgactgggatcatatatagtttatagtcaagtatgcacacagagaagatctatataaggaagccgctgtaaacgttacaagcggagagccgtatcaattcgcttttcatttgtaatgtgtaaagcacgcattgcaatattactgatttctttgcagctagaggttaatttatattatgttatcctatgcattaataatatgatacgatgaagaaatattctcttattaatatgatttcacttggagtctaaaata

SEQ ID NO: 11810 - DNA, 447 bp, Glycine max
  unsure (1)..(447): unsure at all n locations
caagctttngatgaaatagtttctaatcttaaagagcgtgtgaactttgtcacgactggtanataaactataagctggaaagtttctgatgactgtaaaaatttcgaggacagtatctctaacatctcacacgagctaggggttgcaaaggaccatgtgagggagatgaatagggaaaaagagcagttaaagagagacaaaaaccacttgttggagcagctgcagattaaaaaagaacaggaagtggctttgaggaagagtgttgagaagctagaggcaaaagcaagcaaggaggaatcagagaagatgaatctgacaacaactgtagttcaactaaataggacagttggagagcttgagaaaaagatgaaagagaaagaggatggcatgctggacttgtgagatgagaagagggaggtcattacgcagttgtgtttgtggattgat

SEQ ID NO: 11811 - DNA, 434 bp, Glycine max
  unsure (1)..(434): unsure at all n locations
cagctccaaaacagaaataagctccacggcacgagttttgtattnggcgatattacatcacgaaatctgggtctggcgccacttgttccagctctagactacaaaaatggaagcaagtcattgtcttcaaagataatgaattaaagcttatcagtgatcgaatcattaggaaactaatctaaaattcccttgtccttttttaccataatgctaaaatgtcccaaagttgttaagctgaaaacaacaacaaaaaccttattccactaagtgtcgtctactatatggattacacgatgccattgggcacagctaaaaaccatatgatgagagatattattatttattcaccatgagatcccttttaaaaacttgctccaatggtcttcttggtaagcctctccccccttcataggactaaaaaccatacaatatac

SEQ ID NO: 11812 - DNA, 438 bp, Glycine max
  unsure (1)..(438): unsure at all n locations
agctntattggtacaatttctttaaatctggtattataaacaatttttataattgggtgaaatctttttccgtcaacgaatttaggagtaaccttggccacaagctttatttgtacaatttctttaaatcgtttttcataaacaatttttagaattgggtaaaatctttttttcaattccaaatatttgattttatactcttatttttattccatagctttattgtcactataattctgaaatatgttattttttatcattaaatatgttatattgaatctaattaagtgatctaactctggttttagtatttaaccagcaaaattgcatgttaatactataccgtaaatatgttagatcatctgacattcacatatcaatcaacatgatatctatgcaagtatgtaactggtcacacgtgacaagtgttgcatgcat

SEQ ID NO: 11813 - DNA, 450 bp, Glycine max
  unsure (1)..(450): unsure at all n locations
tcaagcttgtatctgaatcttttactattatgcttcactgctcctgtgctcctttnacattctttattaaagttattctttaggctctgcaaacgaggagacttaaaaagggaaaaaggagatattcaaaattttgctcgatctattttattatgattttgcctcgtcaaagtatttggattgtctttgtgccagggtaaatgcatatgtatatgcatatatgctaacattccagtaacaccctgtttgacaatgatgtgccgctttgatttgatgaagaatcctatgtatggaaagaacaattagtcaatcacgatccatgaaatgatattatcgtcaaacaggataaaaaagcatattacacttaatacaattaagtcagatggtaataaagttcttactgatttttggatgtgttatttaagatgggttgtggtatctaaaaaaaat

SEQ ID NO: 11814 - DNA, 306 bp, Glycine max
ttacttttgcataattatacttttattaaaggtaataacgatattgtttatgtggaataaaaatgacaacgtaaaatataaatctcaattatatacataaataccttaaaatagataaaaagaatggaggagtataatctttggagagagggctgtatacatgtattattatcaatatataacattttggggtatgtaggctgtgggagtgaaatgcaacagaaaaaatatcaagttagggaaatatacacggaagatacatcacagtagattaatatgcaaatgaccacagtgtgcagccactta

SEQ ID NO: 11815 - DNA, 436 bp, Glycine max
  unsure (1)..(436): unsure at all n locations
tttgctcttctttgagtagtgcctttatggtaatctctgcagcaactatctactactactactattttattaagttaaagtactatgtgatactgaacctgtgtcaattttaacattccctgcatttttcctaattcccatgtaaaaatatctcttttcaattaatattaactagcataaagttcgccaaagtgcaagtgataatatgtatgtagaacattgtcgaattgatgttgatgaacactaaaaattaaaacgcgaactgatggtttctaattcttttattaatgcttgcttaaaataaaatcttttctatactaaaagggaattaatttgtttctcttctcataacacttgaaattnttgttgtctgtacacatgaacagttacgtcgactatgcagaacttctggggtgcaagtgtctattgaaccaac

SEQ ID NO: 11816 - DNA, 352 bp, Glycine max
ccgaacaccttgtttttctcatgtgcacgcaaacccaatcttcgggttcgaagacaaccttctttctccctttgatggcctgtctagcatagctgttatttctcctcatcaaaagacttttgactctctcatgaagcgacttcacatagtccggcttggcattaccttctttgtgcttaaaaacagacacattatgcatatgcaaatgatcaagacgagttagtgggttaaaaccataaacaacttcaaaaggagaacaattagtggtgctatgagcaactctatcggtagcacactcaacatgggggaaacaagctttccatgtttttaagttctttctcaaaactgtcct

SEQ ID NO: 11817 - DNA, 424 bp, Glycine max
  unsure (1)..(424): unsure at all n locations
tgcacaanatagggtcacaaatacactttaaaacttcattttttttcccatagacagatatactaactgtaacaattttcaagacacactctcaatgggggtctctcatcaaattcattccaacctccaacaagttcaaaccctgcaagaaatgacaaagtggagaaagaggttaaggtgtgtgtaccaatggagagatctctaatggcagaagaggtggcaacagtgcgctcaatttgggtcatctgaccaatcttctccctcagagtcatgcgagaaagaaagtccttcacacgagcttcaatttgctcttcgggattcttgtaaacgcaagccatggctccttggttgaaggtggttggggagtgactagtgagtgtgttattatgtttctgtaagcaacaaacaaatgatgaacacaaca

SEQ ID NO: 11818 - DNA, 342 bp, Glycine max
agcttgcttgagtttcttctatggaagatggatctttgagcatcaataaggcccttcaatgatgattttcagccatggagttgcaacggaagataaaagagaagaggtgagaggaggtgccatccactataaaataagccatggaagaagaagcttcaccaccaagagagtaccttagataagaagcttatagaggaagcttcaatggaggaagagaatgagagagacagagagagaaaaaagtgtgcttgagaatgaaggaaagatagggagagaagttgaactctgaagtgtgcctcacaagacattcattcatcaaagttaccacatacacatgcttct

SEQ ID NO: 11819 - DNA, 432 bp, Glycine max
  unsure (1)..(432): unsure at all n locations
tcattctacacctganaaagaggatgagatagttgcacattttagaaagcttcctatctgtcataccctaatttcgtccggggactatggcttgatggcatgcaacctttgattgaccgcttcgaagtacttggcaccctttgttgcacaatatgtgaagtcccgagacgcgtcggaaatcaaaaggaagcgtggttacacaatccgtgaaattccgtaatgtgacggaaaccaaaaggaaatattgttacgcaatccgtgagtttccgtaacacaatttccacatttctaaaaataaggttgttgtcctttgagacaaacgtgagaggtgctaataccttcctcaaacgtaaatacaactcccgaacttggaacattctttntgaccggtttccttcggtttttccgacgttntccacaaataaacgttgg

SEQ ID NO: 11820 - DNA, 334 bp, Glycine max
  unsure (1)..(334): unsure at all n locations
agcttctacttatgtggcagggcgggcttttttaccttcttgtctccaacgcgaactttgaccattattcttccttcccgcgatgcttcttttcatgtccgcctgagtgggcttatagcctaaaccatacttcccacgatttccttgggtatttatcaggctagttatgccgccgttgttttttcctaaacccatcccgggttcataaccgttccccaacataactcgggccatcattatcgctgcatcggacagacaaggctgcccaaagagggagtccacggaggaaatgctgaccacctcanaagactggaaagcagtttctaacgattct

SEQ ID NO: 11821 - DNA, 376 bp, Glycine max
  unsure (1)..(376): unsure at all n locations
ggaccttaaatctcagctgcctaagagatccagaagatattcagctgaaggttccagttccgctcctgaatatgacagccatcgttttaggagtgctgagcaccagcagcgcttcgaggccattaagggatggtcatttctccgggagcgacgcgtccagatcagggacgacgagtataccgacttccaggaggagatagttcgccggcggtgggcatcgctggttacccccatggccaagttcgacccagacatagtccttgagttttatgccaatgcttggcctacagtggagggtgtatgagatatgcgatcctgngtgagggggttagtggatcccattcgatgcggatgctctcagccagttcttgggata

SEQ ID NO: 11822 - DNA, 381 bp, Glycine max
  unsure (1)..(381): unsure at all n locations
agcttgttggatattgttgaaaactgngggatgttaggttttggttacaagcctacaagagcaaacaaatggatgattgctttggaaaggaaagagaaatgcatagctcgtttacaagggagagaattgcatgtggagagggtccctatttgtcacatcaatgagagctttgtgagtgcaaggcggatgtacgaagatcaagttgctatgttggatgaacagaccgatcaagatcagtcaaaatgggtgcaaccatgtttgctagactatggattgaaaaattggtggatcatagagaaacccaacatatatggttgtgatttgatgtaattaaacatttccaagtcctattgctatgcctaacgctttacgatacacata

SEQ ID NO: 11823 - DNA, 427 bp, Glycine max
  unsure (1)..(427): unsure at all n locations
tatatacaatgagtattgatgaactctcttagcgcagcattctcgcttagcgagttcatcacgttttccaaaaaatgcagaaaacacaactcattttctcgcacttttcaagcctctaaaaggcatatcagacatgcaatgcgtgtgccatactcaattcaatatacaagcttacatagccctcatcttaaactaattctaacaaaacctaaaaaccctaaaaatctaaagctacagttaaagtcttctaccctagagttaagacaagaaaaagagaaaaaggatcaaggaacttacttggacggtgtatgattgatgcttcaaagtaaaaaatgcacaaagagagtacaaatgcaaaatgtacaaaattntggagagagagaatgcagaggcaaggtttttgtaatctggcaaatgtgagtgtaac

SEQ ID NO: 11824 - DNA, 424 bp, Glycine max
agcttgatggtactgtttagtctcacatctcatgctaagcacatgttgcagaaaaaatttggtgttgcagaaagcgctaagcgcagcctgccgcgctaagccctagattcttgtgggattttacaacttcgatttgggcttagcgcgaagctaggctaagcacttgggtttcaaacttaaacgtcacgttggcacactaagcacagctgtgcgctaagcgcaccatacgaatttcagtttttaaaaatcaaacgcaaaggcacttgggttgctacctttgcacccaaacctctgcaccctcttaaccttgagcaaattcttttactctttgctacgtgtgtaccgcttctctgtatcatcatctttacttcatctcaagaacaattcaagtaagttatatttctatttttattcttcattcttc

SEQ ID NO: 11825 - DNA, 422 bp, Glycine max
tccatcacttgataggttagatccttcatcttcttcgaatggacataggtatatcttggttgctgctgagtatttcaccaagtgggtggaagaaattcctttgaatgttgatcaaggggatataataaacttcatagaacaaaatattatttttcgatttagtatcccataaacacttataacaggtcaaggcaccatttttattgatcgaaaagtggttcaatatgtcaattctcaaaatattaagttagtaacttataccccttattatgctcaagcaaatggtcaagttgaagccataaacaagattttggtaaggttaattaagaaacatggccaaaaacctagaagttagcatgaaagtttagaccaaattctttaggcttatcaaaattcaccaaaagggggcccactattgtact

SEQ ID NO: 11826 - DNA, 274 bp, Glycine max
gactgctctagcacagctcatgacatgaaatacagtcgcgtctgaccttccttatcgaggagcagaacggtggtattggctctctcccatatgagctcatcgtcagtgagtaccgaagtatcacttgtgttttctttcatacgattgacgatcttattggcatttagagagatgctcatgctcatgacatggcaactaacgctcaagacctaaataaaaaatataccatttactgtacataatcatttgtattgcgcaatttgttgtgtaaacc

SEQ ID NO: 11827 - DNA, 380 bp, Glycine max
  unsure (1)..(380): unsure at all n locations
anggacctttatacatagaccctttcctcanatgatattgttttattatcatgtncaccgaccaattgacgctcacaaacgtgcacacttggcttatgtcatgggcaaagaacccttgttattttattattacacaaaaactactgaaatacctcctggcccatgcagctgttaagtgaacaatatacaaatatttatattatgataactcctaatatatttataatgagaaactattttaaacatatatttacatatatctcttgtgctcatatatgtgtgtatgtatggatatgcttgcaacgataacattaaaactaacaataaagtaaattaaaaacatacagatttataacatatttttatattaaaacacatac

SEQ ID NO: 11828 - DNA, 441 bp, Glycine max
  unsure (1)..(441): unsure at all n locations
agcttgtggtgcatgtgttgatgctgctgtttgtcaggttgaccttgttgaagtgaatgctctagcagagctaatgacatggaagacagttgtagcggacattccttatggaggagcaaagggtggtattggctgcaacccaaaggagctcagcgtcagtgagttaggaagtctcacttgtgttttcttccaaaagattgatgatcttattggcatttagagagatgttcatgcccctgacatgggaactaatgcacaagttctaatttaattatattccatttccttacataattttttgtttggggcaatttcttatgtaaaccaacatctagaacttttatttattattctatcattttcatttgtttactatttcactgacaaaggcttgcattcttgatgagtattcanagtgctntatagnttatattatcaata

SEQ ID NO: 11829 - DNA, 453 bp, Glycine max
  unsure (1)..(453): unsure at all n locations
tagaaacttaagccttatagaaggttcgttcctaatttctctacaattgcatctcttctcaatgatctggtgaagaagaatgtggcatttacctgnggtgaaaaacaagagcaagcctttgctttgctcaaagaaaagcttactaaggcacctgttctagctcttcctgacttttctaaaacttttgagctagaatgtgatgcctctggagtgcgagttggagctgtattgttacaaggtgggcaccctattgcttattttagtgaaaaacttcatagtgccaccctcaactaccccacctatgataaagagctttatgccttaataagagccctccaaacttaggaacattaccttgtttccaaggaatttttcattcatagtgatcatcaatcacttaagtacattagagggcaaagcaagttaaacaaaaggcatgcaaaatgggtagag

SEQ ID NO: 11830 - DNA, 445 bp, Glycine max
tgcaagctactgctctcaagcaagcactacatgtgtatttagttcctttatacttctatggtctgtgagtataatgaattggtggcccagtaaatactggcgccacttcttcacggctgaggttatggcggcgagctcacgaacgtaggtcgaagtgtggagcaatttcgggcaaaaagctttattgaaaaaggcaatggggtgattctgttgagaaagaatagcccccattcctattcccaatgcgtccatttccaccacgaatggcagggaaaagtccggcaaccgcaagactacggcgctacagatgacttccttgagcttgacaaaagctgctagggctttcggcgaccagcataacttgtctctggccaggagctgagttagaggtgctgcaattgaagcataccccttaatgaatcttcgatagaaacctaataaaccg

SEQ ID NO: 11831 - DNA, 426 bp, Glycine max
  unsure (1)..(426): unsure at all n locations
tggcaatgtgctatttaatgttgtagttatatatgtggctttatatgagttctttaattagttgttgtggttttatctgggtaaaccatgatgagcaaaggaatgatcaatggagtgtttaggctggtagtgaaggaaccttttaagcaaaaaatgctgaggtaatggttaataattatactttagttttggcttccaagatttaaggacaagattatacgttagacttagatccttctattcatgtctgtattatagaaggaattctctcttgtccatttgctcaaaatgtgatgtctttcagtcaaagtgaaaagatcatggggaaaaaagtgtccaatatgtgagtaggcattgcaagttaattctgtgatgaatgatattttcttgactcattgngggtaaagactggttaatttgttggta

SEQ ID NO: 11832 - DNA, 453 bp, Glycine max
  unsure (1)..(453): unsure at all n locations
tgcaagcttcaggaaatattgttgggtatatctgatgacaaatacatgagtttgcaagagggagttaagcaagcgcagagacattttgtggtgaataatcccccaaagaggtatgatgtattccatatgattattcattccatatggctaaggaggttgaatgtgcgtgtgaaataagtcatcaactctattatgttctctctctattcatacttttgctaatggttttaaagtttaattgtttgaccttcaatattttgatacttaaaagataatagattcgagtataattttatcttatatgactaataattnttaatcaagagtcatctcttttgtgacttaatataaatataacaataagagagatgactctacgaaatatgaatatttttttgtttgaagtgtcgttgcgtcaaacatatttttanaatcaacacattgagacacttg

SEQ ID NO: 11833 - DNA, 452 bp, Glycine max
  unsure (1)..(452): unsure at all n locations
caagcttaaaataaatcactcatagtgtataaaactcacacaggcttttgtttntatcctttttccaaaccataactgcaccatgactttattttgcacacgacttcctatcgaatcaaaaataaaacgtacgatcacggaccaataggattttctcgagggtagtggttttttggagaggaagttgggtgtttatgtcttttcctctttgttcaggtggggtgggatatcgccagtcgagaacgaccttgaatggcaatctgaagggaagagacaccaaaaatgggttttcctttgtcggcagtcacctaccttgccgaaaatttatctggcttgaagaatttctgtcctctttctttcattgatcgagaattgcttcgtttcccttttcacttcctttcgatctttgatcgggaatccttccttttctttctttggtttttttctttatt

SEQ ID NO: 11834 - DNA, 452 bp, Glycine max
agcttgaaggtgtgcagctcaccattttttttattagaataccggtaatgtgtcttctatcattgtcatcatttttttttccgtcattgaggtgccacttgagctgccaggtttctccacctttgggcgtattcttttgaaagatttgtgccccctttttgcacatgttctgtagttgcatcctatccgaagacattatactgacactgcctaacgaaggcaatcactaggtccttccaagaattggctcgggaaggttccaagttagtgtaccaggtaacagctaccctagtaagactttcttggaaggaatgtattagcaattcctcatcttttgtgtatgcctccatcttccgataatacatctttagatggttcttggggcaagtagtccccttgtacttgtcaaagtccagcaccttgaacttgggaggggtgatgatattgggtac

SEQ ID NO: 11835 - DNA, 436 bp, Glycine max
  unsure (1)..(436): unsure at all n locations
gtacccatcacatgtggtactaggtgttggtcgggcgattgtgcacagcaagtttttcacatccagaatgcgcgcataaacccaccatcccctgttgcccacctccaactgagctcacgtactcccacgtagcccatatcctcgtttctctcaataccgggtccccatcaatcctcccaagcttccacaacatccaagcaaaacaacatacaaacagcacaagctatcacagccaagcaaaacagagcaaggcagagaactctgctcaacacaccaactaaaatcacagcttttctcacttaaagaccccagtaacaattccttcgatccaattcactaaccgttggatcgactccaaaattgtactggaagtctatagtgcataagcctacattntgaccgttgggatctacaagcaaacatccagaactcactc

SEQ ID NO: 11836 - DNA, 344 bp, Glycine max
agcttctagatgagttatgactgccaatcttacttcctggagagggagtgaccagaagaaggtgtcgagagctaccgtggctccattccagacggacgataaaaggggggcacagaccacacatcggagcaaaatggtatgaccattcgaagaagtcgagagcgtccgttcttccattggaagcgtctagatgaggtatgtcaccgagacgtacatgcccctgacatgtgatcaccagcacaagttgtcgagaacttatcttgcatcaacttacacgtctatatgagtgaggccaccgaaactgacacccgcgtcaagagctatgaccaatcagcttagcatag

SEQ ID NO: 11837 - DNA, 431 bp, Glycine max
ctcagcttctatataagctgaaccattttatcttttaacacaagttgtgttttattcagaaaattagagtttatctcttttatcttagtgagagtgattctcctaaattcttgagtgattcaagaacaccctggctgtatcaaaggactttcacaacctttgtgtgttgccctcgctggaaagagtgattctttccttcctatcatctccacccttgttctttcaaaccacaattccagaaaatccacctctgcccaaaattatctcgtgaccataactcccatttcacacactcaaattaagtgattcttgagcctaaattgaatttcaaaacgagacctttcacctcgttttggaatcacctcatttggagccctgtagcttccgctattgccatttctatatttctgtccagccaccacttaacctac

SEQ ID NO: 11838 - DNA, 329 bp, Glycine max
agctcgattattttgtataattttcggtgttatattatcggacattgatttatttgggatattgtatttatttatggacgatgacacttgtttatttaatgtgaatcattatgtgagataaatagcggtgattcatttatccttaattattacttaattggtgcattaaaaaatagattaattgtggcaactaagataaataacgcatgtatgatacatcgctgtgcaaattgacaacacattgtgaaatgcatgcgtattaagataaagcgtgagatgacattgtcagactcgacaacaccttatgatgcacgataaaacttgacacc

SEQ ID NO: 11839 - DNA, 426 bp, Glycine max
  unsure (1)..(426): unsure at all n locations
tccatcaagacttcaaagttccacttctctccctcttttattccttcaattttgtgctccccccttctctctttcttttcctccattaacgcatcctcttcaagcttcttatccaagacacatatttggtgatgaaactccttcttccatggtttattccctagtggatgatgcttcccctcccctcttctcctttgccttctgttgcatctccatggtggaaaatcaccattgaaggatctcattgaagctcaaagatccagcctccataaaagctccacaagcaaacttccatcatgagattcgataatcaaatctcaatcttcctcctaagataatgtaaatagagaaaatatgatcttatcttatctcttctcttataattgatagttntcaatattagggatttatctttatctttgttct

SEQ ID NO: 11840 - DNA, 351 bp, Glycine max
  unsure (1)..(351): unsure at all n locations
agcttgtagaaatgtgtactagcctcctttagtcttgtagcttgtggtgcatgctattgttgaaaggcttgaaaatgcttttttttaccatgcaaattttgtggacaagttgtgtaattgtccacactactttttgccttctataaatagagggctttgcagatgaaggaaagcatcgagaagaagatcataagaaaaacaaagcttctgggtagttgtgagaggttagtgagaggaaacatatagtgttgagtaaatcctaagagtgtggaaaaaatgcaccaaggtgagtatcaactctaactctntggtactacaaaatataatatttgaatatgagtgattctcacc

SEQ ID NO: 11841 - DNA, 389 bp, Glycine max
ccttgtcgcaacacttcacactaccttacctcttgagagcggtacaacatccaccatggtacctgtctttcccttaacgtgctcagtgtaggtaacaaagtaccgcagaccatcctcgggaaggttcttaaggacttcgcgaaccaaacaacgaatcctgagtcttataatgctctgcatgttgtcgcacagcaccaccttctggcccgtggctcctctcttgcctccctcccatgaccaccgtatccgtcatcgtcacctccaccaccatcaccaaagccatcgcctccaccacaatcacgatcggtgtgggtttacacttcttggtgtaggtcaccaccgagcccaacaagccagattatgatgggacgctcacctttgcatcttgc

SEQ ID NO: 11842 - DNA, 433 bp, Glycine max
agcttcggaagattgtgatgaggtacaagccttataggcatagcttgaaagagcctgggtagtctaagagaagttcaagtccatagccatcaaagtctgaaaagagtatgatgaactaatggatgtcaatatggccaccgatgaagccttggaatgagaaaccaagaaggcccgaaaggaagaacacgaccaaagcaaagttttgaggggctttatagggcagcaatagtgagctcaagctccgaagaggtgaaaggaatcatcacgggtcaaaggcatgatcttgaacgacgagctaaaggtttgccttaagtcgaaaagaaatttgtcccaacatgtaagcgagactgaagggaatatgtgggccgtcatcgatgagtgcaaagagaagctaaatctagcggcgactcacgagcaaaggctagaggatgag

SEQ ID NO: 11843 - DNA, 429 bp, Glycine max
  unsure (1)..(429): unsure at all n locations
tctcaaggaagttntctcaagaaagcttctcaaggaagctttctagtctataaatataagcatgtgtaacacttgttgtaactttgatgaatgaaagttttatgagatacacttcaaagttccacttctttccctcttttattccttcaatttcgtgctcctcccttctctctttcttttcctccattaaagcatcctcttcaagcttcttatccaaggcaattcttggtggtgaagctccttcttccttggcttattccctagtggatggtgcctcccctatcctcttctcctttgccttccgctgcatctccatggtgaaaaatcaccattgaaggacctcatcgaagctcanagatccagcctccatagaagctccacaagcaagcttccatcaagtggtaatcagagcacaagagcttcaagtag

SEQ ID NO: 11844 - DNA, 431 bp, Glycine max
  unsure (1)..(431): unsure at all n locations
gctgctatcaattactttctccatgattctgttgctctatcatatacagngagcttgcatccatccgggcaacctaatgcatatagttgtccattcagagagatacaatctttatcccatccattgaccattccattagcaactacggtccaagtatcagtttcaggtgaataggcttcacacatggaattaccactcccaattgcatttcccttgaaaaaccatgttccattgtgaacaacaccaaataaaggcaccatggatgtgctcatctctgatattaaattccacctgttttggctggggtcataaacttcagcagatcgagtcatttgaattccttcaagttccccaccagacacataaagacaattatttatcacacaagaacgaaacagattacgtttctgcagcatatcgggtgccctatg

SEQ ID NO: 11845 - DNA, 418 bp, Glycine max
tgcttggtttacaatttaagaaattgtctttataaaagtttggttagttagacatgttaatcaatttgagctagtgtagttcttttggtgaaacaagtagatattgtgtatttctgtttatttatgatgttgtcctcttgtggaatatagcagtcaaattgcgaatgtgcaaaatctgtgaattacagaaaaaatgctgacttctgagtgtttttatgtgactatagagggcgtgggtatgattaaatttatagtcctgcaagagatagttttcaatcatataaccaaatttccttatactgttataggtcattttacattaattgtccataaaatagtataacccccataatcaattgcaacaaacaactcccaagtaatggttgcaacttgcaactagtatttctgtgttactaac

SEQ ID NO: 11846 - DNA, 423 bp, Glycine max
tatctgcgagcccgcagcttccttgttgacgacgaatattatttcttgtcgttaatagatgaagccaaaacacttgaaatacacccaacaagagggactttccttcaacttaaataggctttgtacatataaaagaaggatttatgagatgtcgtatctaaccaccccacgcaatatagcagtgtaaacactgtggtaatattctaaatacccaaactagttgaggacctcactcatttgatctgctaaatattcaccagactgaatatgatcctcggcacaatatgcagtcgtctccgactataaaatctcttgtggatgtattagagggccaactgcatgaatagtaatattcagttctacatgcgatacagaatacattcaaatgatccatcttacagacctcatgtccacgatgactga

SEQ ID NO: 11847 - DNA, 408 bp, Glycine max
  unsure (1)..(408): unsure at all n locations
tgaccaagttatgttggctattctaccttgcattntgaatttttataccaatgtcacattgaagttattgttatctacttgcccttcttatccacttgcttgactactaaggctctggtggctgtttcatccccagagaagattttaattcaaactttgtatattgtttcgtacttttactctntacttggtatgaacttcctgctaaattgttcatattcttatttttcatatttatgagccaagctgatcatatttactctgatttcagttgttgtcatttgactcttgtggatgctcttttagtgtagacccttattgacatggacaaaattaactaaatgtttgatcattaattgaacatattgagtggcagaatcagttattgagttgtagaatgtaaattca

SEQ ID NO: 11848 - DNA, 230 bp, Glycine max
agttttactacacacagcattctattaatgttgttatatacaaaatgtcagcacttacggctggcacatataaacatccacttacatacgtaaggccactctcctataagttattaattacactattgaaacccataaacaaaattcaatcaacaccgggttcccaaaaaaaatcacctactcacttaacaatgaagaacaacatgttacacacctccctaattataaca

SEQ ID NO: 11849 - DNA, 499 bp, Glycine max
  unsure (1)..(499): unsure at all n locations
aggcccgccccgggccnatgaaccccctgannaccgnccngnggannaatgagcccctagaagnccgcgacacaagaaacnaagcggncaaatgagcngagagtgaaagaccaanagagcgttttgactctcggtcaccacagcgcccagacaaacaaacaaagcacaacacacacacaaaagaaagcgaacgagaggagccaccgcaccgcaacacgatgtccggaaccgaaactcgaagcagccactccatggaataagaccagataatgcaagggagttgctatcggggggacagaacagaaagagacaaaagaaaggtacttgtttaggtacggaagtatcagcaacaccactaagacacacttagcaggcatgtctcggaggtgaaaagagcttgcggtngcggtggcttctatcacagacgtggggatngggcgtgaacagcgcatccgggaggcaatccagagggcctcgggagaacggaacaacacaaccg

SEQ ID NO: 11850 - DNA, 469 bp, Glycine max
gatccttaagcacctgcggctgcagctgaactattggattcccaactttttgtttcctcgaaatttatttcatgtcattaataaatatagcaaaaacattgaatttcacccaaaaaaagggacttttcttcaacttaaataggctttgtacatataaaagaaggatttatgagaaattgaatctaaccaccccccgaaatataaagtatcaacactgtaattatattctaattacccaaaatagttgaggacctcaattatttgatctgctaaatcttcagcagaaggaataggatcctcggcacaatttgcagttgctcccaacttcaagaactcttgtggaagtttcagagggaaaactatatgaataataatattcagttctacatgcaataaaaaatacattcaaatcaaccaacttacaaacctcatgtccaggaggactgatatgatatatgcaaaagttgtg

SEQ ID NO: 11851 - DNA, 432 bp, Glycine max
tatgatgcaggtgttactgttaaggcgtgtggcggttgttaaggataattatatagttgatacactttcatttagcatactgtcgtctcattgagtgttgcatccccgccaacaaagatttccttactatcatcgttcgaggtatgtatatgattctcacacttatgtgcttaagtattatagacaatggttgacatgttactattctttagtagtacattgtaattcattgagtgagccatagttccccgtttgagattgaatacaatgattaatacggaaagtttggattaattgttgtattcaatcttgaattgtccatttggacagtttgggaagacaaattgttcttacttcattttgacttataagttaagtatgttgtgttattttttactaaatttcgaacaatgcatcttgctttgttctctg

SEQ ID NO: 11852 - DNA, 442 bp, Glycine max
  unsure (1)..(442): unsure at all n locations
agcttaaggaaactttgttgggtatactcgtttgacaaatacatgagtttgcaagagggagttaagcaagtgcaaagacattttgtggtgaataatcccccaaagaggtatgatgtattccatatgattattcattccatatggctaaggaggttgaatgtgcgtgtgaaataagtcatcaactctattatgttctctctctattcatacttttgctaatggttttaaagtttaattgtttgaccttcaatattttgatacttaaaagataatagattcgagtataattttatcttatatgactaataatttttaatcaagagtcatctcttttgtgacttacaataaatataacaataagagagatgactctacgaaatatgaatatctttttgtttgaagtgtcgttgtgtcaaacatatttntaaaatcaacacattta

SEQ ID NO: 11853 - DNA, 438 bp, Glycine max
  unsure (1)..(438): unsure at all n locations
aataaatcactcatagtgtataaaactcacacaggcatgtgttttatcctattcccaaaccataactgcaccatgactttattttgcacacgacttcctatcgaatcaaaaataaaacgtacgatcacggaccaataggattttctcgagggtagtggttttttggagaggaagttgggtgtttatgtcttttcctctttgttcaggtggggtgggatatcgccagtcgagaacgaccttgaatggcaatctgaagggaagagacaccaaaaatgggttttcctttgtcggcagtcacctaccttgccgaaaatttatctggcttgaagaatttctgtcctctttctttcattgatcgagaattgcttcgtttcccttttcacttcctttcgatctttgatcgggaatccttccttttctttcttttgtttntttctt

SEQ ID NO: 11854 - DNA, 454 bp, Glycine max
  unsure (1)..(454): unsure at all n locations
agcttgtaggattatggggtacccatcacatttggtactaggtggttttcgggcgatggtgcacaacaagttttccacatccacaatgcgcgcataaacccaccatcccctgttgcccacctccaactgagctcacgtactcccacgtagcccatatcctcgtttctctcaacaccgggtccccatcaatcctcccaagcttccacaacatccaagcaaaacaacattcacacagcacaagctatcacagccaagcaaaacaaagcaaaggcagaaaactctgccaaaacaccaaccaaaaatcacagcttttcccactcaaagaccccagtaacaattccttcgatccaatttgctaaccgttggatcgactccaaaattttactggaagtctatagtgcataagcctacattntgaccgttgggatctactagcaaacatccagaactcatt

SEQ ID NO: 11855 - DNA, 446 bp, Glycine max
  unsure (1)..(446): unsure at all n locations
ctgtaggtgcgcagcccaccatcttttcatagtggagtactgataatgtgtctatccatcacgattatcgttttcctttccattattgggggtaccacctgngccgccagatccctccaccttttgggcatgtttttgaaagatccgtccccctttttgcacatgttctgtagttgcatcctattcagaaccatatcaaaattgtactgatactgcctaacaaaggcaaccattaggtccttccaagaatggactcaggaaggttccaagttagtgtaccaggtaacagctaccccagtaagactttcttggaaggaatgtatcagcaattcctcatcttttgcgtattcccccatcttctaacaatacacctttagatggttcttgagacaagtagtccccttgtacttgtcaaagtccagcaccttgaacttgggaatgaccat

SEQ ID NO: 11856 - DNA, 302 bp, Glycine max
ctgacgagcattgaagcgagaagaatgctttcttctcagccggcaataacaagaatatatgaggtgtactgcgaagaatacatgctacagcaagcaatgtatgtgtctgcgtcaaaagagaatatgcaaacaagtgcaagagcaatatgatcctatcaagaccaagtctggaaatcaaagcagaaactcatcgatgagaaactggtggatatcgcgcccgaggtgcataaagttgtatgaaacgctatagagcaacatgacctcaaggatgataacctttaacgagaaaaatgctggcgaac

SEQ ID NO: 11857 - DNA, 449 bp, Glycine max
  unsure (1)..(449): unsure at all n locations
aagctttaatgttaaatctctatttattattataaaggaatnatgattatcnntttatatactcactgngggaaaagaataaccctctgtgacttcttcaagtatcctcctcctttcatgtatttcataataaggttaaagaaaggtaagaaaatgttatccaagtggcttcaataaatttaagaggggagtaaattgattttataaatattttctttgttaatataatctaattcatttttctatgataaatataataatatattaaaactttgattaaaaagagaaaaatatgcaattaagatctctaccaatataaatgaatatagtaaatttacaaaaaaaagtaaagagataatgtaagagagaattggaaattcgatttatactgatctggttatgtctatgcaggttcagtccccaagcaatccgcttaagagnttcattat

SEQ ID NO: 11858 - DNA, 426 bp, Glycine max
gatgatatggtcttcaccgaagatatgatcaaagtgggttttaaaacatttttatctggtcatcatgctttgataaatgcaaaaaaaaaaaaaaaaaaaactagggcaaatgaagagggtgagaatgagggagaagcccatgctgtgactgccattcctatacagccaagtttcccaccaacccaacaatgtcattactcagccaataaacaaaccttctccttacccaccgcccagttatcgacaaagaccatccctaaatcaaccacaaagtatgtctatcgcacttccaatgacgaacatcacctttagcacaatccaaaaacacccgctaagaaatgagttttgcagcgaaaaaaaaacctgtagaattcacccaaattccgatgtcctatgttgacttgctcccatgtccactcgataatg

SEQ ID NO: 11859 - DNA, 433 bp, Glycine max
aaacgttcagaaactgctagtaatctattaccatatatgtgtaatcgattacactttgcaaattttgaattcaaattttaatagctattgtaaatcagttttggccactggtattcgattacatcctctggtaatcgattaccagagagtaaatttgttgaaaaatactttttaacttaaatttcttggccaaactttttgctacttcaattggaattcccttcctatttaatatgccctttttaagactctagagactgtcttcatcatccatcttgaatatctttaatttctttgtcttgaattaaagctttgagacgcatgtgaaactttggcatcatcaaaacattcagcttgatcctttgtctacagaggatttacttgattgaggccagatgggtgaatcgggtcctccttagtggcgatacttaca

SEQ ID NO: 11860 - DNA, 396 bp, Glycine max
agctgtacaagtttaagattactctattagtttttctgtattagataagtctaggatctcaaattaagtcttggaagcaataaagatcaattgccattcaacatggaaggttctgtaacataaaaaagacatcagagtactagaaaatcattaaattcttactcgttactttttttgaaaagagaaacctaagcatacaaaaagcacatcatcctagccactaggtgtggcttttgtgaatgagctaccggttaccacttagaactctctgtcgtactttatacaccaaaataaaaatgtattatgtatagcccctgtatactaaacaaaaataccacaccacgactaaggctagtgtctggtcttagatgaaaattgtagagaaacacactatta

SEQ ID NO: 11861 - DNA, 405 bp, Glycine max
  unsure (1)..(405): unsure at all n locations
tgtaactcatcattgttagttgaaattgtcaattgtacatatgcaatcttaattctcaacacactttttggatgagtcttccaaggattgtgttgccttctctaacttttcttccttttccagcgataaggtaaagctacaaaattgagtctcccaatgtttgatataagttttgtaagaccatctttaatttgaacaagtggcttanaggtgtaaatgcacagtccttccaagcgagcaactcaaaggtgtaacaccatcttagaatttcgtatgagcatcttcattgaaaatggaagacttgaacgaaaatggttggctcgctcctcattgatctcggaatagataaggatctatataatgagcacaatgtatgaaggatggaanaactccaatttatgtaat

SEQ ID NO: 11862 - DNA, 341 bp, Glycine max
agcttgtgcctctttacgtctggaatatgtatgtagcatatagatccaaagacccttaagtgctttgctgatggcttcttcccgttccaaggcttaattggagtcttgtcttttacagacttatatggacgtctgtggagtatgtaaacagcagtgtagactgcttcatcccaaaatgtgctatgtagtccctctttcttgagcatcgatctagccatctccatagctgtgcgattctttctttcagacactacattatgttgaggagaatatgcgactggtaggagtctctcagtgccttcatcctcacaaaatcttgtcaactcgcgagaggtgtactc

SEQ ID NO: 11863 - DNA, 431 bp, Glycine max
  unsure (1)..(431): unsure at all n locations
ntaccttcacaaacacataaacacattattccattaatgtatcacacggtactctatttgaaaatggatcttttactctgtgcctgcaaggactgctgacccttccacctgatagttcatcgcatcaaatagacaaaatatatcataagatataagtctcaaagttcataaatagagagagccacacagtcaaaataagcaaactaaccatgaatgcaaaaacaaatattgaaataaataataccactattatgtgtagtgcagctttccaacttttgtacctaactgaaggagacttgtcaatcacttgagagcctgtagcagatgcaatactgtaattaatgaagcttcattgtgagaactgtggtaaaacctatagtgacagacaattagtcatcattatacgcctnctcaaagttgacggaagaaac

SEQ ID NO: 11864 - DNA, 432 bp, Glycine max
agcttcaccacctttatagtgccttggatatgatgcttagaaaggaagcttcaatggaggaaaataatgagagagagagagagagagaaaataaaatgtgtcatgggaatgaaggaaagatagggaaagaatttgaactttgaagtgtgtctcacaagactctcattcatcaaagataccaagagtgttacacatgcttctatttatagcctaagtagcttccttgagaagcttccttgggaagctagtgttacacccctccaagctcatccccaagccaaaatacatgatgggagaaagcttccttgggatgcaagtgttacacccctccaatagctaagctcacccccatgggaaccacacccctccaaaatacatataaatacaataaaagtccctactacaaagactactcaaaatgccctaaaatac

SEQ ID NO: 11865 - DNA, 397 bp, Glycine max
  unsure (1)..(397): unsure at all n locations
tcaagataagaccaaactccacttctttatctgatttcaatcttaaataggtggctttgttcgcgctcgtgcgcttagtgcacttctataccgcttagcgtgcattagtgaatttccgtttagcgtggcttttctcgctcaatggatagactgaagcattgcgcttagcgggatggcccttcgcttagtgaacaagcacaactcatccttcttccagattctttctcatgctcagtcgaggattgttgcgctcagcagatagctcgctaagccagcagtttggcttagcgagagggtgaaaatcagcacttcaaaacttgcctaattatcttgaaattgagagaaaatgattattaaatacacaaaatggaaagactacttanttattacctatatt

SEQ ID NO: 11866 - DNA, 417 bp, Glycine max
  unsure (1)..(417): unsure at all n locations
agcttccctcatctttcaaaangggctaaattttgaaccttatcagtattgcaaagatgacaacaagatcgttgtcatgtggagagactcctctaaagtcagcattagtatatgtaatgttgggtgaaggtcggggtggttggacctccactgtcatgaccgactaggcatatcattttctaaaactacctctccacttgaaaaaccgccagttattatgttaaaatcaccgtaaattacctattggtgagctggtgccaatgtagtccctaaggttggcggtggaaggggtagatccctcttttatgacttgtctctccctttatcctttcattgatagctattattccaagcatatttttccaaaggccccgtcttaataaggtattcgatctgctggatcaaagtacaacattt

SEQ ID NO: 11867 - DNA, 431 bp, Glycine max
  unsure (1)..(431): unsure at all n locations
ctttatgccctctcgggtcatctggccttataaacacttcttctatttggccgngtttttcatcagaacatggtcatcctcatcgacggaggaagcacgcaaaatttcatgcaggaacgactggttcgttccctcggtctcaaggcacagctcacgcatctgcttcgggtcgtggtgggaaatggcaacgagttagcttgtcatcaactttgctccggtgtcatgattagcattcagggccaaacgttctcggttgaccttcatgtccttcccctttgcggagtggacttggttctcggtgttcagtggctgaaatcccttggccctgttcttaccgactataaggatcttacattgaaaatcattcatgatgganaaataatagaattaanagggaatatggacgatgctcttcaccccgtcactccaac

SEQ ID NO: 11868 - DNA, 224 bp, Glycine max
agactgaatgactctgaatatgtcaatagaacagtaaagaacttatctgcaactaactcgtttgatgagtaatacaaagtctactgatggagaccagagtgagatttcccaacacaggaaaatgatacaggtgggctatgttgctctaaaaaatattgaagtaattatttatttgattcttatgttcaatcaacaagaagcagatgtttgggcttcgtcatgtg

SEQ ID NO: 11869 - DNA, 424 bp, Glycine max
  unsure (1)..(424): unsure at all n locations
tcaatntgtagcctcaaatcagccactattatagnnttctttgagacagaagacgaattagaaagttggttttcttcttcaacccattgaaaaaattgacagttatctgggtctgtttggggtaatgcacaagtatagaataaccttcctgggtttctccttgttcttgcagttcgaatagctgcacgtcttccatggtggcattgccgaatgaaactaccagaaaatgcacaacaactgccacttgcagacatggacaaatcaagtgaacaagcagcagggactaagcctcagagtagaagaagaagaagcaactcagcgtgggaagaagaagaagaagaagaagcaaccagcagcttcgtaaaccctaatttttttggggaaaaagaagcaaccttgcatgtgagagagaanttatagatgc

SEQ ID NO: 11870 - DNA, 501 bp, Glycine max
  unsure (1)..(501): unsure at all n locations
ctccccatgaatactattgagaccctgagacctctgagtaccctgcggcccgcgagatctttcagtctactgatgcatgcgggttggccttaacaagatataagcccanatccgttctgacataacatagccctttagataatagtgatacaaactgacaatatatcaaatagcattgcactatgctgcccctcaagccatatacgcctttagaggaatgagaatagagaatgtatattttaccgtaaagagagatgcaaagccaccttctccaaccttctccgaggaatgaaaatagaccgtggctaatttcaattgcatgtgagtgaatgaacgagagctgtcatcgatgatctcttcatctgggtaatctgcagtgcacgccaagagagaccacagataatgggtttaacattctcaagacaaaaaatgttcaatataataatgtgcgtgaccgtcgtgagagtcttcaaaggcgacggcgacaacaaaaacacaagg

SEQ ID NO: 11871 - DNA, 396 bp, Glycine max
  unsure (1)..(396): unsure at all n locations
tcactgcgataagacttatccttccactcttcttcactatgctcatggcaaaaccgtctctcaggtctctctcctttnttttttttttccttcactctttcttattctgccttcgcaatactctttttttatttttattttattgctattatgtctccacatcgtgcttcgtggattttgtattcatttctagggtttctcaattgtattgaccactttaagcgatttataggtttatttcttgaaagtgtgttattcagttcctctggttagtttattgttatctaagtagctattttgtagaatcaatttcaatgaaggcatggcaggtacatttatttattaattttagtgtgtgatgcctctggttactgtttgtgaaattaggatgtgatc

SEQ ID NO: 11872 - DNA, 403 bp, Glycine max
agctttgaccaccacactgattcccttatgttgctctcagaatataggggtggtataggtctaacttctaaaagttactctttttttttttttttttgctatgtatggtgaatctgaatgttattcttttaagcttagttcaaatgggaatttgaccttaaagtggaacaataacacaatgtatttgaaccataggaactcttttgtgaatgtgagcttggattctcctgtgttggcgttgatgaatcggcgagtacaccaatgtggcccaagtagtaaagttaaaacagacattcgagtgtcgaatccacaggaactttgctgatgcttaggtagatgaatatttattaataaaagaagttaaagaaattgacttgaaaggtatgagaaaataacacttaaa

SEQ ID NO: 11873 - DNA, 136 bp, Glycine max
  unsure (1)..(136): unsure at all n locations
ncatctttatttgtagtgtgattgatcgttaagggtgtttttcgctcatacctgacccttnntgggagaggctgccgctagtttggcttgtgcctcttatgtgacttgtgtaaggtgagcttggtgcttcctttgc

SEQ ID NO: 11874 - DNA, 424 bp, Glycine max
agcttctccttcttttccctataaataggggtaggagggaagaacttatttgttcaaccctcctggtatctaaggatctcttaaaattagtgagaaaaattgtttatgtgaagaaaatccaagccgaggcgcttccgtaacacttctgtgacgttttcgtggatgatttcgcgaagattttcaaccgttcttcgtcgttcttcgttcgttcttcgtcgttcttcggtcttcaacaggtaagttcccgaaatcgaacttttcaattcattctatgtacccttagaggtcctcatttgattcgcgtgcttttatattcatttcatttacttttcgtacccccttttggcgtgctttagtcatttatttaagtcattttctcacctaatcaaaaataacataagtttccaccgatcattctgattat

SEQ ID NO: 11875 - DNA, 411 bp, Glycine max
  unsure (1)..(411): unsure at all n locations
agcttcttgcgtagccgctcttggtgctgttataatcccaaaaacttattcctcttattactagctattttgaattctttagttcctgaatgtacaactttcaaattgttggtcgttcccctctttgttttatgcaaaaaatgaaatcaatatcaaacaaaacatgcatacaattgtcatcgttattgctacttgaaccataaggaataacatctaaagaagtactttaaaacgtttatttattttttttgctattttttgaattacaattttacttcaatatctaattttttaatgtacttaggtggaggatgttgacgaagagaaggagaaggaagaaaaaaatttaaagaagattaaggaagtgccacattnttttttttcctcancaaggaagtgtcacatgaatgc

SEQ ID NO: 11876 - DNA, 435 bp, Glycine max
  unsure (1)..(435): unsure at all n locations
tctagtgggagggttacatgaatgaattgaatacacactctattgaaagagattctcaggttatggaagtatgaaactatacagttgattatgaatgaaaggaattaattagtactacctataccaacaagatgaatctactttttatagcccatcaattaagaactccacaattaagtgtgctggcttggagcaattatgagatgtgtgaccttatgaaaagtttatcaaaaagtgtgtgagtgaagacaaagcacactaaaacatcttgtgttggtttgcagggacaatcaacaatcctacaagtagtcaagcattgcacctctaatctccttcttagacactaataattagaatgtcatctgtgacaccctttatcccgacatacatatttatataatatcatacatganaatgtagaattaattaaagaga

SEQ ID NO: 11877 - DNA, 439 bp, Glycine max
cgccagcttcaactttcagcccaaactcccttcatttaatctaattccagtcttaaatatgtggccttgttcatgctcgtgcgcttagcacaattctaaaccgcttagtgcacattagtgaatttcggcttagcgtgtgcttttctcgctcagcagatggactgaagaggtgcacttagtgagatgaagcggtgtgctcagcaaacctgtacagctcatcttcttccagattcttcctcgcgcttagccaatgagtgttgcacttagcggatgctcgctaagccagcaaattggcttagcgagaaggtgaaaaacaacacttttcagagttgcctaattaacctgaaattgagagaaaatgattattaaacacacaaaatggaagtactaagtatttattacctatacttaacagaaagtacttataacactacaaaat

SEQ ID NO: 11878 - DNA, 450 bp, Glycine max
agagctcgtcacccagctcgcccaggcgagcaaggttgcttcctcctgatagcaacaaccttctggaggaatcttctttatggcccaagtgggcctggttgctatttgcacccccatttttactaagtacacccccctgcctttttttggtgattcttttttcgtaaagttatgaaaacttacgaatttcgtaacgatacttgttttctttccgtaatgttacggaaccttgtggattacataatcatcccctttttgacttacggaatgttacagaacctcactaattgtgcaacgatgcttccatttgatttccggtgtgtcacggaaccttagggattgtgcatcaatattttcttttactttctggcatttcccggaatttcacaaattgcctaatgatgggtgccaagcacctcacaaggaccaaataaaagttgcatgtcatca

SEQ ID NO: 11879 - DNA, 444 bp, Glycine max
  unsure (1)..(444): unsure at all n locations
agctntataagcgcgggttcgggagacaaaggtcaagcgttcgcgatantctaagatgatattccgagtactttggatttggtacgaccatgccctcctgatttccagctgggaaattggcgagtggaggaacgccccggcatttacgcaacaagcataatgtaaacctttacggttttaaaagctctatagttgggcctaggctttagagtttttccttttgttaaggctttgtgtcttttgtttttgaatttataatacaaggatctttcttcatctgttcctggtctctacccattctcattcatttgcatgtttacttctttttctgaaacggcagatccgatgacgagttccccgaaggtactaatacctgngacccgtctatcgacttcgagcaagaaatgaatcaaacggaagatgaaggaaatgaggatgtgggac

SEQ ID NO: 11880 - DNA, 446 bp, Glycine max
taaagtatgcccgagtcattcatccctgtgagatgttgtttatttattggcgtatataattgccattccttggattatagggttgaaccaagctcatgcttttacaaaaaaggttcatcaagtcaagttgaaatatggaagtaaccgtcttgcaaaattggggcaaaagatgaatcgagtcacatcactgcttcgtctactgccaaacatatttaggattattgatgtccttgttacttccagtttcaccttgacaaagatgtcatggaccatgttgaaaatctaaattgattcaaccccatatcctgcgtaaaaattcgcaatacttcgactgtacatcattcgcatgcatccatgcttttcattggttgcattgctcattgcattctttccttgaaaaataaaataaaataaaatgaacttatcaaaaagaaaaggacacgctt

SEQ ID NO: 11881 - DNA, 394 bp, Glycine max
tttttgctctttgaagaagcatggaaaggagaacgctccctggatggactggtagagtgggtgacctcccattctgctacttgaggattatgtgggttcatttctagaatatttagacatcattgatacttatatggagaacgatgattttcatctacatatttgtccctagaaaaatgtccgcaacacactcttttaaacactattttaattttaggtcaaataccatacctgctcatggaccattggtgggtgtatagagaattgaataataatggctcaacttttctattgctttggaagtgttatatattatacagaaggattacacagaatagactcggcacatttaaacttaaatcagtaataacctcttatgtgctatctacaattc

SEQ ID NO: 11882 - DNA, 337 bp, Glycine max
aaccgtggatggactcatcagttttaccttgagcctggatagatgtaaacagagaagcaaacggccaaaagtccaaaacaatggcaacagacttacaatgttatgatgccaattggcaagggacctatcaatcagtaaccaatcagcgggagtgccgattggtaatacaagataattattatacacaaggaaaaattccacatctgatactggactctataattgaagagaagcttcctgggaatgtctcacaatatatatatatatatatatatagatatatatatataagcacactcagacaaatactaatgcacatgcgaaaagacaagtcaca

SEQ ID NO: 11883 - DNA, 378 bp, Glycine max
  unsure (1)..(378): unsure at all n locations
agcttgctcggtgttatttcctgtgaatgttatcatttggaaagctagttntaccaaggaatgctactcttaagacaaaaatggcgtacaacctccttcaataaacacaaacatcaatgtaaatttagagcaaacttatgcacatatttccttactaacattcactcgcacaagatattcttctaactaagaaaaatgcacccatgcacaatcaaggcaccttcgttacctagattatttgtatctacttccaaggtgtactacctacatcacatgcatttccttggctaaatgtacatacatgcatactcaaagcattttggctaccaaaaattgcacatgagcacattctnggatctctaatacctatgcatatac

SEQ ID NO: 11884 - DNA, 447 bp, Glycine max
  unsure (1)..(447): unsure at all n locations
gacactatgatactcagcttcacgcctaagccccttcattctatgcaaacaaattgtttatcaattgatctatcgaatttggttagaatcccttgtcgcattccataaaatctcctctgtagctttgtcaattctgcattgatcctttctagtgccctaaataattatatatatatatcagtgaaatggcattaaataaaaaaaagttatagtttagttttttttatggcgtgggaaccttctttcatttaacagtttgggatttcgtaacttttctaatattagttgcagatagaaattataaaaaaaaaaaaacttaaaaaatgataaagcactgagtatgtatttggaaattgaaaatttttcattattcaaggtcagcccanaaagtataagataatataagttgatcattntanggttttatgtttattataaatatatttt

SEQ ID NO: 11885 - DNA, 347 bp, Glycine max
agcttatcccatgtctccgtagcagatgttttatcaaaaatcttttctaatgcatcatcatctaatgcttgatagatgacgaagaaagctttcttgtgtctctttcttgaattcctaaaagtctcattttgtgcttaggacagcgaaatctccttttgcaactccttatagccttcttcaaccatatcccaaacatcatgtgctacaagacaggcctccattttggtgctcaaattatcatggtgctcccctttagaagtggaactaggaaggatgccactccattgctcgccatgactatagagggatttcttatcagaacctaagctctaataccactttgttgg

SEQ ID NO: 11886 - DNA, 425 bp, Glycine max
  unsure (1)..(425): unsure at all n locations
tgctatctacccctaggccaaactagtatcatagaagatttataagatgggagaagtgcggtgtaaaaccgttaaaaaataagtcaacaagttattgcatgcaaactttatcagagaggtccgattctctacttggcttgccaacatcatcataatcaaaaaggccaacgccaaatggcaaatattcatcgactacactgatttgaatagggcatgccctanagacgcataccctttgcccaacattcatagactagtcgatgggacatccgagttccaggtgcttagcttcctagatgcttactatggatacaaccaattcaaaatgcatcctctagacaaggagaaaatgacattcatcactaaagatgccaactntaactgcaaggtcaagccaactntagtggtgttgggtatgttagagt

SEQ ID NO: 11887 - DNA, 248 bp, Glycine max
  unsure (1)..(248): unsure at all n locations
ggcagcaagctttcttgaccttangcaaccttcttctcatccttcaagatcaaactatctactcgtgattggtccctttcctctcttcagagcttaagctcgctgatacttccccacagagcccctctaaatctgttccgaccatgttcttccctactacccctattggtatcttgttccaaggccttggtggctgctctatttacctctctcaatatggcattctgctctcagaccatgagagctgc

SEQ ID NO: 11888 - DNA, 420 bp, Glycine max
tgcggactataccttcgaccaaacactttcgtgtttctgtctatgcccggattcaaggtgggctgcagcaccggctccgcttccctaactatactagaggcggttgtggtggctttatcctctatggttttctgaagttttaacatgacctccgagatggaagccatttgatcttttaaggctgatagatcggccttcatctgttcctgcacgccctcttcattatccatttttctggatcgagtgttataggggtgccttggtgttttcttagttatgatgaaattcctaaagaaataaacaacggtgagtatgctaccaaaacatgagtatgcaaatggatgatcggagcacttggatccaccccaagatttttagataacgtaatgagtccagaacttctcattttataaaaagaac

SEQ ID NO: 11889 - DNA, 434 bp, Glycine max
  unsure (1)..(434): unsure at all n locations
agcttttctttctcaatcaatctgtctacctattaacaattctaaatgcaagttcacattcttgttttttctttgtctaacatacacactttctcaaactcatgaaaagaaacacaaactccatcacaatcatgcattcaatttaaaataaagacatacaccctgctatcaactaaattggtgaggcgtttatggaagttacgcctctccaattcagccttaaactcgtccagctcagtatggtatatttctaccttcctcttaggcagtatatgtcttcctagagaattatctgtgtatcgggtccaagcctcaaaggagtggaacctccttgtatcatactgagttgtgggccttgtaccaatactctntctctttcaggaagccatatgcagacaaaggaatcaaacatttgatcaggaatcaagttattc

SEQ ID NO: 11890 - DNA, 434 bp, Glycine max
  unsure (1)..(434): unsure at all n locations
tcagaccaaagcaatttanaatctatgtatctaaaaccctttaatttagtggattttcaaggtttgagaagtgaaaatgagaatggggtaaatttggagcaaactctcacctcaaacaagtctatatcatcaatctaaacttgctcaaactggtttttatgacaaaaattctaccgaatcaaaatttgactcctcaacacccaattttaccctagaaatggctcttgccttcactttggtcatttgtttttctctcttgcacaacccaagctttctcataagtcctaaatgaaatttcaactaggattaactccctttaacctccaaaaaccactaagtccagatttggccttccaactctcaaagcatcactctttttccactcataacactacattctcactttctaaccctaggttaactctacccttcat

SEQ ID NO: 11891 - DNA, 439 bp, Glycine max
  unsure (1)..(439): unsure at all n locations
agcttgccattgtattcacagaagacgaatttagaagacgttcctttttggaaggaaggagaagaacgaaaccaaggaagaagaagcttgcggggaggttgctgggtgcacgggagaagaaggaaaccacggaagaaaacgttttttgaaacggaagaagaagaaaatgtttttttttttataaatatattaacttttattttttaaatgaaggacattttaggaagttcattcaattgctgggtgcaccaacaattttgctgggtgcacctagtaacagcaaaaaatcatatgcccaaatactatgcgggttacatggactgttcacgggcccatatccaaatgtctggacctagatacaattccnccattaatattgcagtttcggtaatttttcgtcttttcattttaaataaaaatatttagtcatttttatttt

SEQ ID NO: 11892 - DNA, 427 bp, Glycine max
tgtatggatgtaagagacatcttcttctaccttggtaattcttgactccatctcatttaatcgcatgtccacttgtaactccaaagtatcaaacctttcaccaacaaaggtttgaagaccatcgaacctttccaaaatcttttgaagaatagaggaatcttctccaccttgtaaatgtccttcttcatcaattggttgagcaccatttttcacccaagagccatcatgctcttttcgataaccaaaggatgcaatcacagcagcgcctattagaaaggatctcttgattggaacataaggttcagaatcaagagggatgttaaagtgttgaaagaagagagtgactatgtgtggacatggcaatggagcatttaatcgcaatgccttatgcatgcgatatcggactaagtctgcccaatcaatttgt

SEQ ID NO: 11893 - DNA, 367 bp, Glycine max
agtttgatggtacgctaagtctcacatcttatgctaagcacatgctgcagaaaaaatatggtgttgcagaaagcgctgatcgcaacctgccgcgctaagccctagattatgtgggattctacaacttcgatttgggcttagcgcgaagctaggctaagcacttgggtttcaaacttatacgtcacgtatgcacactaagcacagctgtgcgctaagcgcaccatacgaatttcagtttttaaaaatcaaacgcacaggcacttgtgttgctacctttgcacccaaacctctgcaccctcttaaccttgagcaaatacttttactgtttgctacctgtgtaccgcttctctgtatcatcatctttact

SEQ ID NO: 11894 - DNA, 398 bp, Glycine max
  unsure (1)..(398): unsure at all n locations
tccatcacttgataggttagatccttctaccttcttcgtatggacataggtatatcttggttgctgctgagtatttcaccaagtgggtggaagaaattcctttgaatgttgatcaaggngatataataaacttcatagaacaaaatattatttttcgatttagtatcccataaacacttataacaggtcaaggcaccatttttattgatcgaaaagtggttcaatatgtcaattctcaaaatattaagttagtaacttataccccttattatgctcaagcaaatggtcaagttgaagccataaacaagattttggtaaggttaattaagaaacatggccaanaacctagaagttagcatgaaagtttagaccaaattctttangcttatcaaaattca

SEQ ID NO: 11895 - DNA, 243 bp, Glycine max
atcttctgccagtcaatcttttaagcaggtgtactttgtctagtcttccttgacgtagttcccgaaggagcatctgaaggtggaggggaacttgatgggggtgttgccatgggtcttgtccaaaattaaaataagaattacgaaacacaaagtaattgcaacaacatgtaagtatcagagttgtaataagcacaatttgtaaatgtagaatagttaatattttgagtaaacattatttggtat

SEQ ID NO: 11896 - DNA, 159 bp, Glycine max
tctaaactttgtacaagaatgtatctctgataccacttgttatacaagtggcctcagatatcttaagaaggggggggttgaattaagatattcgatactttttcttctaattaaaaatctatcttactttttacttaagttatgaattcccttaatgac

SEQ ID NO: 11897 - DNA, 440 bp, Glycine max
agcttgagaacaggtggcatgaatatgtttggtttggccagctgttcgaggattaaggggatgtcctacattatttccatgatacacatgcaacaatgatgattaggaaattttatgcaaaactggtcatgcatgcacccatgtggacactcaagcatcaagtttttatggtcatgtgacactagggctcaggatttattttccctattttaagtcaacccagtatttccaaaatatgttcttctatcaatttgtgcattcatccgagtctatcttgggtgttcgaaaaacttttcacagcatttacccttcaaatgtgtacacacatttttttcaaaaaaactggttaagatcagtaaaatctttcaaagaaaagttggaaattatctcttttcacaagcatgttgttttttagctagacaactttttattattatttt

SEQ ID NO: 11898 - DNA, 328 bp, Glycine max
caagtgaccttagatatcttaagaagggttggttaattattatatcacagactattcttttatttaaaaaattctactgttaatggaaccctacaacccaggatttcttttaaacaagaactcctacataataatgaaaattaatcttactaaatagaaataataagcaataagcaataaaggagtttaagggaagagaaaatgcagactcagatttatacgggttcggccacacccttgtgcctacgtccagtccccaagcaacccgcttgagagtttcactatcttgtaaaatccattgacaagttctgaaccacacaaggacaac

SEQ ID NO: 11899 - DNA, 445 bp, Glycine max
  unsure (1)..(445): unsure at all n locations
agcttctcactccctcgacatttataggagttggtagcatctcgattcttcaatcttagctatgtctacttcaatccccctcatggagattttgcggcccaacacaattccttcttgcaccataaaatgacattttccccaattaagcaccaagtttgcctctttacaccgctgcaacactcgctctagatttgctagacaataatcaaaagatgagctgaagatggagaagtcatccataaacacttcgatacatttctccaccatgtcagcaaagattgccatcatacatctctgaaaagttgcaggagcattgcaaagaccaaatggcatttgcctataggaaaacacaccacaagggcaggtaaatgttgtcttncttggtcatttggatccacaacaatctgattgtagccaaagtatacatctaagaagcaatagaatg

SEQ ID NO: 11900 - DNA, 419 bp, Glycine max
  unsure (1)..(419): unsure at all n locations
tcaagcttgtgctgacattntaatacataattgattcattagtatatttttcactaatattataataccttttcttcaacataaattactttgaattgcaagacttttctttttaatctccttgcatccatgtttcaaattatcatatatcattagtgagttaattgacatagagtagtgacaacttgagaatgacccaaagattgttgtgataactctcaagaatgaaaggcaaacgaaggtcaacttattatattaaaaatgtttttactctaaatgtttcaaagtctcatttttttatggtaccagggttagtacactcctatgcaatttgtgaggagcttttgcaatccaattgaaagcctacatggatatgagtcacaatganaatgggtcaatggtgattctatacagttggc

SEQ ID NO: 11901 - DNA, 442 bp, Glycine max
agcttcaaaatcaaaaactaaccggttgatgttcgacgaacgatgatgatcgaacttagaatggcgaagaacagggaagaacatccacagaatggatcactaaaacgtcacaaaagcattacagaagcacctcggcttggattttttcctactttcttcttcccctcgctaattttaagtgaaaactgaatacccaaagtgttgaaccccttcccttcagccccaaaggccattttatagaaaaaaggagggaggtggttgccgcctagctcgcccaggcgagctaggtagcttccacctgaagcaacctccatccagaatattctagatgggcctaggactaggtacacccccctaaattgatcagttcaccccgcaagttttgtatattgctcatttccttctgaaacgccgcgaaacttaacagattatgtggcaatga

SEQ ID NO: 11902 - DNA, 448 bp, Glycine max
  unsure (1)..(448): unsure at all n locations
tataagaacacaattgcctcaatcatttccaaatatgcatgttaattangatgttttaacaagaatcaagtcaaggctattgtgcaagcaatcaatggggcataacacaccaattgattatgatgatggatggctcaaattctcacaaaggtaaactcatcactttcaaattgagctttcaaaactatcatgacatgtagaggagaatcaaggatttcaagtcacagaatgtcaagaacttttattttcaaaacaactacccatttcttgaacatatcctataattcaaagaaaaacatgcaaagtcatacatgcacacaaaattgacccaaaatattaaactaaaaatccgacgaaactaacaacattaacaaattaacacatctaacaaattaacagaagcaacaaaactagcaaaaccaaagaacactcccccccatacttaaac

SEQ ID NO: 11903 - DNA, 450 bp, Glycine max
agcttcattaagaagcttcctctagaagctttattagaggcttctttcacactctagatatcttctcaaagatcccaacggttagattatggacaagtgtcttgtgaagttgcagaccaagtttcgagaagatccaacggttaatgaaggcttggaagcgtttttaccgaggcagcttcatgtagctttctctagaagcttcattaagaggcttcctccagaagcttcctcgtggcttctttgagaagctttctcaagaggcttctttgagaagctagattcttatctatccacacccctctattaactaaattaacttccttaaaaataattatggacgaaaataacgcaacaaataatcaaacatcaaacataattactaataatatatagatatatatatcagggtgttacaccaaccatgataaatgtcggagtcttgcttcgcac

SEQ ID NO: 11904 - DNA, 445 bp, Glycine max
ggaccaggaattatttgtatgggttggatgttgaattctgtttgttcctggtgttgagatgatggtacagcgggtgaaccagaagctgaagtttcttttggtgaggtagccatggaaaagcagagcgtttgaaatgatttcgtaaatctcagaaaactattgggaaatgctggtgaaaacacgaatgtcacgaaaatataaatttgaataaggaatgtagagggccgtgtgaagcaacggtcgaatttgccttggttcagtagtgaacgtgctattaatgttaagtgattcgtttgggcacgttcagatatcagtagttgctacaattcctctagcagacaaatgcccagcttgcccctcagtttttcaaactgatttgcatccaaagcctttgtgaaaatatctgctatttgttcctcagtgtcaacatgcttcagtgtgatca

SEQ ID NO: 11905 - DNA, 455 bp, Glycine max
agcttagaacaatatacttgtccttcattttactgtctttgggcttttcgaccacgatcaacaaagtactttcgacacctactatatgttgatttgaccaatgttgttatcggtatgttgcggcaatccttcaataccttatttatacattctgagaggttcgttgtcatgtggccatatcgacatccttctctatcataagcaatggtccacttttcctttgaaatgcgagcaatccatgttgctatggctggactcagatgacggaatttttctaaattttgataaaaataatatgcttgcaaggagtgtagcctgcatgaaattagttagcaacaataatttgaagtatacatgaaagttaaattaaggtgatcatgataaatgaaatcttacccaatttcttcaacatttctttttgtttggcattattgaatttgcgactgaaatacttg

SEQ ID NO: 11906 - DNA, 449 bp, Glycine max
  unsure (1)..(449): unsure at all n locations
tcagcttagaaacacaagcagaggcgatagaagtngattggattttttaattaattattctctagatttgaatatcaccttttcaccatcagagttgacagtgtcattgttcgacggttggcaagtgcaccggatctcgcaagtagtataaaacggtaagaactgagtatcgaactctcggggaacttgttttacttggtaaagatgtggttcagtaagtaagcgtcttgttataaaaggtttatgtgtagtatggacacatgtgtaaactaactaaacaaaggtaaataaaaggtgagcagtggtgggtgcgaaggtagatggtcaacatgttggtcttcctactaggcgactgatgctactaaagatgttctctacctaacagtgttcttgtgttctatgttgtctcctggactgctaaaccccgatgtctcatgcatgtttagcct

SEQ ID NO: 11907 - DNA, 346 bp, Glycine max
catactcaatagaaatatgtactaggatcattctcaaatagaaattgcgtgataaaaatctggtctcttattttaatgatattcattgtacctttaaaaacaactaatagttattttgaagaatgtaacccacaacttattcattttaaaaattaaaaggaaatagaatttgttgatgtgagaattatttggttaagagaaagtggaaattgtaataaaaatgttgacctagtgataactagttagtttagttgtcattgtcatagttcatacttcaagatttatatattatcaatggatgtggctatgtcggcacccaaattatgttgagccttttcgaagagtc

SEQ ID NO: 11908 - DNA, 392 bp, Glycine max
  unsure (1)..(392): unsure at all n locations
tgtgcattcaatatcctgatgaaggtgttccatatgttctaatactggactaatacatttgctgcccaagtttcatggtcttgcacgtgaagatcctcataagcatcttaaggagttccatattgtttgttccaccatgaagccccctgatgcctaagcagatcatatctttcttaaggcttttcctcattctctagagagagtggcaaaagattggttgtactaccttgctcccagattcatctctagctgggatgaccttaagagagtgttcttggagaaattcttccctgcatctangaccactgccatccgaaaagacatttcaggcatcaggcaacttaatggagagagcttgtatgagtatttggaaagattcaagaaaatgtgtg

SEQ ID NO: 11909 - DNA, 384 bp, Glycine max
  unsure (1)..(384): unsure at all n locations
agcttctcccctattttgctataaataggtttgagaagtgtttaaganaagggttcagcctcttaggcacttctctctctgtcgaaattgctgaggaaaattatttccgtgaagaaaatccaagccgaggcgcttccgtaacgtttccgtgagtcattacacgaagattctcgaccgatcttcaagactcatcgctcgatcttcgctgtcttaagacatcaacgggttagtacctcaaaccgagctctccaatatattctatgtacccgtggtggtccacatattgattcatgcattactattctcgtattcattggcatttataccccctttggcgcgcttagccatgtattaaagctttctcgctaatctaaaataaaaaca

SEQ ID NO: 11910 - DNA, 429 bp, Glycine max
  unsure (1)..(429): unsure at all n locations
ctccagcttagggatctaattgtttggtacagttttatataacttggttgaagctaaacttgtttatctattgcatcatgttatgtgaaaattttgttaaccaattagtcgtcgcgttttttaactaccaacaagtgattccctttagatgactaacttaaggaagggatgttgttcctcaattgggttcctagtccaaaccaaagaactttcttgtagttgatgaactacagtttatataccaaactactcctatgcaaaattgtggtaacggagcattgtatacagtcaaaagttgttaaaaaaggtaaagaaagttgtaaatggttgaaagggtaaaagaaatctaaatagctgcaaagcgataaaggaaatctataaatggtcggagaaacacgtaaaggaaagctatacnatacaaataaatga

SEQ ID NO: 11911 - DNA, 356 bp, Glycine max
agcttgaaccaatatccggtgagagtgtgttcttactctgtgagtaatgatctttgcatgaatctctgaattctagaaagatatgtataacttagaacatgatgaagtccatgatttgtatatacacaagctcttttgaccaaatagctcaccttgaatgataaatgtatcttttgctccttctataagctgaatgatttttgtcatgaattgaaccctaaacttaaatgattatctgctgataccttgtttagattctacgagagcatatggttcaaggcaaattcactctaacattgggggaggaaagtcaattaacatgaaacgaaaaacgttaagcatcaacgcacacaaca

SEQ ID NO: 11912 - DNA, 339 bp, Glycine max
  unsure (1)..(339): unsure at all n locations
tctatggaggatggatctttgaactttttaaggtcctttanttatattttcagccatggaattgcagtggaagataaaggagaaggggtgagaggaggcaccatccactagagaataagccatggaaagagaagcttcaccaccaagagagtgtcttggataagaagcttagagaggaagcttcaatgcangaagagaatgagagagagagagggtgggaattgaaggagattaaggagagaagttgaaatttgaagtgtggcttacaagtttctcactcatcaaagtcatgacaagtgttacacatgtttctatttatagcctagcacantgggaagc

SEQ ID NO: 11913 - DNA, 176 bp, Glycine max
  unsure (1)..(176): unsure at all n locations
agctngaaaccttttcttggacggcaatatcccctcttatatagacacgccgaaccccattgggtaaatatggacaaggggatcgtgaagctgaagaccaacatgtccttagtacctgcgcacaactgacgggcctaagcgctcatcaataccgggctagatgtacatgagaaatc

SEQ ID NO: 11914 - DNA, 381 bp, Glycine max
tcacgacattgtttcctagagggtattttagggtaggccttttctctttggcatgtccacgagcctgatgatctactgtcctgtgacatgtatgctgcctaaagcaccgcatttcgaccaaccatacagcctatggctgatccattaccatgatgctgattaagttacactgtgggtactgattctaagatgaacactctcgctaataggactgatctacggtgcatattcagagcatatcttcctggcaatggcgagccaatgtttaactatgaatgctttttatggtgtggctattaaaggatttatggatactatcaatctatgataggtacttctatgaagcatactcttatctgctcgcatatcgagcttgtggat

SEQ ID NO: 11915 - DNA, 412 bp, Glycine max
  unsure (1)..(412): unsure at all n locations
agcttaggttattgttcactgtatggntttctttaacctttgtctatccataacgcagagaacaaacatgaagaatgccaacattacattcaaaaatgggtcaaggaatcacaacgaaaagtgtacttgggaccttacctaaatcagtaagttgaattgatgttgtagaatatagatattatgtgcattattgttgcctaactaatgtttttcgtcttcaaggcacattggcaacttgttgttctgtgtccacgggacaatattgttgtttggttttgttctttgtgtaagaagcctgatgttaacatcaagacaacaatgaataagttagttttaacattaaaagtcaattgaaatattgcaattgtagggtataaagacaatgnatatntgaatatatacgttaacgtca

SEQ ID NO: 11916 - DNA, 436 bp, Glycine max
  unsure (1)..(436): unsure at all n locations
ntannaattgaattaaaaacgttcagtttctgctggtaatttattaccatatatgtgtaatcgattacacagtgcaaattttgaattcaataacttagacaaaagtaaagcataaataaaaagtgcacaacggaaaaataaagagggtagggaagaagaaagcaaacacaagatttatactagttcggccacaacccgtgcctacgtccagtccccaagcaaccaccggttcttgagatttccaataaccttgtaaaatcctttacaagcaaagatccacaagggatgtaccctcccttgctctctttgaacaaccaagtggatgtacgctccacttgaactgatccacaagagatgtatcctctcttgttcttagtattacaacccaagtagatgtacgctctacttgtaccacaaatgatatnatgctcaatat

SEQ ID NO: 11917 - DNA, 200 bp, Glycine max
ttctttggaatagagacttcttggtattcggagtggttcctttgcctcttttcgaaaagcctgccttccgaggttaaaatagtgctgcagtccattatacattcaaatgctcaattgttccacatactaatacttcttacatgaatcagacagctcttcgcgtatgggatggtatcttctatgaaggtgcttaagttata

SEQ ID NO: 11918 - DNA, 253 bp, Glycine max
  unsure (1)..(253): unsure at all n locations
ggggctcttgcctcactcaccgtctttntggtttcatttttagctatcttatacttatcccaagtttcagaatttctacacctagaccactccttgaaacactccttttttactctaactgtgctctgaacattttcattccaccaccacgattctttacccctaggtccaaaacctctagattcacccaacgtctctttagccactttaataatctcttgagacatcttgttccacatatcatttgcacttt

SEQ ID NO: 11919 - DNA, 227 bp, Glycine max
agcttgtgcgaatcaaatctctcctgcattttatctctagcatgcattctttctttctttacccactcctcatgtttggctttttaggaaaaacaccataactaaacgcaccacaacgcatccctatcgcaccagatccaaatctataacgatgggtgatcaagaggagacacaggaacagatgaaagccgacatgtcggctctgaaaaacagatgggcttcatgat

SEQ ID NO: 11920 - DNA, 283 bp, Glycine max
tgaaagtttactggatgcgttggtcaacttggtaacccttctggccttgaatcagaaatctgtacctgtcgcaagggtttgtggtctgtgctcctctactgaccaccatacaaacctttgcccttccatgcagcaacctgaagcaattgagcaacctgaagcttatgctgcacatatttacaatagacctcctcaacctcagcagcgaaatcaaccacaacagaacaattatgacctttccagcaatagatacaaccgctgatagaggaatcaccctaacctc

SEQ ID NO: 11921 - DNA, 441 bp, Glycine max
  unsure (1)..(441): unsure at all n locations
agcttgcatttttggaaaattctagggttcttctcttaaacaagattatgcttgtgctttgggtgctcaattttctactctagttttcaaaggggttttgtgaaagaatcaatgatggaccagtggtgatgagtttaacacaccagttatcaaaattaatcagtgaataaggaacctggaaaattccatgcatttctggcaaaaggatcaagaagtcttagtagcctcacagttttcaagatagcgaacatatctaaggtgaggatatatgtcatataagcctagcttattataaatgtagccaacacaagcctctaaaggacatagtgaacatgtcagtcaatagatcactgcagttgataaaatcattngtgattttcccaaanaggaccttctctctgacaaagtaacaatctatctctatgtatttcattcattcat

SEQ ID NO: 11922 - DNA, 441 bp, Glycine max
ctttggtcaagtggcttgtataaacaacaatggccttcatttttaccaattcattcatttcattctaaatttcagagattgatgcaaaaattattactctatgctagtcgttctctcaacaattaagttcacactctcactagtttatgatcaagcttttctttcacaattaatctgtctactaactaacatttctaattgtgagcctactttcttgttctttctcatctaacatacacaattgctcaactcatgataaaacataatcttcatttcaatcatgcattcattccacaatcaccatttcaaacttatatcaacactgcattttcaaatagtcaagttaaactgttctttatgcatcaggactttcaaaatgttttcaaaacaaaaggtatgttgtaaaccatattcacatgtcacaaaccaaaatagttcata

SEQ ID NO: 11923 - DNA, 438 bp, Glycine max
  unsure (1)..(438): unsure at all n locations
agctntagtctgtatgtgtataaaaagaagtacattatgatagagtatagagaatatactacttgggaaagaggggcaggggttaaggatgagattcctcccaaaccaaaggaagacagcaatgaggctaaacattgctacaaagccgtctgcatatcagttattgaattccccttttaaacaacaataagtgagcttcctagagaaaatataaaactgaatctatagcataacagttgtatgggctaagagtcctcttgaaaacatgggcattcctctccaattaaatacaccagagaagcacaacaactgcacactgctaatctgctactaaatcacagaacccttaattagacagaaaaaccaggtgtttaaattcagatggtcagaactcataagcccttttgaatcctgggttaatatataggtttaagtgat

SEQ ID NO: 11924 - DNA, 448 bp, Glycine max
tcaagcttcttctgatccaaggatctaactctactttctttggtaaatattcttcattagttctctttactaatggttctggattcaataatatactgttaggggatgaatttaatcttaaaagcaaatctatagccccctcggtttctctcggcatatgaaaggagagacgttgatcaagttgtgactgacctgattctctttcgttgctgtccatcaaaggacactaatatatctgttggtcatcaaattaaacttacgtttgcgcgtaacccttccatttcaataaacacgtgtataaactacaaattgcatatcactccacgctgcaccaactttgctcttttattcggaggtattaggaattgtggtcggtatgtcacggcatttaaaatgtgattaaaattaaacttctttcatgagcacaagtgtaaacatacaaatggtc

SEQ ID NO: 11925 - DNA, 453 bp, Glycine max
agcttgataacacgcagagactaacgtctgctttctgcgaccttcgttaatcgcggtcgacaagcccgttgacacgttgagatttacgtcatcttccgcgctcacaagatctgtcatactgacttttgagccacgctgacgggcagaaatacccgagtggttatccgtataaactttttgttgtctgtaagacgaaaagcctgatagcacgcagagactaacgtcgtcttctgtgcccttcgtcaatcgcggccgacaagcccgttgacgcatggagatttactttatcttccgcgcttacaagatctgtcatactgacttttgagtcacgctgacgggcggaaatacacgagtggttatcccgataaactttttgcattctgtaagacgaatagcctgatagcacgcagagactaacgttgtcttctgcgcccttcgtcaatcgcggccgac

SEQ ID NO: 11926 - DNA, 446 bp, Glycine max
  unsure (1)..(446): unsure at all n locations
cgtcggccgcgattgacgaatgtcgcagaagacgacgttattctctgcgtgttataaggctttacgtcttacagacagcaaaaagtttatacggataaccactcgggtatttccgcccgtcagcgtgactcaaaagtcaatatgacagatcttgtgagcgcggaagatgacgtaaatctccacaagtcaacgggcttgtcggccgcgattgacgaagggcgcagaagacgacgttattctctgcgtgctatcaggcttttcgacttacagacagcaaaaagtttatacggataaccactcgggtatttcctcccgtcagcgtgactcanaagtcaatatgacagatcttgtgagcgcagaagatgacgtaaatctccgcatgtcaacgggcttgtcggccgcgattgacgaagggcacagacgacgacgttagtctctgcgtgcta

SEQ ID NO: 11927 - DNA, 455 bp, Glycine max
  unsure (1)..(455): unsure at all n locations
agcttctctactgctgctactactaatgagtttcaaaatttcaaatctttgaaagtgggtccatgccaaagcctagctcttttcaagaagccaaacaaggttttagacagaattcaggtgaaggtggtagtgaagcagttcttggtgaagagaaaaggaaaatctacacaggtcctaatcccttgcataacagatgagatgacattaatttgtttcgagcttttggacatttctttctttgtttcaatctctcttaatttacatatttttcttcatttaccccttttttctttttgagtttttcatttcctcacatatgtttttagaatatgttgttgatttttgatagaccaggttcttctggtgctgtacataagaatgtagcctttagttacaagtaacaactcaatattatagaaaacaatnttgacctgtgaacaattcgggtatgttat

SEQ ID NO: 11928 - DNA, 447 bp, Glycine max
  unsure (1)..(447): unsure at all n locations
tgtgcattcaataccctgacgaggatgtcccatatgttcttttactggactgtccacttgttgcccaagtttcatggtcttgcaggtgaagaccctcataaacatctgaaagaattccatattgtctgctccaccatgaaacctccagatgtccaagaagatcacatctttctgaaggcctttcctcattctttagagggagtggcaaaggactggctatattaccttgctccaaggtccatcacgagctgggatgacctcaagagagtattcttagaaaatttttccctgcttccaggaccatggccatcagaaaggatatttcaggcattaggcaactcagtggagagagcctaaatgaatactgngagagatttcaaaaactatgcgccagttgccctcaccaccagatgtctgagcaacttcttctccaatatttttatgaag

SEQ ID NO: 11929 - DNA, 457 bp, Glycine max
  unsure (1)..(457): unsure at all n locations
agcttccatcaagtggtaatcagagcacatttgcttcaagtaggttcttcttaaacctccattaatttttttgctttaccttctcttccattgttgtttcttcatttttctccatgtatctcctcacatgtctagtgctaaatgttgttaacatgattctttagaatttccaccaattaaaatagctatagaagctagatttaattttctatggttcaaatttcttgttcatgttcttgaaccatgagttgtgttgagtttaggttcctttgagttttgtcttgctatttttttgtggctgaaacctaaaacataaaattcttacaaaaatattaaagtagaagaaaacctcaaaaatctagagtgacttgttcacctgttgtagttntgtcatagaagtcatgtctagtcatgaaacttgtcacataagatttcttatgttgtgctcgaatttatt

SEQ ID NO: 11930 - DNA, 446 bp, Glycine max
  unsure (1)..(446): unsure at all n locations
gcttgaagcaagagtcggtttgagagcttgagatgagtttgtgtgtgattgtgagatctctagaggtgaaggagacatgctcaccacttgtatttttgcaatctttcatcttgttcttctctttgttgtaaagaaggcttcctggtatggaaagctaaatcctttgttggatcttctctgtaggtacctgatgtaaatatatttttatctatttaataattttttgtgtgttctctgtgctatctgcttttcactccagtatgcctttaccttgatcacgtagatgcatgctttgttagggtcattcaacagtggaaactggtctaactctaaagtccttgatagtgcagggctaagttgtcgtactttcacgaggaattgnggtgcgataagttagttgtgtatgtgtgtcttaatgcggtcctagttgagtttagtcttacaag

SEQ ID NO: 11931 - DNA, 368 bp, Glycine max
agcttttctctctttttactcagccaaagtttatattcagaagctctgcctcttcctcacgctgctgtttccttctgctgcattctgcattgaaaccccaacgaagctccaaccttaggccatcatttcttccccacatcgtgaaaggatggcgtttgtggagtcaagaagtgcgtggctactagtgggactatcaaaattcaggtttgggcggacttctttctcctttgattatcgtgggtatgggaggtggggagatatgatgggtagtcttgctagaattctgcttcatgatagctatttgtgaagaaacttgttgaaagcttgttgaaattgccatgttaggatgagataaacatacccactct

SEQ ID NO: 11932 - DNA, 447 bp, Glycine max
  unsure (1)..(447): unsure at all n locations
acacttagaatactaagcttgtagaattcacccaaattctggtattgtatgctaactttcttccatatctactcaataatgcaatggtagccataaccccaaccaaggttcctcaacctccatttttctgaggatacaactcgaacgcaacatgttcttatcatggaggagttatggggcattccgttgagcattgtatgaccttgaaacataaggtgcaaagtctaattgatgcgggatggctaaaatttgaggaggataatcgcttgtgaattctgacattggcaagcgacactatgtatggngcaatgtgaaggttgttgttagatgtctccaatgactcattangattttaaagtttatgtcattactggaaacaacagtcacaatgctaattatatggatanagttgatgtctctcattctctcaattacatctttgcttac

SEQ ID NO: 11933 - DNA, 337 bp, Glycine max
  unsure (1)..(337): unsure at all n locations
gcttttagtaatatataaataaataaatttattagagtttataataggctgagtaccctaggtataaatagttatgttaagtcagctgccttcctttggcctcattttcgttnttccccttctcctctcagaaccctttcttttttcccgcaccccaccaaaccagtctcagaanaacgacgatctcgaatccgttcaccggtggatcgtcgtgaaatttgagtatcatgttcgcaacacaattccgagcattcttaccgtggggaatttcgatatcatgtctgaaatgagagaaaaacccttcgcattgtagcctttttctttcccgcagaaaatc

SEQ ID NO: 11934 - DNA, 442 bp, Glycine max
  unsure (1)..(442): unsure at all n locations
tgacctttaaactcagctgctggggcttctatggaggctttatcttggctttttgaggtcctttaatggtgattttccaccatggagatgcagcggaagacaaaggagaagaggtgagaggaggtgccatccactagggaataagccatggaagaaggagcttcaccaccaagatgagccttggataagaagcttggaaggatgcttcaatggaggaaaagaaagagggagagaaagagagaggggggagcacgaaattgaaggaagaaaaagggagagaagttgaactttgagttgtgtctcacaagactctcattcatcaaagttacaacaagtgttacacatgcttctatttatagactaggtagcttccttgagaagctntcttgagaaaacttccttgagaagcttctttgagaaaacttccttgagaagctagagc

SEQ ID NO: 11935 - DNA, 433 bp, Glycine max
  unsure (1)..(433): unsure at all n locations
agcttacggtgatctatgatgnacgcatatttgattcagcacgtagaacttctctgggtgaattatgaattcaatagtataactaccgctgcagatcaatggaactggctgttgctaatatatgacagtatcttaaatcttcaaaggttggttgaattaagaaataagcagtagaatgactctgtatgaaaggatatgcaattatgtcgtaaaaatgagagggactactccacgaacaatgactatgcacatttaattntatttaccacaaacagtttgatgtacttgaacacatgtaatactggacaagagaagccactactgtgctataaatcaagagagataatgactccaaactaatgatatttagtacgaataagttctatatacactatcgatacacttagttgttataataaaaaatactacctac

SEQ ID NO: 11936 - DNA, 444 bp, Glycine max
  unsure (1)..(444): unsure at all n locations
gaccttagatactcagctgagtttaataaatggatgataatttttccccaatatacatataataatattgccaaatccctatcctttgatgttgtcgaactattcttgaagaagattctatatagacgtagatcaatatatagagtgtggttacattaattagggatcaaataatggtatatcaaaatcttgaagaaagaagaatttcaaatgctactacgtaccattgtggcataaagatgacactagcagaaagattgttaattaaacaacaggaagaatataagcaaagattcttgaagcaatacattgatgcctctcatctcanatgacaaagagattcaatacaacaaagcaacgattgtttctgaaggtagaaaataacttactataatgttttggattgccgtttcatttgaattgatgtactaaaaaacaacattc

SEQ ID NO: 11937 - DNA, 423 bp, Glycine max
agcttgccacccatctcgcccaggcgagcatggttgcttctttcagaagcaacagccttctggaggaagaatctggaaggcccaagtgggcctgattgctatttgctgtacccccctttttactaaatgcactccctttaccttttttggtaattctttttccgtaacgttacgaaactttatgaatttcgtaacgatacttattttccttccgcaaggttacgaatccttacggattatgtatttactcttttttagctttcgaagaagttacgaaaactcacagattgcgaaaaacacctcctttcgatttccgtcacattacggaattttcacggattgcgtaagcctgcttgccttttattttcggcacgtctcgggacttcacatattgtgcaacaaagggtgccaagtatctcgaag

SEQ ID NO: 11938 - DNA, 435 bp, Glycine max
  unsure (1)..(435): unsure at all n locations
agaattatacaataacactntntgctcaaccatgaagtttttcttaattatcatgctatcatggaacttcttggtcttttctttgtagaacttggcattctcatacgcttctaggcggatctcatctaactcactcagttgcaaatttctttcctcaccagcttgatccatagagaagttgcaggtcttcactgcccagcatgctttgtgctcaatctcaactggaagatgacatgcctttccaaagacaactcgataaggagacattcctatgggtgctttgtaggcagtcctatgtgcccaaagagcatcatctagcctggtactccaatctttcctgcttggctgcacaatcttctctaaaattctcttgatctccctgttagaaatttctgcctatccattggttttggggtggtctggtgtggatactcn

SEQ ID NO: 11939 - DNA, 416 bp, Glycine max
  unsure (1)..(416): unsure at all n locations
agcttgagtcctatttcttgtgataatatctcaaacaaaatgggttttctaatactgaccttgcattgacaattccattattacatccttgaatattttattgctatattaatattcaacagccatcaaatgaagttttttttatcagtcgccatcaaatgaagatggacaagataaccatgctacaataaatattttgaatacatcataagacatatttttaaatgaaacagtaagaataggaaataccatgtaaaacatggctttctggtcgtatctaatgacgaaacatatgtctacttgcgacatacaggatgagcataaaagacattaggttgcagaaaagactntcacttacntgaaatattttatgcatataattcatactagctntgatgggttgattattaattctt

SEQ ID NO: 11940 - DNA, 434 bp, Glycine max
gcttcaggttgctcattgactccagattgttgcaaagaaggattatatctgtatggtgatttgcagaagaacatagaccacaaactcttgcaacaggtgcagatttctgattcatggcaagctgagttactaggttgaccaaggcatcaagttttccctcaagctttttattttcagtagatgaagatgaatctgtggccacctcatggactcctctaagggcaataacatcatttcttgcactaaattgttgggagttggaagccatcttctcaataaaattcctagcctcagcaggggtcatatcaccaagagctccaccaatggcaacatcaatcatactcctctccatgttgctaagtccctcatagaaatattgaagaatgagttgctcagaaatccggtggtgaggacaacttgcacacaatttcgtg

SEQ ID NO: 11941 - DNA, 170 bp, Glycine max
catatggcggacgatgtgggtgaggatgttcctcaattggctgatgatgttcctcacacggctgaggacgttcctgacgcggctgatggtaaccccaacaggacaagagctgacgatggtgctgagtctgatggagtggctattgatgggacaactgatgatgattaggg

SEQ ID NO: 11942 - DNA, 392 bp, Glycine max
  unsure (1)..(392): unsure at all n locations
tcatgatgttgaatcaagtatgtttcaagtagttcttatgatgacaaaaagcccaaaagaacccaaaagaatgatttcagatttagtcaacaagttcaagatcaagattgatttcaagattcaaganaagacatcaagaagaatcaagattcaagacaagatgaattcaagattcaagagaagaaatcaagaagcaacaagtcaagacttcacaagggaattattgaaaagggattttcanaaaccaaacataacacagttttgttntacaaaagagttttctcanatttttctaagttaccagagtatttactctctagtaatcgattacagtttttctttgtattgattaccagagatagaatttgatttcanaaagcttttaactaaat

SEQ ID NO: 11943 - DNA, 234 bp, Glycine max
agcttcagttttcaatatttagcgtcgcgatatactacaggacacaatcggacatccgagtcataagttattgtcgtggaatttgctcagagcttctgattcaattacgagcgtgtagatatataacgggactcaatcggacatgcgggtaaaaagttattgtcggttgatttttctcagagctttagttttcaatttcgagcatctcgatatactacaggacacaatcggaca

SEQ ID NO: 11944 - DNA, 214 bp, Glycine max
  unsure (1)..(214): unsure at all n locations
nggaagaatcataattctgctttacacaactatttggagtgtttactcaagactgtgttaggattgggaattctagatcctccaattaactcttgtttttgctcatagatcggctcatagaactgccgatttttcggctcattctgcttgaatgtaaagaaagatactgggtggaggagatccttcaccacttaaaagtctatcatctcttcta

SEQ ID NO: 11945 - DNA, 433 bp, Glycine max
agcttgttgacatgtggagatttacgtcgtcttttcgtgcagacaatctatttcagtatctaactcgtgaagttagggggcaggcggaaatacccaagtggttatccggataaacattcttttaatatctctaagactcaacgcatgatagcatgcagagactaacgtcgtcttctgcaccttttgtcaatcgcggccaacaagcccattgccacgtggagatttacgtcatcttctgtgcagacagcctctgtcagtactaactcgtgaagttagggggcaggcggaaatacccaagtggttatccgtataaacattcttttgctatctctaagactcaacgcatgatagcatgcagagactaacgtcgtcttcggcaccctttgtcaatcgcggccaacaagctcgttgacatgcaaagatttatgtcatc

SEQ ID NO: 11946 - DNA, 435 bp, Glycine max
gaccttaaaactaagcttctccctatttgcttaatgggggagaaggaagattataaggttcattcccttaggcacttctctctctctcgaaattgctgaggaaaattatttccgtgaagaaaatctaagccgaggcgcttccgtaacgtttccgtaacgtttctgtgagtaattacgcgaagattctcgaccgttcttcaagattcatcgttcgttcttcgttttcttcagtcttcaacgggtaagtacctcaaaccgagcttttcaattcattctatgtacccgtggtggtccacattttgtttcatgtatttttattctcgtattcatttgctttttatacccccttttgacgtgcttaagccatttatttaagtcatttctcgcttaatctaaaaataaaataaatttccaccgatcgtttgaattgtatca

SEQ ID NO: 11947 - DNA, 444 bp, Glycine max
  unsure (1)..(444): unsure at all n locations
agcttctcccccattttctataaataggttttaagtgaagtagttatggttcagccccataggcacttctctctctttcgaatttggttaggaaaattgtttccgtgaagaaaatctaagccgaggcgcttccgtaacatttccgtaacgtttctgtgagtgatttcgcaaaggttttcgaccgttcttcgacgttcttcaccgttcttcatccgttcttcgttcttcaacgggtaagttttcgaatccgagactttcaattcatttcttgttttttttaagctttcatctttatttcgttcattttcgatttcttttcttctgtctttaacgcgcttttactgtttatttaagccgttttctcacctaataaatgataaaatgaatntcaaccgatcatttgtgttgtaatctcatttaatcacttttaaaacgaaatctaac

SEQ ID NO: 11948 - DNA, 435 bp, Glycine max
  unsure (1)..(435): unsure at all n locations
atcaaaaactctnttctctctttttctcttaactgttattcattcttttttccctttttcacttttgtacttactttttcttgcgcaaatttcatggcttttccactggtgatgatcatggaaggctaaacactcaatcaatccaaggatccactccatttaaggttgaatttgagttttgatttagtatttctaatttgtatgaatgttcattgttttcttcaatcctgtttttgattttcatgattatgaatatgcttaggattgaaaacaaattangttagagattcctttcctaatttcaaacttaatcacagattgtttggatgatatttcaacctaatttgcgatctcaatgaatttagggattaattcaattgaactaactctaatgagattgattgaaccttcacaacttgatctttctctgcataa

SEQ ID NO: 11949 - DNA, 303 bp, Glycine max
  unsure (1)..(303): unsure at all n locations
actaccttgaanattttctttgatagctctttgagtcttgtttcccttccttggtttgaagctcactacaagccttaagtgaaaaaccatgatattaccatatccttaaggaattttggagctttggaattgttttgggaataagtgtggggggtttttgtttcattggacaacttgttttgttggctatgcttcatgatgtattttgggccatacttgatgtacattgtatataggctaaaggttggacacgctgaatgatgtgctgctcatcgatgccttacagctaccaaaaaaaactct

SEQ ID NO: 11950 - DNA, 429 bp, Glycine max
  unsure (1)..(429): unsure at all n locations
gatggaccatttcaagtgcttgaaagattcaatgacaatgtttacaaagttgagctttccggtgagtataatgttagttccaccttcaatgtctctgatttatctcttttttgatgcagatggagaatccgatttgaggacaaatccttctcaagagggagagaatgatgaggacatgttcaagagcaagggcaaggatccacttgaaggacttggaggacctatgacaagggctagagcatggaaagccaaggaagctcttcaacaagtgctgtccatactatttgaatacaagcccaagtttcaaggagaaaagtccaaggttgtgagttgtatcatggcccanatggaggaggactaaatgacaccactttgtctcaattntagagtgtttagtttgtctaaataatggcccaatccttgtaaagt

SEQ ID NO: 11951 - DNA, 429 bp, Glycine max
  unsure (1)..(429): unsure at all n locations
tgcaagctctaactcttgatataggttctatctattcttttcgttcattttgctttttgttttcattttttgttgttctgttatctttgtttgacttgtttctatttgatttgtctattcattttttttctagtgatcttttgtcttaatatttttgtgctttgggtatattacaaaaaatcaaaacaaaatgcttttatttcagtgttctacaaattcagctttaatccacaaatcaaaattaaaaaaataaaaataaaaattcgggtgattgttgattaaatcttaaatcctaattttcacttagttagaggcgtattttggcaaaaataagtgaccaaatcccctattagcctttntttcgttntgtcgtgtgattcattaccaactgtgagtctattggattgttcttgatgcgtccaatctgat

SEQ ID NO: 11952 - DNA, 447 bp, Glycine max
ccgcaagacttacggaaagatcttagagttgaccttagtctaggtatccattgaagccattgcatcactcacccaatactacgaccagcctttgagatgcttcacattcagagacttccaattagtaccaaccattgaagaatttgaggaaattctaggatgtcctctcgggggaagaaaaccatatctttcatccgggtgtctcccctctttgagcagaattgcaactgtggtcaaggattcagcaagaggtttggactgcataaaacagactcggaacggtaactgtcttggcagatctatttgacacatttgaccgaaggtgcgaaaagagtagcgcacggatcatctgttgcttgcccgccctctgtgtttggttggtttcgcacttgttccaacaagacacaagacatccatgtccgctcctgagccatcgctcgtgtactg

SEQ ID NO: 11953 - DNA, 444 bp, Glycine max
gcagctattcaaatgaaagaattcaaattttagtttgagatattaccacggaagagaatttcaaaatgactctgaattgttttgtgaacaaaatggcattaatcgtaacttttccgctccaagaacaccacaacaaaatgggattgtggggaggaaaaaaaagtcccttgaggaacttgttagtgtttagctctactgagctttaaaagattggctaagattttgttaaaacataagcacttagacaatgaaggaaagctggagttgctgcacatgatgtccaacgctatgtcaaggaataagatcgggctgcacaatgcacaaggcaagataaaatgtcaaatgaagaattgaagttgcaggatccacgatgtcggatacaatgtcctgacatcctgcccgagaatactggagttgctgtacaatgcaagataaaagtcaagt

SEQ ID NO: 11954 - DNA, 387 bp, Glycine max
gctttcacacatgaacaagatataaatgaatgggtcacaccttaatcgaatagctattcaaggaaatcccacttaggaaacatttaccttggattagatctttggatttttaagcctcgacaccgttaagagtaaagactcttctcttggcctttagacgtccaatttggtcatttagacctccaccattctgttcaatatctttgaatatgccccttttgtctacaattgaaataggtcatgtctttatggcacaatttgaggagatgtggcatgggttaccacacttgaaacaaatgatctgggttgagaaagtagtgggttttctacccttaccaccagcaaaccccgtaacagtagtcctctgattggtgggacgattaccat

SEQ ID NO: 11955 - DNA, 413 bp, Glycine max
agcttctagtctcttatatgagcgacacgttatgtttaccactacacatcggacatccgaggggcaagcggaagtacccagaatggcctaccggattaacattcttataatatctctcatactctacgactggactcacgcggacacgaacgtctacagttgcagcttttgccaatcgcggacaacatgcgccatgcaccgtgagcgattcgatctatcacgggacagaacccgacatccagacttaaaattcatgtcttgtttagtttgcgcaaacactccagtgtgcattcagagccgaatgatatagttccgccattaacgcgccgttacagttcatagaaaccgttctctcacctaataaatgacttgacgaatttcaaccgatcatttgtgtagtaatctcatttaat

SEQ ID NO: 11956 - DNA, 308 bp, Glycine max
tctagtctcaattgtgagcgtgtcgatatatcacctaattattcggacatccgagtaaaaagttatagtcgcttgaaaaagctacgagcttccattatcaacttggagcaggctcatatattacgggactcaatcggacagccgcgtataaagttatggacaattgaatttgctaagagcttccgttatcaatctggagcgtctcgatatattacaggacccaatcggacatccgagcataaagattttgtcgatgaatgagctacgagcatgcgtagaaacctggagcatctcgaatattaccggac

SEQ ID NO: 11957 - DNA, 313 bp, Glycine max
  unsure (1)..(313): unsure at all n locations
agcttcttcacattttccgccgaagcangatcttctntattcttaanaacagaaacattacgcttacgcaaaagatcaagaagagtgagtggattaaaaccatatacaaccttcgaaggagaacaacttgtggtgctctgaacagctctatagtaagcaaatgcaacatgggcgtaaacaagcttcccaagatcgtaagttattcctcctaactgctctaaccggagagcccaaagacctattaacaacttccgattgcccatcggtttgagggtgacatgtggatgaaaatcacaatctagtgcccaacttg

SEQ ID NO: 11958 - DNA, 380 bp, Glycine max
  unsure (1)..(380): unsure at all n locations
ntccaatctccggaagttcataatttgttttggcttcatttataggatcttcattgcttccttctccttttcctttagaatcttgtccatgaatatgcatttgttctaaagattctgcaatatcatctaaaatatcctttcttggaggaatagcattagagtcatcaaaggaaacatgaataaattcttctatgatcatagttcttttgttatatactctatatgctctactttgcaatgaatatccaagaaagatgccttcatcagattttgtatctttacaatttgataccctanaatactcatccactcctaagacagatataattatgtttttggcttttaagttatattgtactcgtcttctttcttcctcactc

SEQ ID NO: 11959 - DNA, 359 bp, Glycine max
  unsure (1)..(359): unsure at all n locations
agcttcaaacttgttactaggagtcgagttggtaaaaaagattcgtcttcaaactcttagaggtgactttgagcgtttgtttatggaggagtccgagtcaatttctgattatttttctcgagtattggccgtagtcaatcaacttaaaagaaatggtgaagatgttgatgaggtgaaggtcatggaaaaaatacttcgaactttaaatccaagttttgacttcattgttaccaacattgaagaaaacaaggatttaaagactatgactattgagcaactcatgggttccttacaagcgtacgaagaanaacaaaagagaaaaatttaacaaaaggaggctactgagcaactactacaac

SEQ ID NO: 11960 - DNA, 384 bp, Glycine max
  unsure (1)..(384): unsure at all n locations
tgccacccagctcgcccaggcgagcattgttgcttcctctataagcaacagccttctggaggaatcttctgcagggcccaattgggcttggttgctatttgcacccccatttttactaaatacaccccctgcctttntttggtgattcttttttcgtaaagttacggaaacttacgaatttcgtaacgatacttgttttctttccgtaatgttacggtaccttgcggattacataatcatccctttttttgacttacggaatgttacggaacctcactatttgtgcaacgatgcttccttttgatttccggtgtgtcacggaaccttacggattgtgcatcaatattttctttngatttccggcacgtcacggaatntcacaaa

SEQ ID NO: 11961 - DNA, 442 bp, Glycine max
agcttctattgcactcatctgctcccaaatatacattctatataaattgtctaatttaatctcatcatgattcctacttcaattggcattgggcttcgtaaaaaaacaagaattgaagctgtctatcttttccatggagcatattgatgctgagaaaagcataaacgaatctgagaggaatactcataaataacttacaattgaaagttatgaattgcacaaaaggaattaatatgcatatacaactgcggagctgttattaaatttttagggtgccaggcaattctgaatctgatttttttttcttattctggtaaattacttttgaatctaaatttaacaacataaattgcgatgcagtatctctgcattcaaatcagttgaagatggagctctgaacgacatctacaaaggtggtggtaccagtagcaattagcctatt

SEQ ID NO: 11962 - DNA, 434 bp, Glycine max
  unsure (1)..(434): unsure at all n locations
ngaagagaagaatgataaaactttttcatgagaaaggtctatatctaattgtagaatatatgatgagatccactcaataagtaaatgttctgcatattttaaattgttatccttgaatgctgataatgctgcaattatatcccagagaaccagaggcttatcatgacattgatattggtttaaagaccatatgatattggttccccaataagttaattctttctccacataactggaatttccttcaatgtaacatgaaaagggagatttcagctgaacatccacttgtagtccaccaatccaaaagtattcaatagctgccctcagaatcctgtccaaagttcaagaagaatgtcaaattttcacatttgtaatatttctttcaagaaacctatatttagtaaaagacaatgggtacaaaagataattacaga

SEQ ID NO: 11963 - DNA, 282 bp, Glycine max
  unsure (1)..(282): unsure at all n locations
ctcagctgccctttaatgttctgtctcttctcagggagatgttatcttgataagctntagagggtcattcctcataatgtgtgtaatgttataaaagtagcggtgcctcttgacatatctcgacggaatgatgttccagcttagagacacacaaatgatggcaactttatgattaaatcctcttacaaagcaattgtggctcanaaagatgataatggcctttattacgcactatatgaaagtagcgatggcctgaaagaatgagagaattcattcatggaa

SEQ ID NO: 11964 - DNA, 313 bp, Glycine max
agcttttgtcactccacctatatctggctttgttattaaccagacttaaaactgccgacaacagcgtcaacgaattcttgcaccccggatacaaaggtttctttgaatcaggttgtaatgtatcatacataagggcatgtgcttgctgaaaagactcttgtgcaatgtcacgaatcatatcctccaagcgatctcccatttctacatcaaacggttcggattgttgcccactctgcatgtctgtcatttcaccatgccatatgcacgtcggataattcctcttaattccatcacacaacagatgctctcgtat

SEQ ID NO: 11965 - DNA, 169 bp, Glycine max
  unsure (1)..(169): unsure at all n locations
tctcaaggaagttntctcaatgttgctacctagtctatatatagaaacatgtgtaacactcgttgtaactttgatgaatgagagtcttgtgagacacaactcaaaggtcanaatctctccctttttcttgccttcaattcgggcctccccctttttctttctctccctc

SEQ ID NO: 11966 - DNA, 295 bp, Glycine max
agctttctaaacatgtacattatataaatttttgtggtaccttctaatttaaaaaggcattgcaatatagaattgtgctaaaaaaaaatgttaagttggaaaaaaggatataaagaaaaatttacttggatttgtagaaaatgattttaggtgaaatttttaccttgatgaaaagataattctgtaagcttcaatatagaaaagtaaaacttaatttggttgtggcaaggattagaaaaatgcatatctttgaactagtgtaatttggaaatcaaatgttgccttgtagaacttt

SEQ ID NO: 11967 - DNA, 349 bp, Glycine max
  unsure (1)..(349): unsure at all n locations
ntgcgagattcctcacggaattcgttacggaaacgtnttttaagcgcctcggcttagattntcttcacggaaacaatttttccaagcaaattcgaaagagagagaagtgcctaaagggctggaccctttccttcttgctttcctcccctatttatagcaaaataggggaggtggttgccgcccagctcgcccaggcgagctcagctcgcccaggcgagcagggttgcttcctccagaagcaaccgccttctggaggaatcttctggagggcccaaatgggcctgggttgctattgcacccncattttactangtacacccncctctgctattttttggtgattcttttt

SEQ ID NO: 11968 - DNA, 446 bp, Glycine max
  unsure (1)..(446): unsure at all n locations
agcttctgtgtgtgaactccatgcagaaacctatgagaggatntgttttttgaatgtctgccctcatgaagtcatccacagcctcttctacaataagtacaacgactcacttattacggtattcgttaatgctcatgagatattcaactctttcaaatgcagatccaaaaacattgagtgattgcattctgtgtctatccattcaaatcctcctctttgatcgatgtttaaaacttattttgcttacatgatttttcatttatgttcttagatacattcggaggggcaagccggatgccgggttttctcttttccagtctgaatgtttgaaatggtctggatatgtagagtttgataatctaaaaaaaaatgtcctaacttacttagcagaaaataagtaccttcctcngtctcttatctttctattccacctctactgttaatct

SEQ ID NO: 11969 - DNA, 443 bp, Glycine max
  unsure (1)..(443): unsure at all n locations
aagctcttagactaccatccctgaatacattgaaaaaactctccttttttattagcatttttctaaaagaatttattctttttgtgttgttgaactttttgaagtgaggtgaatgaatttaattttaaaactttgatggtgtttccacgcatggaaatgtgattctatgctagcaacggagtgttgaattgtggtctgcactctgcaaacacaattgtggctgcaataccacatcagctgcacttgtctgccatatttttttctctcacaattttaaggtttgggaagtatttaccacgatgacaattaaaaccttaaatttaacgtttattctcaaaatatatcattttacagattggttgtattaactttaaatgtgctaattggttnttctttaaatctgctcccactgtgctataagataattcataatgggcaagttt

SEQ ID NO: 11970 - DNA, 383 bp, Glycine max
ctttcgataaaggctgttagatgaaacttcttaaaacaccttgagaccttaagagaaaagactatagacttgagtataatatacatctgtaagactatcatcgcttaggcattatgcgaatcaataacaaattttgatgatatgtataaagccaataatgacttggtacaatgaatactggatagaaatcaagcctggataaagcttgtctatggaataggcaaaagtaacaagtgaagaatacttgtgactattgataagttagtggaactttgtgggttatcgagaatagatgagacgaactagtataaattattgagcgctcttggattattgctatccatagtgcctaatagacaaatggtctgaatttgatattagat

SEQ ID NO: 11971 - DNA, 437 bp, Glycine max
gcttgtggttgggtttactgcaatcattaatattggggttatgagttctatttcacactattttagcacatataagggtaaatcgacttttgcagggtgactagggatcaatgttggttataggtaatgaatgaaatgaagtaatcaagcttttaaattgtgattgtggttttatcgcaatcattaatattgtgggagagaagagtgctagcagcacactccttttaacacatataagggtaaattgatggtgactagggatcaatgttggttttaggtaatgaatgaaatgaagtaatcaagcttttaaattgtgatagccattttatcgcaatcatatattaatattgtgggagagaagattactaacaatacattctctaatatatttattttaacacgcattattattgattgatatttattggaaactacaa

SEQ ID NO: 11972 - DNA, 456 bp, Glycine max
  unsure (1)..(456): unsure at all n locations
agcttcatgatgatgaatcaagttgattctatttgttttgatgatatcaaagatgatgacaaaaagctcaagagaatgatttcaagattgagtcaacaagttcaagatcaagattaatttcaagtttcatgaaaagaaatcaagaagatttaagattcaagagaagtttgatttcaagattcaagaaaagatgaattcaagattcaagataagaaattgagaagacttcacaagggaaatattgaaaagatttttcaaaaacaaacatagcatagttttgtttttcaaaagagtttttctcaaaattttctaagttaccagagtttttactctctggtaatcgattaccagtggcaaagtttgatttcaaaagcttttaactgaatttgcaacgttcaaattgattnttaaatggtgtaatcgattacaatatattggtaattgattaccanagta

SEQ ID NO: 11973 - DNA, 439 bp, Glycine max
  unsure (1)..(439): unsure at all n locations
gctcgttgctcctcctgctgctgctgcaccttgtagtaattgtgtctttgttcaatcagttcctccatctatttcctcctcccctgaccatactcgaaaataacgttctttgttgttgttctctattcttttgagttttctcttctgtcctttttttttttaaagatttttctgctttaattttacttgtacttgagatagaagattataggcttacgagggaaatgggtgttatagtcttgtagagtacacacattatgcattatgcttcacggatttaatttttgagctggaagtttttcatctgtttgtgctggttatctttcatgattatgatatcttgtagccttgtagactangatatcttgtattgttgttgccgagttgagaacctttctctcttgtgatgttccatcttgcatatcaacggtgctacact

SEQ ID NO: 11974 - DNA, 446 bp, Glycine max
agcttgagaggattgatggggacccggcgtttataggaacgaggattatggctacgtgggagtacgtgagctcagtgaaggtgggcaactggggatggtgggtttatgtgtgaattgtggatgtggagagttgacttgcaccatcacccgaccgccacctagtaccacatgtgatgggtaccccataatcctacaagcttgaactgaggaagtgtggaagggtgagacttcctacttttattcgttgaccacagagtggtacctggagatatgtggcgggggtcaggagaccttggggacgtcaggtggggtgctattgcccaaaaccaagcttgaccaatcccgacccaacccagacatagtaagtcagtgagaacctgtgatgtacctaaacaggcgagctcctggcaggcaaccgataaaaaaacaaagaccacatagcaagg

SEQ ID NO: 11975 - DNA, 450 bp, Glycine max
tcattgcctaacaggccaacttacaacagcaagccccaagatactcagcataatgatgcacaggccaaagttgagtatgtgaaaagattgtatgaccaagtgaaggtgcaaattgcaaagaagaatgaaagttataccaagcaagccaacaagaaaaggaaggaagtagtacttgaacccggtgataatcttggacatttgaggacaaatgtttaccaagaaggagggaatgatgagaatcctgaaactggtcaaatacaggctaaaggtccaagtggagaaggatgaaggcctaagtggagaaggataaagtcccgagtggagaagggtgaaggcccaagtggagaaggatgaagacccagaggcagagacacgatcaagactattaattgttgttgaaggctcaaattaatttaaagacccaagttaaatatgtttttagttataatt

SEQ ID NO: 11976 - DNA, 313 bp, Glycine max
  unsure (1)..(313): unsure at all n locations
tctagccttatggacttaccttgttataattcctttgattttccttttgagccttgtttccctttccttgttttgaagctcactacaagccttaaatgaaaaaccatgatatcaccatatccttaaggaattntggagctttggaattgttttgggaataagtgtggggggtttttgtttcattggataacttgttttgttggctatgcttcatgatgtattttgggccatacttgatgtacattgtatattggttaaatgttggacatgctgaatgaaatgtngttttcaaaagctataaagtaaaaaaaaa

SEQ ID NO: 11977 - DNA, 322 bp, Glycine max
  unsure (1)..(322): unsure at all n locations
agcttgaatcggatttcaatgtgaaaagtttttactattttaatttcccgagagcttccgntgttcattttcgagcgtctctatacgcgatgcgccctaatctaacatccgagcgaaaagttgagaccattatgacatccgcaagagcatccgctgttcaatattgagcgtatcgatatcagatttggctgatatgtacatacccgagaaaggctaggaccatataatactggatagagctcacgcctgtatatagctagcctctggaataatcatgcgcaacaatgaagaatacttgtaactagtgatgaccattggaact

SEQ ID NO: 11978 - DNA, 402 bp, Glycine max
  unsure (1)..(402): unsure at all n locations
tataatatattattacactcgaaattttacaacagaagctttcgagaaattcaaatggtcataacttttcacccggatgtccgattatggcgaatcacatatcgagacgctcaaaattgaacaacggaagctcgtgagaaattctaatggtcataacttttaactcggatgtccgattcaggcgcataacatatagaggcgctcgaaaaggaacaacggaagctctcgagaaattcaaatggtcataactntccacactgaggtccgattcaggaatataatatatcaagacgctcgaaattaaacatcggaagctctcgagaaattcaattggtcatcacatttcacacggatgtccgattcgggcgcataatatgtcgacacgctcgaaattgaacaacg

SEQ ID NO: 11979 - DNA, 339 bp, Glycine max
  unsure (1)..(339): unsure at all n locations
agcttgtgagtnttgtttagttttgaattatattactcatgttgccattggatttttctcctattcggcatccctgatgatttatgcgacaaggtttctaaataccctaatttttcaatattgtggttgaaaacaacgagaggagggtgctggagttggttaactgggatccacttctagcagtgaatgccttagagaaagagtttgttgttgacgacgattccgcgaagagaaagtttangtttttggtgaagtatgggaaggattttggatttggaattggatgatagtaggaagcttaatttgctcagcgcgcttcctttggtgtcttcgtattca

SEQ ID NO: 11980 - DNA, 440 bp, Glycine max
  unsure (1)..(440): unsure at all n locations
cactatgaaactcagcttaagacaaaccttctctgctgatgtctacctcaacctctgtttcaaatacaaacttccctagttcagctgcaactattaataataactctagtatagtttctaattctgttctttcttcttccagtattactaacctctggcatgctaggtcatagagtttgagagagagaaaaagaagaagaaagctggaagatattattattgatttagcaggaatatgatacaacttgagctctttagctaagactttctccctgacaaaaaagatgtcaatttccgtgtgcttagtctgggaatgaagaactggattatgactgatagctactacactttggttgtcacaataaaataaatctctaggatctgaaacggaacagataactctgattntgaatccatgtaactacagtcgtggcttgagc

SEQ ID NO: 11981 - DNA, 430 bp, Glycine max
agctactatataagcttgaaccattttatctattaacacaagttgagttttattcacaaaattagaggttatctcttttatcttagtgagagtgattctcctaaattcttgagtgattcaagaacaccctgtctgtatcaaaggactttcacaacctttgtgtgttgccctcgctggaaagagtgattctttccttcctatcatctccacccttgttctttcaaaccacaattccagaaaatacacctctgcccaaaattatctcgtgaccataactcccatttcacacactcaaattaagtgattcttgagcctaaattgaatttcaaaacgagacctttcacctcgttttggaatcacctcatatggagccctgtcgcttccgttattgccatttctatatttctgtccagccaccacttaacctacg

SEQ ID NO: 11982 - DNA, 426 bp, Glycine max
tctagatgagttatgtctgcgaatcgtacatcctgtgaatagttatgaccatttgaatttctcgagtgcttccgttgtttaatttcaagcgtctcgatattttatgtcctcaaatcagacatcggagcgaaatgttatgaccattcgaatttgtcgagagcttccgtttttcaatttcgagcgtctagatgagttatgtcaccgaatcagacatctgagtgaaatgttatgaccattcgaatttgtcgagagcttccgttgttcaatttcgagcgtctagatgagttatgtcaccgaatcggacatccgtgtaaaaagttatgaccattcggctttgtcgagagcttccgttgttcaatttcgagcgtctcgatatattatgtccccgaatcggacatccgtgtgaaaagttatgaccattggact

SEQ ID NO: 11983 - DNA, 422 bp, Glycine max
  unsure (1)..(422): unsure at all n locations
agcttagcgcgattttgcccacagngaagtctatatgtgttcttagcatgaaagtccgtgctaagcgtgaagtcggtgtgaaaagtaagctacctagagcttatataagaataaggaagtagaaaggataaacacaccgagtctcaaagctatccaaagcctgagcctatccctaaggggaaaccctccttctttagtcattcctccttctctttctattattcatccagccccttcttccatccacattatcccttgaagtgtaaagcctctcatggccatgaaaggctaaacctccattgttgggagcttggcaggccaacacccttgtaatgtaactgttcttattatctattgaatgcacatgctatgtctatttctttgtttctacttttcatctttattggatggactgatcatct

SEQ ID NO: 11984 - DNA, 436 bp, Glycine max
  unsure (1)..(436): unsure at all n locations
tccanatttctgccaaagtgttgttaatagcctgctccttcatctccaaaaaacgaagatcataagccaacttaaaaaagcctcccttttccactcaaataactctcttctccaccatatttcccaacaccaccgttcatctctccaactccccatctttccaaccacctcaaacttttgttctgagataaggtagagtcttgggaacaagtttgctagacaatttccatccacccaagaatcgactcaaaatcttgttttatcccccaccccaatattccacttcattcccctatcaaaccatttatcttgaataccacacctccacacaccctcttcaaatccctgcaccataaactctccatcctacatattttgaaataagaacatcacaccaaactcccttttgagcatgaaagatattccatctccactt

SEQ ID NO: 11985 - DNA, 231 bp, Glycine max
agcttctgtttacaagtgttctccatctcgatatattaccggactcatgctgagatccgtgtagaaagctcttgtcaatataattatctcagagcttggaatgtaaattttgggcggcttggtatattaccggactcattcagactacccgcatgtatagaatagtgcattgatgtgcatactagctgcctaactaaagtttgtccttccaaggcacattgacaacttgtt

SEQ ID NO: 11986 - DNA, 340 bp, Glycine max
tctagcattctccagatattttctcaaagatcccaactgtttaatcatggtaaagtgtcttgtgaagttgcaaaccagatttcgagaagatccaacggttaacaaaggctgggtagcgtttctaccgaggcagctacaggtagttttctctagaagcttcattaagaggcttcctccagaagcttcattaagaggcttctagcacactccagacatcttctcaaagatcccaacggtcagatcttggaaaattgttttgcaaagttgtagaccaaatttagagaagatccaacggttaatgaaggctgggcagtgtttttaccgaggcagcttcatgtag

SEQ ID NO: 11987 - DNA, 213 bp, Glycine max
agtttttaaagaatggagattatggcgatattctgacattaatatctacttcaagagatgaaagattacatgtggaggaaagttggtgaccatggagagcattgttgatagtgagaaaaccaagacttgcattggaagtgaaaacactaaattttgtaagcatcaatatggtaaacacgatccacgttagaattattgttatggaagtgatga

SEQ ID NO: 11988 - DNA, 190 bp, Glycine max
  unsure (1)..(190): unsure at all n locations
gacactatgaaactcaagcttgaggtgtttatgcatcatgtgatacaatttcactntattagtgggtcccaattggcttcctaattttcagcttacctctttgcatgtgagatcgtggcagtaaggtgccaattttccatcatggattcagtcacaaaacaaacttcaagatattggactgtctaacacg

SEQ ID NO: 11989 - DNA, 243 bp, Glycine max
agcttgtaggattatggggtacccgtcatttgtggtactaggtggcgatcgggtgatggtgcaagtcgactctccacatccacaaatcacacataaatccaccatccccagttgcccaccttcaactgagctcatgtactcccacgtagctcttatcatcgttcctctcaacaccgggtccccatcaatccctccaagcttccacaacatccaggcaattcaacatccaaacatcatgaacta

SEQ ID NO: 11990 - DNA, 349 bp, Glycine max
  unsure (1)..(349): unsure at all n locations
ntgaacattatatttgtccttcatttaactgtctttgtgtttggcggccacgctcaacaaagtattttcgacacctactgtacgttgatttgaccaacgttgttatgggaatgttgcgacaatccttcaaaaccttattgatacattctgagaggttggttgtcatgtggccataccgacgtccttctctatcataagccatcgtccattnttcttttgaaatgcgatcaatccatgttgctatggctggactcagttcacgaaatttttctagattntgatcaaaaatgtgcttgcaaggagtataggctgcatcaaattagttatgaataagaattttaagtatata

SEQ ID NO: 11991 - DNA, 401 bp, Glycine max
ttaagcaccgcggctgcagctttgctatataggatacattttgtgtttacaccaatttcaaagacccttgcttgacaaatgagggtattcaaagctcaatctataaaggattttattcaagggaagaagcagaaaaagcctttgaattaaataccacaagaaggcccttgagctagaaaccacaactataatcataaatgttgaccaatccaaaacctcccccaaaacctacagagaatcagcccaaatctccccagaccaacaaacagcttgaactagacaattttaagaaaatacaaaaattattgtgtagggtacacaacaaccaagcctagattcctggcctatacataggtgtgcatgcctattttaataaaaaaattgtatgcaccaacaaaact

SEQ ID NO: 11992 - DNA, 354 bp, Glycine max
tgtctgagatggataccaactggcttatggaaattatttcggttgttcttcgacagctagaagtgctgtcttggaaatatgttcaaaacaatgatagttatggggatgaacaagtttatacaaatccagtagaggatgctgatttaatagtctccaatgattttgttgaagctatagattctttaaaacgttggcttcacactatgaagataagtctcaataaaaaggattttttggatttgtggaggagcattgctgaggggctagatcattacatttcatggagcattgtcagaagtgagaatcggttctttaagatgggcgtcactcaatttgaagctgacatgcaagcac

SEQ ID NO: 11993 - DNA, 438 bp, Glycine max
  unsure (1)..(438): unsure at all n locations
tccttcagtcacctgaggctgcagcttaattaacttggtntaatttttatattttgtgtaatttcgntgtttgttttctaaatttaaaattaatctttttagtgcttgtaatttgaaaaaaagaaaacttgttttagtgtttctgttcaaacatcaaaatgaatacttttgaaaggaaaacacatatgggataggatatttgataataagaatgcaaaatcaaagtgggttggttaccttgtaatcaacttgtaatttgttagttatgtaagtgaaattgctaacaacgtttaggataaagggaccaaatcaagtttttttttaaatacaggacaaaagatcaactttaaatttagaggacaaaaaatatatttaggccagagctttaacataactgttaatttgatactcgttcttgtaagcattaaagagaagcac

SEQ ID NO: 11994 - DNA, 364 bp, Glycine max
tgtcatcactgatgatggaatattattaggaattatgtgttctattatatcgtattccgacattttctggtacattcatagcctgaacatattgaccaccgttatacataaagggaataccaagttttggtgtacacatgttatcccattttacccttataactacctttataaaatatatttttaacccctgcgactgcacttcttaaacaacccattgcaaccggtacatttcgcaaaacgcccattattatttaacttctattatccaattcttttaaaatttttaaagaatacacatgcatggagtgcctgttttgtcccaatcttaataaaatatattcatataacagtctatggatgt

SEQ ID NO: 11995 - DNA, 412 bp, Glycine max
agcttctagccaaatggacttaccttgaattaattcctttgtattgcccttttgagccttgtttccctttccttgttttgaagctcactacaagccttaagtgaaaaaccatgatattaccatatccttaaggaatattggagctttggaattgttttgggaataagtgtggggggtttttgtttcattggacaacttgttttgttggctatgcttcatgatgtattttgggccatacttgatatacattgtatattggttaaatgttggacatgctgaatgaaatgttgtttctcaaaggctaaagagtaaaaaaaaaaaaattcgaaaaaaaaaagaaaaagaaaagcaataaagttgagtgaataagatcttaaatggcataagaatgatgaaactcttggctctactc

SEQ ID NO: 11996 - DNA, 453 bp, Glycine max
  unsure (1)..(453): unsure at all n locations
gcttactgggaagactccccctgctctctcatcctagggtatgattggaaatntttatcctaggtcaaggttatggcaaaaagtcgatgtttggctcaaaaggcctacaaatggcagaacataatgtacgttgggacatctatttggtcaatgattcagaaagaggggaatgcccagatcatttccatgaaacgcatatcatgataactagaaattcatgcaaaactaatcctagcaaatatccatgtggacactcaaatataaggctttgtggccacacaaacactaaggcttagggctcatttccaaattcaggccaaaccagtgtttcaacgtttttatcaagtcatgcaaaatgtctgagtccattttggcattcgggaaagtctttctttgttttcaccctctangtgcacattntctttttttcaaaaaaactttcgtgttttgatc

SEQ ID NO: 11997 - DNA, 416 bp, Glycine max
agcttccttgagaagctagagcttagctactttcacccctctaataactaagctcacctccttgagaagcttccttgagaaacttccttgagaagcttccttgagaagattcctagagaagctagagcttagctacacacacctctctaatagctaatctcacctccttgagatgagaagctagagcttagctacacaccccctataatagctaagctcacccccatgccaaaatacatgaaaatataaaaaaagtccttactacaagactactcaaaatgccctgaaatacaaggctaaaaccctatactactagaatggccaaaatacaaggcccaaaagaagaaaaaacttattctaatatttacaaagaagagtggacccaaccttggcccatgggctcagaaatctacctt

SEQ ID NO: 11998 - DNA, 455 bp, Glycine max
  unsure (1)..(455): unsure at all n locations
tagcattgatgagcatgttgtcgtgatgacataccagtatatatctaagattggggaagaatatatacaaaacaaagttggagtgcacgccaaatctacctagtggcacaatactttattgttgttgcaaattgcaaagtttttcaaaaaaattgggttaagatatatgagaagcctacacagtatggaaactatcctagaccatagttctctcaaatatagcacttgccattgccacaataggcagttcataacactaactataatgcatataatttaaaataacatcttaaaaaaagaaaaacaaacagacaaactgatatttgtaataccattcaaaactataactacgcaccaaaaacagctaatagaatttttaagtaattattcatttgtgtttattatcccagactgaagagaactcatctccaacaagtganaaccttgtctcgtcc

SEQ ID NO: 11999 - DNA, 426 bp, Glycine max
agcttctagccaaatggacttaccttgacttaattcctttgatagccattttgtgctcttgtttccctttccttgttttgaagctcactacaagccttaagtgaaaaaccatgatatcaccatatccttaaggaattttggagctttggaattgttttgggaataagttcagggggttttatttcattggataacatgttttgttggccatgcttcatgatatattttgagccatacttgatgtacattgcatattggttaaatgttggacatgctgaatgagatgctgtttctcaaaggctacagagtaaaaaaaaataaaaaaataaaaaaataaataaaaattcgaaaaagaaaaagaaaagcagtaaagttgagtgaataagatcttaaatgacaaaagaatgatgaggctcttggttctac

SEQ ID NO: 12000 - DNA, 456 bp, Glycine max
  unsure (1)..(456): unsure at all n locations
ngctaacccatggaagctcctaatatctcccacactttttgnggtgggccattcttggatggccttgattttctcagggtcgaattggaccccatttctaccaactacaaatcctaagaaaactatactatctacacaaaaggtacacttctctatatttgcatagagggtgtttttaataaggactgaaagaacttgcctaagatgtcctaagtgatcatctaggctcttactgtacactaaaatatcatcaaaataaacaactacaaatctacctagtaaatcccttaagacataatgcataagcctcataaaggtgcttggtgcattagtgagcccaaaaggcattactagccattcatacaaaccaaacttggtcttgaaagcggttntccactcatcaccctttttcatcctgatttggtgatggccacttttaacaatcaattttgaaaa

SEQ ID NO: 12001 - DNA, 390 bp, Glycine max
  unsure (1)..(390): unsure at all n locations
atttggggcaaaatgctttgaaccaaatttttcctttcatgaatgatgctctcctacaacctaagacaaggtagaatgagataaactgtacaggctcaaggttcaatcaaacaatcatacttttagctcaaactgggtgcaagggatgaatcattcgtacacaaggtaagctttttggctaaggggctactttcaattacaacatggccttcatcatcttcaaacacatgcattcattccatactcagagattcatgcaaaaaccattacttactactagtcgntctctcataattaaagatcacactctcaccgggttatggctaacgtgttccttcacaatcaacctgacaaaccaactaacatttttagtcatgatcctaattcata

SEQ ID NO: 12002 - DNA, 434 bp, Glycine max
  unsure (1)..(434): unsure at all n locations
nggactagagtgatcaagagagtataaatatgtggtcttttcatgaatttaaagaactacattatctctatcaatcatctttaaatcatctatctttcaatttatctttcaatcttctctcgacatcattcaatacctttcaactctttctacagaaatttctcttcatctttataaaagtttttgttcaatactttctctttcaagaaaagttcactgatcaaaaacttgtgttattgatctttttcattctcttctccctttgccaaaagaacgaaggactaactgtctgaattcttttgtgtctcttttctcccttacaaaagattcaaaggactaaccgcctgagaattctttgtcccaacacattggagggtacatcctttgtggaacaagtagagggtacatctacttatggatggttatactgagaa

SEQ ID NO: 12003 - DNA, 294 bp, Glycine max
tgagtcctttcatatatcgagacgctcgaaatggaataccgaagctctgagcaaattcaaacgacaataactttttactcggatgtctgattgagtcccgtaatatatcgagacgctcgaaattgaataccgaagctctgagccaatgcaaacgacaattaatttttactcggatgtctgattgagtcccgcaatatatcgagacgctcgaaattgaattccgcagctctgagcaaattcaaacgagaatcacattttactcggatgtctgattgagtcccgttatatatcgag

SEQ ID NO: 12004 - DNA, 288 bp, Glycine max
  unsure (1)..(288): unsure at all n locations
agctagtagaagcaagaatttctttctggtctttaacgaggacnccgaaaaggcctatgactcattctcatggtcttttttggattatatgctgcaaagaatgggcttctgtccccaatggagacaatggattcctgtctgtctcaactcaccaaccatatcaattcttgttaatggcagccctacaaaggagtttgctcctactatagggttgaagcaaggggatcctttagcccctcttgcttttagcatatttggagaaaacatcacaggattgatgagggaagc

SEQ ID NO: 12005 - DNA, 421 bp, Glycine max
  unsure (1)..(421): unsure at all n locations
ctactgggaacactccgcgtgcgttgccactccatgtctacattcttcatcaccctcaacattattatgacaatgaaaatgacaaagatagtgatcttggataggatagtatttcatttttttggaagaggtgtgttattttaacatattttatttggttgcgaattctttatgatctacatatggaatttgactaataataggttcttcatttttttattatgatgcaaggaatgatttgtatggagccattgtgaaaaatcagaggtttttatgagcctgtaattgtttcaaattgttttttctctagtaaaaatcattacttgctatgactgcatgatgggcttgctgggtttcttagacttgtgttcttgtgaacattacttngagtacaactacatctagctattgtggtcattct

SEQ ID NO: 12006 - DNA, 394 bp, Glycine max
agcttgttccaaagacacttatcaagttttatgaatggtgttttcttcatgcctgtcacgataattggactagtcagtgatgccattaaaaactaatgatgaagtaaatgttctggttgaagcaatataatcaataatatgaatactattgaggtatttattatcttaaaaatgtggatcgattgaagataatgttaaaaaaaatattctcatattaaaaattagaacacacaatttggtgagtcattctcaatattcaattatttatttttagtaacctctctcttttctcatgtacatttgttagcccatattttcgacgagctaaaatatgctctaagtatgcattggatgtcgtctcgaggttcgaagcgtattacagagcaagagtctg

SEQ ID NO: 12007 - DNA, 452 bp, Glycine max
  unsure (1)..(452): unsure at all n locations
tatatgagtatgtgatgagtgtgaactgacgagcaagtttgctattaaattgagaaaatagtcaaaagagagggaaaaataggaagttttgagaatcttcaaagagcacagcctctgttgtacttgtaggccatgccattccaacatggtcatgctaatttttcaagaaaactcctcatcaacgttactcatttgagcacagtcgtgctactaatgacatgacacatgttgttccaaagccaaaaatcaaaatcagtgtcacgcatccgagcacagccatgctatctttagcacaacacatgttgactcaacacaacctttgctaactcaacacgacctgtgttgacctctgcactactatttaattgtcattagtataaatagaaaatgaggaatttttagaggaagtttttcttantttcgaacagcaagagtttctaagtgagagaact

SEQ ID NO: 12008 - DNA, 493 bp, Glycine max
  unsure (1)..(493): unsure at all n locations
cgattctgacgactcctgantatacgcgacactatagaatactcncgctagcgcaccgatgcacccagatataacgacgaccctcttttgggcttaaacctagtgaaactacccagcgatatcttcgagacagcacctacccacgaacattcctgggagacaaagggaacccccccccgaaattacacgtgacacctcgcattggctgaggcatccgangggaaaataagaccggttcaggagaagcagcctaaaatggcctcccatagcctatagtggaacaccgttctctggactatgatgagaaaggacaactccacctgagacagcaagagtcagaagcacacccatcctttgcgccgaatcctggccgagagaaaaaccagcgccataagcgacaagaccttcccccttacgttcctaacaaagaagggcacagggctcctttggtggagaaaaaaggcccattttcctcacaacgccaatttgagac

SEQ ID NO: 12009 - DNA, 233 bp, Glycine max
  unsure (1)..(233): unsure at all n locations
agcnattatgtgatgttcatggagngaaattttgtcgggtatccncttttgtatctcaccttatgtttgtagatgattgcttcttattctataacgcctttgtacaggaatgtttgcatgctaggaacattctgcttgcttattgaagtatttccgatcaagctctcaagctttaaaagtcaaaggtgctatgtattagaaatgttgatgatgccctaagaattgattttatg

SEQ ID NO: 12010 - DNA, 363 bp, Glycine max
  unsure (1)..(363): unsure at all n locations
tcttgcgtagccgctcttggtgctataatatcccnattcaaatccctcttattactagctattttgaattgtttagttcctgaatgtacaaccttcaaattgttgctcgttcccctctttcttttctacaaaaaagaaaatcaaatgctatcaaaacatggatgaagtcctaagaaaatcaatatcaaagaaaacatggatgaaatcacaattaaaaagcacaactacctatctttcaaagtcctttggttaatttgtcttgtctccttatgtggtggggttttcgttaataatnttaaacttttgcnttccacaaaaaacttatcactaatcctcttttcattaatccaattttgtatgtca

SEQ ID NO: 12011 - DNA, 400 bp, Glycine max
  unsure (1)..(400): unsure at all n locations
agcttgtgtgatgttgctcgtactgatgtgtaccatgaggtgtttgctggngtttgacccacgcgggtgttgaagagacggcatgggcatctccttccttcctttttgcccctgttgccccgattcttttggcgttcacgtttgtggaggaaacgtaatcaaactttcctctcttcaatccaacctcgattctttccccggcaaacaccagatccgcgaagctggacggcatgtaacccactagcttctcatagtagaacactggcagagtgtctaccatcatggtgatcatctctctctcaaccatgggaggagctacttgtgccgccaaatccctccatcgctgcgcatattctttaaggtttcaccctctttcttaaacatattcttcagttgagta

SEQ ID NO: 12012 - DNA, 443 bp, Glycine max
  unsure (1)..(443): unsure at all n locations
tactcaagctggtccttttgaacaaactatttatgtttgaaagcgtcttgcaaaagagaagaagaaataatactcctttctctatctctctcttatctctcttatctctctttccctttgaggaggttgctgggcctcgaagaccagctactaacattagtgctttcatcatcgttgccatggctgacgacactcgttcgaaaacaagtactgaccgatgggaggacgctttcgctaagctttcatcatcaatatcatccaggttcgacgtgcttctccagaggatgactcagttggaaacatcgcangccaatccttagggtccttcaccttcgttcgttcctgcaccaacaaccaacatgagtacggttcaccgcctaaagctcgaggtccctcggtttgatggctctgacccaactgngtggatattcaagatctctcaa

SEQ ID NO: 12013 - DNA, 358 bp, Glycine max
  unsure (1)..(358): unsure at all n locations
gctagcgcatgtatgacganaaagttanattactatatttacttgctttcaaagacacaagatatatacactcttaaaattggggatttttaattcaaaacagtaactgaaaatgttctatctgctagttaagagtggacctactgttgccgttgtccatgtgtaccccttctgtaacattacattgttcttgttttatagggtgacaaaaaggaagttgctacaaatcggaccctggatttgacatctggttntgaagtgggtcctgcaacaactgctggcacagatgcatcatccagtcaaaacactcgatcagtgttgactattgcctttcagttccctttcgacagcagtctgc

SEQ ID NO: 12014 - DNA, 431 bp, Glycine max
  unsure (1)..(431): unsure at all n locations
ccttgaagttgattctttcgcacttttctgacatganggctattgnctttttgngcttaatatcatcaatcgctacatcaacctgaaattaatttaaattaatcaacgtataagattagaagtgaaaagtactaatatattggcaattacaccatacctgctttgtaaagtcacttaaacttgtgtgagaatttataaatcttttaataaatgcattaatactctctgatcttccggtagttgtcatcccaccaaagaaatggtcacgaagataagcgagtgcccagtaattcctgatttcatacaatcctttcacatgtttatttgattgcaagttatacttagcaacaacttttggccattgatgctcaaattcttcacatgtcttcaatntatacaactcgtaacaatcagaacaccattttgaatat

SEQ ID NO: 12015 - DNA, 163 bp, Glycine max
  unsure (1)..(163): unsure at all n locations
gatatgagnngnagcatacactngatgaaatcacttatatgagtgctaagtgaagccactcgtatgagatcgtgacaaaatctttagagcattcataaatatcgggcacacacatgacctattatcgcaacagtcacgacaaggattgtgggggtgttaagtt

SEQ ID NO: 12016 - DNA, 434 bp, Glycine max
  unsure (1)..(434): unsure at all n locations
taccccctgctttgattgcattcaaaggtcatgntctcccgannggcccctctnggcacatgcttggcttgggttatcataacaaaactgacattgagagtgtgaggaaggctgctgttattcatttcaatggccagtcaaaaccgtggttgcaaattggctttgatcatcttaggccattttggaacaagtatgtcaattatacaaatgattttgttaggaactgtcacatcttggattcatagtctgccatgagatgcactatggtttgaaacaacagtgcatgcatactacgaaagggacgagtaaatacatgtttcatctaaatttctgcggattgagaaggcaatataaaattggttgagggcaaagtgtgggtggataatttgcttgcaccccgtaacatttttccacacacagttactatcctggca

SEQ ID NO: 12017 - DNA, 261 bp, Glycine max
  unsure (1)..(261): unsure at all n locations
agcttcaaggttaagtcttcatgtngatgttccttctcatcatatgctactaaccgggntgcagccactagagtatttattcttccttcactctctgtttatgtattttttgttctgtttgctgcttccttctcttcttgattcaacttttttagttgattgggattttcttttatggtttcaagggacattgtttttaccaattctattggtttggtggttcaacactttggagggttctgatgatcttatctttactaa

SEQ ID NO: 12018 - DNA, 434 bp, Glycine max
  unsure (1)..(434): unsure at all n locations
ntgtggagtagaaacatgggaccaactcacgnnatncataatggaagtcatatctagccaagggctgagagaccatacaagattcctaacgatttctaattatgtgggccattaagtctatcatatgctgacaatagccgagaagcccatgaatctcttcgggggcggagtaagtgtctgccatcgccttggccttggctaacaatcggggaagttcttgactcccgttcaaggtaagagcaaaccgatccatccacatggttgcctcttggtgtaaagagtcgatcacccttcctctagcctctttttccgcgtatacttgggcatactcatccgcgattctatgctcgtgggccgtggctagacctaactcttcttggtacttggcgatgatagctaacatgttggtctctgtctcgcataaacgctgagac

SEQ ID NO: 12019 - DNA, 321 bp, Glycine max
  unsure (1)..(321): unsure at all n locations
gagcatctgcaacatcatcaataacagcactagaggggnctccccccgatagagggaagctggactcctggccaagcaacttgtataggcatttggtcgcttcttatcacttcactcatgcaagacattcctacagttttcttaaccttctagagctaaggcaagcacacattattattgaaataaattaaacacaactatcctaagaaataacaaaaaaaacacacaatgcaattaactaaaataaaataaagtaagaaatcctaggttgtctcccagtaagcacttctttaatgtcattagcttgacaggtcagatgtc

SEQ ID NO: 12020 - DNA, 434 bp, Glycine max
  unsure (1)..(434): unsure at all n locations
actcaccttgatcttgaaaaatctgattcaagcttngtggtattagcattcttgtattaatcttgaagcagtctttatccttttgaagcggtcttgtttaattcttctttggtatcattaaaatcatgtatgcatacattcacaaattataaattggcataacattatgtttaaataagttttccataaataagtagagaaaaagaagaagaaaaatgaaataaattaatcttataaattaaaattagtttatacataattaaaattaattnttaaattaattaaaattttagtttctccaaaaagctattttttattttttaaatagaataatgataattaatataaatatttataaaatatattgtgaagtaataaattaaatatttcttaatctgataataaaaaccttaaacagttaaaatttaagaacg

SEQ ID NO: 12021 - DNA, 104 bp, Glycine max
tgagcctttggagaagcaagactcactaatggtggatcttgggtttgacgagcctctggagaagtgagactcaactatgacagaccttgggtttgacgatcctt

SEQ ID NO: 12022 - DNA, 450 bp, Glycine max
  unsure (1)..(450): unsure at all n locations
ccttgtggctgttaatcccaagataagtagtccaaagcataatagttcatcaaatgttacctttcttttnggaggttagaatattttctatttttggattgcaaaatgtttctattctaattcaataccaaattaccaatgtaatttttgtaacatggctcataccttatctctctcttgcaccgttattgcctacaaaccttataacctactctttaattgttctttgttttccatttatcatgagcatcactatacttgatcatatgtttaaattttaaatattgtgaattggatttatgatagacatattgatattttgcgtacgaaattgtgctttcatttgatagaatttttatgatattatcaaatagagcttttgtatcatactgctaattctagtatgtgttacacttatgatttgtttgttagccatatttcttatattct

SEQ ID NO: 12023 - DNA, 296 bp, Glycine max
  unsure (1)..(296): unsure at all n locations
agcntagaatcattatcttatctccgacatccattgggtgagtcctgtcccggtagtcccgaagaagaccggccctacagngataaaaaatgagaaggaggagctaattcctactcgggtgcagaacagttggagagtctgcattgactataagaggctgaaccangttaccaaaaaggaccattttcccctgccattcattgactagatgctcgaacgactggcatgttaatcctcactactgttttcttgatggtttcttctgctatcatgtaatatctattgctctttacgat

SEQ ID NO: 12024 - DNA, 247 bp, Glycine max
tggactgtgctaaggagaataacaaatgaccaaagtgaatcatagccatttctagggcaaaattgggtgttgtagagtcaaattttgattcggtggaattttaggtgtaaatccagtttgagcaagtttagatggatgttatggactggtgtgaggtgagagtttgcttcaaatttacctcattctcaatttcacttctcaaacctagaaaacccattgaatggaggggtgttggacacctatatta

SEQ ID NO: 12025 - DNA, 329 bp, Glycine max
agctagccgcccagctctgttcatgcgagttggttgcttcctttagaagcaacatccttctggaggaatcttctgtggggcccaagtgggcctggttgctatatgcaccccccctttatactaaaagcaccccccccttttactaaatgcacccccttctatatttaattgaaattcttttcccgtaacgttacgaaactttacgaatttcataacaatacttattttccttcccatggttactaatccttatagattatagatttactcttttttaactttcaaaggagacacggaaactcaccgattgcgcaaaaccacctctatta

SEQ ID NO: 12026 - DNA, 444 bp, Glycine max
  unsure (1)..(444): unsure at all n locations
tgatgcaacatatggagaggttaatgaaacaacgagattangcgctccatgttatgttggatcaaatggagaacagagatcataatgaagaagaaaggaggagaagagggaatgatggtgttcctagacaaaaccgaattgatggtattaaactcaacattcctccctttaaaggaaagaatgatccggaggcctacttggagtgggagatgaaaatagagcatgttttctcatgcaacaactatgaggaggaccaaaaggtgaagcttgccgccacagagttttccgactatgctcttgtgtggtggaacaagctacagaaggagagagcaagaaatgaagagccaatggttgatacatggacggagatgaaaaagatcatgangaagcggtatgtgccggctatgtactcaagggacttgaaattcaagctccaaaaactaa

SEQ ID NO: 12027 - DNA, 351 bp, Glycine max
  unsure (1)..(351): unsure at all n locations
gtaaaagggatgccccacattatttccatgacacaaatgcaaaaatgatgatttggaaactntatgcaaaactggtcatgcatgcacctatgtggacactcaagtgtcaaatttttatggtcatgtgatgctagggctcaagattcattccctctattttagtcaacccaatgtttccaaaatatgttcttttatccatttgtgcattcatccgagtccattttgggcgtccggtgaaatttcacagcgttcacccttcgggtgtacacacattttttcaaaaaccagctatgatcggcgaatttcctcaagaagagttggaagtcatctcttttcaaaagcatgtcagtt

SEQ ID NO: 12028 - DNA, 450 bp, Glycine max
  unsure (1)..(450): unsure at all n locations
gacactatgatactaagcttgagaatatatataaaagatctatgactatngaagaatcattcatgtgnccttngatgagactaatgctatttctccaagaaaggatattttagatgatgtagcagaatctttagaacaaatgcatattcatggacaatattctaaaggaaaagggaaaggaagcaatgaagatcctccagaagaagccaaatcaaatgatgaacttccaaaagaatggaaagcttcaaaagatcatccccttgacaatattattggtgatatctcaaaaggggtaacaactagacattctcttaaagacttatgcaataatatggcttttgtgtctatggttgaacctaaaaatataaatgaagccataatagatgatcattggatagttgttatgcaagaagaactaaatcaatttgaaagaaaaaatgtgtgggaact

SEQ ID NO: 12029 - DNA, 369 bp, Glycine max
  unsure (1)..(369): unsure at all n locations
agctatgaaggatgtgttgtagnnnctaattgattatcaancaannnatcactgacttgattgcttggaattcagctagggcttgatcgttcttactagctgctgcactgtgttaagttgtaatatgtattggtcgttcttgattttcttactgtgatacagtgcaataatgcattatatgtattggccatgcaataataactagcaagttcaattacatatgttactgattaatttgttggttatgtagtaatacgctgtgttgtgtaatttggaagtggtagtgatgtntcccaatcttattttgaactttgttcaagtatattggaaagttacatatttaattttgtgattccttttggtattcct

SEQ ID NO: 12030 - DNA, 435 bp, Glycine max
  unsure (1)..(435): unsure at all n locations
ntgaagaagcatcaaagcaggatgtatgggtcaaggcatttgttagaagagatacagatgatcgagaaaaacaacacatgggagttagtaaatcgtccccatggaaaagatatcattggggttaaatgggtctataagacaaagctcaacctgatggcaccatacagaaacacaaggcgaggctaatagctaagggttactcacagcaacccggaattgactacaatgagacatttgcactagtagctcgtcttgataccataagagctctaatagctcttgcgtcacaaaaaggatggagtatccatcaactagatgtcaaatccgccttccataatagcgtacttgaagaagagatctatgtggagcagccacaaggattcgtgtctgaaggcaaagaaagaaaagtgttaagactaagaaaagcactctacg

SEQ ID NO: 12031 - DNA, 390 bp, Glycine max
  unsure (1)..(390): unsure at all n locations
agcttcttttggaccttgcacaagcaatcttctcctctnatagataccangcnatgngctcgcgactgggccctttcttcccttcgcaacttgagttcactattgctaccccatagagctccgcgaaatttgttccggccatactcttccttgcgagccctcttggtctctcgttcaagggctcttgcggtaattgcattctcttcccgtaacccggcacactccttccgaacgtgtgtagcagccaacttgaacttctccttggcgagttttgcctttcctaactcgcttttgagagcttggacttcctcgtcctcttccggtgcttcaaaattctcttcgctgacgaacttttacttggcgagccaatctaaacctcgtatgcgaact

SEQ ID NO: 12032 - DNA, 439 bp, Glycine max
  unsure (1)..(439): unsure at all n locations
actcagcttggaattcattctatgtactcgtggtgggccacannagtanttatgtatnnttattcncgnancagtcactttttatacccccttttgacgtgctgaagccattttatttaagtcatttctcgcttaacctaaaaataaaataaatttccaccgatcgtttgaattgtattatccattaactttggttgaaatgaattccgaccgatcggtcgtgccgtaaccacgttggaaataaaaaaaagaggtaaaataataatataataatcaaaaaatacccttttagtaaaataaagcgaaaaatcaatcggacgttttctctttgggatttctcattcttaattgaattgactaataactaaagtgaaactaaggctaaaatcaactcgcctagtcaaggtcgtccacanaaataggattntgaaagttatca

SEQ ID NO: 12033 - DNA, 337 bp, Glycine max
  unsure (1)..(337): unsure at all n locations
tgcaagcttataagtgatgtgcatggagcgaatttttgtcgggtttcttctacngtatctcacctnacgcccggagatgattgcttcttattctataaggcctttttacaggaatgtttgcatgctaggaacattctgcttgcttattgaagtatttcggatcaagctctcatgctttaaaagtcaaaggtgctgtttattataaatgtggatgatgccctaagaatccatattatgcgtaccctgtgtgtccaagatggggttgtgaatggaaaataccttgggctgctatacatgataagcaaacactacaaattcaccttcatatatataagag

SEQ ID NO: 12034 - DNA, 406 bp, Glycine max
  unsure (1)..(406): unsure at all n locations
tcttgcgtagccgctcttggtgctcagagaatcccanaatcttatccctcttattactagctattnngaattgtttagttcctgaatgtacaaccttcaaattgttgctcgttcccctctttcttttctacaaaaaagaaaatcaaatgctatcaaaacatggatgaagtcctaagaaaatcaatatcaaagaaaacatggatgaaatcacaattaaaaagcacaactacctatctttcaaagtcctttggttaatttgtcttgtctccttatgtggtggggttttgtttaataatcttatacttttgctttccaaaaaaaacttatcactaatcctcttttcattaatccaattttgtatgttattgtataaaagatcatgggttctccacctgcctccactact

SEQ ID NO: 12035 - DNA, 241 bp, Glycine max
  unsure (1)..(241): unsure at all n locations
gacaatcgaaaaaagactttatanagttatagngacaccactcggaacattcaagattgcgcaancatcataaacaaggatgaaggagnnggcagtnttgaaccattaggcaagccaccgctgggaaacgccaaagtcacaagtttaacttaactggggttttgtcttatggggcctttcacaatctaagtcagataacacaattttaacatcaagtttaatcacgaaattgtacttcatg

SEQ ID NO: 12036 - DNA, 238 bp, Glycine max
tatcaatccagaggggagcagagctgaaaattcaacatctatgggatcgttgtacaatgataggatcagcatttaatcttcttctaccacatgctgaaaacacattcattgcgtcatatgctgagcagagtgtattgacctttgaaaaggaaaatcggatggagaggcatgggcaccaactatagatatatatttggccttcccaacaacttatctcattaaagggctccaatggtac

SEQ ID NO: 12037 - DNA, 429 bp, Glycine max
  unsure (1)..(429): unsure at all n locations
agcttctccaaagggcatgggntattcctttttctctaaatttatctaagaatctcgccaaatggcggtccttctccttcttggaaggtaccacaggatatggtacttccgcaccttcattcacagctttttctcttttcttctctctagcnntgtcacttctacttctctcttcattcttattnttctcatctttttcatttttttcattttctttttctttntctttttctacatctttttctttttctcggtcatttatttctttttttcttgaccattatttgtttttctttttcttgatttctttcacctttcacatcatctttcttttcaccaatacctttctttccaacagctttcttcttggatacaacactatcctcatcctccgcctccacanacctcttactccttgtcatcacaact

SEQ ID NO: 12038 - DNA, 449 bp, Glycine max
  unsure (1)..(449): unsure at all n locations
tcaagctgaagagcccggttagtcatagagaagttcaagtcccattccataaagtctgtttagagtatgatgaactaagggacgtcaatatggccaccgatgaagccttggaatgagaaaccaagaaggcccgaaaggaagaacacgaccaaagcaaagtttcgaggggctttatagggcagcaatagtgagctcaagctccgaagaggtgaaaggaatcatcacgggtcaaaggcatgatcttgaaggacgagctaaaggcttgccttangtcgaaaagaaatttgtcccaacagttaagcgagactgaagggaatatgtgggccatcatcgatgagtgcaaagagaagctaaatctagtggcgactcacgagcaaaggctagaggatgagtacgccaagatatcagtagaaagggaagcaagggaaagggtaattgattcattgcac

SEQ ID NO: 12039 - DNA, 362 bp, Glycine max
ctatgggcctattgagcaaactgataatattgaggaaataactttgaagatttctcacttgccaaaagcttcagaaaaacataaaaggattattgctatcacccaaggtgtagattctatttgtgttgttgagtatgagaaaatgaaattgtatcctatgatactattacctaaagacaaattagttgataccaatggagcagatagcaacctattgcttttagtatttaaatgttaaagttatatgggtaattaagtttatgggcaattggtgtgctcataaaatgctttgaatagtatatcatagtcatgcaaccaatacatagatattgcatcttgatgatagtggcaatctagatttt

SEQ ID NO: 12040 - DNA, 431 bp, Glycine max
  unsure (1)..(431): unsure at all n locations
atcaaacacatagcccacatcagaccgaaagaacaaataatgacaaccttccactacctaaggaagaaggtttggttgcaaaactacattcagctttatatactacccttcaccttaaccatcaacccttcatccaaaagaaaagcaaatgggatgatcctaattggatcccatctattacctcttcagtcgtttgtccagtccatcaaaagcttactagtttggagattataactcaatgatcctatatgaataggtttcctctactatggttgccttagaacgcccagtacaagcatgatgaaggtgatactctaatagctaactgttgaatttcccctacagttgatttttggtccactntctctttatacaaatatgttcaagggaaatctggtttgccggaaagcacactggatcatcaagtattt

SEQ ID NO: 12041 - DNA, 188 bp, Glycine max
  unsure (1)..(188): unsure at all n locations
agctatgcttcttgctcttgtagcgcgnatgagcagtcactttctgaatctccctcgatcaacttcacgcacttgcaaacaaccaataagttgtactcgcatcaagatcctttgagtttctctaacttccgcgggggctctagctgtggctgtgccaatggtgatcaccgcggcggcgtcggtgctat

SEQ ID NO: 12042 - DNA, 453 bp, Glycine max
  unsure (1)..(453): unsure at all n locations
cttggctgcgcacgagctccgattgcgagaggatnnatattatatgacgcattgttatcgattacagggatcggtaatcgattacaggcccaataagccttctggtaatcgattacaggatgttgtaatcgattacaggctgcctgttcaagtgtaatcgattacattgagtggtaatcgattaccagagcctattctaggctagttactaagagaatatctatatttatgctcaaatacatcttatatgactaattttcactactaatacactaaattcaatcattcaattactatatacacaagaaatcataaattctatcataaaaacaagaattcaaacaagatcaaacaaaataatctacaatcaaaaagtcaaaagtaaatcaatcaatcaatcaactaatcaatcaaccaatcaattcctatttttctaaatctcttacatctaag

SEQ ID NO: 12043 - DNA, 383 bp, Glycine max
  unsure (1)..(383): unsure at all n locations
agcttagcatgctnncattttattccttttatataactaccataaggcataaacctagtagaactacccatcatatctcccaaagacccaatacccacgaatttcatgtgaaaagaagtccacccatacctgaaattcgaagtcccacaacgtagaggtgcgcttcacgacttcgaaaatggcttccttttgcaatntggagtagaagtgatgagcaaagnttggagctttaatgggcaacaatggtggaggagaaagggagaagaaaagcaacgtgggagatgaggaaaaagcttctgaaaatctgctgagtgaagtgagagagtgtggctttntaaaaaaaaanatttctttttcctattgttttattttttaaaagcact

SEQ ID NO: 12044 - DNA, 453 bp, Glycine max
  unsure (1)..(453): unsure at all n locations
tgtcctgaacttgtacaaaatggggttcgctcgctgtcgtaacttacccttcggcgggagggcgacgcgagactcacgggtgcgtcttccaagaaaggaaaatgcatggagtcgccaccaacgtttatttggggaaaacatccgaaaaaccgaaaaagacgtggtctacaaactttaagtgtgaggttcgagagttgtatttacgcacggngaaggtattagcacctgttagacaagtggcctcagatatcttaagaagggggggttgaattaagatattccaaactgtttcccctaattaaaaatctattttattttttactcaagttataaattcccttaatgacaatcttcttaaatattaattcaaatgaagcaacttgaatatgaatataaagcaataataaataaaggagattaagggaagagaaaatgcanactcagttttatact

SEQ ID NO: 12045 - DNA, 410 bp, Glycine max
  unsure (1)..(410): unsure at all n locations
agctaggaactaggcttgtttgcctactttgtcatgcgattatcctgccaaaagaagnggatgtgaagaaagagaatattacaaaaaagagagagaagtgtgtaataagatggttgatgggatagagaaagataagaaagaaaaaccaagtgttttgtacaaatcatgtaactccacaggaaatgataatgtaaagttgagaaagatacagaggagaaagatcacatgaagaggaatgattacaaactctcttttactttaaacatttcattaacattcattatttttctctatctatatgtttctattactagtgtgtgtggataacacgtgagaatttattctaatccataagatctttgcgacaccatgacaaagctgaagctagtattcattgcttcactcttgat

SEQ ID NO: 12046 - DNA, 308 bp, Glycine max
  unsure (1)..(308): unsure at all n locations
ngaaagatatttagtgtttgatgattcaataagcctgagtanttatccaatggtatagactccatgcgagtagaagaaatgaatagaggtaggcaagcagtagccaataaaacattaatatataaaatgagtcaaacctaatttctttgatgaaacagaatatgtaacaataatgttatttgatacaaaactatataaaacacgattcagtttttaaaataatgggtgatggtgagtagaaatagtggcagtaacaagaatggaggttgttgaataacaatgacaacaatggtggtggaagtgatatg

SEQ ID NO: 12047 - DNA, 351 bp, Glycine max
  unsure (1)..(351): unsure at all n locations
ctcagcttaactagctgctcagcctagatcaccctgatccatgnctctctgcttaagcgctccatcaaacctggagtagtggctgccggccttcctcctggactggaggttgctgatgttgatcctcttgagcccgaagccatcctggcctccagagaagggaagtctaaagccttggagtggctaatcctgtggaaatcacgaccagttgaagatgcatcctgngagtccgctccttccattcgagccaggtttccttcctttggccttgaggacaaggccaatttcccaggcagcggtattgatagaaaccttgtcaagccctttaggctctattactcccgtaggccc

SEQ ID NO: 12048 - DNA, 361 bp, Glycine max
  unsure (1)..(361): unsure at all n locations
agctatacacagactttttgtttcatcttttttccaaatcacaganatgncatgaatcaattttgcaagtcatttcccataaaaacaaggataatatgcataatcatcatggatcaatagaactttttaagatcagacttgtaagaaattttggctttggttgctctagtccttccctttttttggcgtgagtaggggagcgggcataaagatttagttagtaatttaaacgggcgatcacttcccatcccctcacgtcttgaccaagatactatcgtttgccttcctttntactctttaccataactctgtacatggntcagccaaagaaacttgtttttctttttttttttaattcccc

SEQ ID NO: 12049 - DNA, 348 bp, Glycine max
  unsure (1)..(348): unsure at all n locations
actcaagcttctatgcataacctaaatgttttctccttttcaatttttgtttaaggggccaactagtcaattactgacagctatcttgtttgcattttgtcacatgtgttgcaggtatcctttcactaacaaacaagcaattcctccaatggactgggaagagtatatttctgagattgcatctgacataatgaaggaacagagcccaaaaaggttttcttctagtacaatttactttgatctttcataataaatagagtgntcaactggacgttgaaatttgtcaggttcatggtttgcctaatgaattgtatagtgaactaatttcatgttntatttagttatctg

SEQ ID NO: 12050 - DNA, 391 bp, Glycine max
agcttacagcaagtatttattataaagcttttattatctagtttagggatttactacttgcaaaccaattgcttaatgttgtgaactgttaaaagcgttatcaatggcggcacataaaagttccatgacacaaccacttggagcattttctttttcctatctttactctatcgtgtagttgattaagtattaagttccatgacacaaccattaggaacaaaatattaaggtgtttgacaagatgagattatagcctaggagtcaaacttgttacacattgattagacaagaaacaaaaacagggggcaatggaaccattcaacgtccaaattaatttggatgttgcgtgataaggccggtgaatgcatattcctccaataagggtttcact

SEQ ID NO: 12051 - DNA, 439 bp, Glycine max
  unsure (1)..(439): unsure at all n locations
tatcctanatggtactccttgctctatcaatttcctaatttaatcacttttaaagtcttgctaactgagtacaaagtgacttgtagaaatttggtgagtaattaaacactcctctatctatcaaattttaaaatcatatacatatctaatatgaatttaatgttaatttcaggatgtgtcgagtaccatgtactcatttatgaaagctataggatttacccatttgaatttggaaaggatcatggagtgcatgattgtttataattattggaggaagactgcaaaaattggaaatggatgaatgaattttgcacaattacaaaatttgcacttagaactcanattatatttaaatttgagtttccagatacaacttctaactntgttntattttggatttgtttgtaattaaagtacattactactatactattatcaa

SEQ ID NO: 12052 - DNA, 283 bp, Glycine max
ccacgggccacgagcatagaatcgcggacgagtatgctcaagtatatgcggaaaaagacgctacaggaagggtgatccactctttgcaccaagaggcaaccatgtcgatggatcggttggctcttaccttgaacgggagccaagaactttctctattgttagccaaggccaaggcgatggcagacacctaatccggccccgaagagattcatgggcttctcggctattgtcagcatatgataaacttaatggcccacatatatagaaatatgtaggatacttg

SEQ ID NO: 12053 - DNA, 285 bp, Glycine max
  unsure (1)..(285): unsure at all n locations
catggngcatttttttaacttaatatatttcttagcgagattcaaagaataatttatcgaaatattaaaatttattataaatgttcaaaaaatatttttcttatatatgaatttgaaatcaaactttcaattataatttaatagacaaaattatcaatcaacttataccatgttaatattttcacatgtgacataacatatatatctttaaagaatggttgtatctttgcatcaaatccttatctcttccgacaccaatatccctgaaaagcatatccaccaaaa

SEQ ID NO: 12054 - DNA, 442 bp, Glycine max
  unsure (1)..(442): unsure at all n locations
tctattcaatntagctctgatgggaaccacatgccatcnctttcagatttgcaccaataggaatacccatgtagataaatgagaaagataatattctacaattcaagaatgatgaataacgttcaatatcttccctatccaccccaatacccctaaatctacttttgtgaaaattgactttcaatctagatacaagttcaaagcacctcaacacactttttacaacaaccacattgtccatgttgaactctccaacaaaaattgtgtcgtccacatattgcaacaagttcacctccacctccttagccttcactttgaaccctctatatatgtattttcttattgccccccttattagcccacttaacccttccgctataatagaataaagaaaatgtgctagaggatcaccgtgtcaaagccctcttgcatcatgaattct

SEQ ID NO: 12055 - DNA, 422 bp, Glycine max
  unsure (1)..(422): unsure at all n locations
agctataacatcagaccacttccagggtgttgtaactacttacatggatntgatggggcctatgcaagnngaaagccttggaggaaagaggtatgcctatgttgttgtggatgatttctccagatttacctgggtaaactttatcagagagaaatcataaacctttgaagtattcaaagagttgagtctaagacttcaaagagagaaagactgtgtcatcaatagaatcaggagtgaccatggcagagaatatgaaaacagcaggttcactgaattctgcacatctgaaggcatcactcatgagttctctgcagccattacaccacaacagaatgggatagttgagaggaaaaacaggaccttgcaagaggctgctcgggtcatgcttcatgccaaagaacttccctataatctctgggctg

SEQ ID NO: 12056 - DNA, 454 bp, Glycine max
  unsure (1)..(454): unsure at all n locations
ctcagctaaacattcaatttcgaggctctcgatatatacgggattatatcaagcatcctttanaaaatttattggcgtttgaatttgctcagagattcaacattcaatttcgagcgtctcgatatattacgggactcaatcagacatccgagtaaaaagttattgtcgtttgaattggctccgagcttcaacattcaatttcgagcgtctcgatatgttacgagactcaatcagacatccgagtaaaaagctattgtcgtttgaatttgctcagagattcaacattgaatttcgagggtctcgatatcttacgggactcaatcagacatccgagtgaatagttattgtcgtttgaattggctcagagcttcaacatttaatttcgagggtctcgatatattacgggactcaatcagacatccgagtaaaaagttattggcgtttgaattggctc

SEQ ID NO: 12057 - DNA, 282 bp, Glycine max
  unsure (1)..(282): unsure at all n locations
ttttgcattcgcccaaaacngagggacgcaaggactgtccttgcacgttcccctattattaagtattatctgtgcaagaatacaaggctacacgaacactagaaacccatgtccatccttggtacacactcgtacaaaaatgcaaggcacgcccttggtaagctcactcctttagaactatgatgaatatagccaatggtccaacttccataaggcaaaatgaattaccaccacattggtcagcgagaccttaaaccaggtggaaatcatactaagttctca

SEQ ID NO: 12058 - DNA, 244 bp, Glycine max
  unsure (1)..(244): unsure at all n locations
tttgcagaggggctttaagacacaaaccacaccctgcacaagacaagntgatcaagtctctggtccagtgaccaccatcagttttcttaagctttagttaaagagcaagggtgtgttcctatcctccttaagctatgcacttttgcctaactgtggagtggtgcactttaataaatttggtcacagttatgtttcaggcccccttgcacattattacttttcataatgaatctcataaatattt

SEQ ID NO: 12059 - DNA, 205 bp, Glycine max
gatccttaagcacctgcagctgcagctgagaaaggttccatatttgtgactagggcggcgcgagggccaacagtttcaatcacaatgcgcataacccccatcctgtgccactcaatgactacgtactccactacccatatctgtttctaacacggtccataatctccacttcccaacatcagtatacaacattaacagacaacta

SEQ ID NO: 12060 - DNA, 444 bp, Glycine max
  unsure (1)..(444): unsure at all n locations
tgtctcagcgtttatgcgagacagagaccaacatgttagttatcatcgccaagtacgaagaagagttaggtctagccacggcccacgagcatagaatcgcggatgagtatgctcaagtatatgcggaaaaagaggctagaggaagggtgatcgactctttacaccaagaggcaaccatgtggatggatcggtttgctcttaccttgaacgggagtcaagaacttccccgattgttagccaaggccaaggcgatggcagacacctactccgcccccgaagagattcatgggcttctcggctattgtcagcatatgatagacttaatggcccacataattagaaatcgttaggaaacttgtatggtctctcagaccttgactagatacgacttcctttttgaaataaaatgagttggtcccatgtttctactccanaaagcttatg

SEQ ID NO: 12061 - DNA, 121 bp, Glycine max
agctattactgttatgcttgtgtgtattattatattaaataatttgatgaagtattcagctttctaatgccgcacgtctaactaccgactctgtactatgcttgacatcaagttcttgtgt

SEQ ID NO: 12062 - DNA, 372 bp, Glycine max
  unsure (1)..(372): unsure at all n locations
tagagaaaacctttcacccacattaatcgacaaaactgatgtctttntacgagatatggttntggntggcaaatattatgacgaaggttgggatctctagcaattagaaactaagtcataaaagagaaaaaatatttaacaagaagatcttgtcacatgttattctggaacaattggataggcaataggaaatggtgaaatagagctgcagagtagacattgtcaagttaaagagattagctctgatgaaaattgagcaaagacattgaagagtaaccactttggtaaggaagcttaccaaacacgaagtgtcttgcattttagtgccttcattgctgctttcgcaaacactcgtgcagcctctgcctcaac

SEQ ID NO: 12063 - DNA, 392 bp, Glycine max
  unsure (1)..(392): unsure at all n locations
cnggtttgtctacaaagcacccataggaatgtctccttatcgggttgtctttggaaaggcatgtcatcttccagtggaaattgagcacaaagcatactgggcagtgaagacttgcaacttctctatggatcaagctggtgaggaaagctgatgcaatcctaccccgcaagggcattggatagaaaactccaagtagattgggccagagatgcaagagaaggccctagggttcttatgagccttagggtagatttcgggcccatgggctaagtacgagcccacttttctttgtaaatattagattaagggttcattatttttgggccttgtatttacggctccataatgtaggtagggtaccctaaaaatataggatctntcagcccttgatg

SEQ ID NO: 12064 - DNA, 451 bp, Glycine max
  unsure (1)..(451): unsure at all n locations
ntgtggcaaaggaagaacaagaagagagatgagtagattttgtttcttagaagttctaaaaaattgttaaagagttgtaaaagttattttgaatgcaagtcaaggtcttacttttatagactcttcatgtctagtcaagaaaaccattggaagagttataaccttgagaaaatcatgtcaagagttacaacttttgaccttttattcaaaagctatcactggtaatcgattaccataatcatgcaatcgattacacaatgcatttttatgaaaagttgtgactcttcacaattggatttgaattccaacgttcagatacactggtaatcgattaccaatttagtgtaatcgattacaccatctgaaaaatattttggaacgttgcaaattagttaaaaaaattttgaaattaaattctgtcactggtaatcgattaccagagagtaaacac

SEQ ID NO: 12065 - DNA, 400 bp, Glycine max
  unsure (1)..(400): unsure at all n locations
agcttctattacctatctacagttttttctatagngctattattacaagaccaactcttaaaattaaatattatgatttgccctcatactcgccccattttcccaaatactttcagggggtgcattccatgttggacggctgtccaggaaaaacatgggaacctaacgagaagaggataaacaagcttgtcttcattggaaggaatttggatgaaactgcccttaaaaaaggcttcaaaggttgtttagtatagcattaaagatctgttaccagtcaagttcccaagcagcagcccttgtgtgtcttattttataaattccagcaagcaagtatatgtacatggtagcaccaatcgaataaacgttggttgttcgtgctatatactgaatatacagactc

SEQ ID NO: 12066 - DNA, 390 bp, Glycine max
aaatatgtgggctcttattattctttttattgcaaattatagggatacaatatttattttgtaatttcataaggccacttgtttgttcttcagtagaaattgaagtagaggttctatttttctcaaaattttcatagagaaaatctaccgtctattcaacttggtttaatctgatttcaaaagtagaaatcctgttatttataactttatttctaaaattattttcctttttaaaatcaggaaaatcaattttcaaaattgtttgtaagcaagtcttgcaacaattcttatagcataagctacaatgagttcttaatgttttatgagaatatcttttgcaaaaataacattatttatgattacgtcctgtatagaattatatttcatgtt

SEQ ID NO: 12067 - DNA, 331 bp, Glycine max
  unsure (1)..(331): unsure at all n locations
gccttatcaagtaaanggatcatctctaagggccaacgccttaaaatgatcacctttcaagtaaaaagaatcgcttgattcacgcttaagaaagaactacgtaggttcgatttcctcatcgatggagggtacgtangagcaaaagccccgcttttgtcgacctcaaaaaataaaaagaaataaaagttaaggtaatacaatttccacaattctaaaaaataggttgttgtcctttgagacaaacgtgagaggtgctaataccttcctcaaacgtaaatacaactcccgaacttagaattttcattttgatcggttccctncggtttttctg

SEQ ID NO: 12068 - DNA, 457 bp, Glycine max
  unsure (1)..(457): unsure at all n locations
gacacttgaaactcagcttataagcgcgggtccgggatacaaaggtcaagcgtncgtgatgtgcgaagattatattccgagtcctcaggatttggaacgaccatgctctcctgatttccagctgggaaattggcgagtggaggaacgccccggcatttacgcaacaagcataatgtaaacctttaccgatttaaaagctctatagttgggcctaggctttagagtgtacattttgttaaagctttgagtctcttgcttttgaatttataatacaaggatctttcttcatctgttcctggtctctacccattctcattcatttgcatgtttacttcttttcctaaaacggcagattcaatgacaagtcccccgaaggtactaatacctgtgacccgtctatcaacttcgagcaagaaatgaatcaaacggaagatgaaggagatgatgatgtgggact

SEQ ID NO: 12069 - DNA, 376 bp, Glycine max
  unsure (1)..(376): unsure at all n locations
agctttganaacactatacaatagtagggtatctttcacaaagagggttaaaactaaaacacaaatntcctactcaaagatctagcacagtgtgttgtagatttagaatgcttcaacttgttcttcgtagctttcaaaaatgcctcttaaagctctcaagaagaaccatttagtgggctgcacatagctaatacacttttggagcaagttggttcactttcaagttgtcatgatatgatagtagacataaccattctgaggttctcattctaaagagcctttttaatggtcattctgaagaaccatcaanattgtcattctaattgttgcttagaatgaatccatactttgatgaactcccttgattaagttcata

SEQ ID NO: 12070 - DNA, 410 bp, Glycine max
  unsure (1)..(410): unsure at all n locations
ntaaattaaagtaaatttgggattttagtgaatgcatatgttacacattgcatcttattgggccttgctcaatgcgcacgttgtactaaagtcaaattgggtcttcatcaatgcataaatttcgcttctgtcgtattaaactttaatgaatcattggtgttacacttataccttatattttgaaatacttaattttacaaattttgattatcatatattttcataatataaagggtatttatttattatcatttttaaatatttattttgtacaaaacacaaattaaaagactaatgataagcatgacttatttatcttaatcaaataatgtaaatattattttgttaattntattaaaaattatcatagtattggttgttaattaaaaatatactaatnactaatttca

SEQ ID NO: 12071 - DNA, 330 bp, Glycine max
  unsure (1)..(330): unsure at all n locations
agcttttagaatatctggttattattcttaaatcgaaatcctttcctttcttttcattggtttcttctttggggggtgcatggtggtagacagaanaataataaaaaaactagtatcctaacgacttgtagtcatgttcaattgggtggctggcattaagtatacanttgtagtcacttgtactggctgttcattttaatatcttgaatggtgtttactttctctgttatgtttaactcttatttcaaaatatggattccctttatgactgaactaatttaagaaattggacatatgaatttctagggtgcaacaggtttgaagatgact

SEQ ID NO: 12072 - DNA, 434 bp, Glycine max
  unsure (1)..(434): unsure at all n locations
ctcgccatttttgctagtgtagcatttgtgggaattacttcttgtaccctttgaggcatagattcttctgtgtcttgtgatggtgttgaagttgaaccctcatgacctacttgtattttactatcaacttttgttatagtatcttttgtgcaaatttcttcttgacccttttgagccttagactctggtgtgtcctgtgatgaggttgaagaagcctcatgagcaacttgttttttactatcaacttttgtaatagtatcttttgtgggaattccttcttgacccttagactcttgtgtgtcttttggtggggttgaagttgaagcctcttgaccaacatgtttttcactttcaactttggtaagtgtagctttntggggaattccctcttgatccttntgatgcatggactcttgtgtggcatttggtggagt

SEQ ID NO: 12073 - DNA, 385 bp, Glycine max
  unsure (1)..(385): unsure at all n locations
agcttcttagtctcaactgatgaagatgaattcgtgacatctttatgcactcctctaatgacaatagcatcatttctggcactaaattgctgggagttggaagccatcttctcaattaaatttctggcttcagcaggggtcatgtctccaagggctccaccactggcagcatctatcatacttctctccatgttactgagtccttcataaaaatattggaggggaagctgctcaaaaatctggtggtgagggcaactggcgcatagttttttaaatctctcctagtattcatataggctctctccactgagttgcctaatgcctcanatatcctttttgatggtcgtggtcttggaagcaaggaaaaagttttctaagaatactc

SEQ ID NO: 12074 - DNA, 437 bp, Glycine max
cttgaaggtgtgtagcctaccattttccatagtagaatactggttatgtgtctatctatcattgtcatcgatttttcgtcattgaggtgccactttgagctgccaggttctccacctttgggcgtattctttgaaagatttgtgccccctttttacacatgttctgtagttgcatcctatccgaagacattatattgacactgcctaacgaaggcaaccactaggtccttcaaagaatggactcgggaaggttccaagttagtgtaccaggtaacagctacccagtaagactttcttggaatgaatgtatcagtaattccttatcttttgcgcatgcccccatcttccgataatacatctttagatggttcttggggcaagtagtccccttgtacttgtcaaagtccagcaccttgaacttgggaggggtgatgata

SEQ ID NO: 12075 - DNA, 422 bp, Glycine max
  unsure (1)..(422): unsure at all n locations
agctnttggcatattggtttataatgagctcatgcctactttatttgcctatatttcacgtacatgtttaagacccttaattntctttttttccagccttgcatttacataaattactgcataacaaacctataaacattcttttggctaattattattgatttggaaatattttgccagcaatttataaactatatttctcccaagatgttttcttgatgttccctttcctatggtatgcctgttatttgtgggattagaaggatgttatatccatgtggttggtgagacttgttcgtattttcctttnttaactggtgacagatagtcctttcttgtcactgcaggccaaacagaaacggaacaatcggaaaggaaaggataaaggtagagaggagagacctattgtggctgtatatgac

SEQ ID NO: 12076 - DNA, 312 bp, Glycine max
  unsure (1)..(312): unsure at all n locations
tgctctggcgagagggcatggtacgaggaacaaccaactagtttattctcgcgaaacgaaacngagatcgatagaagaaataggaagagaaagaggacaaggatccaaccgtgggaatggaatgggaaagatgatatccgatcgtgaggatggatgggaccattaatgctaactgctgcttaatgcgcctcttagctctttacttctatttttcttacaagctcaggaatcctatttgactaatatatgtcactaaaaggagactttttatgattgaaaatctactcagcacttggaactctaatgaaatta

SEQ ID NO: 12077 - DNA, 424 bp, Glycine max
agcttcacacagacaagtgtttcatcttaattccaaatcatatatatgtcatgtatcatttttgcaagtcatttcccataaaaacaaggataatatgcataatcatcatggatcaatagaactttttaagatcagacttgtaagaaattttggctttggttgctctagtccttccttttttttggcgtgagtaggggagcgggcataaagatttagttagtaatttaaacgggcgatcacttcccatcccctcacgtcttgaccaagttactatcgtttgccttcctttttactctttaccataactctgtacatggttcagccaaagaacttgtttttttctttttttttttaatttcctcttgctcctctccattttgattgatttctcctctcttcttttttctttttttgatgaacattt

SEQ ID NO: 12078 - DNA, 450 bp, Glycine max
tcctatgcataacctcaaatgttcatctccttttcaaaatgttgctctaagggttccaactagtcaattactgacagctatcttgtttgcattttgtcacatgtgttgcaggtatcctttcactaacaaacaagcaattcctccaatggactgggaagagtatatttctgagattgcatctgacataatgaaggaacagagcccaaaaaggttttcttctagtacaatttactttgatctttcataataaatagagtgttcaactggacgttgaaatttgtcaggttcatggtttgcctaatgaattgtatagtgaactaatttcatgttttatttagttatctgagtgacttgtgtggtgtgcaatgcctctttcatattctctatctcatctatcttaggttgtttcaagttcgaggaaagctctatgagctgctaatcaattgcatt

SEQ ID NO: 12079 - DNA, 425 bp, Glycine max
agcttcggaagaaagtgatgaggtacaagtcttaaaggcatatcttgaaagagcccgagtagtcgaagagaagttcaagtccatagccatcaaagtctgaaaagagtatgatgaactaagggacgtcaatatggccaccgctgaagccttggaacgggaaaccaagaaggcccgaaaggaagagcacgtgccagcaaagttttgaggggctttatagggcagcaatagtaagctcaagctccgaagaggtgaaaggaatcatcacgggtcaaaggcatgatcttgaaggacgagctaaaggcttaccttatgtcgaaaagaaatttgtcccaacagttaagcgagactgaagggaatatgtgggccgtcatcgatgagtgcaaagagaagctaaatctagcggcgactcacgagcaaaggctaga

SEQ ID NO: 12080 - DNA, 450 bp, Glycine max
  unsure (1)..(450): unsure at all n locations
cgccaaattgctatacatggattctggtattgtgccattcnatttattatgatagatgtcaaggtttgtcaagttatggtactcaagtatgaaactaggcaatccgccagtgaagacattgagatctaaagcaagatgagttaaggcaaggcattccagaaacatattcttacatgcgaatccaactacgaattagttcagccaggttttgttgatattaggcatagaggtaaatgtaaatataggaaaaatataactatatggtgtggtccacgtccgctgtggtatgtagtgattataattgaattccttgttttttaaaccaccataatgaaggtctttggttctctgacggcacaatgactccaatttccatgcatgaagatcaatgcactagtagggtcatggcactaaaatacaaaatagaaaacatagagtctatcattgtac

SEQ ID NO: 12081 - DNA, 404 bp, Glycine max
  unsure (1)..(404): unsure at all n locations
agctnngngnacaagcaaacaaanaactattctaaaactttattttaaagaacngaaacanaaaagcngaaanntaaangacataaatcataaaanaaccgaaaaaaaactaaaaggggctgaatgcaaaaatttaaatgtcctgctcctcctgtggctgatcttcattaagatccagtgtggagctgctgatgaatcctatataagctgctcaggctccatgactggtgtggcatcatcaggaataggtgcaggggctagagatggctntggtataatctctggagaagnttcctcctcccgagccataggtacacctgcatcaaaatcaaagggctcaggaggagtcagctcatcctcaccctctactggtgctggtagtggctcctctggaacaggctcct

SEQ ID NO: 12082 - DNA, 474 bp, Glycine max
  unsure (1)..(474): unsure at all n locations
gacactatagaaactaagctagcaagctttcacaaatttcttcacaaataactatcataatgcataaacctagtaaaactacccatcatatctcccaaaacccaatacccatgaacatttatgtgagaagaagtctacccaaacctgaaatctgaagtcccactatgtagaggtgcactttacgactccgaaaatggcttcttttcgcgatttggagcagaaatggtgagcaaaggttggagctttgatggagcttcaatggtgaggaagaagaagggaatagcaacgtgagagagagagggagagaagcttctgaatttttttggctgagtgagtaaggagagagagaacatggcttttagtttaaaaagactntttctctttctttttttttaaaaaagatgtgccacatgtcttcttttgagtggagcananaggggcccactttttctctggatgtgactcatactcagt

SEQ ID NO: 12083 - DNA, 379 bp, Glycine max
  unsure (1)..(379): unsure at all n locations
agctagttggttnatgaaactngatctgctgtatggttatcaccaaatccacatgcattcttcggacattgctaaaacgacctttcgcacgcatcacggtcactatgaattcaaggttatgcccttcgggctatgcaatgctccctccacttttcaggcgacgatgaacatgcttttccggccattccttcgccggtttctcattatcttctttgatgacattttaatctatagcatcacctttaatgatcatgttcttcatttacaacaagcttttcaggttctgttggacaatcaattcgtcctgaagttgtccaaatgtacctttgctcagccacaggtggagtacctcggccatgtggtctcctagcgaggagtg

SEQ ID NO: 12084 - DNA, 406 bp, Glycine max
  unsure (1)..(406): unsure at all n locations
aggcaaccgatgagcaagaatctntttgatgaccttgtaggacacattacaaagatcaataaatctaaagttatttcgtcttcaccatatgatcaaccttcagaataagagtgatcaatgtctcattgatctctttaatcaagtatgactccttaaacattctccgcaccatagcctaaagaacttctcccacaatctcccattgatagcctggaatccatctaggctcgatgctttgaatgttttcatacttccgatgatctgacgctttgaatgccctcgtacttctaatgatcttatgaactttgtggcaagaaaccgaattgcctagagaagccaaagtagaattatcttgagctggaaataaacctataacacccattagaaaataatctaaagtttcagc

SEQ ID NO: 12085 - DNA, 365 bp, Glycine max
  unsure (1)..(365): unsure at all n locations
agcttctaaaaaagctttcttatacttttataacaattttcattattcaagagtagatctataaaattngaaccatagaaatgcaagaacaagtgtagatcttgtcataacctaccctacgacaggggtgcgaaaggcaaaaagaaaatgtgtgtcttccaaaaagaaaatgcgtggcagtcaccaccaatgtttatataaggaaaatgttagaaaaaaaccaaaaagtggtctgcaaattttgaaaataagggttcgggaggtgtttacgcatggggaaggttttancatcccacgcgcccgtcataagggatgacaatctttaaccgagggtgcgcaacgtgacttcaaaaatatgtatattt

SEQ ID NO: 12086 - DNA, 439 bp, Glycine max
  unsure (1)..(439): unsure at all n locations
tctntgagaaaacttccttgaaagcagagctagcttacacacccatctaaaaactaagctcacctccttgagaagcttccttgggaagctagagcttagctacatacacccatctaaaaactaagctcacctccttgacaaaatacatgaaaatacaaaaaaaaagtccctactacaaagactactcaaaatgccctgaaatacaaggctaaaatcctatactaatagaatggccaaaatacaaggcccaaaagaaggaaaaatctattctaatatttacaaagaagagaggacccaaccttggtctatgggctcagaaatctaccctgggattcatgagaaccccaaggccttctttggcagctctagcccaatcctcttggagtcttcaatccaatacccttgcggggtaggattgcatcacttaagctgagtttcg

SEQ ID NO: 12087 - DNA, 396 bp, Glycine max
agctataggttgttcaattgtcttagatttttgcacaaaagggcaaaggtctgtgtggtggtcgacagaggagcataaaccacatagtctggcgacaggtgcatattttttattcatggccagttgggttaccaggttaaccaaggcatccagttgaccttcaagtttcttagtctcggctgatgaagatgaattcatggctacttcatgcactcctctaatgacaatagcatcacttctggcactaaattgctgggagtttgaagccatcttctcaattaaatttatggcttcagtaggggtcatgtctccaagggctccaccactggcagcatctatcatacttctctccatgttactgagtccttcataaaactattagaggagaagctactc

SEQ ID NO: 12088 - DNA, 453 bp, Glycine max
  unsure (1)..(453): unsure at all n locations
ntcggtattgttccctaaggacgacattctccttttgtgttgttctccatctcttgggtgtacttttgcttaagtgtgttcatttccctctacaaggagactatcaaagcatgattatcaaacacttgacgtacaatgttcacctaggttgtgggactcccatttttaggggctcatgtggtaggcaccccaaatgtggtgggcacctatcccttgggtggtctttcttagttggttgtgggggtcttttcgccatttgcttccattgatggtggtcaaaggagaatttttcccttgtcccacaatgggcaccaaatgtttttaccaaatatggtagaatcttctgatgtcagtggtcctccaagaactcctccacgaatggtggtgagtgtacctacaatgacattttgatgcttaagttagcgacacatagataagtaaaagtatcaatat

SEQ ID NO: 12089 - DNA, 388 bp, Glycine max
  unsure (1)..(388): unsure at all n locations
agctacttagtctcagattatgcnagctgtttttgtagctacctcatgcactcctctaatgactatggcatcatttctggcgctaaactgctgggagttggaagccatcttctcaattaaatttctggcttcagcaggagtcatgtctccaagggctctaccactggcagcatctatcatacttctctccatattactgagtccttcataaaaatattggagaagaagctgctccgaaatcttatggtgagggcaactggcacatagttttttaaatctctcccagtactcatacaggctctctccactgagttgtctaatacctgagatatccttcctgatggttgtggtcttagaagcaaggaattttttttctaagaatactctc

SEQ ID NO: 12090 - DNA, 454 bp, Glycine max
  unsure (1)..(454): unsure at all n locations
ntattcaagacaagaatccaagaaagtcaagatatatgatctagtttgatctcttagaatctttaggaagaagtttccaaattgaaacaaacaaaaggtttgaccaaggaattctatcctttcaaattgagatttgctctctggtaatcgattaccagcagtttgaaaatgttttaattcaaatttttaaaacctgtaatcgattacataagtcttgtaattgattaccagaggggattttcagaaaataatttccaagagacatatctattcaaatgttttatgaacggccattcaaatgttttaaagagagttttcattgcccaaacagctttatcctctcgaaagatcaagagtttttctgaactgaaatgtcttatcctctcaaaaagattccttggtcaaccacttgcttattcaataaggaattnttgattgatcttcattntacaat

SEQ ID NO: 12091 - DNA, 414 bp, Glycine max
  unsure (1)..(414): unsure at all n locations
agctagnagagnnaagtttcttactggtttattctatnactgttgtaatttaatcgattacattgttggttgagacaatgattgattttttcaagagtctctactttaattgattaccaagtagattaatcgattacttctctcttgtttaagttgttcagaagtgaacaagaacattttaatcgattacctgcgtcatctaatcaattacattgttcttgagtggttttccagatgttggacggacactttaattgattacttcattgaaatatttgattactttatagatcttatcgattgcaagcggntataactatnttctctataaataaccagcttgtgttcacatctatacatcatgagatcttagtgaacactcaatacatctcanaaattacttcttagtcttag

SEQ ID NO: 12092 - DNA, 451 bp, Glycine max
tgcctctctctctcgttgctatgctctctccttattcttccattgaagtcttcatcaaagctccaacctttgcacaccttttctgctccaaattacgaaaggaagccattttcggagtcgtgaagcgcacctttacgtgtggcacttcaaaatttcaggtttgggtagacttctttctcatatgattttcgtgggtattgggttttgggagatatgatgggtagttttactaggtttatgcattgtgatggttatttgtgaagaaatttgacgaaagcatgttaaacttgtcatgtttggtgtgagtcaagcttacccgttctgttttagggattttatgatgatgcttgtgaggtttgtgtgctgaagttgcttatggaaaactgttagagatgaagggtagagttaacctacggttagaaagtgagaatgtagtgctatgagtggaaaa

SEQ ID NO: 12093 - DNA, 377 bp, Glycine max
  unsure (1)..(377): unsure at all n locations
agcttctccctcattttcttataaatatgtgtataagtgaagagaaattttgttcagccctcctggtaattcagaatcacttgaaattaatgaaaaaaattggttccgtgaagaaaatccaagccgaggcgcttccgtaacgtttccgtgggtgatttcgcgaaggttntcgactgttcttcgacgttcttcattcgttcttcatcgttcttcggtcttcaatcggtaagttccctagatcgaacttttcaattcattctatgcacccttagtggtcctcattgtttttacgtgctttcatttacatttcatttactntcccgacccccctttgacgtgcttaagccatttatttaagtcatttctcgcttaaatct

SEQ ID NO: 12094 - DNA, 435 bp, Glycine max
  unsure (1)..(435): unsure at all n locations
ntgaaggtgcgtagcccatcttttctcatagtagaatattggtaatgtgtctactatcattgtcatcgttttttcgtcattgaggtgccactttgagctgccaggttctccacctttgggcgtattctttgaaagatttgtgccccccttttgcacatgttctgtagttgcatcctatccgaagacattatactgacactgcctaatgaaggcaaccactatgtccttccaagaatggactcangaaggttccaagttagtgtaccangtaacagctacccagtaagactttcttggaaggaatgtatcagtaattccttatcttttgcgcatgcccccatcttccgataatacatctttagatggttcttggggcaagtagtccccttgtacttgtcaaagtccagcaccttgaacttgggaggggtgatgata

SEQ ID NO: 12095 - DNA, 395 bp, Glycine max
gatccttaagcacctgcggctgcagcttgttattgattgacatgaaattttattgcaatagtgacaactgctagtcttccttggatgacgggaacaactgtaaacccactatttcaagctgcatattcatcacaagctgcaaagtagaaactcactctgctagttccatggctttgtaaattagatgaagaactggtttatcccaccaatctcacttttacttcaccagaagaaatggtttatcccaacaatcatgctttatgtttcatacttttatatcactagtgtcagttcttatatttttgtcattctcatgtgtattttttggatgcaaggcggagtataatacctggcggagacattgttgtcaaattataccatccatggatgctgac

SEQ ID NO: 12096 - DNA, 335 bp, Glycine max
  unsure (1)..(335): unsure at all n locations
ngaaggtgtgtaacccaccatcttttcatagtaganaatcgataacgtgtccactatcattattatcatctccttctccgtcattgggggcactacttgagctgccagatccctccacctttggtgattcatgctcctttttacacatgttctgtagttgcatcctatccggagccatataagaattgtactaatactgcctaatgaaggccaccattaggtctttccaagaatggactcgggaaggttctaaattagtataccaggtgacaactgccccagtaagactttcctggaagaaatgcatcaataatttttcatctttcgcatatgct

SEQ ID NO: 12097 - DNA, 83 bp, Glycine max
accgatctttaagaagagacaggccttttgatgaccctgttcgagacatgtagggttcgcttgatgaatatggaaggtatgaa

SEQ ID NO: 12098 - DNA, 310 bp, Glycine max
agcttgcaacttggcttagcaaaagagtgttttacaacactttttctaagccgcctatggaacctgaagaggggagaaattgattattaaacgcccaatacaaaattataaattatttattacctatatttaacaaaaagtacttatagtatgacaaaacaaccataaattgggaaagtgtgattcaatatacacaggttatatacacaaaagttagttcgattcatcgactaacaaagtgttagactacaaaaagtcgagggccccttctagttttcaagctatgagggaaggagccgaggtgatgcct

SEQ ID NO: 12099 - DNA, 378 bp, Glycine max
agcttaaacattcaatttcgagcctctctttatatcacgtttattcaattaaacatccgagaaaaaagttattgtcgtttcaatttgctcagaggctcaacattcaatttcgagcgtctcgatatattacgggactcaatcagacatccgaggaaaatgttattgtcgtttgaattggctcagaggttcaacattcaatttcgagcgtctcgatatgttacgggactcaatcatacatccgagtaaaaagttattatcgtttgaattggctcagatcttcaacattgaaattcgaacgtctcgatatatgacgggactcaatcagacattcgagtaaaacgttattgtcgtttgaattggctcagagcgtcaacattc

SEQ ID NO: 12100 - DNA, 442 bp, Glycine max
  unsure (1)..(442): unsure at all n locations
gttgagccaattcaaacgacaataactgtttactcggaggttgtattgagtcccgtaatatatcgagaccgtcgaaattgaatgttgaagctctaagccaattcaaacgacaataacgttttactcggatgtctgattgagtcccgtcatataccgagacgctcgaaatngaatgttgaatctctgagccaattcaaacaacaataactttttactcggatgtctgattgagtcccgcaatatatcgagaccctcgaaattgaatgttgaagctctgagccaattcaaacgacaataactttttactcggatgtctgattgagtcccgtaatatatcgagacgctcgaaattgaatgttgaacctctgagccaattcaaacgacaataactgtntactcggatgtctgattgagtcccgacatatatcgagacgctcgaaat

SEQ ID NO: 12101 - DNA, 343 bp, Glycine max
  unsure (1)..(343): unsure at all n locations
agcttgaatgccacgtcctcctccacatcatcctatcctatactaatnctcaattctcattccttagcccaaatcatcctaataatacaaaccccaaacccatgattggtcccactaattgccccccgacaagcaccatggatggtcccataggactacacatcatctagtgtgtgtccaacttcatggaacaccggggcccatctttgtttcaagtgttaattagatttgggagacatgtggtccccaccatgccctaagctgcgagacagtggcattagttggcaaggcgcaagcgggcttaagccgccatagttgctaacacgcgtatattttgcacaca

SEQ ID NO: 12102 - DNA, 403 bp, Glycine max
  unsure (1)..(403): unsure at all n locations
gatactcgtgttcataaaatgtatttgactangtgnatttcttctattagagatgaaataactatgattagaagttagcgagttggaaccagtttatctttactttatttggtttgaaatttcggtgtagtaattcatttgaatccaaatttgatccgttcataacccaataatgggataagattggtccaatcgatttactaatgtaatatatcttaataattcaaaaaaacaaaataagtatacaacttaacatatattttacaatacataatgaacatattttaaatcagcaattatgtataaaaaagcaaactatttaaataattctattatagaaaaatcagagagactgatcatatatgtaactattcttaatgctcactggtttattatatatgac

SEQ ID NO: 12103 - DNA, 431 bp, Glycine max
agctatcactctaatgtcagattcaggaactaattatatattgacactcgaaattgaacacggaagctctggtccaaatcatatggcctaaacttttgacatggctgtacgattgaggcccatgatatatcgagatgctagaaattgagaaatggaagttctcgaaaaattcaaatggtcataagttttcactcgaatgtcagatttaggaacaaaatatacagagacgctcgaaattgaacaacggatgctctctagaaatttaaatggtaaaaaattttcacacgtatgttagattcaggcacataatatatcgagacgttcgaaatagaacaccgaagctctggtccaattcaaacgtccataacttttgtcatgggtgtatgattgacgcccatgatgtatcgagatgctagaaattgaataacgga

SEQ ID NO: 12104 - DNA, 416 bp, Glycine max
  unsure (1)..(416): unsure at all n locations
tgatgcaacattcggagaggttaatgaaacaacgagaatangctctccatgagaggttggatcaaatggagaatagagatcataatgaagaagaaaggaggagaagagggaatgatggtgttcctagacaaaaccgaattgatggtattaaactcaacattcctccatttaaaggaaagaatgatccggaggcctacttggagtgggagatgaaaatagagcatgttttctcatgcaacaactatgaggaggaccagaaggtgaagcttgccgccacggagttttccgactatgctcttgtgtggtggaacaagctacaaaaggagagagcaaganatgaagagccaatgtgatgtgaatcttacggngcgcggatcgcttgatacaggctgtagaagttttggatgacgccactt

SEQ ID NO: 12105 - DNA, 354 bp, Glycine max
  unsure (1)..(354): unsure at all n locations
agctactactgcaaagttttttttggattttgctagnaatacctaagctaaacacatatatcacagcttttatataaattcattcctgcttcttgctaatagaagtgtccatcctttgcagtattctatggtaagaggaaagaatatcaatctacctcaagaaattccgaccatgtttggcaaattatttttcagcaaaataatcatttcatttttagctctctccaaaagctgccaaaaacaatgcaatagtttcccacaaataagctaatccaaatatgcaccaaaaaacctatctttttttttttgcaataaactgtatcaacatcatatgattagtgccttccttgacat

SEQ ID NO: 12106 - DNA, 437 bp, Glycine max
  unsure (1)..(437): unsure at all n locations
tgtctcccaattatgtaggtattaagactgtggntggatgnattatccttcctgaacccattattcggcatcatatgcaggaactagactcgtatagcagttcagtttctgcaggtgtccactcacaccgttctttaagaagagacaggccttttgatgaccctgttagagacatggagggtatgcttgatgaatatggaaggtatgaaattgttggaagaaaatattgactttatgattttctcgtacctctgcaagtgtgtttactgtttactcaagttgcatttggtcttgcagcaactcaagttttcagctacctggattttgcatgccccgaatgcttggagatggagggagtgattctgatggaggggagtttgaggctgtcacacctgaacatgattctgaaacatatgaagtgcaagaaacaactcatg

SEQ ID NO: 12107 - DNA, 332 bp, Glycine max
  unsure (1)..(332): unsure at all n locations
agcttgaactcctcccatatagggaccnatagatctagtctatctttgtataagagnggagcaacaacttanaaaaaatctttcttcaaaatcttatggctttcactctattctaaggaagaaccaagccaaaggaattttgggggttgcaccttcaaaacccaagaaagataatggtaagaccatagagaaatacacccctaagactagttcccaagcaaggactagccacattaaatgcttcaaatgtcttgggagaggtcacattgcctctcaatgccccacaaagaaaatcatgattatgaggggtcaagatatttatagtaatcaaa

SEQ ID NO: 12108 - DNA, 331 bp, Glycine max
  unsure (1)..(331): unsure at all n locations
tatccctagaggtgatggactctntcaggtcttggtgagtancaataacaatttctataggttgaacctcctataagagtgtggagttaacaccacttttaacatttctgatttaattccttttgcaggtggagctgatactgaggaaaaggaaccaacagatttgaggtcaaatcctcttcaagggggaggggatgatgcaatcctccgtaggaaggaaccagtcactagagccatgagcaagaggagaggattgggctagagctattgaagaagaccctagggttctcatgaacctcanggtagattttggagcccatgggccaagctt

SEQ ID NO: 12109 - DNA, 259 bp, Glycine max
aagaggaattaaatactgataagctaactaatactagcatgaactaatacgataaataatgtcataattgcaaatttaaacttgcaaattaaactctatatttgctgtaatctttgatgctcattaatcaacaccggacactggtaggtctgaaatagtacttactgatgagccgaccgaataatacattaaaatatactagaggtctagtgttcacgacagatcacaagttatgagatattaaatatacatggggggg

SEQ ID NO: 12110 - DNA, 433 bp, Glycine max
  unsure (1)..(433): unsure at all n locations
gacactatgaaactcacgcttgaggtgcgtagcccaccattctccctagtagacaattggtattgtgtctactatcattgncatcggtcttttcgtcattgaggtgccacttgaactgccaggttctccacctttgggcgtattctttgaaagatccgtgccccttttttgcacatgttctgttgttgcatcctatccgaaaccatatcaaaattgtactgatactgcctaatgaaggcaaccattaggtcattccaagagtggactcaagaaggttccaggttagtgtaccaggtaacagctaccctagtaagatttccttggaaggaatgtatcagcagttcctcatcttttgcgcatgcccncatcttccgataatacatccttagatggttcttggggcaagaagttcccttgtacttgtcaaagtcca

SEQ ID NO: 12111 - DNA, 387 bp, Glycine max
  unsure (1)..(387): unsure at all n locations
agctcgcgnccatnatcatttattagagttacctcccctatgtcaacaancntgctggaganatggatgcccatcttcaccataccgaaatcccttttttgatatgatgaaaaaaaacctctatgaggagtaacatggaaggatgctctatagtctattatccatatacaatcattagatgcaatatttaaataattttcattattgataagaaaaacattctcatcatctgatgccacggcaatagtggcttcaccttagtctttttcattgagtcaatttgattagcatggacagttccagccttctgatctctcttcaagaatttgcactcagacttcttatggtcttaactttcgcagtagcagcaacccacgccttgggatg

SEQ ID NO: 12112 - DNA, 372 bp, Glycine max
  unsure (1)..(372): unsure at all n locations
gctaaggaagtgcgactgctttaccaatagttgaaacttaatcgggagatgtttcagcttatatttataaagtaaatcagctgaatgtatgacattaaggaataaaaaatgtaagaagctcaatatcaattttgtacaattacctatatccatggttgtttctgtctcatccaaatcaccattattgtgatctgagatgccatcaattacgtttgaattgtgaatcacaaaatttccttcatttgttggctgacatggggatccatctttatctagcacaacatatgtaatagcatcaaatataccagttgattaacccaaaaaacaccctatgaacatataaaacacacaantttaatcgtacaaacaata

SEQ ID NO: 12113 - DNA, 421 bp, Glycine max
  unsure (1)..(421): unsure at all n locations
agctangcgaatnngggtttcttcggggatagtgttgaagctggtctgaaaaggggaaaatttaatcatcctacttggacgaatgaggaaaaaatggggcaaataaagagggtgagaatgagggagaaacccatgttgtgactgtcattcctatacggccaagttccccaccagctcaacaccatcattactcagccaatatcagccattctcattacccaccacccatttatccacaaaggccatccttaaatcaacaacaaaacccacctaccacacaaccaatgctaaacaccacctttagcacaaaccaaaacaccaacctataaaggaattttgcagcanagagcctgtagaattcaccccaattctggtgtcctatgctaacttgctccattatctacttgatactgcaatggta

SEQ ID NO: 12114 - DNA, 423 bp, Glycine max
ttgatggcgactcggtgctgagagaaacaagttattggctacgtataagtgtgtgagctcaatttaaaggtgggcaactggggatggtgtgcttatgcctgacttgtggaaatgggagagttgatttgtgccatcgcccgatagccacctagtaccacatatgatgggtgccccataatccaataagcttgatatgaggaagcgtggaagagtcagtcttccaacttttgttcgttgaccacagagtggtacctggagatatgtcgcgggggtcaggagaccttggggatgtcaggtggggtgctatttcccaaaaccaagcttggccaatcccgacccaacccgggcatagtcagttagtgagaacctatgacgtacctaaacaggcgagctcctggcagtcaaccaataaaaagaacaatg

SEQ ID NO: 12115 - DNA, 391 bp, Glycine max
  unsure (1)..(391): unsure at all n locations
agcttgtaaggatgcttcttggagaataatttagggagagaaagagagaggngggagcacganattgaaagaataaaagagggggagaagtagaactttgaagtgtgtctcataagactntcattcatcanagttacaacaagtgttacacatgcttctatttatagactaggtagcttccttgagaagctttcttgagaaaacttccttgagaagcttctttgataaaacttccttgagaagctagagcttagctacacacacccctctcataactaagctcacctccttgagaagcttccttaagaagattcctaaagaagcttgagcttaactacacatacctctctaatagctaagctcacctccttgagatgagaagctagagctt

SEQ ID NO: 12116 - DNA, 432 bp, Glycine max
  unsure (1)..(432): unsure at all n locations
actcagcttgcttctacaatctcccncttttttatgatgacaacttttgaaatcaagaaacacactcacactttttcctagtcgatcactctcataaattctccccctttgtttttgaatttatgcttatcttaaaaataagttgattactcatgtgaattattgatttaatcccatttctctccccctttggcatcaacaaaaagccaaagtgcgtatcaaataaatttaatccatacaatgttcataaaaaaatatcaaccaaatcatgaagcaagaagcaagaaccatgaaaccatgaagcanacaaccatgcatagataaattataaactccacatagtcaaataacatacttaatattagttcanacataccatgcaaatagagaaatagtaaattggtcaaatagtataataatatagccaaaata

SEQ ID NO: 12117 - DNA, 385 bp, Glycine max
  unsure (1)..(385): unsure at all n locations
agtttaattatctattgttatagctntgtttcttgcaggcgctagatactaaaatcaattgacaaagagaactaagacgggctataggctttgatacagattttatcttataaccaattagtattaagtaaagttgtccaacagatatataagttgcaccccaaaaactgagataggtgatgtgggactttctaacggctagaacacattgtcagttttctaacgagtgaaggtcgcaacaaaatggctcgatcgaaagattttgagaatactccagatcttttatgagtagaaaactagcttataatctctaacagaaacactggcgaattaagtttggcgtactcgatagataacagatagattatgatcagaacacataact

SEQ ID NO: 12118 - DNA, 441 bp, Glycine max
  unsure (1)..(441): unsure at all n locations
tagtgtanagaaactcatagaagattagatgatcattgttctgatgaaataaaggatcaaggtaatgctgatgtagaatcaaagcaatccagattagggcatgaagaccccccaaagaaagaatccaaaagaaaaaagaaatctcgcaagaaaagccgtgatatggatagtcatgatttgaattcagctgcaaccttgaaatctgaattttcacataaacagcattcaagacaacagtcaaaagataatctagatttggacaaaataatgaatgatttttgtcatgttgaagctgcttgttccatgatgaatgacaatgatggcaaaattgatgcacagtcaaaccaaaagcatgctatctctgaaaaccttgctaatgcaatccatgaatttgcaatcagatgagattgaatgggaaagatctgcctgaagatggacaat

SEQ ID NO: 12119 - DNA, 420 bp, Glycine max
  unsure (1)..(420): unsure at all n locations
agctntctcccaagtcctaaatgacattttattctagnattaattcactttaacctccatttaccacagaattcagacttagccttccaactctcaaagcctcactctttttccactcataacaccacattctcactttccaaccctaggttaactctatatttcatctctaacagttttccatgggcaatttcagcatacaaacatcacaaacatcatcacaaaaccctaaaacagaatgggtatgtctaactcacccaaacatggcaatttcaacgagctttcaacaaaagtcttcacaaataatcatcacacagcagaaacctagcaagactacccatcatatctccccaaaccctattcccacganaatcaaaggagaaagaagtccacccaaacctggattnttgaagtcccact

SEQ ID NO: 12120 - DNA, 423 bp, Glycine max
cagataatagtagtgacccactaacctacacatagatatcttaatgccatgaaccctgggaattaaaaaaaaaacttaaaggctgagtgtaactaaaattgtggcgaccaaaagtcacccccaacaaacaacacgtcaatcaccatttggtctcccataaggctgatgcctacgttgccaattgggcccttattacaacttgaactaaacctactaaaaagcccttttagatgattaacccaaaacatatttttggtcacccaactttacaacgatagggccattatttagacaaactagacactctaaaattgagacaaagtggtgtcatataatccttcttcatatgggccatgatacaactcacaaccttggacgttactcttgatacttgggctagtattcaaataatatggactacac

SEQ ID NO: 12121 - DNA, 409 bp, Glycine max
agcttgttgaagtatctttgacttgatttgttataattcattacctatattcaattggtggattatgcttaatgagttttgtactatttgacatgtgaatcaaaattctaatatatataatttagattattattattattattattattattattattattatataatatatggtgattgcattgaaagtaaaaataatatatcatgatcaccgtgagatataggatttggtgtacatgtgatgtattgagatatatttgtttattgtatattgtatatataatagaagattaattttcactttcacatgttgaaaggttatataaatatagattaaatatgtaaattataagatgttgaagtaatttttactagatgtcacatgtcttcagcagctctgaagatgaaa

SEQ ID NO: 12122 - DNA, 435 bp, Glycine max
  unsure (1)..(435): unsure at all n locations
aagttttctggttctccaaaacttgaaagcttgttttttcatcttttcattctcttctccctttgccaaaaagaatttgccaaggactaaccgcctgaattctttttgtgtctctcttctctcttttccaaaagaaggaaggactaaccgcctgaattcttttgtgtctcccttctcccttatcaaagaattcaacacgacacagtctgagaattcttttgattcttcccattccctaatacaaaagcgttcaaaggtttaatcgcctgagaattcttttgtatccctattcacaaagtatcaaaggtttaacagcctgagatctttgtctcaacacattggagggtacatcatttgtggtacaagtagagggtacatctactntgggttgactgagaacaagagagggtacatgtcttgtggatcagttctagt

SEQ ID NO: 12123 - DNA, 426 bp, Glycine max
  unsure (1)..(426): unsure at all n locations
gcttctacaatagctgcanggnggggtttgtgttcttctgtatcatgcaagaatatgggnggaaggatttgtgaattcatttcccaacggacattatgttagagttgaactgctagttattaaggaggggcttagtgcaacttggaattatgggttttaggatgtggcttgtgaaacagacggtagagaagcttataatgatattttacatcatgaagctagcaaaggtagagtgcacctgcatgcagatgttgttaataatattcatgttctattatgaaaaaattggcaaccaattcttgttattgctcctagggaggcaaacgatgtggcaaacacacttgcgggatggagttcctctatacccacaacgattcaatcatggcttatccacccactgcgattttagcttctctagctcttgac

SEQ ID NO: 12124 - DNA, 451 bp, Glycine max
tgccgcccatctcgcccactcagcaaggctgctccactatttcaacagccttctggaggaaccttctggaatgcccaagtgggccaaattgctatttgcatcccccttttttactaaatgcaccccccttttctatttttttgtaattctttttccgtaacgctacgaaactttacgaatttcgcaacgatacttattttttcttccgcaaggttacgaacccttacgacttatgtatttactcttttttagctttcgaagaagttacggaaacttacggattgcgcaaaaacacctctttttgacttccgccacattacggaatttcacggatcgcacaagcctgcttccttttgatttctgagacgtctcggaacttcatttattgcatgtcatcaagtattaatccccggacgaaattagggtatgacacacataattgactaacact

SEQ ID NO: 12125 - DNA, 378 bp, Glycine max
  unsure (1)..(378): unsure at all n locations
agctngaaggatnnccaatgcatggnntatttgttaatgctccacattaacattatcatatcatgatggttatgcatgtccggaatttccttttgtgttataatggaaaacaaaatatagggtggagtttatttaacatggcagtgaggaatagggcaaagcaagtcaaggcagggtactcgtgtctcgctcattaatatggtcttgccccatattcattctactgaaaattcttataattntcattagattattaattatattacgtacgtgtggaagtaatctcaaaggaaagttagaagaatctacccaacacaaaaaaaaagttagaaaatgtcaaaacaagtggctccaatttggtcgcaatttgaatgttac

SEQ ID NO: 12126 - DNA, 382 bp, Glycine max
  unsure (1)..(382): unsure at all n locations
tcagctcttanacaatantatgcctgtgctttgggggctcaatggtctactctagttttcgaaggggttttgtggaagaatcaatggtggaccggtggtgatgagtttaacacaccagttataaaaattaatcagtgaataaggaaccgggaaacttccctgcatttctggcaaaaggaccaagaagtctgagtagcctcacagttttcaagatagctaattggtgttgaggttttccccactatgccggtgggcactatgaagatttatacattagcaaggcagtggttcatgaaaaaataactcaatataaaagacagtaaaattgtttgtttcaagattttattatgctacatgatgtaaattattcgtagctgagaaa

SEQ ID NO: 12127 - DNA, 252 bp, Glycine max
  unsure (1)..(252): unsure at all n locations
agctattgcatgtntagatacttctagagtgataaaggncctttttctagagagttttgacagctttagctatgcgaagactggcagagaaccgagcctgaagaggaagctatccggagagcatgagatcaatttgtgagtgattgtgaggttctagaggtggaggagacatccccactacttgtatttcttcaatccttcatttctctcttctctttgctgtaaaggaagctttctatatatggagagcta

SEQ ID NO: 12128 - DNA, 465 bp, Glycine max
gacacttaaaactcagcttccagaatcaagatcaagattcaagactcaagattcaataatcaagagaagacttaatcaagataagtatgaaaaggttttttaaaaaattgagtagcacatggatttttctcaaaacatgtttatcaaagagtttttactctctggtaatcgattactagattgttctaatcgattaccagtagcaaaatgtttttgaaaaagttttcaactgaatttacaacgttccaattgatttcaaaaagctcttatatgttttggtaatcgattaccactgtctttgaacgttgaaattcaaattcaaatgtgaagagtcacatcctttcgcataaaagctttgtgtaattgattacactgatttggtaatcgattaccagtgattgtttctgaataaatgaaaagatgtaactctttcaatagtttttgatctttcaaattggtttaatt

SEQ ID NO: 12129 - DNA, 449 bp, Glycine max
  unsure (1)..(449): unsure at all n locations
tgagagtgtgtaaccaaccattttctcattgtagaacactggttacgtgtatactatcattgngatcatctttttctctgtcattgaaggtgccacttgagctgtcaagtccctccacctctgggcgtattccttgaatgactcatgctcttttttacacatgttttgtagttgcgttctatccggagccgtatcataattgtactgatattgcctaacgaaggcaaccattaggtccttccaagaatagactcgggaaggttccaagttagtgtcataccctaatttcgtccggggattattacttgacgacatgcaacctttgattggccgtttcaagatacttggcaccctttgttgcacaatatgtaagtcttgagacgcaccggaagtcaaaaggaagcagggttatgcgatccgtgaaattccgtaatgtggcggaaaccaaa

SEQ ID NO: 12130 - DNA, 367 bp, Glycine max
gcatttattcgcacaatgacccaggtgaagcaagactgtgacaaccacactgaggcgaaacacaataacgatcactatgctctgctttcataaaagcctaccattgcacctgttataacatccatctgactcttctcaaaacttagaactagagctgtctttctcttggagtgggatccgagctgtctggttacaatggggcaacctttgcttctctatttatatactacatagcgccccctctactatccacctatgacgtgctcttccgtcttaaaagatccctaccacataggactattgttgcttcaacgaatggccattctggtgatgtcataccttatttccttctagcacattatatgcc

SEQ ID NO: 12131 - DNA, 224 bp, Glycine max
atgatgacaaccaccctgaagttatgagcagcatccaagaaaatatctattcgcatataattgactcccacttggatttacaatgatggctcatgtgacacaatggaagatttcatatttctcatatatgaaaagtagtctgataaaacaattgataattttgcttactattctatgtgttatcttactctacccctctgtgaacatctaaaacaaatcatgaa

SEQ ID NO: 12132 - DNA, 212 bp, Glycine max
  unsure (1)..(212): unsure at all n locations
tgcactcaaancggacattcgagtgaaaagatatgaccatttgaatttctcaagagcttctgttgctgaatttctagcatgtcgatatattatgtccccgaatcggacattcgagagaaaagttgtgacaatttgaatttctatagagctctcgttgttcaatatcaagtgtctcgatatattatgcgccagaatatgacattcgagtgaaa

SEQ ID NO: 12133 - DNA, 279 bp, Glycine max
  unsure (1)..(279): unsure at all n locations
agcttgtacttggtttagacatgantgttcatgatttgggacttgnaggattcaatttgggcaaaattggatgagggagagtgtgatttcgaanatctgcacttatgcagaattttgctgtcaactaggtgcagcaaaatttgactttgtgcagaaaatgtaatgaaattactggttgtggaaagagtagcaccgattgggttctggacgttttctagcaaatcccaacggtcaaaatgtagacttatgtactagagacttccagtaaaattttcgagt

SEQ ID NO: 12134 - DNA, 234 bp, Glycine max
cccgctgaggtgcacacgtatcgctgatgagacatggatgagatcgatgacgtggacgatcttcgccggccttcagcaatctccgctcatggtatcctcgatacacaatcggtaaggcgacagatttgaatacttccattgctcctatacacctcaaacgagacattcttgttcgagaatgcttgcactgaaaaccaacgaacatgcgctgaacgtgttatcgcgactctaact

SEQ ID NO: 12135 - DNA, 424 bp, Glycine max
  unsure (1)..(424): unsure at all n locations
agcttatgcgcatacttctttacgaacgttatttgcacaagacattctcataactaagaaaaatgcacccatgtacaatcaaggcaccttcgttacctagattatttatatgtacttccaaggtgtatttgttacctacatctcatgcacttccttggctaaatttacatacatgcatactcaaagcatttggggtaccaaaaattgcacatgtgcacattccggtatttctaatacttatgcatatacaaactntgtgatgaatcttggctatctacacaagaaggtgatacatttcatgctttactcaagtgtttttgctacctaaagccgcatgcaaattcaagtatattttcttttgctgactaaaattgtattcaaattaaaaggtattcttgtaaggtattttctttacataacatgc

SEQ ID NO: 12136 - DNA, 417 bp, Glycine max
  unsure (1)..(417): unsure at all n locations
gcatgcgaagtgggtggaattcctagagcattttctttatgttatcaaacataaaaagggaaaatgtaatattgtagccgatgctctttctcggcgtcatgcattactttctatgcttgaaacaaaattgattggtcttgaatgtttgaaaagcatgtatgaaaatgatgaaacttttggagaaatttttaaaaattgtgaaaaattttcagaaaatggtttctttagacatgaaggctttcttttcaaagaaaacaaattgtgtgtgcctaaatgttctactagaaatttgcttgtttgtgaagcacatgaaggaggtttaatggggcattttggggtccaaaagactctagaaacattacaagaacatntttattggcctcatatganaaaggatgtgcacgaaatttgtgaaca

SEQ ID NO: 12137 - DNA, 425 bp, Glycine max
  unsure (1)..(425): unsure at all n locations
agctntagctagttatgggtaggataaaattattttatcagaggaagggatttttagtgagaaatttactagcaaaatctatttgagtcaccccttatattcttcactctcagcattcctcgccagctaagggataggcccttagtggttttaatttgaattaatgttacatgaatcatttctacaagtcaatgtcttattataatgcatacctccaaatatttacccgtgattgttgataatctgtgttggctttgttggctaagctatggatgatggatttgatagaatctttctatggtgaggtcaaaggtatgttgtgaaatttcatagggtattagaaggccatgaactgatgtggttcataatacttaattctagtcctaatattttggtgtatggccatgaaatgctatggttcataa

SEQ ID NO: 12138 - DNA, 455 bp, Glycine max
  unsure (1)..(455): unsure at all n locations
ngagaactctttccatgcagaagttagaatactaagcaatattcctcataccttcattgtgagattgatgtgttgtatctctaatgaggattctatgctctttgtgtatgagtatctggaaaatcacaacctagataagtgactgcaccagaagcttaagtcaggttcagtaagtaaagtggtccttgattagccaaagaggttgaaaataaccattggaattgctcaaggtttaagctatatgcaccatgattgttcaccatttgtggttcatagagatataaaaacaagcaacatccttctagatactcaattcaatgcaaaagttgttgattttggacttgctaagatgttaatcaagccaagggaatctttttgtttcctgactaacaaatatattgctcttgcttagctatattttgtgtgtgccttatgagtaaactatnnttttagtc

SEQ ID NO: 12139 - DNA, 393 bp, Glycine max
  unsure (1)..(393): unsure at all n locations
cctgcaggcactgcagctatctantctcggctgatgaaaatgtatatcatggctatcttcatgcactccttctaatgaaaattagcatcactctctggcacctaaattgactgggagtcttgaatctcttcttcacatattaaatatcgtggcttcagttccgggtcaatgtctccaaggggctccaccacttggcagacatctatcattacttctctccatgtcaccgaatcctccctaaatatttcgctggagaacctgctcatacattcggtggcgagggcatcttggacatagctattcaaatctctcccagtactcatataatctctctccactgagttgtctaatgcctgaaatatcctctctgatgaaccgggacttgtaatcaat

SEQ ID NO: 12140 - DNA, 274 bp, Glycine max
tacccatcatatctcccaaacacccaatacccacgaaattatgtgagaaagaagtctacccatacctgatatttatagtcccacagcgtataggagcgctcacaaatccgaaaatggcttccttacacgatgtggagcaaaaatggtgagcacaggttggagctttgatagagctacaatggtggaggagaaagggagaaaaaagcaacgcgagggagagggagaagcttatgaacatttggctgagtgacgagagagaacgtggcttttattc

SEQ ID NO: 12141 - DNA, 246 bp, Glycine max
  unsure (1)..(246): unsure at all n locations
agtttttctttagtatgtgtagnaaaatatttagagnngatgagagagataancaaaccgcaccccccacaanaaaagcaacaaataaggaggcatcaaataacgtaggaagaattaaagtagctgatttggtattgtctaaacgttaagacaccaaatctcaacattcacatgttcctatttttcggacctacactatgggattatttattcatttattatgcgattgatatggagtattgatta

SEQ ID NO: 12142 - DNA, 349 bp, Glycine max
  unsure (1)..(349): unsure at all n locations
agcttctattnttaacgattattctccatgatcacaagntcgttctcttggtttatctcanaaaacttcgattcttgcctttatccctctagaagtgagtttgatgtgcttcattttccctccccgccttctactatgtattctttttttacactctattcgtatttgtatgcgtattttatgtgttgtggtaattcactgcatgttcatcgttccttctaaagttgtcatttttatctcacaaacgtgtgatatttatctccaaactccatgagcacacgatcaatttcttgattattctatcagaggttaaatatttatgtgttcctgagccttctccgacgttgct

SEQ ID NO: 12143 - DNA, 488 bp, Glycine max
  unsure (1)..(488): unsure at all n locations
nccatgtacctgatntcgtgaccttagatactcagcttacaggtgaatcactttatgcctatatcttggggcaaattgttgtacaagatattttccaagatttgggccaatcggattgcacctgttcttgagactatcattggtgagccccaatctgctttcctgaaaaatcggaaaatgctagataatatcttcctcatccaagagcttttgcgcaagtatgcccgtaaaagggtttctcctagatgtctgttgaagattgatttgcacaaggcttacgactccatttcctgagacttcttggaatggatgcttaagtccactggttttccacatcaattctgtgcttggattatggagtgtgtctctactacctcattcagtattgtgatcaatggagctatttttggccacttcagagggcagaggggccttaaacaatgggatcccctttctccttatctatttgtcttgtgcttggagtactn

SEQ ID NO: 12144 - DNA, 412 bp, Glycine max
ggctgcaagctacgtccacctatttgcagaaatgaaagaagggtgtaataaataacatttggctggaaggaaacaagagacaaatacctcccccgtccaaaaaaaataaaagaaaagaagttacctttccccatatatatccccttgtattcttctgcccctcttcttggtaggaaccatcctcattgacccaaaaatgtgggttgccagcacactgaactcctgccaactgcacacaacaaccaaaacaggattctttcaaaaattctgtttcacaataaacaagatatggttattaagagagagcctctcaatatgaattgtcgacctgcaacatacgaagctccactttagttatttcccgaccattgatgaaaacctgagtggttccattgctagcatccggttggat

SEQ ID NO: 12145 - DNA, 444 bp, Glycine max
  unsure (1)..(444): unsure at all n locations
ctttacatggngagataaatcagagctttattcaagccttgcacaaatcagagctatatggcacaggacaattcagagcaatgacaaacctgaaggttgtttcctttaatgtaatcccacattctttttatgacatcagttctcgctaactcgctttctccagtaccaaggaagtttacaagggcatcagatagctgaagaggagcaagaaaacctgatttccctcctcccttctgccgtttttcctttttttttgcttcatctgaatctgtcatagaggttatgatgcagtatgctataaaacaaatgtccctaaatgagaaaaactagtaccacataccgtgaatatccctaaatccctaaaacaaataaagtttatccagttgctggtgctgtgtgttcaaatgatttccaatataaatacactacacacattatttctca

SEQ ID NO: 12146 - DNA, 415 bp, Glycine max
  unsure (1)..(415): unsure at all n locations
agctattgtagtagtagtcttcattacattttaaatcactatgttcaatgacatgaaaacactgcagctaacttagcaaatattcagtaactttggtcatacctttaactagttgcaggaagaaacacccttattagtgagttctttgtaaccttttttctacaggtagggcatttagcctgtgcagatatagcagccctgatgcaattcttgcaaaaaatatgaccacaccttgttgacatttcttcaaccaaaggggacatacatattgggcaattaaaaacaggctccttatgagcttcaggctccttgggaggttcaggtgtcttcttagcattttcactctgcaaaaggaaaaagtgtcagcaatttgaactcatacaaatgtctgcaatcaactgcaagtctntatatg

SEQ ID NO: 12147 - DNA, 454 bp, Glycine max
  unsure (1)..(454): unsure at all n locations
tactcaagcttaagaacggagttccaaccacagtgagtcacaatccctcctgaggcagggtggtccaatatcagcaactggggcgcccagttccatatgatataacccttcttgctttctttcatcctttgcccaaaatcttgcaggaaactctctccatcctcatctccatctccataccttttccgaataacccagatgaaatcatgaccagaattttcaagcccgtgagcgatttcaacaagctgagcatgagggagcctgattcggcttccaaaacttacataaagaactgactcattntgcttagagttaagccagtttagccactcttattcttgcacaagctcctccttgtgtcccctattggccttttcttcatcgcactgattaattaacccaagctgacaccggtcctacactccaacacttgaccccctttgtgctctgataa

SEQ ID NO: 12148 - DNA, 250 bp, Glycine max
  unsure (1)..(250): unsure at all n locations
agctcttatttttctggaagatttattcaccaccttccttaggcaatatcagnacaactctgatatggctcccgaccggactcagctgcagaacatggttaaaagggaaaacgagtcctttaaagagtacgctcagcgttggagggacctgacagcacaagtagcccctcccatggtcgaaaatgaaatgattaccatgatcgtagacaccttgcctatgatttactatgagaaattagtgggctacatg

SEQ ID NO: 12149 - DNA, 313 bp, Glycine max
  unsure (1)..(313): unsure at all n locations
tactcagctttagggtattttccgggtcatcatattttattttgtatggtccctcattcattttttaaatctaacgttggacaaatatttttatgttgtccaaattcttactttttagttaatcaaatacacccttaaatatttatttaagatgactcacgtagctcgagtgattnttgtaactttgtatactcgggagacatttttcanagaaggcatgaaaaaagtgaagttacattagcatattataatataattaaccaccaataaattattggttcaagtgattcttaatttacgttcattaaggtac

SEQ ID NO: 12150 - DNA, 298 bp, Glycine max
  unsure (1)..(298): unsure at all n locations
agcttgtagaggatgcttcaatggaggtttagaaagagggagagaaagagggaggggggagcacgaaattgaacgaagaaaaagggagagaagttgaactttgagttgtgtctcacatgactctcattcatcatagttacaacaagtgttacacatgcttctatttatagactangtagcttccttgagaagctttcttgaaaaactttcttgagaagcttctttgagnaactttcttgagaagctatagcttatctacacacacccctctcataactaagctcacctccttgagaag

SEQ ID NO: 12151 - DNA, 407 bp, Glycine max
  unsure (1)..(407): unsure at all n locations
agcttataagcgcgggtctgggagacttatgtaagtgttctctatatgcgaagatgatgttccgagtactttggatttggtacgaccatgccttcctaatttccagctgggaaattggcgagtggaggaacgccccggcatttacgcaacgagcataatgtaaacctttacggttttaaaagctctatagttgggcctaggctctagagtttttccttttgttatggcttagtgtcttttgtttttgaatttataatacaaggatctttcttcatctgttcctggtctctacccattctcattcatttgcatgtttacttctttttctgaaacggcagatccgatgacgagtcccccgaaggtactaatacctgggacccngctatcaacttcgagcaagaaatgaa

SEQ ID NO: 12152 - DNA, 304 bp, Glycine max
  unsure (1)..(304): unsure at all n locations
agcttgagatgaggatgtatnagaaggngtaatttcctgcttttattcgntgaccacagagtggtacttggagatatgtcgcgggggtcaggagaccttggggacgtcaggtggggtgctattgcccaaaaccaagcttgaccaatcccgacccaacccgagcatagtcggtcagtgagaacctgtgatgtacctaagcaagcgagctcctggcagtccacagataataggaacaaagaccacaaagcaaggaggcttgtggtggctggccaactgtgaactctgtgtgatatatgggtttttg

SEQ ID NO: 12153 - DNA, 413 bp, Glycine max
ctcagcttatgatgatgaacagcaattttttgatgcgaaaagttctttgattgattcaagatttcaagatcaagcatcaagaatccaatccatgattcatgattcaagagaagaaatcaagaagcaacaagtcaagacttcatataggataagtattaaaagattttttcaaaaaccaaatagcacagttttgttttagaaaagaattttctcaaattttctaagttaccagagtgattactctctggtaatcggttaccagtgaccagtttggttttcaaaatgttttcaaatgatttgtaacgttccaaaatgatttcaaatagtgtaatcgattacactatattagtaatcgattacaagtgaatttgaacgttgaattcaaatccaattgtgaagagcacaactttcca

SEQ ID NO: 12154 - DNA, 347 bp, Glycine max
agcttaagctctttcaactgcacaaggctcttaatatttgaagagtatccttgtggaaccttcacccgatgaagacactgacaaaaacttatcttctcctttttggacaaagtatgacaagttgggggcaagtaaattttctttccatcagaccttggatgccactgtgatcggatccacatctctgctagattttgacgagtattcaagccatccttcgtcttgccctaaatgttaaagagcgtcccaatcacactgtcacatacatttttctcgacatgcataacatcaatacaatgtctaacatctagatcagaccactacggaagatcaaagaaagttgacct

SEQ ID NO: 12155 - DNA, 369 bp, Glycine max
gttcccccaatttatggttatttggagtaaatttttgtaataaatcttgttttatggttaacactgtctctagaacatttcccttggatttaatgatggaatctatgcattttcaggtgaaaaagaggctaagttttgaaatgcaaaaagtagcagttgggctaagcgcatatccaccgctaagcgtaaaagagaatctggcagagcatcaacatcaaagttgcgcgctatgcgcgagatcagtgtgctaagcgcagcaggtgccttcagccaggcttatcacaagactagcgctaagcctaattccacttactcgcgctaagcgcgagggtggcgctaagcgcaaggtcatgaattttgagcctattt

SEQ ID NO: 12156 - DNA, 448 bp, Glycine max
agctttgcttctatagatgcaggctctgcatcatagacaaggaatgctctaagctctgagcaggaaaacctgtaagaactggagatgctggtgctggagggagatgagagatagaaagagctaatgtagatggggcctcagatcttctagccttggatttctgggttcccaaaaagtgaccaaagggccatccaagttccagtgattctttttaataaagccaaattaatggctgggctcagagattcaaaggtcagagaatcagatgagactcctcgagccttgcataaggcagttatcaaggctggaaaacatagcctcgaggagtcgtgctgagctataagagagatctgacctgacatgaggggccccaagttcatatccctctgcattacaagcccgtagattaacatagccctatccacagtaatatctaaagtgtgggatg

SEQ ID NO: 12157 - DNA, 485 bp, Glycine max
tggacgaataggtgatgcatctaggaaacacaacaactaactgtatgaaaattggtaatatatattggttttagggtttacacacgaatggataaaaataattgtttgtgttttacaaatgcacggttaagtttgcacattgggccttaaagagactactaccgaatagccttggagacctatgtagtgtttgagaagccatgaacaatatgatcactctacaacatattgaaattaaggcatcgtttgagacaactacacatgtggttgggcatgtttttaaagttaccttatacaagaaactatttggcatggtatcaaagtatgtgttaaaccacattgttgctgagtttgagcatgtaaattatgctagcattgatagttctcattatagatatataatgagaactactcacggtcttccatgtgcacgtgagctagctagatatgttcttggtagcataccacttgacacaatccatatg

SEQ ID NO: 12158 - DNA, 491 bp, Glycine max
agcttttcaaatggataaaaggctcacattcattttcttctacatcatattcaaatttgtccaaataaataataagagtcatctcgactcaaagaaaatcatataagtctcatacaattaatatagaacctatattctaatgtcacatcctatcagagcgtggtgttcccgggtcctctaacatgaggttcttcatagtcatccacctattcatctgctcccccgaacacaagttcaagatcatcacaggatccaaacacaacaacacacagggagtgagttatcacattcctagctcatagagaaacaagacaattaaatatacatattatataaatgagataccacttgcttaaacatagctcacgtgacttcaccacttcatcattcaaaattcactttttaattatcaatcacattacacaagaatcccacacttcgatcaagatataataacacatcaattagcaagcatatgcgatagttatgct

SEQ ID NO: 12159 - DNA, 379 bp, Glycine max
  unsure (1)..(379): unsure at all n locations
ttataagcgcgggtctgggagatgaaagtcaagtggtcgcgatatactaaaatgatgttccgagtacattggatttggtacgaccatgccctcctgatttccaactgggaaatggcgagggaggaacccccgctttaccccgacatatgtgacctttacggttctaaagctctatattttggcctaggatttagagttttccttttgctaaaagctttgtgtcttttgtttttgaatctataatacaaggatctttcttcatctattcttacgtctctacccattctcattcatttgcatgcttacttctttttctgaaacggcagatccgatgacgagtcccccgaaggtactaatacctgngacccgcctatcgact

SEQ ID NO: 12160 - DNA, 692 bp, Glycine max
ttcaagtgtttatataaccaagctcatcctttgataggccacaatccaaatcatattctaatatactctaagctataacagacaatatatacaataccaaacttaaacttggtttggcatatcaaaatcaaaatacagcccgtgcacttgttgggtaataagaataatgacattaaatatataggacttagttaaaatttatttatatttcaatccattaaacttggatattttttttctccttatgtttgagtccacgcgcgggagtattaaatatatatatatatatatatatatatatatatatatatatatatatatatatatatatatatatattacaaaaggaggaattaaaaaaaacaatttaccttctaggagtagttttctaatgctgaaaaattacgaagaggactttcgcttcacaacaaaaaaagcatcagaaaacaatccctaccaaggaaattgttttcatcataatataaccgtgggagaatttggttgttttcccccccactttggtaaaaaaaaaaaaggtgacaccatgggaatacttctaatacctttgaattaccatgaaaaatgaaaacaaaattttttttttaatttttatttaaaaaaagcagtttttttctcatggaaccaccccaaaacacattaattttttaatattttttataaaatgtgaaaaa

SEQ ID NO: 12161 - DNA, 476 bp, Glycine max
tatattgatgcattaggcttttgggaaagaccaagctgtggtcatctaattcaactgcagataattaaatttaaattagtaatgctaggacctcagttttgtataccttaatttgactgaacataaaggctatgaaatttccttattatcgagggatgttggtaattgtatttcagctggaactgtgggaccacattattttttaacttctgacttaaaggaaattcacattagataagctgatatgttaaatctgaccatataatgaaaggggtattatttgtcaagcttacctgtcaaaaaaggaagtggtgttgttttaaatcacacccctgccccccaaaaaaaacccatccactttttttttaaatttttttttttgagagggaacagctattaaaatggaatcttccagaaggagcctctccaggatggatttgttatgtttgattggtttgatgtcactttactaaatg

SEQ ID NO: 12162 - DNA, 464 bp, Glycine max
agcttatgcatggaaaatgtaattatgaaattgttatgcccgaagaaacaccatttcctagttaaccatgcattaggtaccatgttcaattattttgttttttaagcgaaacgggtttatgatcccaacatggttggctcgtggtgcctaacacatggaactaagaatgtagtgtgaagtttcacgcttccccctttttgtttttgttttgtagaggaaaacgcaaggatgagcaaacatgaaaacaaatggtatgcaattttgcagatcaaaaagtttgttgaacgcatatgcatgatgatgccatgactcatgcaaaatgtgaggccggaatatgataacggacaaatgcaggatatgtccattatgatgttatgaaaagatgcttatgcgatgcatgatatgaatgcattttaccgacacgagagcccgggaaattatctcttttacttgtgcatttgggg

SEQ ID NO: 12163 - DNA, 631 bp, Glycine max
  unsure (1)..(631): unsure at all n locations
tgtaggattcaccccaaattccggtgtcatatgctaacttgctcccatatctactcgacaattcaatggttgccataacccctgctaggtttcctcaacctccatttttccgaggatacgactcgaacacaacatgtgcttatcatggaggagccccggggcattccattgagcattgaagggccttgaagcgtaaggtgcaaagtctaattgatgcagactagctgaaatttgaggagaatcgcgtatgagtcccaacattgacaagcaacaccacacatggggcaattttgaaagctgttgttaggtgcctctaatgacttatcaggatttccaagtttatgccattattgtaaaccatagttacaatgctaaaatagatgaattggacatccttgtctctctcatcctttcacaaacacatctttgcttattcaacttccaccggaatgtgagtgtaagccattggtttgtttgctcaaagcgacctgcgctcctgagtgttgaattccaagaccgttcaatcagagattactcgtcctgcacgttggtggggtgccgtanacaatgagtagagcagaaaagttcacaaagaaaaaaaagcatatgattgactgttttttcaagtaaa

SEQ ID NO: 12164 - DNA, 400 bp, Glycine max
aaaacagagagttttgcctcttgaagaaacttttctcacttagaaacttttcttcacactaatcatgatgatgcgtgatgcaatacaaatatcaaatgtactaagatgcagcaaccaagataacaaccaatacaaatgccactcaagggatttatgcatgtaaaagtgaaaacttcttcaagcttttctttgagcttcaagctctagcctttaggttgttcaccatgttgctccttctatgtctaacactgcactccattccatcccaccatgtgtgtccttaaccacgaaaaacgactttgttatcctttggtagaccaagcaatgaagttcataagatttgcgataaatatacttggacacctactccgagagagacagagagagagagagagagaga

SEQ ID NO: 12165 - DNA, 380 bp, Glycine max
aaactgaactatcgggtctgaaaatcaatttttgttatagtaaattccgagctgtcgggatttctgattaatggaagcatgatgcagcaaagtacttgaactgcagctacttaactcttctttttgtgtatcttggcatacctataggggctattaatgcaacaaaatggtgagctgtggaccagagttttgaattccaaatatggtggatggaggaaccttgaagaaacaggaaattcagcaaaacaatgtgtttggtggagggatgtaaaacaagctttcaatcaatctcaacagggactggttattcaaaataacatgaagtggaaggtgggggatggagagaaagttagattctggacagataagtggattaatca

SEQ ID NO: 12166 - DNA, 569 bp, Glycine max
agcttggacttcctgtgttgtgggaacctctccttcctcaggtgtacccaaacccaatcacctggttcaagcacgactttctttctgcttttgttggcttgccttgcatagctcgcatttttcttttcaatttgagccttcacttgctcatgcagcttcttcacatactcagctttagcctgtgcgtccttatgcttaaacatagcaatgttaggcataggcaacaaatcaagaggagtcaaaggattaaatccatacactatctcaaatggtgaacaattatttgtgctatggatgatacgaaatcagagtgtggtaacggaagcaaacaaccaataacgaaagtactaggtaccacccttattagtcgaattcctttaagtatttttggtatttgtgtgtttgggtttttacgaaaatcagcaaggaaaaataagcgatattaaactacaccaatagcttaatacgagattagcactcaccaccaattgagctaatcggactattttcaagacgacgctggcaaataatcgggcgaaaaatgtaacacaatttctaattggactgaa

SEQ ID NO: 12167 - DNA, 465 bp, Glycine max
ctcagcttctagtcgtccatgacctcctctgtggtacggtctatcaaacgttgcatctgtgcattcatcgcatccactaacagacgttgagcgccgtccaactgatggtactcgtcaccaccaccacctgctccagccataattcaacaggaaaaaaaaaatgtgcaataaaaattattaaggtttcaggacctcacaacactctactcacgtctcttagatggtagtacactcgtgtttaatgctctcaataggcttttgtgtaatgtattccctcttgccttttaccactcgtgtttcctcttaagttcctggatggaccaaattagacacacaaggtaatataaaataaaaggaaagacaatataatgatcacaaacagatttgatttgggataacaacttggacttgatttggataataatatattagaattggatttggataacaggtgagctttatttt

SEQ ID NO: 12168 - DNA, 412 bp, Glycine max
agcttttgacggactataccaagctctatgaaccagggacggagaaagatctatatataggcttgctaagggtagagagaggaagactagagatttggatcaagtaaagtgtgttaaggatgaagaaggcaaagtcttagtgcatgaaaaagatatcaaggaaaggtggaaggcgtatttccacaacttatttaatgatggatatggatatgactctagcagtctagacacaagagaagaggaccggaactataagtattatcgtcggattcagaaacaggaagtaaaggaagcgttgaaaagaatgagtaatggtaaggcggtggggccagacaacatacctattgaagtgtggaaaactcttggagatagaggtcttgagtggctcaccgaactctttaacgaaattatg

SEQ ID NO: 12169 - DNA, 385 bp, Glycine max
tactttcttgattcatgaaagatccaagccatctagttgtatcaaaaagggtgctaaaatacattcaaggcactttgaactatggaatcaaatatgacaagaaggtggaagcaaatgtaattggcttttgtgacagtgattgggcaagctgtatggatgaaatataaagtactttcggatatgttttctcactgggtttaggagaattttcatggtgctcaaagaaacaacaaaccgttgcccaatcttttgcaaaagctgaatatatttcagctggcttagctacccaacaagcaatatggttgaagagaatatttgaagactttggtgaaaagcaagggacaatgactatccattgtgataacaaatttgctattgctatcac

SEQ ID NO: 12170 - DNA, 485 bp, Glycine max
  unsure (1)..(485): unsure at all n locations
agcttgcatttggaattgcgaaagccccactccatcattaggattagtacctgacatctcaaacaaacaaatcaaacgtaacaagacaattatagttgctgtttgaatacctcacccactcaagtgtatcacacaattatggcttttctctaatgaaacactcttgccttttaccactctaattccccttgagttcttaagcaattcaagagattatggccacaacaaagaacaattcaccaatatgtgtaaggtaaggctatacaaggaaaaggttaaccaagaaaaaggctaacaatgtttttaggcacaaatgaaggaaataaaattcagaatttaggaattcaagtaacaatccttcatgcaaccaatatattaccttaaagagattttttttttaaaagttcttcaagcatgaaccattcagcccaatttttnttttttttttaaatttgcttatacgaaaattttgttttttttttttt

SEQ ID NO: 12171 - DNA, 461 bp, Glycine max
tcaccttctggtcctcctcatagttgtggcatgagaaaacatgctctattttcatctcccactccaagtaggcctccggatcattctttcctttaaatggaggaatgttgagtttaataccatcaattcggttttgtctaggaacaccatcattccctcttctcctcctttcttcttcattatgatctctattctccatttgatccaacctctcatggagcgcatcatctcgttgtttcattaacctctccatatgttgcatcaaagcttgcatttggaattgcgaaagccccactccatcattaggattagtacctgacatctcaaacaaacaaatcaaacgtaacaagacaattatagttgctgtttgaatacctcacccactcaagtgtatcacacaattatgggcttttctctaatgaaacacctcttgccttttaccactctaatttcccttgagt

SEQ ID NO: 12172 - DNA, 572 bp, Glycine max
agcttgtaggattatggggtacccatcacatgtggtactaggtggcggtcgggcgatggtgcacaacaagttttccacatccacaaagcgcgcataaacccaccatcccctgttgcccacctccatctgagctcacgtactcccacgtagcccatatcctcgtttctctcaacaccgggtccccatcaatcctcccaagctttcacaatatccaagcaaaacaacattcaaacagcacaagctatcacagccaagcaaaacagagcaaaggcagaaaactctgccaaaacaccaaccaaaatcacagcttttctcacttaaagaccccagtaacaattcctttgatccaattcgttaaccattggattgactccaaaattttactggaagtctatagtacataagcctacattgtgaccgttgggatctactagcaaacatccagaactcattttgcactactctttccacagccaaccacacacaagcatttttctgcacaagccaaaatcctgccccacctattttgacagcaaaaatctgcataagtgcagaatttgaaaaacacacct

SEQ ID NO: 12173 - DNA, 525 bp, Glycine max
  unsure (1)..(525): unsure at all n locations
ttaataagctatcattccttgacaatcgcatacaaatttttttataaaaaaaaaattataaaaatcataacgtgctttatcttcatgcccttgtagcctatgttttttctacttcaacaattgtttctctctcagttcaataactgcaaatttgcatctgcattagccattcgtccagttcttgcttaagtccaacttcctttttcgtcaaggccaaattttccaccttttgtcaatccttatcaacacttacaacaaacggagagaagttcatagagaaatcatacaaacattaactccataatcttaaagttgtaagacatcaatcaactttcttcatttattaagaaatttcccgtctactacacattacatttctcatatcatatcatataacatattatcagntaagctttaataagctatcattccttgacaatcgcatacaaaaaaaaaaaaaaaaaaaaattagaaagatcataacgagctttatcttcatgcccttgtagtctatgttttttctac

SEQ ID NO: 12174 - DNA, 386 bp, Glycine max
agcttgctcatagggtgagggttgcccccccttatatattctatcttgacactatttctatcggatgtgggacttgggttttcccaaatatatgccctcatgtccaatacttttgagcttggtgcgaggataatatggcgggtggcccgttaatggatctaggatagaccctgataccattttattatgtgggtttgagcctaactcaaccctaaaagttagctcatagggtgagggttgctccccacttaatacactatcttctaaccgatgagggacttgggttcttcccaatgagtcttttattcaccctgtagtctgttttttttaaactatgttaaccgaggcgggatccgggactttaaaaccgaatttgtttgtttttt

SEQ ID NO: 12175 - DNA, 278 bp, Glycine max
attgtcaatgccgaaggtattatgcgcttcactatccatgttcacacattattgcagcttgtggttacatgagcatgaactactaccaatatatagatgttgtttacacaaatgagcacatcttaaaagcatactccgcacagtggtggccttttgggaatgaagcgacaattcctccttctaatgatgcatggaaacttatccctgacccaactacaattcgtgcgaaaggtcggccaaaatcaacaaggatatggaatgagatggattggttggaa

SEQ ID NO: 12176 - DNA, 332 bp, Glycine max
ctgtcctttttcaatctggaaaacttgtcttgccagcctgattaattaatttgtcaacacaaaaaccttaccggaatgcgggtcccttttttttttttttaggaaaaacaaatgaggggtattcttgtgattgggttcgcgcttataaaaatatgtttgtgatgataaggattgttttttgggccttcaaaattgaaaggggtttctctccttcttccataaggggtgttgggtcctttaaacgtgaatttattttctaaatgtattttatccctctggtcaaagggtggcgtagatacccttcgattatcctttcggtaaagtgtcgaaat

SEQ ID NO: 12177 - DNA, 128 bp, Glycine max
tgcttttcccaaagagaggcaccactggttttatcacctgatcgccaaccggatgcccccaagcgtctttgacttttttgaagcggtcgatatccataataacgacgcactaaagcggattctgggct

SEQ ID NO: 12178 - DNA, 593 bp, Glycine max
  unsure (1)..(593): unsure at all n locations
agcttgggaagcaattgcactaatcagacctttcttagctgctgtcacgtgtagcccaatgaacattatagcttttttttttgaaggaatctatctgtctataaatataatatttcaagttttcttttgtgacaagtgtcaagcactaagctactttttagtttcatcctaacgcaatagtattttttttgtcagtttcagaacaatcagcagtattattttttgtttttttaagactggccaatatcttgatggttaatgaaattgaaaaattattaaaagcaatgtaccacatattgattttgttgatattttttagtttcatcctactgtaacaatattttttttgtcagtttcggaacagtcaatagcattattttttatttttaaggctaaacaatatcttgatggttaatgaaattgaaaaattattaaaagcaatgtaccatatattgattttcagtgatatcctttacgtctatattttttagtctcatcctatgtaacaatattttttttgtcagtttcngaacagtcatgctattatttttggttttttaggctaaacatatcctcatgttaatgaaatgaaa

SEQ ID NO: 12179 - DNA, 365 bp, Glycine max
tcagctctcccttctttctttatattctttgagtatactatccctattctttctatcaccccaattgttagccctcaatggccatgagtgactaatccctagctcaggtcttgcatgcctaaaaagccaacgatgtacagtgtgcttccagaattatcaatgcaaagggaatttattccaggtgtttgtcttctaaatcttatcttgttatcttgcatcagctcttaaacatcttttgagcattattctctcagtagagggcatttcctagtcctgatatcaaatataatgcatgcattacttttaggggtgatgcactcgtgaaatgggccacacctcctttaacatctaaggaaaggaattct

SEQ ID NO: 12180 - DNA, 471 bp, Glycine max
  unsure (1)..(471): unsure at all n locations
agcttttgtgtgggatacccaatgtgagcttattttccagacccttaaggaaagattaacaaccactccagtgttagttttgcctaacccgagagaaccctttgaggtgtattgtgatgcatcaaagatgggattaggaggagtgttgatgcaaaatggctaagtagtggcctatgcttctagacaactcaagactcatgagaggaattacatcactcatgacctggagttagctactgtagtttttgcccttaagatgtggaggcattacctgtttcgctccaagtttgaggtgtttagtgatcataagagccttaagtacttgtttagtcagaaagagttgaacatgtgtaaaaggagatggttagagttttttaaagattatgattttgagcttagctaccatcccggcaaagccaatgtagtggctgacgccttgagtangaaatccctacatatatcggcattgat

SEQ ID NO: 12181 - DNA, 353 bp, Glycine max
atatactgtaatcgattaccagagcttattttcagaaaatattctcaacaatcacatctttttgtgtggttcttgaatggctatcaaaggcctatatatatatgtgtgacttgcgacacgaatttgctaagagttttaaagaacaaaaaggtcttatcctcttaacaagaaaaattgttttatcctcttacaaattccttggccaaaacacttgtgattcaataaggaattatctgagtgctcaaaatgttcaatctatctctgtcaagagagatatcttcttttctacttcttcattctgaaaagggattaagagaccgagggtctcttgttgtgaaagaattctttacaca

SEQ ID NO: 12182 - DNA, 711 bp, Glycine max
ttttgctccgtgtgtgtcaggaagcagtgctattatctgttcaataagatttgaaacacacacacacacacacacacacacacacacacacacacacacacacagaatatgagataatttaagcccaataaagtaaacatgcaaaaacatgcgagtattccccaaaatattcaaccaaatgaagtgaaaaactacaattagtcactaccattgttgtctgttcaaaataactgcacaatattccttcaggtttgatttttgtcatttcagaaagtaataacccaacaaacaacaaatgtgacatccatttaaataatatttgattgaaaaatgcacttgatgtagggattcaatcaatcaacctaatttaattatgacaaaaaatcatcaatcctaaccatatgctttctatccatgtagagagaaaatactgcataaagaagaataaaacccccattgtgtccccatactccaaatcatgatgaaaactaaatggcgaagctacttggattagccataatgggaatgataaagggtgatgaggaatcaaaatgggtttatgaacttccaaatggagaaagctttatttttttctttgaaatttccttttggaggggctaagagataaagaaagggaacttatcatttggtggttctcttctcaaagggggacactaccctttggttttggactggcctcattaccccaag

SEQ ID NO: 12183 - DNA, 419 bp, Glycine max
tctacttatgtggcagggcgggcttacttcaccttcttgtctcaaccgcgagctttgactaccattgttccttcccgtgatgcttctctttatatctgcctgagtgggcttatagcctaacccatacttcccacgatttcctttggcatttatcaagctagttatgccgtcgttgtctttgcctaaacccattccgggttcgtaaccgttccccaacataactcgggccatcattactgctgcatctgacaggcaagcttgcccagagaaggagtccacgaaggaaatgcttaccacctcaaaagagtggaaagtgggttctaatgactcctctgcggcctccacataaggcatagaggatgggtagctcaccaagatgtcttcctcgcctgatacgatgaccagatgcccttccacta

SEQ ID NO: 12184 - DNA, 521 bp, Glycine max
  unsure (1)..(521): unsure at all n locations
agcttcacaaaagaaaagtggataatccacatattacaaaaggttgacttccacattaccatcccccacaaggaaacttgcaaacaagtttttctcaatagtttccctctcaccatctcacacaatccttctaataacaatagtaaacaagaaaagtgtcaatggatcaccttgtcttaaaattttttgagcgaaaaattcataagtatttcagcaacatcaaatggtacttgatgtcaaacatcccttaatccaatgaatccacttctcatcaaaacccaacctcttcatatagaacaagaaattccaattaatcaaataataggtttttcataatctaacttaaagataagactttttctttttccttttttctttatcaatggtatcattcaccgccaacacactatgaagtaggaattttcctcccaagaaagcactttgcttatgatcaatcacacttaanagtaccttcttcaacctattagctaacaccttacaaaatattttatacatacatc

SEQ ID NO: 12185 - DNA, 489 bp, Glycine max
tcagatcaaggtaaatcaaaatctaggtatccaaaacccatctatttagtgaattttcaaggtttaagaagtgaaaatgagaattggttaattttggggtaaactctcatctcaatcaagtctataacattgatttagacttgctcaaattggttttaaagcgaaaactccaccgattcaaaatttgacccctcaacacccaatttaccctagaaatggctcttgctttcaccttgatcactcatttttcttatttgctctgcccaagcttttctacaagtcctaattgacattttaaactaggatcaactcactttagattccaatttacactaaccccaaatttggcttttcaaaaccctcaaaatctcacacttttccactcacatcactaccattctcacatttaaccctaagttaactctccccatcatctctaccagttttccatcaacaatttcagcatacaaatatcacagagcatcatca

SEQ ID NO: 12186 - DNA, 472 bp, Glycine max
agcttgtctcagtgtttatgcgagacggagaccaacatgttagctatcattgccaagtaccaagaagagttaggtctaaccacggcccacgagcataagatcgcggacgagtatgctcaagtatacgcggaaaaaaaggctagaggaagggtgaacggctctttacaccaaaaggcaaccatgtggatggatcggtttgctcttaccttgaacgggagtcaagaacttccccgcttgttagccaaggccaaggcgatggcagacacctactccgcccccgaagagattcatgggcttctcggctattgtcagcatatgatagacttaatggcccccataattagaaattgctaggaaacttggatggtctcttagaccttgactagatacgactttctttttgaaataaaatgagttgggcccatgtttctactccaaaaatcagtgcgaatcaagtaactcccgcatttta

SEQ ID NO: 12187 - DNA, 558 bp, Glycine max
  unsure (1)..(558): unsure at all n locations
tcttatccaaggctcatcttggtggtgaagctccttcttccatggcttattccctagtggatgacgcctcctctcacctcttctcctttgtcgtccgctgcatctccatggtggaaaatcaccattaaaggacctcattgaagctcaaagatccagcctccatagaagccccacaagcaagcttccatcaagtggtaatcagagcacaagagcttcaagtaggtgcgccttaaacctccattaattttttgctttaccttctcttccattgttgtttcttcattttttttctccatgtatctcctcacatgtcttgtgctaaatgtttttaacatgattctttagagtttccaccaattaaacttgctatagaagctagatttgattttctatggttcaaatttcttgttcttgttcttgaaccatgaattgtgttgagtntaagttcctttgagttttgtcttgttattttttggggctgaaacataaatcataaaattcttacaaaaatattaaagtagaagaaaacctcacaaatctagagtgacttgttcacct

SEQ ID NO: 12188 - DNA, 400 bp, Glycine max
agcttgttttaaaacacttttttcaatataataattatacttttatttgtttgtctaaactgatttaattttttaaaaaatgttttctactttttttaagaaataacctctatttgcttcttaaaaaaatatttatttctacaatcacttttttcttaaaaaatttaagcaaattaactcttaatataagattttaaattttgttaaaaaaatatgatttaaaattgtgagtgcagttctgaatggcattgtcaacacctgcagacctacatggttgttagagtgtgcacctgcatcctcttatttttaaaattcattaaatttgtaaataaaactatatatttttatattttattgtatttatatttatataattaaattcactcattttattgtttat

SEQ ID NO: 12189 - DNA, 456 bp, Glycine max
  unsure (1)..(456): unsure at all n locations
ttggaacccagatgctccatcgactagcctgtttattttgggcagaaggtatgcgtctttaaagcatgccttgttcagattagtgtaattggtgcacatttgtcaattgttgttgaaccttttgaccatgatgatgttggcgagccacgtggaaaacctgacttctctaatgaagtttgcattgaggagtttatccacttcttctttgacagctttacgccattcttctcccatcttccttttattctgtgatattgttttggcctaggaacatataacaagtttgtagtagattatgctaggatggattcctggcatgttagacggctgccaagtaaataaattcccgttttcatgtagcacgtcggcaatgcgttggtgctcatgactagtgaggtcgctactaagccacatgcactacccanngttaggttcgagttgcaacttgacatgctc

SEQ ID NO: 12190 - DNA, 379 bp, Glycine max
agcttgttagtaactcaacacacacttttgatctctacccacagggagggaatagcaaccgactcaatattatcttaacctgatcggtcacatctatctcacgcgtaaagggttgcctataagatgagaatttgttgtcttatgatccaaaaagcaaaagaatattacgatccatttgagctacacacaacctatgtgcctttaaacaccaattataaggattggattgcaaaaccaatctgcttcctccctatataactagttgggctttaattgagaagattttaaaggtcttgatgcacaaaacatggtttaatctttgtcacaacatacactaataaatctgttttacagaactggccacacattattacacctt

SEQ ID NO: 12191 - DNA, 498 bp, Glycine max
  unsure (1)..(498): unsure at all n locations
gtggtccataatgctttcaaccgagcttcagcatttattttatcaaccccaatcaaatcttctggaggtatttgaatcatcatgtacaccgtaaagctgtgtgctagttttagtatttttcaaccagcctcttaaacacttggttttgattttgttcacccaactcttgctaagattcagagattccttggatgataagtctaaggctaatctagtgcaaattaaaggacgattttcagtgacatcagaaaatttagatctggtgaaggtatgctttttagttttttcttattaatcaaatggtccctatcgacaacttcaactgacttcatcatatggaataggatattcctgtaagttcagtttcacgccgatcttcacaggttggttgatgatctaattgattattggctatatatntatgttttcttcttatcacctcatttgatggtctctttccttttacgttaaatatatggatcaccaatgagggaaatc

SEQ ID NO: 12192 - DNA, 337 bp, Glycine max
agctttgttcgcaaaagtcactaaaaaccgttttaagggcgaacgccttaaacagatctctttgcttttataggttaacatggaccgttcaaaagcataaaatcaacatgtaactttaccacctttgcaagaactatgtaggtcttatttcctcatcgcaattgaggatacgtaggagcaaaatcctcgcttttgtccaccaccccaagagatcgctaatggtgcaatgccttaacgatactctcctttcaaaaacaaaagagatcgttaatggtccaacaccttaatgtttctctccattcaaaaacaaagagatcgttaagggtccaacacctta

SEQ ID NO: 12193 - DNA, 523 bp, Glycine max
tatgaccacaagtacatacaaaatatctagaacctacgtctacctatacatatgaaaaagaaaggaagacacccagtctcagagcagtcattgccaacccaatcctacaggagaaactgtacgcaaaaaggggcgagtcaagaatcaacaactaagaggtccttaacagcaagactccctaaagagacatcccacctatttttatcagggtcctcctcactactttccttcataagccaccctacttctccataagaaagctctccattgactatagctatgccatccaccatgataagatcaaaaggatactctatcgcctctagcgggtcctcctctaacatctctgggtcctcctcgatctcatcgtcctttgcaatgggtgttagagagagcatggctgacaccgcatgctcaaaatctcacctacatcagatggccctagcatatagtccaatgcgcccaaggagatgatgaagacaacaaagaggagatctctatgatctccctacgaatggcatga

SEQ ID NO: 12194 - DNA, 374 bp, Glycine max
agcttgcctgtccaatgcagcagttatgatggcccgagtgatgttggggaacggttactaacccacaatgggtttaggcaaagacaacgacggcataactagcctgataaatgccaaaagaaatcgtgggaagtatggtttaagctataaacccgctcaggcagatataaagagaagcatcacgggaacgaagagcggtggtcaaagctcgcggatgagacaagaaattgaagggagccctccctgccacataagtagaagctttatatgcgcacgtctgggagacgaatgtcacgtggtcgcgctatacaacgatgatgttgcgagtacattggaatcggtacggtcatgccctccctatttccagctgggaa

SEQ ID NO: 12195 - DNA, 491 bp, Glycine max
  unsure (1)..(491): unsure at all n locations
tatggttactttttgaagaaagattatgtgataatggagaaacatttgcaatttggttctcaatctccttactcactttgttccattgatcttaatagtgtgttgatgttcacttttttatttttaggacaaaattatctaatttgatttttttttgtttttccctttagggtttacattccaagggtttgaggcaccatgtcttggaataggcaaaggatttttaattttgttagggttctatatggcacaattttcaaccatgtcttttttttgtgtttctttaaccatgtttggtgttaatttctttggtcatgtttgggtttaatgttttgctatttgctggtaattttccagtggaaattcttttagaactagcttttgtatatcatgtntttttatttattttaataccttggacatgttggcattctactcctacactatatttagtaaacatatactatgtctagcaggttacaatttcaagg

SEQ ID NO: 12196 - DNA, 518 bp, Glycine max
agcttcgtaatttgaggagcatgaatggttgctttacacaaacaatgcatgtgaaggtgcatgtgccattttgaattctataacaatattacccatttgatgatgatccttcccatctttgaatttccgaccacatgcacttatcttaattagtcaataaattatttaaataacatctgacaattagcaaattcgaccattagtaatctaagatcacctcttacatttctatgaacttcttttagaatgggcacgaggtaatcatgtttaaatcataaaattattattggtaagaaaaaatcttttcaaatatttaacacatttatatatagaatttgaagactaaataattgatcagatgaaataatctcacatcaattaatttatgcactcatgatttacatttccatggacttaactgtgaagttctaattaaaacaactacataatattttaaaaagatgttagaaaatttataaaagtaaatgaatatttctctaaataaactgaatgaaatg

SEQ ID NO: 12197 - DNA, 451 bp, Glycine max
ccctatgactcggattcttggggattcctaaactatatgattatgatgatgggattttgctaaagatggagaaaatggatccatggatgcctttctagtgcaactacatcaattttgatcaaaggccacactactagagaatttgtgcctgaaaggggactgatgcaaggagatccccttgcacctttcctatttaatataacagctgatggactcactggggtgatgaagacagctgtctccaaaaacctttttagcatctataaagtggggaggcaaaaggaggagattaacatcttgaagtatgcacatgatacactgttttttggaactgcgactacagctaatgttagagacatgaaatctatcctcataattttcgagatggtttcaggactcaagattaactatgctaaaagccaaattgagtgcttgcgtaaatctttggact

SEQ ID NO: 12198 - DNA, 421 bp, Glycine max
agctttgaaatcaaaaactaaccgattgaagatcgacgaacgatgaagaacaaacaaagaacgacaaacaacattcacggaattggtcacggaaacgttacggaagtgcctcggccttgattttctccttctttcttcttctcctcactaattttaagtgaaatttgaataccaagggtgttgatcccttcccctcagtctcccatgtcaatttatagaaaaaatgggggaggaggttgctgcccagctcgcccaggcaagctggaggcttcctccagaagcaacctactcgcccaagcgagctggttgcttcatgttgaagcttcctaaagggcctaaatgggcccaaggctgaaaaacaccccctaaattgatcttttcacccaatgaagacccatatgctcacctagccacatacatt

SEQ ID NO: 12199 - DNA, 419 bp, Glycine max
  unsure (1)..(419): unsure at all n locations
ttgaggatttggtctttgccagtgaaaggatcgatgtttttatgaaaaaaggcaaatttagtcatcctgcttggacgaatgagaaaatggggcaaatgaagagggtgagaaagaaggagaaacccatgctgtgactgccattcctatacggccaagtttcccaacaatgtcattactcaaacaataacaaacctcctccttacccaccacccagttatccacaaaggccatccctaaatcaaccacaaagcctgtctaccgcacttccaatgacgaagaccacctttagcacaaaccaaaaaaacaccaacaaaaaggaattttgcagcaaaaagcctgtagggttcaccccacattccgttgtcatatgctanactngatcccatatccactcaataattcaatggtagccataaccc

SEQ ID NO: 12200 - DNA, 324 bp, Glycine max
agcttcatccactttcttgcaagggatgaagtgtgccatcttaggaaacttgtcaacaacaacaaacacagaatcctttccattcttggttttgggcagccccaaaacaaagtccatagatatgtcagtccaaggatatttaggaacaggcaaaggagtatacaatccatgaggtttaaccttagatttagcttgtttacacacaatgcaatgaccacaaaacttatgcacatcacgcctcatatgaggccaaaagaaatgatcttgcagaatttccagggtcttttgaaccccaaagtgtcccatcaacccccccctattgtg

SEQ ID NO: 12201 - DNA, 454 bp, Glycine max
acactataaaatacctcagcttgttatccaagggtcatcttggtggggaagctccttttttcatgggttattccctaatggatggggcctcctctcaccttttctgctttgtattccggtgcatatgcatggtggaaaatcagcattaaaggacctcattgaagcttaaagatccagccttcctagaagcttcacaaacaaacttgcattaatgagtttggttcaaccccataacccaaagaagaatgactcgggcgtttcataaagatgaatgactcgggcatacttatgctatgcgtagaaaatgtcattatgagagtgacatgcccaaagaagcatcattgtctagatagcaacacattagggaccatgctccaacattttggtttggtgaactttcttttggaaataaggttatgatcctaacatgggtggctcatgggacctaacacat

SEQ ID NO: 12202 - DNA, 525 bp, Glycine max
agcttgtaatatattgagacgctcattgttgaaaaatgaagcccatcataaattccaacgaccataaattttcacccgtatatttgaataagttcggtaacctatcgagacacacaaaatttaacaaggaagactcaggcgaattccgacgggccaaagttcggactcggatgtctgagtgagacccataatatatcatggcgctcgagagttgatatggaatgcccacacaaatttggaggaccataacttttgtcccgtatgtcagattgatgtttatgatatattaagacgctttttgttggaaaatgaagcccatcacaaatacaaacgaccataacctttcctacagatatttgcataaggccagaaacctattgagacacccagaaataaacaaggaagactcggggaaattttgacgtgtgaaaaatttgacttcgatgtgcgattgaggcccataatatatgatggcgctcgaaagttgatatggaatgcccaagcaaatttaaacgaccataactt

SEQ ID NO: 12203 - DNA, 425 bp, Glycine max
aaatttagcgttaattccaaaagaaagggggagaaagagattagtgaatgatagaacaaaacttgcacgtattctcttgatttcaggattgtcatcatcaaaaagagggagattgtggaagcaatgctttccaagattattttgatgatgccaaagactcaagtcaagaatcaagagtcaagcaagtttcaagaatcaaagagtcgttcaatcaagattcaagattcaagtgaagaatcaaaagaagactcaatgaagataagtattaagagagttttttaaaatattgaataacacaattttgttcaaaaaaaatttcgaagaaaaatcttttaccaagagttttgctctctggtaatcgattacctgaaggtagtaatcgattattagtagcccatattcttattcaactgatttacaaagct

SEQ ID NO: 12204 - DNA, 424 bp, Glycine max
agctttgcggatttggtcttcgccagtgttaggatcgaagtggatctgaaaagaggcaaatttaatcatcctgcttatacgaatgagaaaactggggcaaataaagagggtgaggatgatggaaaaacccatgatgtgactgccatttctataccgccaagtttcccaccaaacccaacaatgtcattactcagtcaataacaaaccacctccttacccaccacccagttatccacaaaggccatccctaaatcaaccacaaagcctgtctaccgcacttccaatgacgaagaccacctttagcacataccaaaataaacaccaaccaagaaatgaattttgcagcgaaaagcctgtaagattcaccccacattccggtgtcatatgctaacttgctcccatatctactagataacgcaatggt

SEQ ID NO: 12205 - DNA, 808 bp, Glycine max
  unsure (1)..(808): unsure at all n locations
accacccctcgccgagtgtctccagttctnctctcaacactatcgccctcttnttcatcacatacacatccncccnncccccacacacnncgcgggttttgaaccctgaaagccgcacatanaaaatcagctctccgcagagaggaggatgacccactaaagggggaatattattactctacggccactcacccagagggaattataaacaaactaaatggggtggaggtgaactgaaatagagggcaaccaggaagctaccccaacaagtaacacaagaatcagcaaaaggtgttctaaaaagagagaggctaaggagacacacgggcccctatacaacttgaacaaagcccctttagaagattaagccaaaacatattcttgggtaaaaaactttacaaagagtgggccattatttagacaaactgacgggaaaaatgaaaaaaggggaaggagggcccatcgggcagaaacaatacaacttgatcttcatgtgaaaatggcttgattgacaaataggacacaatagcgaaaacctcagggttccatgttaacctagcaatgacgacagtgatgacttgaaggtgccctgaccgaggccatgatatcttaaagaaccaataaaaaatcaaccctgcccctaataaagaaaccatcccaatcaaaaaaggaaattgaaatgaaagcgaaaccgaaacgaaaatgaacaatgaaaagctaactccaaactcaaaggggaaaaaaatttgaagtcgaaggggaatactgaacggaaacggagacgaaacacaaatgcaaatgaactcgc

SEQ ID NO: 12206 - DNA, 404 bp, Glycine max
gagcttattaggaagcacacctagaagttgctttttaaagcacaaaaaggtttgctctagagtcacttccatgatattggtttttgactacttagttcattatgatttgtgaataatttttaattatttggataagaatagaaaattagcattagccagacaaaaagataatgcacttgtagttctaggccaaaagtatattatttgtgaggtaaggaaatcaatcctcctcaaagaaaaaatcaaagctagtcacaatggcttaagaattcaataacgtatctaatctctccctaacactaatgtatttcagctcacgattgtcctttattctgtcagctatgtgttctacccactaacttactgtgggtatctattcgagcttactttctcttttccgagta

SEQ ID NO: 12207 - DNA, 375 bp, Glycine max
tagcagaccagctcatacacactttcagcgacgagatatgttgctagccaaaatcttagtgaggatgaatatgttctacattaaaaatttgctttggtcagagtccaccaactctatatggcactggaagcttggatagaaagtttgtaatgctttgtgggagttataggtactgtccagagatatcaggtttttcaagtgttcatttgttcttcatggaggaagttgatcaaggtctctataccatttaaatatcgattacgtattgcgcagactaattgctggatagtggtgcataatgattaattgttatttataatatattcctctccatagcactctagcttgaaccacgctccataatctattggtgat

SEQ ID NO: 12208 - DNA, 473 bp, Glycine max
agcttccaagaatcaagatcaagattcttgactcaagattcaagaatcaagagaagacttaatcaagataagtatgaaaaggttttttcaaaaactgagtagcacatggattttttctcaaaacatgtttaccaaagagtttttactctctagtaatcgcttaccagattattgtaatcgattaccagtagcaaaatggatttgaaaaagttttcaaatgaatttacaacattccaattgatttcaaaaaaggtgtaatcgattacaatgttttggtaatcgattaccagtgcctttgaacgttgaaattcaaattcaaatgtgaagagtcacatcctttcacataaaagctttgtgtaatcgattacactgatttggtgatcgattaccagtgattgtttctgaataaattaaaagatgtaactcttcaaaaagtttttgactttctcaaattgattttaaagttttctaaa

SEQ ID NO: 12209 - DNA, 457 bp, Glycine max
tgatttgtaagttgattttagccttagtttcactttggttatttgtcaattcaattaaaaaaaatttcaaagaaaaacgtccgattgatttttttttattattttatttaaagatatttttgattattttattattattttgcctctttttggatttaaacatggttacggtgtgaaagatcggttggattttattctaacagagattaaaagatattacaactcaaatgatcggtggaaatttattttattttttattaggcgagaaaatgacttaaataaatggttaaagcacgtcaaaaaggggtacggaaagcaaacgaaataaaaataaaagcacgcgacacaagtggagaccactataggcacatagaatgaattgaaaggttcaatttcaggaacttaccggttgaagaccgtagaacgacgaagaacgaacgaagaatgatggaaaatc

SEQ ID NO: 12210 - DNA, 443 bp, Glycine max
agcttcatgatgatgaaccaagcaatttttatgttgccaaaagcccaagtgattgattcaagacttcaagatcaagcatcaagaatcccatccaagattcaagaatcaagagaagaaatctagaagcaataagtcaagacttcatataggataagtattacaagaatttttcaaaaaccaaatagcacaggtttgttttacaaaagaattttctcaaattttgtaagttaccagagagattactctctggtaatcgattaccagttatcaataattgattaccagtgaccagtttggttttcaaaatgttttcaaattatttgtaacattccaaaatgaatttcaaatagggtgatcgagtacactatattatttaccaattaaaagtgaatcacaacgctggaagtcaaattcaattgcgaagagtcacaacttttcataaa

SEQ ID NO: 12211 - DNA, 500 bp, Glycine max
ggcaaaatatagtaaggaatgaaggttttaggggaatgtaccgtttcctttcaccaacaatagtggcattacttccgaattgggcagtgagtttcttttccttttgccactctaactacattgatcaatgtctattgcaactaaagatgcaaggctctgtgaagcagggtttggatttacttttgttttgccttgtttcagcattcatttcccttccatcttctcatgtcatatgcacaaactatacataaacatagacgaaacataattgataagcccaaaatttggagttacacgggtctcatgaatagctgatgattatcttcaaatcaatttttatttgtcttataatcctctctaggatacagtctttacaagctacctgattgttcattaccactagtttggaaaattcttggtctccttagtccttattccttaacaggtgctatcactttctttggttgctttattttataatagaatctagtgttatgttc

SEQ ID NO: 12212 - DNA, 462 bp, Glycine max
agcttcttcctcagatccttcttgttggactagactcatcttaaatagcttatgaaagtttagactaatttaacttaagctttgttctcagatccctctagttggactagacttagaccaaacaacattattgtaacaacatatttaaaaccaaaacttaatccgcaaatccctcatttaagactaagtttcaatcctgcttcattcaagttctaaggtaacaatacatttcccaatgctaaagtcacctaactatgcacacaaatgggtgataagaccataagcatacagaatttaagcactgaaagaagcattgaacacaagaaacacaatcaattagatattaaagtaattacatcagttgttctttagaaatccctaacaagggtgtttagccagccattacagaaaaaccctaacaataatgagattaagagtagagaataaatgctccttacacaa

SEQ ID NO: 12213 - DNA, 463 bp, Glycine max
ttatagcaaatgccactctactccaagtttttaaaggatatgttaacaaggaaacacaagtatattcaccaggaaaacattgttgtggaaggaaattgtaatgctgtgattcaaaaaatccttccacccaagcataaagaccctgggagtgtaaccattccttgtttaattggagaagtcattgtgggaaaggttcttattgatttgggagccaatattaacttaatgccactctccatgtgcagaaggttgggagagttggagatcatgcccactatgatgactttacaactcgctgaccgctccattaccagaccatatggagtaattgaagatgtgctggtcagagtaaaacattttatcttcatgacagactttatggtaatggatatctgtgaagataatgacattcctataatattagaaaggcgattcatgttaattgcgagctgcatagttgata

SEQ ID NO: 12214 - DNA, 501 bp, Glycine max
  unsure (1)..(501): unsure at all n locations
agcttttgtctatgatgtacgcagttgcacactattcactcaccttgcactgactctcatacctaaccctcccatcaaaccatctaattaaattctcctaccaaactttctttccctatatataatcccatcatttcacaagacatcacacacaacaacatccttacaaaagtaacctctattttaaactctcatagctttcccacttacatcccctaaacacaaccctggtttaagaagttacaaagtggacttggttttggtggcctacaaattttggtaggcaagggttgtgaataacaaatctagatatcataaattataattttttattatttcttggattttttttggcactacttgtgctcaacctctcatattaataaagatttcccttttaaaanaaaaatacatattgatattagctggataaaatacacatttaagaggccaggatttttactatcgataaacaccgttgatataatataaaaaaaaaat

SEQ ID NO: 12215 - DNA, 410 bp, Glycine max
tctcaggaggcgagcttagttattagaggggtgtgtgtagctaagctctagcttctcaaggtagttttctcaaagaagtttctcaaggaagttttctcaagaaagcttctcaaggaagctacctagtctataaatagaagcatgtgtaacacttgttataatgaatgaaagtcttatgagacacacttcaaagtttcacttctctccctcttttattccttcaacttcgtgctccccctttctcttccatcaaagcatcctcttcaagctttttatccaaagcacattcttggtggtgaagctctttggcttattccctagtggatggtgcctcccctctcctgttctcctttgccttccgctgcatctccatggtggaaaatcaccattgaaggacctcattgaagctc

SEQ ID NO: 12216 - DNA, 363 bp, Glycine max
agcttaaggtaacctgctgctctgtttcattggcagccatggtacaaagcaatcaacaagcttatgagagagtaaatgttttttgctaaaatgttgtaaataaatttgttttgttgacaaaacctttcttaagcgtttcaagttactagtacaggatattgaaaatgttgagtcaccttgactgtgtatttaatgaatcatgttgtctggaaatgtgcattgcgaagagagattcaaggaaagaaaagttaatgaacagaagtatagcagggaccgatcaagtacgggagtcactatatttttaactttgcatgtagggtccatatgtcatgaaacacattggtttgaaaatgtgcatggaga

SEQ ID NO: 12217 - DNA, 489 bp, Glycine max
  unsure (1)..(489): unsure at all n locations
aaatctatatatggtttaaaacaagcttcccgttatttgtaccttaagtttcatgggataatttcttcatttggttttgatgaaaaccccatggatcaatgcatataccacaaggtcagtgggagtaaaatatgttttcttgttttatatgtagatgatattttacttgcagccaacgatcggggtttgctacatgaggtgaaacaatttccctctaagaattttgacatgaaggatatgggtgatgcatcttatgtcatcgacattaagattcatagagatagatctcgaggtattttgggtctatcacaggaaacctatattaacaaaattctagagagatttcggatgaaagatagttcacccagtgttgctcccattgtgaagggtgatagggttaatttgaatcactgtccaaagaatgactttgagagggaacaaatgaanaacattctttatgcttcagttgttggaagcctcatgtatgct

SEQ ID NO: 12218 - DNA, 469 bp, Glycine max
agcttttcgattcattctatgcacccatggtggtccacattgtgtttcgtgcatttttattctcgttttgtttactttttataccccctgttgacgtgcttaagccattttacttaagtcatttctcgcttaacttaaaaataaaatcagtttccaccgaacgtttgaattgtattatccgctaacttcagttaaaatgaattccgaccgttcggtcgtgccgtaaccacgttggaaatcaaaaagaggtaaaaaatgatataataatcaaaaaaacatcttttagtaaaataaagcggaaaatcaatcggacgtttttctctttgggatttctcattcttaatcgaattgattaataactaaagtgaaactaaggctaaaatcaactcgcctagtcaagctcgtccacaaaaataggctcttgaagtttgtcatttcaatttctcactaagtaaaatggatcattttt

SEQ ID NO: 12219 - DNA, 520 bp, Glycine max
  unsure (1)..(520): unsure at all n locations
tcttatccaaggctcatcttggtggtgaagctccttctttcatggcttattccctagtggatggcgcctcctctcacctcttctcatttgtcttccgttgcatctccatggtggaaaatcaccattaaaggacctcattgaagctcaaagatccagcctccatagaagccccacaagcaagcttccatcaaatttttcttatgcttggtggagtgggccattcaaaaatgacctttattctcttagggttcatgggaacttcttgatcactatttaaaaaaattaagaaaagtaatgcaataaaacatacatttttctatattttcatgttgattattcctaccaaaaagtatgacaaacctaaggtgtcccatatgagtacctaagtttgtattaaaaataaaaataagaacacacctacctaatgagtccctatgtacacaaatcatgaagatgttgggtgcacaagtgattttacaaaagagggttgcaccactcanaacattcatcataccaccta

SEQ ID NO: 12220 - DNA, 479 bp, Glycine max
agcttacttcttttatattgtcgtgattattaaatataataaattattttttctaataaactatttatatatatatatccaaactcaatgaataaatccttaaatgatatcacaaactttgaatttcaattttcatatatagcaaagagctttttttcaacttaaataaattattcctcaaaaaggacacgtataataaaaaaatacacgaattcgtagtaatatttgaaataaaaacattatattcttactgaaatttaattttacgttgaactgtattttttactcctaatggttaaataattgataaattatatctcccaacattaattacacattttatcctaaactttaaagaaactcgtggcttttattctctatcattttatttctaatataactgtattttttaccccacttattattctttggcaaattataccttcaatttttgtgcttactaatgaaaaagtgattga

SEQ ID NO: 12221 - DNA, 554 bp, Glycine max
tataggattctacatgtgctaaatgactacactccatcttttaatctaccaatgtcactgcttccccaaacattcccaacttgcaacaactacttagaagagagttatgaataatttccgagggagagattcccccttccctcatatgatggtacaaactgaaagctacattcaagcgtcccactttgcacagtccattaataagcttgctgtaagtgttaagattaggcacacagccacattcttccattttctcaaagagcacagttgtgattccaaaatcaattttactccatatatctgtattatcaacagagatatttgttaaacttacatcaagccccatgggattgcttccttccttcttatgtttttcaatcactagatgcttcattatgatggagtatgttagataagaaggctcatcaccagtaccaaacatgcgcctgagaacaccacatgcactatcaagtagtcccatacatccatatgctttaattaataaattatatataaaggaatcgagcaatacgccttcatttttaatcttgaga

SEQ ID NO: 12222 - DNA, 334 bp, Glycine max
agcttgatagtagcatattttgtgtatcttattaatgcttaggaattttccaacctttccttcaagtagttttttgtgtttttgtatatattcattaatcaacttgttagaatcaaaatgattgaaatcaggtgcgtgtcaggtgcataaaggttgattagagatatgggggaacgaataaacttgttatatttaaagctcgacattgattgatttaagcatcaaataaggactaaggaggaccatttctaaaaaataaagtgaaataaaatcttaatatcagatgttaagctacatactaattatggctaataccaataataacgatttgtgt

SEQ ID NO: 12223 - DNA, 500 bp, Glycine max
tctcctattgccaatcacccaacaagccttggctttttttgtagcaatgaatgtgttgatgaactactaaatggatctgtgaggatcttggatatctgtagtacaattaaagattgcctactgcaacacaaggaaagagtgcatgaacttgagtcagctattcgcaggagaagagatgccgaggccggattcacagtttcgagtggaaaatacttggcatctaggaagcaggtgaaaaaagcaattcggaaggccttatgaaatttgaaaggattcaagaatgaactcatatttgcttcctcaaacaaagacaacgagacattgtgcatgcttagcttcttaaaagaatcagaactagtcaccgtgagctcattaaaagccctcttgttgtttatcacttgctcaaagggacaatccaaacacaacaggtgggtcataatctccaagttgatccaaccaatagagtgggatgtgactctcaagagccgattcaaatgaat

SEQ ID NO: 12224 - DNA, 408 bp, Glycine max
agcttttgagggtgccctattgtttgctgttttttttatgcaaattccattagcaatcccccaaattaaggacttatcataacttgaaacccttatgctctcttagaaccctaaaacaaggtcaaggatatcaaaattaggctcaggggtttattcaaataaatcattattacttttggctaaacaagggtgcaagggataaattcatcacaaattggctttttggctgagtggcgaaaataaaaagaaacatgccttgatcatatccaccttatgcaaataatctaagagtctaagaatgatgcaaaattaggaatttaaaaacagacattctctcataattaagttcacacagctcaccgggacaagatatagttattggcttaccggaccatgatctctttccat

SEQ ID NO: 12225 - DNA, 862 bp, Glycine max
  unsure (1)..(862): unsure at all n locations
ccccccccccgacacaacaacggtctcacttccctcccgccacgctcgatccctaatccgcgaaatttaccccntccnccccccnncccacccatagactcgtacagcacgcgcacaaaaaacaccagctaagcacgggcttgcaagggaagtgatttttgtggcgggaggccaaccgaaggacaactcacacccttcatagcgagcttggaagaaatcgtggggaaacccacaaagacgagcctccatggggaaaaaaatcccccccgcagggatgaccacgggaccaaccaaaaaaaagacatctaatgcgacgcggaggacgaaatccaaaaacgagccttagaaccataaggccgatggcaccctgttaagcaggaaaaaccatcatcattagaagtcatgccttggaaaagaaaagatctaccaagggtgcccccaacaacgcccaaaaagggagacaaaaccaaaggtgccataagaaaacaaagacgggaaggaacgaaaaatgcgaacccaccgccctgggaggccacatgtccacgaatcaccaaaaaagcgggcgaacccctgaaggtcacaagacggaagcacccctgcgaacaagaactagggcaacctaactgaaagagaagggcgccaaaccaacaaaaaacgcgctggcggcaccaaaatggaaacacaaagccgccaaacatagatggaaacaaaaaactccctttcgcaggggagacaccttcttcgccacaacaaataggaatacaaaaaacctcactggcaccacccagggcgggagaaaaaacgggggcggcctcaacacaaaaacccccttccgcggcagagacaactccatcccaccccc

SEQ ID NO: 12226 - DNA, 781 bp, Glycine max
tgatttttttagaggcaccggaaactcggcacctttttctttcaatatcctacctccgccctcgtcgaaattacattacatccccgtggggggaatccactacgattcgaaaatcccggtccgcgcctaggtgcactttaggtcgacctttatacatatgcggggaatccaactataccctgctcctatttaaaggctccggacactgaactgaactcctatcatccaccatcatggaccatagggaagtgcctctcctctaatcactatcagtcaccaatcacgtcctctacattcgactgggtacccctctccactctatatctcactggctccatgccagcaactccctatggagcgccccccgtaaaacctacgacacacatctcttcatccacgtttatcacatcttatatctctcatacatacatgtgcgccaagcttgttacaacatctgctccactcttcccctcttctaacacctataaatccaaaaatgttaagcatcacatcaaccttaccctcccacatgcttttacatctcggcttctatgttttcctaattctgcgtcagctccactttccttacgatcatgattatctctcttcacttctcccggtgttccgacaattattcctttacacacatattgctcggaccatcctgactcccgttggcactcttattatcctaatctcacgctcctatccgaaaacacagtaccattctcaccttatcgggcgctcacccggatgaccctacctcgacattacttgaccg

SEQ ID NO: 12227 - DNA, 95 bp, Glycine max
cccccctcaacgatgaaaactggcattgggtatggagaaactccgatgaagctctattggcatagttacactgatagagggcatttatggccctt

SEQ ID NO: 12228 - DNA, 98 bp, Glycine max
gagcatgcagcttttttgtgggtgaagacttttttttctagaaggcagaccaaaggggcatatttttagtaatacacgccccccacagcacgcaaaaa

SEQ ID NO: 12229 - DNA, 865 bp, Glycine max
  unsure (1)..(865): unsure at all n locations
cccgcccaccccaccggatgcggctgaaccactttntagctacacccccggcctgtcttccctccacacaatcctccaccctcccccccccaccgccccgcgnnnnttagagcttctaataggcccgcctnaaaaaatccaggcggcccctatncaaaaaggaaagaaagcagagccgcctttttttattgctcgaagggagctccccgcccaaattccatgccgcgcgcagcccgacccctaaatgacgaaaactggcattggctatggagaaaccccgatgaagctctattggcatagctacactgacagagggcacccacggcccccctcgcggctccccgccaaccaaggacatcgcccacccttggaaaccccccgcgtgtaacgagcaccccccaccctacgcccgcccggtcccctgagacaacaaggccgccactcccaccccccggaaccaccctcttacccgcgcgacgaaacgcgaacaagccctctcaccaacaaccgcggccccgcccacgccgcaccgccgaccaccgccccccaagccgcagcgcgaccacggcacccctcaccccccaccccggcaccccccccgcgcccgccgcaccacccccgacgcccgaccccccacccgccccggcaccaccccgccccccgggcccaccctaccacaccctccccgaccccaccagccaccctcgacctccccgcccgccccgcccaccccactgcgcccacccccccacccacccccccccaacctacaccccgccaccggcaccccacccccgccccctaaggccagccgcacggcctcggcaccccccacgcccttctgccccgataccccacccggccg

SEQ ID NO: 12230 - DNA, 370 bp, Glycine max
agcttccccagacagacccatctcaattgtggtttacaagaagacactagcagcacacaaaaaaaaacacattgcctcaaaatcctctcttgtccacaaacatgaagctatctgcgaaacccatttcgagtccaggtcgcacagacaagttccctcccccactcatgaggtttctcagaagcaatgcgggcagcagaagcagaaggtccaggtcaagccctatgttcgtacgaaagaaaaacaccaccttcgaaacccacacccaggaaccctcttcccccaaggtcacgtgcatgggccaggtccgagtcaaacgcgctgtcaaacaacccaccacccaacccgacttagcttccactcggggccgccg

SEQ ID NO: 12231 - DNA, 1053 bp, Glycine max
  unsure (1)..(1053): unsure at all n locations
cgcgctcttggtangccatgctannttacggggaccactatagaaaatactcannagcttattattcttccccttgcggggggtttttgaaattagggtctttcaggtcctcggtcgtacttgcgcccgnntacnccgacggaaagaacnganncagggttgacattcaattcnngtgcccggctaggcctggnnnggtcaattcaataagtggcccgccctcaacagtggccgcaccgaatccattcggcaattcgcacaaatttcaagccgccgttgtgtctcccggctcagggcgttttggttaagcgcttctacccacatcgcgatctcctgttatgcaactcgtccattatcggcantcgtctttcgcaccatctctcccactctctcattctcacaccggtggtcgcctatttcgccctcgcctcgcgtcctccctctcgttacccgggccccccctctctccacctgcgctttcttctcgaattttcgtcatacccctcccctttcccctcgtcgtcgcccccaccctcacccttctcgtgcctgtccctcttttttccctcctctaggaccctcactcatcccgcccctctcctccttagcttcctgctcccactactccgcctccacctccgtctccncgctaagggtgtctgtgttcttctctgcngccacacccgctcgtccacctcgcccccctacactcttatatgatcgctcctcctctctccctcctcgcctctcgcttcgtcaaccccctacccctctttgctatttcgaatctgcacctctctctctctccctctacgatctgtcccgtgatgcccccgctccctcataacttctccccnccccttcacttctatgtttgcgcctccatacttctcctcatttactctatacttcccctcctccgcccgctctcgcatattgtattccactctgccgctacttcctcccgcccgccatctctcagacactccctttgtctctcgcctctccatttgcgcgctccgccctcgcgcattatctcctcctctccctccg

SEQ ID NO: 12232 - DNA, 375 bp, Glycine max
  unsure (1)..(375): unsure at all n locations
agcttcatgtggatacatcatacatgcnattatatatatgctacagngtgaataattattttgagtaagaaaaatagcagcatcaaaattagttatttacaacatcatatcaaaactattttgatcttaaaaaattatgacaaacaagaaataaaacatgagggacatgttatgtgctcaaatatatttcccctgttataattaacaaacttgtgtaggaaattttcgtttgttaggttaaaagtaaaataaaaaaatagaaatcctcacttttgtattgtctggttgaccaccatttgttaatcttccacagatgttcctatcatctgatcattttctctggatcttaatggattcgcggggatagataacgag

SEQ ID NO: 12233 - DNA, 911 bp, Glycine max
  unsure (1)..(911): unsure at all n locations
ccaccccccctgcgtaccgaccctcgccccnnctccacaccaccccacaccacacatgcaccgtgcataattgcttctccctccannntcaggccnnnacgaagggattggacctgtgctaacacgcagcgacanagactacngctgctgtcacaattaccaacgcggaggcagcgaagaaaagattttaaatccgaacgcaaaaaccacgacgagccaacgctgaacgaagccaggatcgccacgaaacccagaaagggcctgagtgaataggggaaaaggagaggacacaggggagagagaaagcaacacgagtccgagagaaacagacagcgcaaaaaagtatagcagggtcgttacccggcggcagacgccctaccacaaaccccagagcagcttaaagccatttcgcaaagcacgccccccccccctccacgcgcaccccctcgcccacccaacccccccgaccctcggaatcgaccccccccgccctcccgcgatcaccacccgccaacccgcaaccaccgccgccccccccgcccccagcgcccggacccccgccacccccgcccccaccccccacgcggcgatccttcatganctccacaccctcgcgcccctccctccccctccggcattccccccacccagccccccccctccgacctcgccccccccccacctcacccgtaaatactccccgccccctcgcgagtaggcccaactcgacaacccgccccgtaacccctcctcacccccgtcgccaatcccgcccacggcgacagtagccccttttccccgcaccccccgggcaatgtgtggcccgaagcccactgcgcccgcctccccaataacccccacacccgcgccccctttcccccccctcccccgcaatacgcccctcccccccc

SEQ ID NO: 12234 - DNA, 263 bp, Glycine max
agcttctagccaaatggacttaccttgattaattcctttgatagcccttttgagccttgtttccctttccttgttttgaagctcactacaagccttaagtgaaaaaccatgatattaccatatccttaaggaattttggagctttggaattggtttgggaataagcgtgggggggatttgcctgtgaaggctatcgaccatttgaatttttcaaagacaatcgatattcaacttcaagcttctctatatgcgcaccccctcaa

SEQ ID NO: 12235 - DNA, 142 bp, Glycine max
  unsure (1)..(142): unsure at all n locations
cactatagatactaagcttgagagtgtgcagccaccatcttttcagagagagtctgattatgtgtctaccatcacgattatcgnctccctttccatcattggggataccacctgggccgccagatccctccaccttttgggc

SEQ ID NO: 12236 - DNA, 449 bp, Glycine max
aaaagctgaccatgattagacaactatctacggatggtgcaagtgtgacaccctttatcctggcatacatataaatcagaaaaacatataagaatttagaacttaattaaatcaattttattcaaatcacttaagcaaattcatatggataaaagggtcacattcactatactgttacaaaataaaacttatcaaaaacatcttcggctcaaaacaaggtcggccaaaactccaaagaatgaactaaagactcagcatatgaaatagaatgatacaaactacaagtccataacttcttgcaattaacacagaacccctgtgtctcaatgtcacgtcctatcagaagattgtacttcagcatcctctagcatgaggttctccatagcaattcacctaactcattgcttccatgaacccaaagcttgagatcataaatgacccaacataaa

SEQ ID NO: 12237 - DNA, 365 bp, Glycine max
  unsure (1)..(365): unsure at all n locations
tcaacttagtaaaattggaaagaaattaggtgcttcattgtattgctcgaagggatttctttgcctaattttcatgctgtgtggattttgatctctaaatgatgaaaactgtcattggctatggagaaactccgatgaagctttattgtcatagttacactgatagaggtcatttatggtttttcttgtggnttcttgccaattaaggacattgctcatctttggaaactcctcgtctgtaatgtgcatttctcaccttatgctgttttgttcttttgagattacttggttgtcattttaagctttttgaacctttttttttatctgcgcgatgaatgctatcaagcacttccataaacaacctt

SEQ ID NO: 12238 - DNA, 956 bp, Glycine max
  unsure (1)..(956): unsure at all n locations
cccgcccccccgcgtgcaacaaaccatccccgcgaccccgcgacacccgaaccatgctcgcaacacccccgctgggtcctcaccccncccgcccccnccccgccnttagtgcctccctgcgcgnagagatntatagagaccgcgcagcaagcacagcgaagctttatcatgcatcagaatagccgatttatttgttatctcccgatccggcaccaccctgcaccacagtgcacctcaaatacaacaacgcgccagccagcccgcatgcacccaatccataccgccagaacaagagggcccccacgctaccaccaacgaaggccgccacccgcgccgaccccaacgcccatccgcaccaacagccctccacacaccacgaccaccccagcccgtcgcacacgcgcacaccacaccgcccaccactcgaccgccccccacccacaacgacccgaccgcgcacccagcaccccccgacacaccccccgggcgcgcccccacgcgcccgcaccaatccccgcccaccccacccaccagcccccccccacaccagccccaacaagccggcccacaccacccacagccaccaccaccgccgccacacaaacctcccaccccaacccccacgaccccggcaccgccgctcaccccccacgcccaccccacccccccgcccacacgccccccaccccgcggccagacccacccccccgcgccacccccacgtccccccccaacccgccgccacggccccacagccccccccccccacggccaccccccccaccccacagataccacgcgcggcgccacccgcacccgccaccgcccagcgaaaccgacccccaccgacagccgccccaccgcccacgcgctcccccgcacaccacccacccgcactcacaagccccgacacccccccaccccgccaaccaccgccacccgccccaccaccaccc

SEQ ID NO: 12239 - DNA, 979 bp, Glycine max
  unsure (1)..(979): unsure at all n locations
cccgcacctccccatcgacanngtattcnttacatcccccgcaccnccggcacctctctctccgccccccccccccccacgccccccccnncttgtgacccctggaagagagggaaaaaaanaagctcgctcancgcgagaaataacccaagcgacggacggacctgtttattgataacatagcaaccacacgccctagcacacctccttcactttgacccacaatacaacgctccaacgacttgcatacccacaggtggaacccaaaaaccgctaccccctcttcgcgcgcgaccaagcgagccaccctgccaccccaccagaccccgacccacaacgaatcaccgcaccccgcgccgccctaccgcaacctccccacacccccacaaccccccgacacccagtacactcacacggtccccgacacacccccacgaaacacgcattaaccccgccccacgccaacctcgcgccccccacccgcgcatcccgcccacccgcgatcatcccggcccacccgcattacacgccgcacaccgccgcacacccggcatcccgcacacacacgcccaaccacccgccccacaaccgacagccacggcgcgaccggccaccctgccacccctccctccccacgatctcctgcccacgcaccgcgaccaccacgcgacatcaccgccgacccgcccaccaccgccccgcccacccgggcaccaccccgcacacaccgcgccacccncgccacgaccaccgcgccctcacgcgcccacccctcgcctaccacgcaccacatgcccactacaccgcacccgaccccgggcaccaccgcacgcatcgctcctgtacaccgcacccactaaccaggcatcaaacgcgccgccacgcccacgacaactccgcaccacaaccgcgaaccacaaccacgcaatcgcgcgccggccacaacccacacacccacccatcggcaacgcgcacaacg

SEQ ID NO: 12240 - DNA, 508 bp, Glycine max
agcttaggaacaagccttctctcacctaattggcctaagaagaaagctaacactatatagagccttcagtggcctcacacaaacacactacactgtttctcacagtccctctcatcaggagcaagatattgagagccaacccatcatagtgaaccgtgacggctctgaaaataagtacgaaactacgttccttatgacctcagaagaaggtggagaatacgagttggtgtacttcaagaggctcgatgatgaattcaacaaagtggacaagttttacaagtcaaaagtggaggaagtgatgaaggaagctgcaatgctcaacaagcaaatggatgctttgatagctttcaggatcaaggttgagaagccaagtttgttgttatttgatcattctgtggagatgactcgtcttgcttctgatgttgcttcttcatctgcagtgtgggcagtttccacacccaaaggggccaaattggacagtaattaattttcaccttcacctcatttt

SEQ ID NO: 12241 - DNA, 250 bp, Glycine max
aaaccaagctataatggcaggcccgacgaggagacgcttattaattggagggcccgaacgccgagccctagcacaaggggccaaactgcccctgaaccctttctccctgagagagataagaccaatgcagcccaaaccaggcatatggcaactgcgactgaatcaaaaacaagacaatcacccaaaaataagaataaggacagtaacaataagaaaaacaggacacccaccaaggaggcacaaagaacat

SEQ ID NO: 12242 - DNA, 369 bp, Glycine max
agctttgatgatatggtcttcaccgttgtttggatcaaagtgggtctgaaaagaggcaaatctgatcatcttgctttgataaatgcaaaaaaagctgcggcaaataaagagggtgaggatgaaggagaagcccgtgctgtgactgccattcctatacagccaagtttcccaccaacccaacaatgtcattactcagccaataaccaaccttctccttacccaccgcccagttatccacaaaggccatccctaaaacaaccataaagtctgttttccgcacttccaatgacgaacatcacctttagcacaaaaccaagagcaccaaccaaggaatgaattttgccccgagaaagcctgtacaattcaccc

SEQ ID NO: 12243 - DNA, 337 bp, Glycine max
tccaagattattttgatgatgccaaagatttttaaaatgtattcattcaaacaagattaaagaaatcaagaagattcaagagaagactcaagatatgcaagaacctcaagaaaagcatcaagataagtataaaaagaatttttcaaagaaaagattgaatatcacattttgtccaaaagaatttttcaaagaaaaatattttaccagagtttttactctttggtaatcgattaccagaaacccaaaacagttttataactattttacaaagtagcaaccgattatcatggacatgtaatcgactaccaatgttttcgaacactgaattctacacccc

SEQ ID NO: 12244 - DNA, 448 bp, Glycine max
agcttggcgaggatgcctcaatggaggttttagaaagagggagagaaagagagagggggggagcacaaaattgaaggaaaaaaaagggagaaaagttgaactttgagttgtgtctcacaagactctcattcatcaaagttacaacaagtgttacacatgcttctatttacagactaggtagcttccttgagaagctttattgagaaaacttccttgagaaacttctttgagaaagcttccttgagaagctagagcttagctacacacaccctctcataactaagctcacctccttgagaagcttgcttaagaagcttcctaaagaagctagagcttagctacacacacctctctaatagctaagctcacctccttgagatgagaagctagagcttagctacacccccccctatattagctaagttcacccctaagccaaaaaccatga

SEQ ID NO: 12245 - DNA, 260 bp, Glycine max
taacaatctacttgcttattgcttggtagatgaagcttcttttctttacttaagaattttagcttctacacttgtctggatggaagattctcgtattgagcggactgtcttgcaatacaaaattatatcttttttctttgggtcaatttgctattttgttaaaatgcattgatggagcctcaaaaacagaagctaatgatccctacagtttttgtctcgcaactcagacatttttaaatgaatccctatgctatacgaac

SEQ ID NO: 12246 - DNA, 133 bp, Glycine max
agcttgttattttattaccttttttggtttctaagttatgaatcatctctcaggctgcagtcattccaaattgtcgcattctcgctgcagttggccagaaaatggcccgcactcccggcgctagtgcctccct

SEQ ID NO: 12247 - DNA, 254 bp, Glycine max
tctcactggggaattaaccaagtctctgaggtacgcgttcaaggataatttgaaatcatatgccatagcaatctcttcactttgaccatcaataatttcttcaatgttttctatctccaagttgtcaaccaaaactgctcccttttgcctgagtttgaaggaagtatatgagactgaatacaccaataagtaattaatactacaatttaatagtttaatacttaacagctgacacccacattaattttcattac

SEQ ID NO: 12248 - DNA, 267 bp, Glycine max
agcttgcatgatttacatctccctctttctcaagcaaattcttcttgatatcatcaaaatcttcatgatttacaacggcaaccctcatctgggatacaaccgagcggcttacccttatggattgccgcccaactactcaccacccgtcctgcaagacgatgcgggcaatattgcttctcctgtccttgaaagagagccttctcaacagtccgacgaggtccacgaagacactcaagactatgctcgaagggatgtccagttctattc

SEQ ID NO: 12249 - DNA, 124 bp, Glycine max
  unsure (1)..(124): unsure at all n locations
tgagatgaggaagtgttgaagggtgaaacttcctgcntttattcgttgaccacagagtggtacctggagatatgtcgcgggggtcaggagaccttggggacttcaagaagcctgctaattacca

SEQ ID NO: 12250 - DNA, 483 bp, Glycine max
agcttttgcaagctggaatcatttatcctatctccaacagccaatgggtgagtcccgtccaggtagtcccgaagaagaccggcctcacagtgataaaaaatgagaaggaggagctgattcctactcgggtgcagaacagttggagagtctgcattgactataggaggctgaaccaagttaccaaaaaggaccattttcccctgccattcattgaccagatgcttgagcgcctggcaggtaaatctcactactgttttcttgatagtttttctggttatatgcaaattactattgctcctgaggatcaggaaaagaccacattcacctaccccttcggcactttttcctataggaggatgtctttcggcctgtgcaatgcccctggtaccttccagcggtgcatgattagtattttcagtgacttcttagaaaattgcatagaggtgttcatggatgatttcactgtgtatggatcctctttga

SEQ ID NO: 12251 - DNA, 469 bp, Glycine max
  unsure (1)..(469): unsure at all n locations
tctaacccacatgatgaatatgaaaaattttgccctgttgacattctccaaaaataaatctaaaatcttttaagggcacataagagtgaaaaacaaaagtacaaagagtactattctgagagaccaaattctcccattcccatgtagaccagcagaatctgtctgaatcatgattttgaacttgcaatctccagttgaaagatctttgtcagtgacaacagaaagaccggggaatttgcatgcactgtcaatctggtcattcacttggaagtaactattgaatgcataagaaagattaccacgagcatctaaaccaccacatgaagtttgatatccaagacttgtgcaatctgcattttgacaagcataagacacactcggtgccacttgatcactattgagggttgctgaggttttcaaaatgcaccactttnttngtagatatgccaccccagtagcagctactaag

SEQ ID NO: 12252 - DNA, 480 bp, Glycine max
agcttaccatcttcaattgaaagccttttttacctcagattgctttgtttggagagatgtactttatatgacaacttatccatcatagggaagctgaaaaaattaagaattctcagcttttctggatctcgaattgaaaatttgccagctgagttaaagaacttggataaactacaattactagacatcagcaattgttcagtagtcaagaggattccgcctcagcttatgtcaaggttgacttcgttggaagagttgtatgtaagaaattgcttcatggaagtgtcggaggaaggagagagaaaccaatgtcaaatttcatttatttctgaactaaaacatttgcatcaattgcaagtggtggacttaagcattccatgtgctgaagtttttcccaaggaattgttctttgcaacttatgtgattacaagattgagaatgggaacttctaaatgctttcacctggagatttcagaatgc

SEQ ID NO: 12253 - DNA, 352 bp, Glycine max
tatacttgtgtttataactttctaaattttttatttatgaactatcttcacattatctcgatatgattcacttttatattccaatatctctttaatcaagaattaaaactctcaactctatttttaatttttttgtgtttatttttaaaaactatttttttatctcaaatgtcaattacctatattccgaatgttatgtctatatccttaggaattcttttgactcaaaggtggacgataccttttcggcttttttttactcacatctcgagcaaacaaactaatccactgtaattcacgaaacagtatttggaaattacgctaccagatatgaaatgggatttaaattaat

SEQ ID NO: 12254 - DNA, 420 bp, Glycine max
agcttgggaaagattctatgagttgattatgtttttcccacatcatgggtttaatcagcaaaggatgcatatattctatggaggataagagaatcatgaagagggcagtcaaccaagtggaggatcaagcaattacttttggacttggacaacaaattcaagctttatacaagcaaatcgagactctaataaaggcctaatctctatctcgggtttctaactccacaccttcataccttgtgataagtgtggatgtgtccatgggtcaggagaataaataatggaaggcgagttggctcaagccatggatgagttcaaatatgttcgaggtaggtgttggatcaagtggcctcataataataagaaggaggggttgaattaattattcctaaacctttactaattaaaaatttactcttc

SEQ ID NO: 12255 - DNA, 493 bp, Glycine max
  unsure (1)..(493): unsure at all n locations
tgatgaggaagttgccaaacaaaagggggagaaaaagtattagtctaagtcggcatcatctaagggcaaatgtgaaattctcaagaaagcatcagtacagggggattttttatgattcagaattttaactttttccgtagaactttttattttgtacttaaaacacatcttgatgtgaaaatctttatatgaataaaatgagatattttcttttatctattcaaactttatctcaaagtcttataatgcattctgatttgccatgtgtgtgtgtgtgtgtgtattctctccatttgataagactgactaatgcttttatgtaatatcttataagtatgccttcaacttttacatttgtgtttgtttgacatcatcacaaagggagattgttaggtcaaaagacatatgtgtcctaagacgaattangaccctttattaatttaattagatgtaaacaaatacaaagattaaaagttgtgtcttatgtgctatt

SEQ ID NO: 12256 - DNA, 381 bp, Glycine max
agctttaccctacagtaagtttgaagaagctttatgagaaaatccacaagtcattaaggcggtgaaatgaaaaaaatgagtgaaagccagaaagctatgttgaggactatttgtccatagtgagtttgggcagtgtttgctttcttgctctgttcctattacattactactctttttttcagcgacattttttctttttttctttatttctttatcccttttatttttgtgaggggaattatggttttatttatttatttatgtatacgacgatgtcaatagcaaccctaccctatgatagggagcttgggatgctttctatgtcttgagaaagctgaaagccgcggagaatggggaattggttttgtttgatttgatgta

SEQ ID NO: 12257 - DNA, 460 bp, Glycine max
  unsure (1)..(460): unsure at all n locations
tgtcttgactgaagatggatcagtggacataagcactgctctatttgttgcatgggctgtaaggattttggctgcagttatgattcttcaggtttttttttattaatttccaccttgtttctgttatgttgttgatgcttaaaataagcgcatgattgtaaatttgataagatgttgtttccagagttctatggatcctctgttgggaacattggcattattatgtggatcatttgtctccttattgaagaaaatgcataggttgagattccttcgacatttacgcaggttggcccacttccttgaattttggaccttattaattttgaacaataaaaatgttcttttcattttttttaattaagtacaagaacgaaggttttctttttccctgcagagggggggaaggggcngtnnnatctgggacctatccctggaagaagtctccacagaagccatt

SEQ ID NO: 12258 - DNA, 503 bp, Glycine max
tagcttatacgcaaaacaagagaggtgttatttttaaaaaaaaaacgcaaacaaaataggtcgcgtatgatataatttaaaatgtaagtccaacatcggttttcaataaaaataaaaaaaaaatcgatgttaacaaaatgatgttaactttaacatcgattttcttcaagaaaccgatgttaacttatcatacgttaacatcgattttatgaaaatccgatgttaacggatacatattatttacaattatgccaccgtgtttatcttaacatcgattttatcaaaaaccgatgttaatctgacgatgttaaatctgttttttgtagtagtgtataaataatacttggattattaacatgtagagactagtgtaaaacctactttgggttgagctactaatggcttgagacaataatatttatatctttgagaaaaatagaaaaacttgatggtttattaacaatttaatgtaatcctcagtgtttgagaaaaattattataaa

SEQ ID NO: 12259 - DNA, 571 bp, Glycine max
tttagagattctcactgggccggttgtcgtgacacacgtttctctattacaggcttcttcatctttcttgggaattctctcatatcatggcactccaagaaacaatccactgtctcacgaaggtcatctgaagcagaatatcgcgctttagctaccaccacatgtgaacttcaatggcttacataccttcttcaagattttcgcattccattcactcagccagctaacctattttgtgataatcaatctgctattcaaatttcttccaatcaggttttccataagcgcacaaaacatatcgaattagattgctatatcgatcgcgaaaaatcactaaatggccttctcaagcttcttccagatagatcctccatgcagcttgctgatatttttaccaagcctttatctcctactcaattcaagacactaatctccaagctgggaatgataaacatctattcccagcttgagggggggctcttaccactatgagagaattcgcgttgctgctactgcataagtgccgctactgcagagttgctgctattgcatttcattacatttcatttac

SEQ ID NO: 12260 - DNA, 608 bp, Glycine max
agctttattcaagacaaagaaattttttatattcaagatggatgatcaagactgtctatagagtcttataaagggtatattaaataggaagggaattccaattgaagtagcaaaaggtttggccaagaattttaagttaaaaagtcttttacaagaaatttactctctggtaatcgattaccagtggccaaaactgatttacaaacagctattaaaatttgaattcaaaatttgccctgtgtaatcgattacacatatatggtaatcgattaccagtagtttctgaatgttttaattcaaattttaaagcttgaaatcgatttcacatatactgtaatcgattaccatagcagaatttcagaaaatattatcaatagtcacatctttctatgtggttcttgaatgggctattcaaagcctatatatatgtgactcaagacacaattttcttaaaattcttaaaacaaaaaggcttaccttttaaaagtaaaataattttattctcttacaaattcttgggcaaatactttgggattcaataagaaatatttaaaatcttaaatggttaaattatctttttcaaaaaaattcattttttttttttttat

SEQ ID NO: 12261 - DNA, 406 bp, Glycine max
ttggaattcaatgtgaaaagttatgactattttaattttccgagagcttccgctggtcattttcgagcgtctctatatgtgatgcgccttaatctaacatccgtgcgaaaagttatgaccatttgaatttctcaagagcttccgttgttcaattttgagcatctcgatatgtgatttccctgaatcgtacatccgtgtgaaaagttatgaccatttgaatttctcaagagcttccgttgttcaatttcgagcctctcgaaatattatgcgcccgaatcggacatccgtgtgaaaagttatgaccatttgaatttctcgagagtttccgatgtttaatttcaagcgtatcgatatattataagcctcaaccggacatccgcgtgaaaagttatgaccatttgaattt

SEQ ID NO: 12262 - DNA, 521 bp, Glycine max
  unsure (1)..(521): unsure at all n locations
agcttccatcactgctgttgttgttgctgagggctggaccatctgaggttagggtgattcttctatccagggttgtatctgttgctggagaggtcataattgttctgctgtggttgattttgcttctgaggttgaggaggtctattgtaaatatttgcagcataagcttcaggctgctcaatcgctccaggttgctgcatggaagggcaaaggtctgtatggtggtcagcagaggagcacaaaccacaaacccttgtaacaggtacaaatttctgattcaaggccagctgggttaccaagttaaccaatgcatccagtttgccttcaagcttcttagtctcagatgatgcagctgagtttgtagctacctcatgcactcctctaatgactatggcatcatttctggcactaaactgctgagaggtggaagccatcttctcaataaatttctgcttcagcangagtcatgtcttcaagggctcaccactggcagcatctattatacttctctccatattact

SEQ ID NO: 12263 - DNA, 421 bp, Glycine max
aatttgaattaaaacgttcagaaactgctggtaatctattaccatatatgtgtaatcgattacacagggcaatttttgaattcaaattttaatagctatttgtaaatcagttttggccactggtaatcgattacatcctctggtaattgattaccagagaataaatttcttgtaaaagacattttaacttaaaattcttggccaaaccttttgctacttcaattggaattcccttcctatttaatataccctttctaagactctatagactgccttgatcatccatcttgaatatctttaattgctttgtcttaaataaagctttgagatgcatgtgaacctttggcatcatcacgcatgtgaacctttggcatcatcaaaacattcagcttgatcctttgtctacatgtagctaagctct

SEQ ID NO: 12264 - DNA, 706 bp, Glycine max
tcggccaggctatctaatgttgctttctccagagtcattaacgcttgtgatgtgaaacattatgaatggccccactagacctttgttgaagactatttccccatattgagtttacgcccgcatgcctttttgcgctgattctattacattaaatactctgttcttcaccaccatttaacgattcttgtttattttccgaataccttactattactgtgaagaggaaatatgtcatttcatttatttaatctatcggatacgagagatgaacattacctatcccctcccctattattggatcttgggaatgcctttttatgtcttgcgaaaggtgatatccctcgagaatggggaaatggtttcggctcgatatgatgtatttctgcatcactgattaaagggttgcaaacaccctaatgttgaccattattttttttgttctttggacgccggaggctccttttaataaaaaggggaacattcctttttcattactcttttttataattaatgttattcctcactccccccttttatggtaaaaaatgtgggcttaaacagtaaggggccctgtcttatttcttattaaaatatattagccaattgttgaaaaataattattgtatctatcattaaaaaaatatggggtatgaatatccccctctttaatttttttgggtcacagtccaacaaatatttctatccg

SEQ ID NO: 12265 - DNA, 399 bp, Glycine max
  unsure (1)..(399): unsure at all n locations
taagagagcacaaatcctagacttaaccaattagtctttttaatatacttagcttgctcattagcctttcacttgacttgttctaacaacacacacacttatttgaactctttttttttttttctatttttatttatttgntgngtgtgttgttgttgtttcttacctttaaaaattaaccatctaacagactcccccaaatttggggtgaaattgtcctaaaccaatgtgccctcttaaaacctaagcaaggtaaataggaattacaactaaaggctcacagttcaatacaattacagtttagctcaaagatgggtgcaaatgatataataattgataacaggtaagcttttggtcaagtgtcttgtatatacaacaatggccttctgtcatacccta

SEQ ID NO: 12266 - DNA, 437 bp, Glycine max
agcttctggtgggacatcttgacttgctttccaatctgacattcaccacagattctgccttcttctattttcagattgggaatgcctctaacagcacctttgtcaatgattttcttcatgcctcttaagtgcagatgtccaaatctttgatgccatattctgacttcatcttctttggaggatagacatgtggaggagtagctgatttcttggggtgtccatatgtaacaattgtcctttgatctgctgcccttcattagaacttcactcttctcatttgtcaccaagcattctgactttgtgaaggttacattgaatccttcatcacacagctgactgatgctgatcaagtttgcagtcagtcccttcaccaacagtactttgtccagactaggaagtccatcatgaactaccctttccatttcaatgatcttttc

SEQ ID NO: 12267 - DNA, 424 bp, Glycine max
tcattaagaggcttcctccagaagcttcctcgtggcttctttgagaagctttctcaagaggcttctttgagaagctagattcttatctatccacacccctctattaactaaattaacttccttaaaaataattatggacgaaaataacgcaacaaataatcaaacatcaaacataattactaataatatatagatatatatatcagggtgttacaccaaccatgataaatgtcggagtcttgcttcgcactgggttttgtttcactttagtaaaacatggggtcgagtcaggcgccttcgcttaaaaataggttctatcaagtcaaggtcaagagcctatgagtcgctagtttgaaagagttaggacagttgatgggtcagctccagcgacaagcttttcgcatagcttacggtaagatctggg

SEQ ID NO: 12268 - DNA, 554 bp, Glycine max
agcttctcaaggaggtaagcttaattattttaggggtgtgtgtagctaagctctagcttctcaaggaagcttctcaaagaagcttctcaaggaagtttctcaacaaagcttttcaaggaagcttctcaaagaagtttcttagggaagctacctaggctataaatagaagaatgtgtaacagcttttgtaactttgatgaatgaaagtcttatgagagacacttcaaagttccacttctctccctcttttattccttcaatttcgcgctccccccttctctctttcttttcctccattaaagcatcctcatcaagcttcttatccaaggcacattcttggtggtgaagcttcttcttccatggcttattccctagtgaatggtgcctcccctctcctcttctcctttgccttcccctgcattttcatgggggaaaatcaccattgaagaatctcattgaagctcaaagatccagcctccataaaagctccacaagcaaacttccatcattttgggcttaacgccaatgctgcgctgagcctacaagagacaaatg

SEQ ID NO: 12269 - DNA, 638 bp, Glycine max
tgagcttagcctttatggtaaacaagccgagtcgagccattttttacataggccaagccaaaggccctcgacaagctgctcgactcatttccacccctaattgacatgatgacctatttttagtttttggccaagtaacctattcattaaaaaattcaatttgagtatttatcttatttttttaatttagtttagtcttttatctttaaaaagtttattttgataatttatcttattattttattaaatattatcatttgattcttttaaaattgatatcattaatcatttaaaaataaatgtttatgctaaaaatgaagtgaagagaaaggagagaaaattgaacaaaaaaaaatcatttttaaatgattaatgaagtcaatcttaaataaattgaaagaccaaactaaaaagaaagtaaagatcaagctgaactatagcaataagatatatgatcaaataaactttttaaaagataaatgactaaactgtgtttgaaaaataagataaataattaaattaaactcttaaaaaattaaaatggataatttaattacactttttaaaagagaaaagtaaaaagtaaaaaaccaataggtgatttagccttttttttatcaactattaaagtgagcgag

SEQ ID NO: 12270 - DNA, 436 bp, Glycine max
agcttggcacctaaccatttgttttttttttcagctggatatcctcctaacaatctatttggctttacaggaacggatcctccagggtgatattattacggcaaaaaatcctaaccattcattaaattgcattaacataatattttttattataaaatgaaagttttcaaaaattaatggtgagatttcaacactgcaaaatatcgttgcagaggatccactcccgtggctctccaggtttcaaaaacaacacaaacccaaaaaaaaaaacttttatgtaaatctgttttaaaagtaagcattcttttttcttcttcctctcttgttaccaaataaaagttaaaaaacacgcctttaaatgtaattagcttagataatgatttaaacttgaattaaattaacagttagatatatcgcttgttggtttaaagaacat

SEQ ID NO: 12271 - DNA, 468 bp, Glycine max
tatccccgttttttctttgtatcaacgtgctgtcaatgtgggctctccgcataaattttgttgctgtgctgcttcgttactctaatactatttcttttttccttttaataatgaacaagagtatcactatttttctttttcgtacaaatttggtagtatttgttatgtcattattattattagttttaatttcatttgttatctataaatcctgttccttttaattattctttttcaacgaaaaacaaacttggttagagtgagtttcttcgtgcattgaaattgaagttacattgcgtgaatgtttagcagatttcgtcgtttagagagagcaagtcagatgatcggcgtttctatatatttacagcaacgaagaccctccatctgagaactgattcaaggaaagatcgcgtggcgtggatacaagcctggttttaacacgtgccctgatcctcttcaccactcatg

SEQ ID NO: 12272 - DNA, 511 bp, Glycine max
agctttacattactcctcatgcttcttaccatgtctaataaggttcgatttcttcgttctgccacaccattctgatccggagaaccaggcatagtgtattgggcaacaatcccatgttcttgaagaaatttcgcaaatgaacttggggcttgtccatcctctgtgtatctaccatggtactccccacctctatctgatctcacgatcttaatttgttttccacattgtttctcaacttcagccttaaaaactttaaaggcatctaaagcttcattcttataatgaagtaagtagcgatacatatatcgtgaataatcatctataaaggctatgaagtatttctgactatttgcatccatgtctggacaacatatgtctgtatgtatgatttctaataaattagaactcctctctgcccccttttaagactgttagtttgcttacccttaatgcattctacacaagtttcaaaatcagcggaaatccaaggactaagtacttcttctttact

SEQ ID NO: 12273 - DNA, 523 bp, Glycine max
  unsure (1)..(523): unsure at all n locations
tttaagggttacttcatcatacattaagcatgttgtcccataacaagcttttctttttgtttgtgtttttcttctttcttccatttttttctttttgtctgcttattcttcatcatttcttcaaacgttcctaatctccttttgtctcttcttattcttagtgcagctgttcttcttcttcatgcgttcaatgtgtcttgtgctctgattattcaaaatttcagaatttggctctctatttttttagaatttcagaatttagttctctggtcttttagaatttcagaatcatgttgttcatgctttattgaggagatgggagctttgaagaatatgggtgggaatggaactttaaatggaggaggaacctattcgacaacgagattgatatggaagccagctctctaggtgaggtggaaggcacccaaatacaaattaacagaagagatgagtggacttggctagcagaaactagtggcgaatcttccacanaaagtgcctatgatgagatgtggggagctga

SEQ ID NO: 12274 - DNA, 371 bp, Glycine max
ttcgtgaagggcacccattactgtctttaggacattacgccccgccctgctaatcatcgaaagactgttgaatgtcttaataatactgccggggtggaagccatcttcataccgcctgatgacccttaatatccagccgcgtattgcccttttctcctggggataatatttgcccatgttggaaacagagggcgaacaagtttttctttttgtcttttatatatcaaacctgtgtaactccctcaaggattggttgtgtcgaacaaatttttttaatatactcttttgaaaacaagccatatttctccctttctacccaattttttcaattattggtataacctgctgaatgacctaggaaatcccttccg

SEQ ID NO: 12275 - DNA, 437 bp, Glycine max
ctctcagacatctgtctgatgcgcatagtaaagcagcccgaacccggcaacccccgtgaagcgaacccctgcggtaggaataaaaatatgacccttataaggttattattgaggggctttatttacacttggaccgaactgggcttttcgcggcggggcgcacatttgtgcatcttttttttgggcccctctctatattctatacccggcggggaatcttaccacccgtcttttggaaccgagacggtgggagacctctcccaaataacatgccctcctcttccccgcccggttttctcctcatatagacccccctcaggatatctccccctaacatctcctgatggtggggccctcccacgggagatttacgaatgcactcgtgccctctgcaactggggtgcctctctctcactctccgggtgtggcagccttct

SEQ ID NO: 12276 - DNA, 470 bp, Glycine max
agcttaaataagtgagttggtccgtgctctcgcgcttagcgcaaatctgaatcgcttagcgcgcataagtagattttggcttagcgcgcttctctcgcttagcggatgagctgaagcaatgcgcttgatgacctggagcggtgcactcagcgaacctgacagctcatcttcttctggattcttcctcacgcttagccattgagtgtcgcgcttagcaaatgctcgctaagccaacagattggcttaacgagaaggtgaaaacaacacttttgccaatttgcataattaacctgaaattgagagaaattgattattaaacacacaaaacaaaagtataaattatctattacctatatttaacagaaagtccttataatattataaaacaactataaattggagaagtttgatacaatatacacaagttttatacacaaaagttagtcgtattcatccactaacactcgatc

SEQ ID NO: 12277 - DNA, 844 bp, Glycine max
  unsure (1)..(844): unsure at all n locations
cccccactctgcccanaaaatccccccctctgcgccccctccctacacccgcacccctcccccgccccnccgcggttgaccgtgtacccgccccaaaatcaccgccggggcccaggaggtggacttggctcattaggccttaagggatttccccacggaagatgtcccggaagaccaaggaaaaatgtgagacgagccccctcccctcaagaaatagccctgggaagagnggagccttcccacccaagaggagccctcggataaaaaaacttctttgaggatggttcaatggaggaaaaagaaagagggagaaaaagaaagaaaggggagcaccaaatttgatgaagaaaagggagagaaagtgaactttgagttgtgtctcacaagactctcattcatcaaaagctccaacaagtgttacacatgcttttaattatagaataagcagcttccttgagaagctttcttaagataacatccttgagaagcctccttgagaaaacttccttgagaagctagaccctagctacacacacccatctaaaacctaagctcaccctctttgagaagcttccttgagaagcttgaacttatctccaaccaccatcaaaaactaagcccaccctcctgacaaaatacatgaaaataccaaaaaaaggcccttctacaaagactactccaaatgccccggaatacaacgcttaaaaccccatcctactagattggtccaaatacaacgccccaaagaagggaaaaaccctatccttatattaccaagaagaatggatccaacccttgacccatggctcaaaaattatccttaatgccagaaaaaccctaggcg

SEQ ID NO: 12278 - DNA, 1116 bp, Glycine max
  unsure (1)..(1116): unsure at all n locations
cccgcccacacacccggcgcatccccaatcctcgcctagtcccacacgggcctcacaaaggactcacacgccgactacccactcaccctctcccggctnnatatgcctcctgaacccccccccggaaaancatactggaagcctgcgcgcctggaccttccgtccgcccagagaatttgtttttggaaggggaacgagccggttgccctcgatctctccaaaaaccaacccgctatctgagcgacctacgcatcgggcgcaggtgccgcaaacaaagcaccaccacccataagccaccagggcacccactcggaacgtggcagtgcctcgaaccaaggtacacgggtctaatcataccactgagtcacaacacccacacgcctagccactaaaccccacggaagctccatttctgcaacaccccacgacgtgcgatcgccgactctcgcagagccggacgaaaaaccccctcgagcgccggctgacatcgactgcactgacagccagaaaaggagagggcgaccacctgcacacccaaatcatctgagcaaacgcgacaacacgaattggatcggcgggtgacaaaccctatcacaggtccttaaacgaacgcacccatcgaacccgggcaccccatgaatgaactcccaactccctcgctctacatgaaaaacaggagaaagcttgcgtggtaatccaagccccctgcgttactacgcgcgaaaagagaagtccacgcccctcctactgtcatccgcctcgccacaagagacggcccgcgctataaacagataaccgcaacgactactccgaccacactaacccccacgacttatcagccatcacgtaaacgatacacctcccacctataggtaaatggtgcgcccaaacgggacgcgagcaaaacaacaaaaagagcgagtgggcccctacgacacccaactacgcggacctggcacacccacacataaaccggcgcggggcgatgacggcctgtcctctctagcactcatcacggcgcggagagaggggcccacacacacagtggcggccgcgagccccgagacctctacgcacgcacatatggctgatcagcaccacccccagctctgtgcg

SEQ ID NO: 12279 - DNA, 455 bp, Glycine max
  unsure (1)..(455): unsure at all n locations
nttttattcttaggttcaatttttattattaaaaacaagttattttaattttaaggatttttatttaaatagtgcctggcccaactttttttttaaagataaaagaaataaaaaaaaaactgagccaaatactacctaaatatgagtcaatattcgtttcataaagtatgagtcattatttggaagataaattatatttaaaccttaatttaagatattcggacaaatataatttataatcaccataaaaacgtaaatattaaatggtttatttagcatttagacaaacgaagaagattattttcctcattcatctattacgagtaacatcatgcattcctagatgtacatatatgtcattagccatgattgccatcgatctgaaatagttcacactaacaaccatatgcatcaatgttatgttgtcaacttcatggctcaattcgataaaagat

SEQ ID NO: 12280 - DNA, 429 bp, Glycine max
agcttgtctcagcgtttatgcgagacatataccaacatgttagctatcatcggcaagttcgaagaagagttaggtctagccacggcccacgagcatagaatcgcggatgagtatgctcaagtatatgcggaaaaagaggcttgaggaagggtgatcgactctttacaccaagaggcaaccatgtggatggatcggtttgctcttaccttgaatgggagtcaagaacttccccgattgttagcaaaggccaaggcgatggcagacacctactccacccccgaagagattcatgggcttctcggctattgtcagcatatgatagacttaatggcccacataattagaaatcgttaggaaacttgtatggtctctcagaccttgactggatacaacctttggcatggtattttacctaggtttttgaaaaaa

SEQ ID NO: 12281 - DNA, 372 bp, Glycine max
tactatcatcgtgatcatctatttctctgtcagttgaaggtgccacttgagctggcaagaacctccacctctgggcgtattccttgaatgactcatgctcttttatacacatgtttgagacctgcgtactatccggagccagatcacaattgtactgagaatgccaaacgaaggcaaccataatgtccttccaagaatagactcgagaaggtcccaagtcaccgccataccctaaactcgtccgagggaaattacttgacgacatgcaacctctgatcggccgtataaagataaccggcaccctatgctgcacactatgaaagtctcgagacgcaccggaagtctaattgaagcacgggtatgcaaaccgag

SEQ ID NO: 12282 - DNA, 454 bp, Glycine max
agcttgtgaatgttcacattaatcatatggacatgtctctctatctggcttttgattatgcagaacacgacctttttgtgagtatatataatcgtgaaactgttgacatggcactctacttaggcactagagttcaagttgaaattaaagttgtttgctttcgtagttcatcaaaatgtttcccgagataatgtgtactttctgatatctgaatatccaaggtgtttttagtttaatgttgccttttgacattcctagctagtgagataaggcttggttgttgcatcttgtattagacacattatggtctttgcaatggactttatgctattgtataagttttgcttccgtgtcttataaaatgttggtgaattttctctaggaagagatatacgtaggtagcaaggaattgcttgttctgattaattgagtgtaaagattgccattttgaatg

SEQ ID NO: 12283 - DNA, 447 bp, Glycine max
ttaaatagaaaagaatatgtaaatattgatttaaagcacatgttgtttgctttgctgattttttgtatttcatttatattaatattttttatatgccaatttctttttataaatctataataaaatcagtgaaatcaaatcaaataccaagtacttgagcattctattcaaaactctctcctatgcccatagctactgttcatgttacgcgaatagcaaacattattaatacatatttagcattaagtcaattatatatttaatttagttttttaaatgagtgagtgttacgtataatttaagaattaattcaaatatacagattgtgtaaatatttttatgtgactatttaatcataaattagtatttttttgtgattatcttaaatttagagttaggtttttttcattaatcaacggtataaaaaatgtaacacttattgcagat

SEQ ID NO: 12284 - DNA, 377 bp, Glycine max
agcttgtaacctatgtatttttgcctttagttgttcctttttgtaggaacaattggttatggaattcaaccaataggtcattgagttccatattctagagtgaaacccaccattttgcatgtttccttttgtgctttcttcaaccattatatcaatgaaatttttcactgcagtctcaggacaaagttttgattccatacatattgttaacattagttgtcatcatctcctaaaataatatagtgagtatacatagtaaaacaattatatgtagcaaagttgaacagtgcatgcttaatgagccctctctattgatattgatagaaagaaaattgtgtatatacttaggaataaaactgaatttatttttttggaca

SEQ ID NO: 12285 - DNA, 181 bp, Glycine max
tgggaatagggaaaatgatctctcttgaagaaaagacccaagagcaaatctgatttgtcattggggtccaatatttttgtgaggatatttttatcaaattaatgggcacgattttatttttctttattttataatttttaggtaggaataatattagtagttattggtttgcttacaaata

SEQ ID NO: 12286 - DNA, 374 bp, Glycine max
agcttatagtatcaatatatcagtatgttttttttgttgcggttagcttctacatccaaagacattttttttgcacaatgaaaactctctagaagccaagtaggagtacaagatatgtcatttggtacgagataaagacctcagtcctcacactgacactgacattcaactaattgataagaaaatgatctcatgtctttaatagtctaacaacacgagagctacttgaatcaacgtaaatggttcacctacaacaggagtcgggacttgggagagggggagggcaacaccatgatgagatgattttagaagtttcaactcgctaacttacactttccttggattcatctaaataactgaatcgctcttctacc

SEQ ID NO: 12287 - DNA, 374 bp, Glycine max
ttactttttttaaggaattaatcatctcttttaaaaatatataaaattattaaagaattaatttgttgaaaaattaccaacaaattgttatgttcattgttctgagttgattctagtaatatagaattcggttcatttaagcaaagttttgaatttaagttttgtaaatgaaaaaaaaaatataacattaagttgctatgagacttacctttttttataagattaagttagtacaagatttacttttttaggaattaatcatctcttaaaaaaagagaaaaatattaaaaaatttaattgttcaaaaattaccaacaagatgttagtcaaagtttcagattcaaagattcaagtttatggatgaaaaaaaaaaa

SEQ ID NO: 12288 - DNA, 870 bp, Glycine max
  unsure (1)..(870): unsure at all n locations
acacaccacacactaccgtagaanacacactaacacacactgtcgcgacggctcgctcacaaggctattaatatagaaatgtaagacaccagtacccctccacgcccctgancctagagannaatggagcctgttgggaacccccgagcaccagnagagaccagcaggcaggcaagcttgtcgtaacgtacaggcgagagatattcctcatgtacgcgtatcatcgcaggtcgaggaaaaggaaagtatagccacagcccccgagcaaaaaatcgtggacgaggatgcccaagtgtatgcggaaaaagaagcctaacgaagggtgaaccactctttacaccaagaggcaaccctgcggatggatcgggtcgctattaccttgaaggggagccaaaaacccccccgattgttaacaaaggccgaggcgatggcagacacctacctccaccccgaagagaaacatgggcttatcggcgattgtcgacacatgaaaaacataaaggcccacataagtagaaaaagataggaaacgtagatggtctctcagacctagactgggcacgagcctttgaaaaggctattataaccggccgaaaaaaaaaaaaagaatggggccaggtttctactccaaaaggtgggcaaaaaaaggaatcctaaatttatatataaacacgcgtgtttgtggggtatcctttgtcacagaagccggaaggaaactaacctcttaaaggtcactggggggcaaaccccctaaggcgagtaaaaaaaaaaatttcccggccctcgggccgagaaaaatcccaaataagcacaaaaaaaacccctgaaaaaaccccaagggaaatacgtcaattgaaccctacttatacg

SEQ ID NO: 12289 - DNA, 569 bp, Glycine max
gacctataaaactcagcttcctggctgccgaggaccgccttgaggccgccttgtgtctatcttgctgcccgctcaacgccgcctcgaatcctcactggatgcctttctcctaagattgcctcggcgactcggccaccactacccttcttcctccctgcaatcaccaccgtcgctgcccttgctgttcaagccaactccgtcacccacgcttaccgcacccacgaccatgccaactccgccgctacccccgctgctcacgaaagccccgtcctcctccgcacaaccacacccacgtcagctccgcctcccttggctgttttccgccatcccaaactcaaaacagtcgcacccatagctccgctggcgcttcctcgctttcatatgaacaaccgccacatccggctcaatcatccattggctttatcactccgcaccgcccaccgttgttaccgtcacgtccattgtcgcgacatcccttacagcaatgacatcatcctacttgatgatgctgccgccagcatcagattgtccgccgcacacccgccacacattcaaatacaccctcccat

SEQ ID NO: 12290 - DNA, 432 bp, Glycine max
agcttattcttgcttttttctaagttctttttctagcttagaacaatatacttgtccttcatttaattgtctttgggcttggcgaccacgatcaacaaagtactttaggcacctactatatgttgacttgaccaacgctgttatcgggatgctgcgacaatccttcaacaccttattcacacattgagagaggttggttgtcatgtgaccatatcttcgtccagatgtatagtaagccatgctccatttttccttggaaatgcgatcaatccatgttgctatggctggactcatttgacgaaatgtttctaaattttgaccaaacacatgcttgcaaagagtgtacgctgcatcgaaattgttaccatcaaaatctggacgtggatatgaaacttaaattaacttcgtgtataaaataaaccttacccaatt

SEQ ID NO: 12291 - DNA, 431 bp, Glycine max
tacttagaaagtcatttagaatcatttaactatgcctattttatttacaagatagatcttttttctaaaagagcttacttgtcttggaacaaattatccttccttaaaagttgatatgtcgagaatagaagtgtcattagaacaaaaatctgatttaaacgaaggacgccttcagaattatctgattaagaaagctgaaattagatgggatttgatattgagctgcatgattttttttatcgtcaacagcatagagaatgccgattatcacctcatctatatacacagagaggaaactaaatgaatagcgattaccataatactgagcacctataccctaagcacaatgaagatcttattgctaccaccagcatatgcttcagatcaaaagatatcttcgtggtgacaatggttacactgagttggcaaac

SEQ ID NO: 12292 - DNA, 520 bp, Glycine max
agcttatacctttatgattacatgatctattttatttctgaaattcacaattgttccgtagctatccaatgcgtgagtaatctttcgtattttatgtctgtaaatgcaataagtatgtttcttctaccaaccgggagtttgccatttcaaccatttgagaaggaagaggacacttcctctctctatctctctctcacttcaccttctgcataaactcagcagatccacaggccacttcccagcttatctcagcctctaattctcttccaaaatcacttcctccaccatgtgcagcgcaaactcctaaaagtgctgattttttcaaaggagatggcatgtaactcttgtaccctgtgaaagcaaatcgtgaccattcattttcaacagcatcagcagccatagatggatgatcaccccaattgaacaaacttcttttccccgacacgccaccatcgcgaaaaacaaagtaattgtaattgcccttgttgttgttcttgtttccctgatccaattgaaaatg

SEQ ID NO: 12293 - DNA, 536 bp, Glycine max
taactaaagataacatttgctgaatgggattaatgtttgttttgttgtgttgaaatgtgcagacaacgcagtgatcaatggggattttgaagagggtccatggatgttcaagaacacttcactgggtgtgttgcttcccacaaatttggatgaagaagcgtcctcactacccggttggatagtcgaatccaaccgtgccgtccggtacattgattctgatcattactctgttccacaaggcaggagagccattgagttgctctcaggaaaggaaggaatcatatctcaaatggttgagaccaaaccagacaagctctacagcttgaccttctcattgggtcatgctgatgacaagtgcaaggagcctcttgctgttatggcctttgctggtgaccaggctcagaacattcactacactcccaatttcaattccaccttccaaactgctaacgtcaatttcactgccaaggctgagaggactagaattgcattctatagcatatactacaacaccagaagtgatgatatgagttctc

SEQ ID NO: 12294 - DNA, 403 bp, Glycine max
agctttgaatgaggctgaagaatctgtttttcatgttcaacaagattcggtggagattaatttatctcagcctcatttgtcacaagatagtgacatggagttgatggtaaatatttgtcacaacaaagtagttttatctcaacctaatttgttgcagcactccatttttatatattacaattattcatgtttgacatttgcatgtaggtccctgcaactattgttccaccaatagcaaggaataagctaaccataacaagagccaaacaaaggaaggttgttgataaagatgatgcagtataaagaaaactgaagacccattttttgttgcattttgaaggttgctgagtttgaaggttgctgatgaagaaactgaagaacccatttttgttggattttgata

SEQ ID NO: 12295 - DNA, 527 bp, Glycine max
tatacaacttttaaacttttattttttaagacacttgcttaaatattgtttaatacattttctttggctttgtagctcaattcccaatttgcaaaagctagctataaatatataaagctttatttgtagtgcattcaattgtgaacgtaaatgaagtgtttatgaggaagtaattttctttttttaaagtcaataatcaattccaaatctttcttataattatttcttagttatttatctcaatgttaaagattatattgagaaaaggaataggtttgagcataaaagattgcatgacttggtaaccaacccttaagtaaaccataaggatgaagttgatgcaattaacctctgtgatattgatgaatgtaatgagtgactagtcagagagatggatggggacgatgctgaagttgagatgaaagagttttgacggagaatatgaagttgatgctgttatcgagtcatatcgtattggcacattatagccctatacaagttatgttgacatgaattcaaggaattac

SEQ ID NO: 12296 - DNA, 535 bp, Glycine max
agcttgcttctacagagtgaaatatgattttagatgaaggaaaacaggaaaaagaaaaacaaaaagaaaaagagaaggttgatgaggagaaaaagaagagcaagagtgaggttttaagagagaaaaagaacgagattacttcagctgaaggaaaggaagtaccatatccattggtaccttccaagaaggataaagagcgacacttagccagatttcttgacatcttcaagaagctggagatcactttgccttttggagaagttctccaatagatgtcactctatgccaaatttttaaaagacatgctaacaaagaagaaccagtatatccacaatgaaacaatagttgtggaaggaaattgtagtgctgtcattcaacgcatccttccctcgaagcacaaagatcctggaagtgtcactataccgttttccattggcgaggttgttgtgggtaaagctctcataaacttgggagctagtatcaaattaatgcgtctctccatgtgccggcgacttggagagatagagataatgcc

SEQ ID NO: 12297 - DNA, 477 bp, Glycine max
  unsure (1)..(477): unsure at all n locations
tcatgatgaatcaagattgattcaaagagttttgatgattactaagatgatgacaaaaagctcaagagtcaagaacacttcatgataacaaagatgatgatctcaagaatcaaaggatgagttcaagattgaatcaagaacacttcaaggttcaaaaggaaatttgatttcaagaatcaagtttcaagattcaagaatcaagagaagactcaatcaagataagtattaaaaaaaattttcaaaaactgagtagcacatgaatttttctcaaaaaccttttaccaaagagtttttactctctgttaatcgattaccagattattgttatcgattaccagtagcaaaatgattttcaaaaagctttcaactgaatttacaacgttccaattgatttcaaaatgttgtaattgattacactaatttggtaatcgattaccagtgtgtttgaacattgaaattcanattcaaatgtgaagt

SEQ ID NO: 12298 - DNA, 450 bp, Glycine max
agctttttgtgatgtgtatttgcgcttttttattcttaacatttaataaatataaatggccttttgatttgagaaaacataatttgcatatgttttattttcacttttaattacaaaaatatcaccttatttttactttgttttttaatttcaagagtttgtataaaaaaaccatgaaaacagaaaatgacacaaaatgaaaacaacggagcgtttttacagttaaaaataaaagcagaacacgttttcttaaagaaaacagctcctaagattaaacctccgatgccggagcaatcatctgaaagttggtgagatatgagaatcaacatgcaagtacacttcatcatgaaaaatgaagcagtgaaacagaatgctttagtattgggtgcgacaatacaatgaatatccagccgataaaataaaatacaatgtatatccaggtcaggaaag

SEQ ID NO: 12299 - DNA, 389 bp, Glycine max
aaacctggtttcctttattaaatttttattaaaattaaaaaatgctggtgaccggacccatgtatattattctacgggtacaattgcaaatgctttaccaatgggatgtttataataagatatatgaattacctccaggaaaagaactcctaaaaataactgcccctcgtggaaataaaactccacccatctgtgtttgcttccaagcccaaagtttttattcaatgcttataaattgatctaaaataaagcgcggagaaaaagtgtaaaaaatatattttctatccggaacatactcctgctctatgcactctatataaaggacatggctatattcactatagaaggggtacataaatttatgcttctgagttcactattttattttc

SEQ ID NO: 12300 - DNA, 451 bp, Glycine max
agcatgtagtataataggtatgctcctttattataaatccaaaaggcataagttagaaagaaaatggaatcttgttttaaatatgaaccgcaaggaaatgtatttattaaagtactatccatcataatattatgtgaactctctatttaataataaattagaatgaatacatttcaatatcttttatattaatattttctttggatcattcgatattttcatatatttaagttgatttgatatgacataacaaaaattttaaacatgacaaaaaaataaaagacttaaatatgtttttcatatatataatattttttttttcatattgggatctatttttgctttccacctaatctttacagaattttgtctttgatacatgctgttaatatttatctattaagtaataacgtgatattacattattactgaaacatcattgtaatagtag

SEQ ID NO: 12301 - DNA, 372 bp, Glycine max
tattctatgatattgggaataatgtctgttaatttataaatgttggcagtttaacataaataatgataaggatgggctcttttgtttattaattttatgtacaccctgccgttctctttttccatttaaaacaacaccaccttttctagttattaattaaatatttctcaacttgcaagcactaaatcgtttgatttcccctctttgatcttgtgtgcgtgtgtgtgttttgtgccatgtacttttgctatttctggttcacaactgatatagtctcttaagagaatcctactctttgttggcttgaaatgtccctgacttacgggatgtccataaaatacaattttgccacttactgacactttacttcat

SEQ ID NO: 12302 - DNA, 433 bp, Glycine max
agctttcttcaatcgctgatacgggtgatatggtttgagaaatcttcggcgcctagtatatattgtcttctttccatgtttcatttggatgaagctcatgtttctctcacaaatagggcatgcatgatgccctttgacactatatccacttaaatttccatatgttagaaagtcattaatagtacaaaacaccattgatcgtaacctgaaggtctgttggagattcccatcctacacatcaaccctatcattccccgactgccttggacccgctatcatcatacacaggataatgtatttttgcttgatgcacaaccaaagagggaggttgtaaatcatcaccaaaataggccatgacctgtggtttgtgcttaagttaccaaaagaattcattccacccagagcaagaccaagccttaggtttcttggctca

SEQ ID NO: 12303 - DNA, 300 bp, Glycine max
aatactaagcttaccggaggaaaagatagagagagagacagagagaggggggatctctcaaaagaaggaggaaaagacggagagaagttgcactttgtggtgactctcacgagaatctcattcatcaaaaggacaacatgtgatacacatgctaacatttataggctcagtaggaaacttgagaagctgactcgagaagctagatcttaacatcacacaagactctattaacaaaagtcacctccataagaatctaacctgagaagctccatagagaatctcgagcacctcttcacacat

SEQ ID NO: 12304 - DNA, 137 bp, Glycine max
agcttctccgttgagattaaccttccattttgattttcctacacaattggtgacgtacgcgttgccgttgaagtctgcaacgacgtcgttcgcggtggcgcgtttgtcatcccctgcggcggatgggacgggggaaa

SEQ ID NO: 12305 - DNA, 422 bp, Glycine max
aaaattaaaaactcttaatttatattttttttttcttttgattataataatacagaacctcttttgagattcttgtgttttttttatgcgtaagattcttttgtatttgatgctaaactcagaaaactgtaattgtcttaattatgtttttagtctcattaaggattgtctttttagccttttaaataaaatttggttttatagttcctcaaattctggtgaaagaactaaaagaacatttttttaagaaaaaaaattgaaagacttagaagatacaaacttttatttggatgaccacaaaataaatcccctaatttgaagaagacaagatataattaagttttctattaatatggatgcagtaaaaggaaggaaaaaaagataacagaagacagagttattaatatattgtgatgtgattg

SEQ ID NO: 12306 - DNA, 505 bp, Glycine max
agcttatcaaacccttggctagagtaacatatcttaattatatctataaaatgtaggagagagaataatgatacgaacaagcccattatgcagaagagtccagatgagaatccaattgaagaaaaataagtttctgctgataaaccaaaagggccaatgttaggcctaacagaaactctgattttatatattacaaataaaggttattatggggaatacaaatatagatagttctagaaacatattctgttagaggaaatttgttagccaatgtaatgatcaccaaatgcaaatggcaataacaatcaaaataagaaatcttacatctttatccataaaaatcatgtccggtattggccttgatgtattctccctactccaagtattaacaattttgacaactattttccatgtttctcacgagtcatttatgtccttggaagagttgagtttgtgagtcatccttagttatgatgctctagagaccagaagacatagaaaatac

SEQ ID NO: 12307 - DNA, 425 bp, Glycine max
ggaccttaaaactaagctttagcatgggactttgcatctggaacgaatgtggtcactttctcctagctaaagcagcttggtcttttggcactccgaatccaacagaagctgaggcatagggcttactgcatgcgctttcatggctgaaagacaagaattatgataatttggatgtgtagatggatgctaaattggtagtagatagactttacattagcttagatgactcctctgaattacatgatttaataaataaatgtgaagtgcttctatctgattttaaaaactctatggtgagttatgtatgcaatcatgttttccaacaagttccccattgtatttcctcttttattatgaatgaaatatcttaagtgtcttttttttaattaaaagaacaatatccctcaaattagaaatcaatcaca

SEQ ID NO: 12308 - DNA, 460 bp, Glycine max
  unsure (1)..(460): unsure at all n locations
agcttatcaaaggggaatggaccttttttgtcaacaattggcttcaccttcccactttctaagtaagggtttagtttcctcagaacttctccattggaagtaactacaaatctgaagccaggtggtgtaacagcacctgtgagtgccaccacactgccatcttctttcacagccttcactgccctgtcacattgccctgcaagtcaccagcaaggaatgaaacactatcaacaacatgagtagtataaattagtattgggggaagtgggattttgggaagaaaattttgtgattttcccttatagagtatattgttaacagggtgtgagcgttgtaaacactctagtaccgtgttcaattgctacagataaaaaaatagagtatattgtttcattgaatttcagaanattaagtatgatatacatgataacaaattttcttttccatctacctgtgcgga

SEQ ID NO: 12309 - DNA, 468 bp, Glycine max
tatggtagagcttacatgtgtaaaagccagaagtgacttttaacacactactacacaatatgcattttgcaatatttaagatgtaacacttgtaaaaatgtcattgctagttaaatttgatttttttctaacatttattaaaacaagtgttactattgattattaaataaaattttggtaccattttaaaataaatgttacccaagcagtctttccttcagatctcataatctctacctccctcacattttggtaacatttttgtaacacttgtaattttagtaacattcatttattaaaataatagtttcctgcacaaatttacactcttaaccctctgcctcactcaaattttgcctatgttcacacatttctcagtcgcaagaacttgaactcaagcctcagtctccgttaacctccatattgcccctgatgtcactctctccagtgaaatcccctgttggaata

SEQ ID NO: 12310 - DNA, 437 bp, Glycine max
  unsure (1)..(437): unsure at all n locations
agcttgtgtttggatcaggaatttttatatttcaggaaattttaaaagtctagaatttgaattattttgattttaatttccttcatttttcaaatgctttgtttggataaataaattcaaatttcttcaattttaaattcgttgtttggataggataattcaatttccttcatatgcaaaattttaattttatattttaaatagatgaaattttaacattaaattttatagaaaacaaacacaatctaattttgaaatattaattaaaaatatttttcaatttttaataatttaaaaatataaaatattaataattttaactagggttattttgcctgaccacaaccagtgatctttttaaatcaacatcaaccaaggttatttttcggtcgacatcaaataagattntttttgtcanagtatgccgagaatattta

SEQ ID NO: 12311 - DNA, 425 bp, Glycine max
tggttcctaacgctctgttcaggctatcccaaaatctattgttaccctaggatctctatcagacactatactagatggcacaccatgtaatctaacaatctcactaatatacagggaggtcaacttctccaaggaaaatctaatattaatgggaatgaagtgagcagacttggtcagtctatcaacaataacccagatagaatctaaacctctggggttctaggtagtcctacaacaatatccatggaaatactgtcccacttccactatggtatctccaagggttgtaacttccctgaaggtctctgactaaacatgcacacacaaactcactaacctctctcttcatgttaggccaataaaacatcatcttcaaatcctgatacatcttggtagcaccaggatggatgctaaagtttctccta

SEQ ID NO: 12312 - DNA, 463 bp, Glycine max
agcttaaggttttgggttaaaatgtggtgtctggttcacttatatggttgctcgtggtctactggtgtaaaatctcctcggtgtttatcctcatcggctgcacaacaattggtatcagagccgatgatccgacttgatgatcaactcaaacaagatgacggtgacagatccctggatatggagatcccttatatcgaaagtcttcctggtgggtgagtccatgcatgaaggtcaggcagtgggtcatgtaggtgttgcgttggtacaaggtattagaatttgttggcgacaatagctagacaagatgggacagtcgcacttaagctctagggaccaccaatggatactcgtgaaataaaaatgacttctactcgaaggggagattaccatgtggaagagaactcattgagggagagattattggaatacaagtgtgaggtgaagtctcacatcgactattaat

SEQ ID NO: 12313 - DNA, 532 bp, Glycine max
ttgaacgtatcactactataaaaatattaattaacgattgagcttctacatcggtgaggaacatccggtcttattgttttatcggtgacatttttgtaataactatgttattgaacaacgacggtggtacaaacaccgcttttgaaggttattttctcctttttccacgacgtccttcgaaggcaccgtcttcatcgttgatcctttttccagctgattatttttctgacgtgaaaccagctgatgactatgaagctcagtgacgtacgcacatttgctttcccgctcagccagtacttgcagctaccttgaacgcacgcgtccccggcccctgtcaatcaacaacaacgttgaacaaaaaataaccaagaagctcatagttccagcttgcaaagccccagagttgcaccttgcaaagccccagagttgcagctagaaaagccccaaagttcattagcttagcaacattttgaatcagctagcatgactttgtttccaacaacgacccattgccatgaaagtatgttacatg

SEQ ID NO: 12314 - DNA, 443 bp, Glycine max
agctttgacttgagtcatcaagagattattaatatgtgaccatgacatgagtttcaataattatcaatcatctttgaatcgtctatctttcaatctttttttcaacatcatctctcaaacatctttcaatcaagcttccaatatctttctacagaattttctaattcatttctcttcatctttctaaaagttttttatcaacaccttctcttcaaagaaaagttctttgttcaaaaacttgtgttattcatctttttcattctcttctccctttgccaaaagaatgaaggactaatcgcctgaattcttttgtgtctttcttctcccttacaaaagattcaaaggactaactgcctgagaattcttttgattcttcccttccccttaaacaaaagatttcaaaggactaaccgcctgagaattctttgtcctaacacattgga

SEQ ID NO: 12315 - DNA, 479 bp, Glycine max
tgtggggttttatgggactaatcgatttttctggaatgtcatcaacgaaagattggttctttatgattcggagaacacaagggatcttcaggtttatggaaagcatgattctataagggctgctaagtacacagaaagtcttgtttcgcttcataggggaaatgagtttagtcacaagtgtttttcgtgtagtttggttccagaccctctgctacatgatactgaatatcttgtttcattttaattttgatcaattttatatttttgaactttaaaaaaaataatgatttttgtcctttttaaggtgaaaatggtttatgatgagggatgaaaattactttttttttttaagttcagaaattaaattgatcaaaataaaaatataaggattaatactaatttttagttaaagtacacgactaaaaacatgtattaacctaaactatgttggtcttagtctgagactatgtttttggttt

SEQ ID NO: 12316 - DNA, 298 bp, Glycine max
agcttgagaccaggtgttagagagtattataagtgattaaagcttcaatctcattgcctctatgcgagggccatatatcactctatagacaatattgcataaatcccaatggtggaaatgtgtgaaaatgaatttcaaaggtggtgtctatagtttatgaagatccaatggttaacgtgtttatgatcgtagttttatgcacataagtttgggtgtatactgaaaaaagagaggattttggaagaggagagaaagagaaccacttttggccccaaaagagattaatgggcttttcagc

SEQ ID NO: 12317 - DNA, 550 bp, Glycine max
tgtccttggtttagatatgatttatacttgatttatgtacttgtatgatccaatttgggcaaaattggatgagggcaagagtgatttcgaaaatctgcactattatgcagaattttgctgttgaaatgtgcaacagaattttgtgcttgtgcagaaaatgcttatgcattgctggttgtggaaagggttgtacattttgggttctggacgttttccagcagatcccaacggtcaaaatgtatatttatgtattagggacctccattaaaattttcgagtcgatccaacggttaacgaatcacaacaaagagaatgttactggggtatttgagtgaggaaaattgtggtattggaatgtgttttggggcagagttttctgcctttgcctagtgatagaggtgacgtcatctgaggaagaccctgaggaggacccagaggagctacctcctgagcttgctgtggatgctcttgactctctagagggtgatgaggacccactccctgaggtggattctcccgaagacgtcatgtcagcatctgaggcagactc

SEQ ID NO: 12318 - DNA, 390 bp, Glycine max
  unsure (1)..(390): unsure at all n locations
agcttcactctgatctgccatgttctttaaattaggatccatagggctttcaacaggtctacagttctgcatacctgtttcttctaaaatatcaagagcatacttcctctgagaaatcacaataccatctcctgattgagccacttcaataccaaggaaatacttcaaagatcccagatctttggtatggaaatgactgaataagtgctctttcagctggacaatcttagtagtatcattccctgtaatcactatatcatcaacatagaccattagatagacacattttccaggagatgtatgatagtaaaatacagagtgatcagcttcacttcattttagtccaaacatttgaacaacatgactaaatttaccanaccatgctcgagg

SEQ ID NO: 12319 - DNA, 179 bp, Glycine max
ttgtccataaaaatcacctaaaagccattttaaggtccatcgccttaaacggtcctctttgcttttattggttaacggacactttgcaaagcctcgagggagcatgtagcccagaaagtagtttgccaaaccgagaaccaactaagggtaggaaggcagagggaacctgtgacgtacct

SEQ ID NO: 12320 - DNA, 411 bp, Glycine max
  unsure (1)..(411): unsure at all n locations
agcttgacatactaggcttaactttttttaccacctttccctcagaagcaacactacttcacttggntttctaatcttgcaatactcattgatgacgacgacccgatacgctttcacatctggcttcatcccatgactaaccatttccctcaaatgctaaacagcctcatcagacttccccacaatgcaaaaccccttcaacaagctagtgtttgtggcaacgtcttctttcaaaccattcaactgaatcctactcatcatcttcctggcctcgcccgcttcaccgctcaaacaaagaccttcaatcaaagcattgtaggtcacaacattcggggaacaccttccataatctctttcaagcactcaagcgcatctcggaaatcacctctctttgaataccctgcaatcaaa

SEQ ID NO: 12321 - DNA, 656 bp, Glycine max
  unsure (1)..(656): unsure at all n locations
tgtggacttgtggtcattaacgtctataggtgtgtttattcaatactttcattatttacaaattccatagcggagaagtgggcggtggctgcatgtctgaaactcgttttggtcaccaaattatgtacgtgtgaattaatcaacaattaacctttgaaatgatgaaccacaatgtataatggaacctacactcgagggattagttgctgttgttagtttatgattggacttgccatttaaaaaattgggatcggtatacgaagtaacttaaccagaacggcaaaacatgatcctgaaaatttccaaagatcattattggcgcttcctttgatacagcgaataaccaacaagggcagacatcagaaatgtccatagaacctgcccacagtatcaaaataattaaaacaagataattgcagtgaattcatacagagaaaaaatcagcatgcactttggaatanggatttgggagtaccgtgtttatcgctagccacctttcaagccttctaatctttgattgcatttcctcaataactccttcaattggagagactaccctacttgatgaggaatctgaagcagagctacatccctgtttgtttcaacataataccgctaaatgataatgcctaaaaatgatatagcatgctttaaaa

SEQ ID NO: 12322 - DNA, 358 bp, Glycine max
  unsure (1)..(358): unsure at all n locations
agcttgcttagcctaaaagttgttgtgatgtatatgcgcttagctcaggtaaactcggcttagcgcgacgtttacaacacaaagttttctaagttactttggcttagcgattcagcctcgcttagccacaggtagttcagcaagaggacaagtgttcatcctcaaaggatgaactcgcttaacgcggtaagcgcgcttagtgagttcttcagagaatgcttacgtacaatgagtattggatgaactccttanngnactatgcttgcttagcgagcccatcgcagttatccataatacccggaatcgcacttcgtttaattcccctaggccagcctttattttttttttcccacccttt

SEQ ID NO: 12323 - DNA, 328 bp, Glycine max
ttggttggtgttttcagaaggggacccggagatatgtcgcaagggtcaggagacctttgggaccgtaagtggggtgctactgcccaaaagcaagcttgggcaattccgaaccaacccaagcatagtcagtcagggagaacctgtgacgtacctaagcaggcgagctcctgggagtcaaacaataaaagaacaaagtccacgaatcaaggaggcttgtgtggcggctgggcagctatgtatcttgggtggtatctgaaaattagcaactgctaatcaattaccattcgtgggtaatcgattacagggtttaaaaatggagacaggatga

SEQ ID NO: 12324 - DNA, 103 bp, Glycine max
agcttgtctcagcgtttatgcgagacagagtatcatacatgttagctatcatcgccaaggacgaagaagagttaggtctagccacggcccacgagcattgaat

SEQ ID NO: 12325 - DNA, 729 bp, Glycine max
  unsure (1)..(729): unsure at all n locations
ccccatcgtagattacgacgttagatactcagctgaagtggtaacaaacactttctattgaagacaccgtanaccgtgatactatcaatgnngacatcttttttttttgcaattgacgccccccctctagttgcccgctcctccccctttggggcggttcgcttgccccgctcttcccgctctccccctcctctctctctctcctccttcctctctcctcccctcccctccccgcctcttctctctcttcttccctgctcctcttcctctcccctccgcccctcccttccctccccccttctcctccctctcccctccgctttcctccccctccccgtttcgtccttctcctctttgccttccttcctctcctcttcttcccccttttcttctttcctcctctcctcctcccttcttccttttctctccctttctctccggcctccctcctcgtcttctcctccttccccttctctccttcccttcctcttccctcccccctctcctcttgttctctccgtctttccttctcttcccctcccttcttttcctctcctcccctccctcctctcgttccttctcctctctccctctttctctctcccctctctccgccttcctctcctccctctcctccccttctcccttctcctctttctctcctcctctcctctctcttcctctccccgccttcctccctctcccccccctctcgcgtccttccctctc

SEQ ID NO: 12326 - DNA, 224 bp, Glycine max
  unsure (1)..(224): unsure at all n locations
agcttaactaaacaccaaacccagaacttttatcttgatcacaacacaatttcaatcactacatctcaaaaaacaaaacagcaacaaattacatgatatacttaattgcaaatgcaactgtgacatcacacagcaaacccgaaaggaagaccacaatgcaccttaggaccttcatatttttttttctgaatgtttgncttcatctgctgctctgctaattgttt

SEQ ID NO: 12327 - DNA, 232 bp, Glycine max
  unsure (1)..(232): unsure at all n locations
ttgtactagctcatatttgagtatatcctttgatcaatgattataaggttgnataacttatccactaaaacttcctgctgtctgttgtaaaccacatgcaccaaatctcgggttgctcgccacatcatgtactggctactctactaccaatttgccttagccacgaagaaccacacctgttaatggaacctactatccacggcaacatagcccatgcctgcttatgatagga

SEQ ID NO: 12328 - DNA, 424 bp, Glycine max
agcttcttcccaattttcctataaatatggtgttgatgtgaagggaaaaaatgttcagcccttctggtaattcgagattacttgaaattagtgaaaaaaaattgtttgcgggaggaataaaatctccacgaagcttactttacatggactaaaatctggataagataagatttgataaaataaaagtgtctgctctcttcaagatgaagcccaatttcggatttcaagcccaactgcttataattcttctgaaattaaattaaaaacacaaaatttgtcaagtagggcccaatgataaaactgcataattaatttgacaattaaggcttatcattaattataaaggtgagaaaaagggttaaaaaatacgatataactctgacacatcatcaagctagcttaatctctggcctacctcctcacc

SEQ ID NO: 12329 - DNA, 123 bp, Glycine max
ggctgctgagtgggactcctcacgctcctgcagttaaagcgttgcctttcatacctactttatcaaatgccatgctacaaccccttcactttccaatacgcacggcgctccatctccaccgaa

SEQ ID NO: 12330 - DNA, 350 bp, Glycine max
agcttatgacaatttgaaattctttagttttttcgaagattaatttcgagcgtcgcgatatattataagcatgaatcggacctacgtgtgaaaatttatgaccatttgaattatttgagagcttccgctgttcaatttcgagcgtctcgacatattatgcgcctgaatttgacttgcctgtgaaggctatgaccatttgaatttctcaaagagcttccgatattcaacttccagcttctctatatgtgatccgcctaaatcatgacatccgagctaaaagctatgacaatttgaatttctcaaaagcttgcggagttcaatttcgagcatgtgcgtatactatgcgcccg

SEQ ID NO: 12331 - DNA, 309 bp, Glycine max
tgttgacacgcggagatttacgtcaacttttgtgttctttatatttgtcatactgacatttgagtcacgttgacgggcggagataccctagtggttatccgtataaacattcttttttgctggctgtaaaacgaaaagcctgatagcatgcagagactaacgccgtcttctgcgcccttcgtcaatcgcggccgacaagcccgttgacacgcagagatttacgtcattttccgcgctcacaagaactgtcatactgacatttgagacacgctggcgggcggaaatacccgggtgggaatccgcctaaac

SEQ ID NO: 12332 - DNA, 399 bp, Glycine max
agcttcgctgatttagttttcaccgttttatggatcaaagcaggtatgaaaagaggcaaattaaattattctgcttggatgaatgaaaaaaactggggcaagtgaagaggatgagaaggagggagaagcccatgctgtgactgccattcctatacagccaagtttcccaccaacccaacaatgtcattacttagccaataaccaaccttctcattacccactgcccagttatccacaaaggccatccctaaaacaaccacaaagtctgtctaccgcacttccaatgacgaacatcacctttagcacaatccaaaaacaccaaccaagaaatgaattttgcagcgagaaaccccggaaaattctcctcatctccggtgccctatgtgacctgcccccata

SEQ ID NO: 12333 - DNA, 247 bp, Glycine max
  unsure (1)..(247): unsure at all n locations
ttgcggattttgtcttcgccggcgcaaggatcgaagngtcnctgaaagagtcaaatttgatcatccttctttgatgaatgagaaaactggggcaaatgaagaggatgagaatgaggaaggaacccatgttgtggctgccatttctacatgtncaaacttcccaccagcccaacaatgtcatcgctcagccaatatcggcccttcttattacccaccacctaattctccacaaaggctaancccaaat

SEQ ID NO: 12334 - DNA, 682 bp, Glycine max
tttccataatataaatacaatactttcagcggccacgcgtttattataatgataaaaatatcctaacacatatattagcgaatactttatttatatctgagggcagattctcccacacgctcctcacaaagccccctcagacctccctctcctccccttaccccctctcccacccctctcgcttcgtccttcccctcgcgccgtcctccccctcccccctccctctccccccgccctccccgtcccctcgcccctcttctcccccctcctccccccgcctccccaccctcccccctccccccccccccgccctctcctcccctcctcccgtcgcccccccactccccctagtccgcccccccccccccccccctccgccctcctccctctgtcccccttccggcggggcgccgcgcctcccccccccgtcctcccctcctcttccccctcttcgctctctcccgctcccgccccgcccccccccccctcccgctttcccctcctcccctcgtcccccccccccgaccgcctcctccacccctccctcgcccctcctcccccccctgctccctcccccccccccccgccctcccccctcctcccctcctctccctccgccccccccgccctcctccccctctccccccccccctcctcttacccctcgttcccccccccgccc

SEQ ID NO: 12335 - DNA, 773 bp, Glycine max
  unsure (1)..(773): unsure at all n locations
cccctggcttcgtataaangcaaaactatagnatactcaagcttacttagattaacgcttctgatagacactcgcgatttcggtgatttttaccacacaaccgcacccccgggcgcttctttttccccacaactccccccccccacccccacaaccctccatcccccacaaacggaggcccatcaccacacctccccactcccaccattccgacccatcgtcacctccctacctctcccccctctctcccatctcccccaccccctccctcccccactaacccctatctctactcccccccaatcactcgtcctacacctcatccccacctctccttcctcccaactccccacacacttccactcccatctcgcctctctactcccaccttccaccactacccccctaataccaaactctccatattttctcacctcgcaccaccgcaatcctctccctccccccatactctctatcctcgcaacacgcggattgctttccctctccttactccttcatctcccacacccccaaataccttcccactctacccctccacacccctctcacctcccctcccgcaaattcgcaccgctctcactcctaaatctccgacatctcccccataccactctactccacatcgcaccactcatcacctaccattactttccaacattcccatcctcccgacacaacccacctctctcataacacccacactcccaatattccactatttccccctctcgcttcaccccccccaccccccc

SEQ ID NO: 12336 - DNA, 697 bp, Glycine max
agcttgtgttcaaagaattgaaaatgatagatatagaagtgagtgcgcgagggagaccgcctagccatgagtttaagagagacggatggagtttgagtgttggaatggcgacgcccggcattgcctcacccctcccccccccccttggcccccccccccgccccctccccccctcaccctctcttccccccctcccctccctctcccctcccccccccccttccccccccccctccctcccctcccccgcccttccccctcttccccccgctcccccctcccccccacgcacccccccccctcccccccttcccccccccccccttccccccctcctccccccccctccccctccccccccccccactctctcctccccttctcactcctctcccccctccgcccctccccctcccctctctctcctccccctccctctcctccttcccccccccccccctcctcccccccctctccccccccctccactctcccctccctcccccccctcccctctcccccccccccctactccctccccttcctccccctcctccccccccccccctctccctccccccctcccccctcttccccccctccccccctcctccctcatccccccctctctctccctcttctccccccttcttccccccccctccctcctcccccctccccttcctctccccctcct

SEQ ID NO: 12337 - DNA, 322 bp, Glycine max
  unsure (1)..(322): unsure at all n locations
tgtccttaaattcagntaagagcaacgcaaagctcacactanctgcttcaactcctaaacaatccaaaaattttggcttctggttttatgtcaatacatcaaaatcttgttttacttgtgtcatcatgtaatgtttcctctactactaattcgataaaaccaaaaaaaaaaaaactaaaaaatgaaacctaatatcatcaacaacataaaccaaaatttctagtattagtatcaccaaaatttttggctgctggttttgtgcacattccccacatttgatctttgatgatccaatctacaaatctcccccccaccccccata

SEQ ID NO: 12338 - DNA, 439 bp, Glycine max
agcttacaaatctatttttaagtcctttctctataaacgaaataaaataaaatctggacaagataagataagattggatgaaataaaatatggacgaaataaaatgtagatggaataaaatctagacgaaataaaatctagatggaataaaatctggataagataagatttgataaaataaaattgtctgctctcttcaagttgaagcccaatttcggattcaagcccaattgcttataattctcctgaaattaaattaaaaacacaaaattagtcaagtagggccaaatgataaaactgcataattaatttgacaattaaggctaatcagtaattaaaatggtgagaaaaagggttaaaaaataggagaaaataatgacacatcatcaagctaggttaatcttttgcctagttactcagctggacatgaatgtcggag

SEQ ID NO: 12339 - DNA, 559 bp, Glycine max
tgagttggtgaccattcacttttaagactttggtggttattttatttttaatctcaattgcaccatgaggaaaaaacattagtaataacaaaaggatcatcccatctagatcaaagtttgttggaaataagcttgagacaagagttaaacaagagcactttttagtcaatatggaactccttcctaaggatcctagagtcgtgaaatctcttcactttctccttgtaaatcttggatttctcataggcttctaagcggatctcctcaagttcttggaattaaagcttccttttcatacctacttcatcaaatgccatgttacaacccttcacttcccaataagcacggtgctcaatctccaccgaaaggtggcatgccttaccaaaacccactctatagggagacatcctcaaaggtaattagtaagcgatcctgtgggcccatatagcattctcaaagttcttgctccaatccttcctaatgggttgcactaccttcttgaaaacttgcttgatctttttattaaaaaacctccgcatgcccattagttcggggatga

SEQ ID NO: 12340 - DNA, 352 bp, Glycine max
agcttgacataacggtagtaagtgttgtgatggttgtaccctccatatgaaatactccacatactctggtgccttctcgaactcaactagggatgtcactgtaaactgaaggtactcaatgacgtagacaacaccctgtgccacatttgggaaccatctactaactccatagccaagtttgacaagaagtttttactacataagtctctcaacatttacaagttaccggcgcgattactctctgggtatcccttaccattcatccacacttgattacccatgaccagtttggatttcaaaacgcttttcaatctttttttacactgcacaatgatgttcaaaaagcgtcttc

SEQ ID NO: 12341 - DNA, 333 bp, Glycine max
ttgggaccatgttgaaatttctccaaatcatggctttattattagtcatgcaatatttgtatcaatgtaagcaagctcaatcaactcacttgtcaaacaactcactgcacttagaacctgaagccaatgcctagaaactacaaggcaaggaaacctgaaatgcaacatagacgcagcgttgcttaaggacattcaacctttggagttgccttttatttgtgagatcacaatggaagctttatccaagaaagaactaatgttatcaaaggttacctatctcccaaagaagttgaagcatgggctcatgatttgacagcttcgactaccaaactt

SEQ ID NO: 12342 - DNA, 397 bp, Glycine max
agcttcttgaagaggatgaagggatgtttaaactcaaagatagcccttttgccagagagctagaatctgcaaaggctagctcaataactatatcttatgagtcacatccgaggaagatagaacccatattctaatgtgacatcctactcaaacgcggggtgcccgcgtcctctaacatgagggtcttcataatcattcccccatttatctgctcccccgaacacacagtcaaaatcatctcacgatccaaacacaacaacacaccaggggtgagtgatcacatccctagcttatagagaaacccgacaattaaatatacacattatataaatgagataccccttgctaaacatagctcacgaaacttcaccactttatcattcaaaatcaccttttc

SEQ ID NO: 12343 - DNA, 397 bp, Glycine max
  unsure (1)..(397): unsure at all n locations
tgcatactgttctgtttgataagtttttggggcatgtatttattataaggacgcccccaccaccccggggtttttattaccatgtccntccccatttccaaccgggaaattggccagtggaggaacgcccccgcatttactccacgagcataatgtaaacccttaccggtttaaaagctcctatacttgggccctcggatataaagtctttccttttgttaaagctttggggctcttgtctctgaactcataataccacgacctttctctaaatattcttaacgctctatccattcctattcattggcatgcttactgtctttttctcaaactgcagaaccgatgaccactcccccgacggtacctatacctgcgccccccccatcgacttctaccc

SEQ ID NO: 12344 - DNA, 122 bp, Glycine max
agcttacaattcaaataagaagaactctatgagctctcttaagatccttatgctctatttcaaggcgttgagaacatttgtttaattatctataagctttatagacgcgggaagatgcccct

SEQ ID NO: 12345 - DNA, 453 bp, Glycine max
gtgcttctacaatctcccgcttttttatgatgacattcttctgtaatcatgaaacacacacatacactttttcctagtcgatcagtctcataaattctccccatttggatgagactacaccgacaccaaaagtgcatatgatggatgagccccggggcattccatagagcattgaagggccctgaagccgctagtgcaaagactaattgatgctgactagctgaaaattgaggagaatcgcgtatgagtcccaacattgtcaagccacaccccacatggggccattctcaaagccgctgctaggtgcccctaatgacttatcacgatttcccagcttatgcccctttttggaacccctagttccatgctgaaatagatgaaatggacccccttgtctctctcatcccttcacaaacacatctttgcttattcaacttccaccggaatgtgagt

SEQ ID NO: 12346 - DNA, 242 bp, Glycine max
  unsure (1)..(242): unsure at all n locations
acacgaataggcgcattcctaagtcttcggtgggggcctctttgggccactggcgcaaacccaccttggcggtttgaaaacgccctttcaatgttgagtgatcttccgacctatnaatgacgaaggtaatgtgctactattataaagtctattatctagacaaggtgaagcaatgatgcttatatacaacattactgccacactgtgctgatgaataagtgagtgactcctcctaatattca

SEQ ID NO: 12347 - DNA, 550 bp, Glycine max
  unsure (1)..(550): unsure at all n locations
gatgcacttagagcttgatctagctatggtgctttgtatataagttatgtataatntgattctatagaagtgatgccatacgtactgagtagtaacaaatgtaatgcatgggtgtattatatttgtagagagatctatcgagtttgaattgagaagggtcatactattctcatgagtagattaatgacagacgttctaaattanataaaaatacttttacacttaacttagtagttatgtgatgaagatgggctgtacacttattggtggttaccatatatataactctactatgatgtgatttaaaaattgtatattttattttagttactatccccgacactattcacgatattgacataaaatatgtttttgcaaattatgcaataaatatggagttactttatacatcttacaccgtccttgttgttttaaaaatatatctctcttaaaataacacaactacgntcaaatgtgaatgtacatcgtttatcagtgtctgccagataccttattacagattctcctatgtgcatagacactagcaatg

SEQ ID NO: 12348 - DNA, 424 bp, Glycine max
atgctgtacctccgactaagtcgcttttactaccatttataccagtggttatcaaataagtgtgttactaggaaggtctctaatctgatgatcaaaaccctggctgatcaagacttacaactttggtgtgcctcctgaagaggatcttcttctgctaatacctgtcgttaacccattacatatcacttgccaatttcaggcaggtgcattagcctcactatatcttacctatgattcaacaacttccttttgatacctttgaccgtctcatatgctttattttgcgccactacacttacatctctctttccaacactataaccattccctattctctctacaatccttttagtatcacactacactggcgggtttcgatatagactatatcacttgataaaacctacgttctaccctaaaccat

SEQ ID NO: 12349 - DNA, 72 bp, Glycine max
aactcaaataccagcacagggtagatttctgaagtgctctatcacaattttagatagagtcttgtcatctat

SEQ ID NO: 12350 - DNA, 476 bp, Glycine max
  unsure (1)..(476): unsure at all n locations
atgcgtccggtcttagcacgcgctgcagctctcggccttctgaggcaaattgaagtgttccatggacctcttaacagatgctcccctctcctaatcaactcatgaattaacagcttgcctgttcttcaacgtactgcgagactctatactaaaaatgccctatcatcaagagctctactaatattactgactccagggtttgtattcatacacacgcctctgctgatnacatcatgctactaagcatntgggccaaaactgcatcctcattgatttatacctctatcaactacatatctgctgctccatagggctcttatcttttcagtttctactaagcgctcaatcaactatntcttgtgactaaatgatcaataaagattatnttgtattgttctactacatcactatattatattttgagaattgctcaaatatctttctcagtttgtttacaaggatgcaggttgtctttc

SEQ ID NO: 12351 - DNA, 392 bp, Glycine max
  unsure (1)..(392): unsure at all n locations
atgactgagttaactactgctaaagcgangcngcgcaaacagtcgtcgaacacatacgttagacctgcaacaccttgacctcaggatgcgttcgacacctcactaggcacattacgattagagaaaggccgcgggcccatgtatcttgcattatcgaaatctattatctgtgcacagaggtctactaactgtaggatgacctcatcaccttaccctgatcagttgaagcaatcattgcaagacgcatgtcaaagctgcatttgtcggcgattcgctgttgagaggcattcccactaccctgcaattgtaatgtctacacatctcacactatcactcctctatcactggccatctgcgtactctggtatattatctattttcgtgccatgcct

SEQ ID NO: 12352 - DNA, 676 bp, Glycine max
  unsure (1)..(676): unsure at all n locations
tatgaccttgccgcatcttaagcactgngctgcagctgtattanantgtntaacataccttaantaatatgtgagctctatttccttattaatatatatgagacgggtagaaggttcacatactctatctctatagctacatanaggctaancgtctttgacagtatanggaccactccatctatatnttatatttccatgacataactttaatccttgagtgtagagcaatactntgtgntcgggcctgaatactctatggaggatcttgttgtcatggtatctcttggttctttctttgtagagctaggatgattcatatgcattgacgagaatccnttcaagttcctgtagttgtaccttcctctctntntggatgttgagacacagagttgaagaacttcatgggctattgatcatctatttctaactccactgggaggagacaggcttcttcattacaccattgacacantgagatgccaatgtgtgtgttgatgggtgtccatatgcccatangcantcatcaagctntgangtcgatccgtccttgacgagctatggctattctagatcctcttgtctcctattgaaactcactcgtccattgttgggatgaaggtatgctcttgtgcnaatttgatgtaacgacttcagtgacattaatatgtgcctt

SEQ ID NO: 12353 - DNA, 161 bp, Glycine max
  unsure (1)..(161): unsure at all n locations
tactaagaattgaactcttcaacttacaagaatcaatgtacatgggatttaaagatgtaatgttgtaatctaaggaaagtaattagatcatgatattataattgaattaataaatggatgggtnntgtatgtgacgtagtggtattgataactttcatgag

SEQ ID NO: 12354 - DNA, 208 bp, Glycine max
gcactgtgctgcagctattgtgcccctcctgagcttctctcttattaattattctaacctgcttgtgaagaactcaactggtgaagtattagtgtcacttaaggggttcttcactaattgctggactaaacgactaaaaggaactccgagggtggtccttcgttttttgtcaacccgtctgctactctgagtgaatattgaaaaacct

SEQ ID NO: 12355 - DNA, 681 bp, Glycine max
  unsure (1)..(681): unsure at all n locations
tatgtactccggtgacttnactctcagctagctanatggtgttgtcaaacgtacacgttacgtatcataaaagccgtatataagctgaccatgantnttacgaaccaagccaccaaagccagagtgtcctggattcccataggtgtngccacatttacggaaatctaccttaggagtcattctttccctccatctccatgcctctgtatcttcttctctncccactaatcccaagtgtagagtctctcatgacaatgagatactacactctgcattattgagagcctaacaaccatacgctcatgatataattccnttcctactctctacttaatgctaatttaactcttacgtggcgtctttctatacataagtctacgtgatagaggtttggcactcatatctactgtnctcgnctgtggatcgaggacttgngaacagctctcttcanagagtcgagacaagcatataattgatcatgcttgggatagatgatatcgtaaccctctttatgctatcttcgctatgacgctactagtgatttcttacgatacgaagaatangtgatatggtgcgattatatcaagtcttctactatatcgactatattatcatagattcttacatactcggagaactcgagctagccatctttcatctatagactcatccactcctacn

SEQ ID NO: 12356 - DNA, 454 bp, Glycine max
gtgtcccatagacataactactgcattgctccggaagacaacgttaaaaaaaattatatctacttataagaaaacggcaagaaagataaatagaagaccctgtgtggtgcattctacatgcaacttccaccacccacatgcatactcagcatatcgcctttattaccataccaacatcacaaccatccaataacacagctgctgtacacacccagccaaccacttaacaacaaatggattgcacaaactgagatcatcaattcggcaatctactgtctattactgaaagatgacctaccctgaggtctaatcattttagatcataaccacagctatagagatctgcttctacacgtacttacgagtcagtatatcgctgtaattagaacgtggactactgcacaccccaggattaagcggtagttagaccaattagttgcttgaccgcagcata

SEQ ID NO: 12357 - DNA, 216 bp, Glycine max
ccggatcttagtcactgagctgcagcttgaccctaacatatactttactcgtgttgtgatccgacaatcagacctcaatgatgtgacttgaccattaacacatacttttacgagctgatgatccgactatgaacctcaatgatgtgactctgacaatcaagacatactttctcgagctgatgagcctcatatcaacctcaatgatgttgacttacc

SEQ ID NO: 12358 - DNA, 125 bp, Glycine max
agcgtatcgatatattacgggactcaatcggacatccgagtaatagttattgtcgtttgaactagctcagagattcaacattcaatgttcgagcgtctcgttatattacgggactcaatcagaca

SEQ ID NO: 12359 - DNA, 635 bp, Glycine max
  unsure (1)..(635): unsure at all n locations
tgatgtcattgatcactcgtctcgagatcctcttagtcgacctgcagcatgcangctngganagctnngacatgtatngaagtgtanatatttagttgctacatggtngtatggcagcaatatatacacaaggtacttggaatacttacttctactcacttacgtggagtatatgaactgaaaagcacccgcatgagtgctttggtgtatatatatgcaagtngattaacagaaagtattggaagcaanttgacangctcgacaaggatcttctcttgtacgatatgacaaatcaatttgatatgttgggtcctntcatgacacacaagaattgtagcaatatgtaaagtgacttgtatcatagacaaatagctgttgatggaagcactttgaatcttctacngaaagttagtcactgcgctcgcaagtgcactgcgtgagctctgattcagctctgagagctctagaatagtgctcgctctagattccagtgaataaaagaccagatancgcgatacttataatctatgggcatgcacagcctgttgatactaagcttcattggagacattgtgaagaatgctgactgaaccttgtgatttaatcgaaactgtgaacaattgtgactacgctat

SEQ ID NO: 12360 - DNA, 668 bp, Glycine max
  unsure (1)..(668): unsure at all n locations
ctgagatggcactatangtacactatgatactaagctttatcaaactagttcatttcattttgtagggatggacantgatgtntatatggttacttcgatcctgcgggcattgcgcacacacaagccaaacanagcaatntcaanataacaanattcanatctanaaaccctttttaatatagaaccatgtgaacgtcaatagagaactctgtaatcaacattcaacagccacacatacaaagganagaagcttattaaggtgtgaanaccagaaaaataattgaanngaaacgtacttctttggtagtgttatattcggtaacanagtcaaatgaatatggngtaacanagtcaaatcaatgcanatgccataagaccaatcgcannnaatacttggacccataattanaaactttatgagggtgtnggaagttaaccatgaagctcaatctttggtggaggctatcaagatcaatgtacacctctccccaacatattgtctactataaagaatanntaaanaataacttaatcaagtttaaacatattaatacagccttcagaggtacangtacatcacttttacatatatanacttctntaatataatcactcgtaacaggcgctataactatcccatgacatcatcgacgtggtccgacgctct

SEQ ID NO: 12361 - DNA, 169 bp, Glycine max
tatcatgacatcagagttccactcttgaagaaagaagttgaatatactgaaaatttgatgaaaggccatatggagcaatgggtcaagtatggttgtactattatgtccgatgcatggactgatcggaaacaaagatgcatcattaaatttttgattaactctcaagctg

SEQ ID NO: 12362 - DNA, 664 bp, Glycine max
  unsure (1)..(664): unsure at all n locations
atgtgatgccntcgnattangtgcactntngantactcangctggcttgtngagcttctatggaggctgggatcttgagcttcantgaggtccttcantggtgatnnttaccatggagatgcagcgganggcacaggagaagaagagataggaggcgccatccactatggaataagccatggaagaaaggagcttaccaccaagatgagccttggataagaagcttggaaggatgcttcaatggagganaagaaagaaggagagatagagagaggggggagcacganattgatagaatataagagggggagaagtagaactttgaagtgtgtctcataagactntcattcatcanagttacaacangtggtacacattatagactaggtagctttcttgaggagctgttctgagaaaactttcttgngngctgctttgagaaacttccttgagaactagagctagctcacacaccctctatactaagctactcttgaaacttcttagagatctaagagctgagctactacctactcttatactagctactcttggagagagtagagtactaccacccttatactactaccctgcaaacatgaatcaaaagtctactcaactctaatgccaatcaggtaaccttctctatgcaatctgccacagg

SEQ ID NO: 12363 - DNA, 603 bp, Glycine max
  unsure (1)..(603): unsure at all n locations
tatgacctccggtcttaacaccatgatactcgtccggaccttaatcacctgggctgcaactnntgaatgatgtgtgcttctgtgtgggatngggggtgactgacgtcaaggctctanaccagtgcatactntanntaanagttgggcgacaattgaatactccatatatgacanagaagtgtacgctttggtgagagctttgcatacatggcaacactactcgtggacaagggantcataattcattntgaccatcaacagtttgaagttctaacatctcagcgtgagtttcaaaataaacatgctaagtggntggactcatngagaatgttccttatngatcangtacaagactgatangganacatatntggctatgcttgtgcagaagatgcttgctactctttcaactaattgttggttgagttggaagactgatgctatattctgcttgaaagatgaactgtcaccatctttggacatatgactatggtctgttacatataatggtctgctgatgtttaagacgctgcgtgagagacatttgtgaaaaacttaatttctactttttgccactgactgatcattgtgaaggctcatacg

SEQ ID NO: 12364 - DNA, 111 bp, Glycine max
ctcacatgtgagccacttaagtagggagattatccattggataaagacattgaggtcttaagataattggttatttggagtatgatatatttttttcatatatataatata

SEQ ID NO: 12365 - DNA, 611 bp, Glycine max
  unsure (1)..(611): unsure at all n locations
ngtgaactataccttcgancgaacacgggcgtgtntctgtctatgccctgattcaaggcnggctgcagcaccggctccgcttccctaactgtactggaggcgggtgcngtggctntatcctctatggtntctggagtntaacatgacctctgagatggaagccatntgatctcttaaggccgatagatcggccttcatcntgtcctgcacgccctctctcattatccattttctggatcagagtgtatatgngtgccctggtgtttcttagttatgatgaaattcctaaagaaatatacaacggngagtatgccaccaaaacgtgagtatgcaaatggatgatcggagcactctgatccaccttagaatttataatacccaatgagtccagacatctcttttatatatagaacaagctttatctnccaagatatacaatgtgtacaagaactatgatcctattatatggcatcaattatatgtctgcataatgatagccatgatctctcgggcagacacactcgcctacttngcttgtacaatgcggagctgactcatcaggcaggcgacttcatccatacgtctgagaccgatatactctctgtctttcg

SEQ ID NO: 12366 - DNA, 52 bp, Glycine max
atactgatgtggactgagatgtggacccgtaagacagatagtctggatctac

SEQ ID NO: 12367 - DNA, 512 bp, Glycine max
  unsure (1)..(512): unsure at all n locations
tatgaccttgtcgcactcaagcacctgngctgcagcttgtgtcaattatagcgttgcatntttacggcactctatcgacattcgagtcgaaacttatgcggtcgattngctaggagacttatctccatttgacatctgattattcggactcattgacatcagtaaattattgcgtaaaattgctaaatttgtttactccgagctcattatacagactcatgactcgataaagttgtgtgattgctcacttatttcatttgacatctgattatacggacctaccgcatcaataaaatatgcgttgaatgtacaactccatttcacttcagcggtcattatttgactatagctccataaagcatggctgatactggatttttttaatgaagctatatatgactacgcatcataaagatgcttgattgtcactcattactcacgtcgatataactatgctcataaagatgtgcattgctgatctttatcacgtttttacgacatgctcagaatan

SEQ ID NO: 12368 - DNA, 67 bp, Glycine max
tgggttttttcaataatttaagccgccgaccattgtattattcacatctttgtatcacacttatatg

SEQ ID NO: 12369 - DNA, 106 bp, Glycine max
acactctttaaatgacatcactcattaacaacatataacaagtgttttcttatttatagataaaagataacactatcgaatactcattcatttcttctatcttcat

SEQ ID NO: 12370 - DNA, 455 bp, Glycine max
  unsure (1)..(455): unsure at all n locations
tatgaccttccgcatcttaagcactgngctcagcttgataacatgactctacataatgattacgtcagcctgatcatcgcttgaaattgatgtgaatcattgaaactttaactattgtctgtatcatacacatatgtatcataccaaagaaactttggtaagttgcaaactctgtctttanaattaaaactttaaactatctgtgagctttctctctgatctgatctgaatttgaatcttagctgaactgactgatctgaactaactgattgtgagctttctgatctgatctttgatctgaccttgatgtctaatttgaagagtttgatttgacttatatattgatacttgtaatatgtatataacactcatatgtatatataattgtccatctccttgaatcacttaatcaacccccctttcagcaccttatatgtccctgttgatatctatan

SEQ ID NO: 12371 - DNA, 628 bp, Glycine max
  unsure (1)..(628): unsure at all n locations
tatgctacttctgtagccttgatactaagctttcattatnctannatttgantantctctattcttttntaatatgtggatattgatgacanggaaccgcatggtgccaatgaggtagtcgcatanggtgcctacgtcgtatatgatgatgaagatgttggaggtatcactagcgagaaacttngatgtgacacganagaagtaatgagtctggcttatcgatgtgggtttgaacttcacccaagtttggaccnttgccacgtgatccaattgaaaattggnggccaagtggagatggaggacgatggtgatggtgagttcaagtggaaggggtttttttttcttttagtnttattaacattacacaataaataataaattagaatgtcacgtttacaatantaggtatctttaaattgatgagggataaatactaatttanaataggactaatgtctatttaaaataatactagatgagatatagagagagaatctgaatacattttaanacaggttctanccattttgtcagaccgagtcaactatcatggacctcttgaatacttcttgctgccgngnaactgatcnaacccttctagccgcgtagatatcatattgatatattt

SEQ ID NO: 12372 - DNA, 469 bp, Glycine max
  unsure (1)..(469): unsure at all n locations
tatactttcgcggatctatagcactgtgctgcagcttatagcgcggtctgggacanngtcagtggtcacatacacaaatgatgttcgatacgtggattggtaaaccatcncttctgattccactgggaattggcagtgaggaacgccccacatttactcaacgacataatganaccttacggtttaanacttatattaggctangcttagagttcttttgtatgcttgtgctttgtttaaatataacaagattttttattgtctactttccatctatcttgtgtactttatttaacgaatcatacagcccagctatctgacgcttactcacaaacataacgaataggatggtggactccaataaagttccctagacaaaggcttcaaaatacatatggtgctgaaagaaaatgcagtcgcttctaaaaatcgtaaacaattgtgtcaatcgtgttctgaactactacag

SEQ ID NO: 12373 - DNA, 662 bp, Glycine max
  unsure (1)..(662): unsure at all n locations
tgttctccattttgtaactatnactactcangctcactngannataagtatntaantatatgaagtctngatntaatccctatnntatactccccttttgcatcatacaaaagccanagtgcataagatatattaaaccatacataaatgactaatcatacaagagaatatgaaacaatcanacaagataacttaaccattcatcanactagaaagaaatatacttatagaatgtcatataatccagaaagtcattcacaataaccaaataanaactactaatgcatganaaaatgctagtcatgtgtttaagacatagccaaatacacagcttnngaatcaagactaatatactaagaataataaatctagatgatgcngngcngtgtggagataaacatgtccgatgaagtgcatctctttcacctgtgaccttagtcatctcgcgatccatgtcacttgtgtgcanacatanaccttcaccacatangttgaagtcatcaacctgtcacatctctgaagaagaggatctctctattgtagtgtctcatcatatggtgacgactttttacctaagcatacctcttcngtacaagatgcatcacacccataaaagatntgatgactangtcaataatataggtgcgtcaagccatacgcct

SEQ ID NO: 12374 - DNA, 170 bp, Glycine max
cttcttgtgctcgctactccggccttgagatagcaccctctcggggactccctatacacttcgcaacatagagaatccattgccctgtactaaatcgtccctgactaccacactattgcttccgctacccccctaagattgtctccgaataggagatagcctgaaagtaa

SEQ ID NO: 12375 - DNA, 71 bp, Glycine max
  unsure (1)..(71): unsure at all n locations
agtggaactttgaagtatgtctcacaagactctcattcatcanagttacaacaagtgttacacatgtttct

SEQ ID NO: 12376 - DNA, 682 bp, Glycine max
  unsure (1)..(682): unsure at all n locations
tgttctgtacttccggatcttagcacctgngctcagctaggttattaagctcaaacataactcgataggataccaagttgtctacaagatgattacnttatganggcatgtgaaaangggaaaaaaaatanaaatactctttttttcatagaanaaacnnattgttctcacctcaagaccttacatattgatcntgttagtccaaccaaaagacatctatcaagggaananaggtattgactcatcagagccgatgactactcntaatggacatgggttaacttnctagcctagaagaatgaatctattagtgtcttctctanatcttgtacaagaattcacaatgaanagaattatgccattaccttaatccanagtgatcatatggggagaattgagattgatacttttaactattctgtgangattatgtattctccatgactnnttcacaccangaataccctcacngaatgagggtagtgagaggaaggcanatctctacactgttaatgatanntcacccctcacactttaggctnagcactgatactgccatattacaaaacaantgatagacccatctaacataactcctataaatgtgaggaagcaaaccacatatctagtcatcatttggtcaatgtntatctactctgacattaagcatcgaggagtgngn

SEQ ID NO: 12377 - DNA, 102 bp, Glycine max
  unsure (1)..(102): unsure at all n locations
agagaatctttcttagatactagaganaaagtctctttgtaatctattcctttcttttgagtaaatcccttagcaacaagtctggccttatatctctcaatg

SEQ ID NO: 12378 - DNA, 678 bp, Glycine max
  unsure (1)..(678): unsure at all n locations
atgatttgccatttgatcgagctcgtacncngngactctctagagtcgacctgcnggggatgcaagctgccatngccatctntanntgtattgagttgctcacctttctttagggtntntcaacatntgacttgatacaattgcaactaaatagggttntccgacatgtgatgtnntttaagacagtgagaggtggagaatgcaccattgtggatagtctagtgttatagaacgtggaatatatctattaacaagagattaatccgcaagctaatttacaatccataatcagccacctaaaacctgcacccgatntataaagataatgacccacggcctcaattacagatactgctcatatcggattgatgatacctttcagcttttcctaagcnactatatgtagttgagtacgtagaatatgatgctagaccgacaacctatctgaactatttttgtttgaagtgctaactaatctggttgattagactcatgtgaccttatactcttttctttggatacctttnggaatagcagatacgaacaacatggtcgtggacatcatcctgcttttactaananatttttccaattataataaatgagtaactattgcgaatgatagtgcttaagtaaatatggcacttcgctgaagaactactgcaacttgtttaacct

SEQ ID NO: 12379 - DNA, 130 bp, Glycine max
  unsure (1)..(130): unsure at all n locations
cctctgcaattatatgacagaaatatcattatcanngtaagttactcccttctcaactgccattggtntatctctgtattccatatcagccagcacctctatgatctgatgaatattgccctcataagtc

SEQ ID NO: 12380 - DNA, 602 bp, Glycine max
  unsure (1)..(602): unsure at all n locations
ttgcttgtacttccggatcttagcaccgagctgcgctctgtatgggcggcggctncttacttcttgctaactgcagcttggccactggcttttcttccgcgtgcttctcttatatccgctgagtgggttatagcctnaccatacttccacgattcctttggatttataggctagtatgccggcgtgtcttgcctaaaccattccggttcgaaccgtccccacatactcggccatcttactgctgatagacangaagcttgccagaaaagagtcacggagggatgctgccacctcaaagactgagagcggntctaaacgatctctgctgcttcacatanagcaagaggatggggcagtcaccagatgtcttcctctctgacacgatgaccaaagcccctcactacgattttaactttgggtgagtgagagggacaactccactgagtggatccaccggcgcccacagacagtgagggggggtaatatcattatttgaagtgactgacagtggagggctattgactggagactactctcctaacttcggagtgcgcacgccgacacatgactcgctaatggagatgatgtatctcaaggtctag

SEQ ID NO: 12381 - DNA, 202 bp, Glycine max
  unsure (1)..(202): unsure at all n locations
ccgatctgaatagttanggtgagtcattatatatntgagtcanaactanatngaactgatcaaaaccgtntatgtatgggtngaattacgagtntagacttatagatctgtngacattntgacccaacccatgaacctgtaattaannatataaatnntatttatatatatatatatatatatgtatatatatatatatata

SEQ ID NO: 12382 - DNA, 660 bp, Glycine max
  unsure (1)..(660): unsure at all n locations
tgatgaccctttgactcagccgtcgtacnncagngatcccctctagagtcgaccctgcanggcanntgcaagctttangtgtanaaacttanagttnanggagtcacgaagtgaccaatcatanatattctgtaactctgtngaagttagtggaattgatgcgttgtcaataattggacttagntttgatgatcgacatgatcccgcatacattcatgtgtcttatcttgtctatcttctctgtngtgctatanacttacgaattgaatntgatttttgtttttacaagacctagaaccattgtctgaattattattntgcaaaaattagatatatgtcttcttatatatncatcttcaaccataatgttgttgtatatgaaaagatttataatttctacaaatacaatccatcctctctgtatattatcttatagttgctaactttagaaataaggcacatacgcaattagttccggcttacaaattacaaacctttggagtatatacaatattaattcacattgtctagaaatcacaacaatgatatgggctttactattcacttggaagataaagacaaatgatatgtctgcatgtgtacgttcaataaagatgcaaatcagttcatgatgttgatatgtatacatatattcccccn

SEQ ID NO: 12383 - DNA, 447 bp, Glycine max
  unsure (1)..(447): unsure at all n locations
tgatgtcttcgtgctcctttatctcgctgaacgtaagatccactcgtgcattaaanagagagagaatgtgttttgtaaagcgggcccacatgtgtggtgcctacacaccaacctgttatcaaactaaagaacttgtgatatagtcacagcatatgggtgttggtcaatgacctgtaacacccattgaactgaggttaattagaaaaacctacgaaaaaatggctttatattttaaactgatggcctgtggcctcatgattcccctgtgtataaacctccttttatggtggcagttgcatttgaggagtttttattctagagatttatgtaatataaatgtattttaacagacacattttgtttttgcgattctcacatcaatatttattcctcctttggtaagaaaactgctagtttggtctttgaactccactcgaaatggcactc

SEQ ID NO: 12384 - DNA, 152 bp, Glycine max
acctccggatcttagcacgcgctcactttgtgcaatcttgtgtgtattgttggctaagggcttgcatggagtgcggaacagctttgtgttgattaggatggcttgggatatgggtgtgggaaggagacgttgtattggctaataatacattg

SEQ ID NO: 12385 - DNA, 225 bp, Glycine max
  unsure (1)..(225): unsure at all n locations
tgtgctatattacatatcattgatcaagctgacctttgatgtaggttgccattagaaaaggtggctnttcttcttttcttcattcctatcaatgatggcattggctccagtgccatatcttgtgccttggctgagacctatttgggatgctctcaaacagatatttgactgatgtctgttcttcctatacatagtggaatttatctatcttcttcttatatgtct

SEQ ID NO: 12386 - DNA, 511 bp, Glycine max
  unsure (1)..(511): unsure at all n locations
aagacaccanagagtctccaacgatggctggccatntntgcatctcatgtaagctngaagagtggaacactcataacccanaaccttccaccattctcttcagtcccattcacaagcttcccaatctctccaaccatgtgatccacaggacaantacaccctctgcttgtgatccgtagccctanatctacaccacttgagaccccaatacaaacatanctttgtatgttactgccttacagaccctaagctctcaccttgctcacctcctctgaacattccaaagagataagaagagaattacttgcaccctggagtcactcatcacacatcccttatcatctttccatactcctactcacctcaagcagtacaactctcacatacacactctctttctaccccaatttcatacatacacatctaacctataggacacacaccctcttcactaacatatttcttgctatatatgtggatgataccacatatctgagcaatccagaacgtg

SEQ ID NO: 12387 - DNA, 610 bp, Glycine max
  unsure (1)..(610): unsure at all n locations
agtgttgaccccatgtgatcactattacgtgcactatgatactcagccttgagaagccttggccctcatgtctccattttcagtattctcagaagtagggtaagtatttaatattnnntgtattngtattatatagtcgcttgtattctgataattgaattacttattctacatattataacagtttatataatagaatagtnttatgtatcgtaagttattacgattgtatacctcacgtttacttcttagtcttatatggcagatacggctagtcttagtctttatatatcgtagtttagttcttgtagtatcagtagatatctatgtaattacttagctctagcttattggtcatagtattagttacgttattggacgtattctagttaatattgacgtatagtctgacttagataacttcgatgcttgtgttaattcacgatctagtatagtttgatctaatatttagtcgagatctgagatattaacttgcttttattcacttgttctcgttgttatggcatttgtgtaattctgtccttgttatttggccgcatttcatttctatattcatatgtcactgattcctattgcacaatcacgttcc

SEQ ID NO: 12388 - DNA, 307 bp, Glycine max
  unsure (1)..(307): unsure at all n locations
ggtcttagcccgcgctgcactgcttatctctgcatcagctgcaccatgccttaggcaaaggcaatatgactctcaaggagtcacatctatacatgacatgttgtctcttgantgtgtgtgctcccgcacagtggccggggccatacttcatgctttgacattcctttacaggctctggaatgtgctctaagtgagtgttgcacctcgaaagaaaagttatctcttacattttacaaataatataatcatgtaagatactacacttgtgataatgagaaatactaaatacttaaaattgtaaactcat

SEQ ID NO: 12389 - DNA, 650 bp, Glycine max
  unsure (1)..(650): unsure at all n locations
ntatgccacattngtgactctgatactaagctgtctagcgctatgcagacaganaccancatgnntagctatcatcgccagtaccaagaagatgtggatctagccacngnccacgagcatagaatcgcngatgagtatgcncaagtatatgcggaanaagaagctagangaanggtgatcgactctttacaccaagaagcaaccatgtggatggatcggntngctcttaccttgaacgggagtcaagaacttcccccgatgtatccaaggccaaggcgatggcaaacacctactcccgccncgaagagatcatnggcttctcngctattgtcagcatatgatagacttaatggcccacantantangaaatcgtagaaactnggatggctctcaaacctgactngataagatctttntatanatgagtggtccatgttctactcanaagctgtgcaatanatactctacattatcttacatgctttcttcttaccactctacgttgttttagganaacctactaaccgcgcagggatctatgaccaatcaatcttacatggtgatagagaacctgacaatgaacgactgcgtctaagacaatgctcatatgagcatgttgttgacactatgaaaaaccgcctcgcgtgct

SEQ ID NO: 12390 - DNA, 520 bp, Glycine max
  unsure (1)..(520): unsure at all n locations
tatgtcatagtggcttatctagctcaatagatcctgctactgtcgccaactgcttaagaatgaccacatctttcgncgcagatacgccctatcnttcgcaatacatncngagatgcnnctttgacatgtcgtccctttgtacttatcanagtctggtactttgaaacttgnganggatgacgatgtnggcacgaaacataatcgtatatcgagatgtgtattgcgagcctcactgtctaaccttcttaagcgcctaattttcctatcttcgcgaaggacagatctntactgtgtggtgaaccgacatgacaacatgttgtgggagtatggggaagatcttagtngacaggccaatggtttctctatgctgccgatgcgataagggatgcctaagatggctgtaatttcggtgacggacagtcgagagcataggactgcgcttcctacaaatgcgtttgttgcaattagcgtgaacgtcgtctatgcgaggtcggtattttgttgttaaactcagacatat

SEQ ID NO: 12391 - DNA, 615 bp, Glycine max
  unsure (1)..(615): unsure at all n locations
atatgaccattagccgcatctcagagtcacctgcngctgcngcctgagaagctcgangccttcccttctaacaagatacatgccccagtggaccaacgtacgcataacaaactctcatttttcatcacgaaccanacacccnccactcatattggcattatgaatattgaacacttgatctatattacacttgaagaaatcttataaanggaaaccgttatcctatcaagattctgcttcatagtcctccttgtgtctcatcataaaaactattatgtatgacaattattcacagatatctatctctcaccagtattgtttactatccaaatattcanagtcatgccaaaaaaaagctgtactcaattctttgagattctgagcattgtatacacacctcacacaactatctctctcacataaaagagctacataggcatatacaattactcccacatgatgcttctgacagtaaaaaatagtgcangcatctctattgatactgacacacaccacattaacattactcctttgttatctctctagtcaatcctctacagcctcaatagacctactgggagacctacctcatcaggcattcttaactcataaacg

SEQ ID NO: 12392 - DNA, 233 bp, Glycine max
gctcacgttgaatctaataaaagatcattatttaattctcaatagattcttatgactgatttatagatataaacgctctgcttatatagtaagatgaacatcttataagaatgatctaattcaatctcgaattgatttttctttggtaagagtttaataaagagttttgcgagtattttaaagagctctgtaatacataatctaatattattcatcttaaagtataaaatatc

SEQ ID NO: 12393 - DNA, 497 bp, Glycine max
  unsure (1)..(497): unsure at all n locations
tatacctgacgcatcttaacacctgagctgcactactganaccccctgctctctatctaggtagatgaattcatcttgcaggtatgcaaagcatgttgctaaagctcaatgcaaactatgacgtnggacatcattggtcatgatcaaaagagggaatgccagatctttcatgaacgctatatgatactagaatcatcanactatctacaaatctgtgcactaaatagttgggccaaacactagtaggctatttcaatcagcnacaggttcacgtttatcagtttcaaatgctantcatttgcattcggaagctttcttgtttcaccttagtgccattctttttcaaaaacttctgttgatcggaattcaaaaatgcacatctttaactgtattattttataaaagtgatcangaagtataccgaaaatctttaaggcaggcgctgaaaagaactccaatccgtctttttgtacacctcatgatctcacttgacatat

SEQ ID NO: 12394 - DNA, 641 bp, Glycine max
  unsure (1)..(641): unsure at all n locations
tatgtagcttcngtaancatngantctcagctntgcttctcanagcctaggctaantanggctaaactntcataagctgcttgagctaagtctagtcttacangagggatctgcagacgaaaactcagttaagttagtctaaacctaagaaggccgtctanatngngcctagtccaacaagagcgatctgaggatgaagcttggattgattcggtctgatgaaggatcgaggtttattatattaggctacaacatataacacatgagaaatngattagagaaatatattgagacacacnaattcgtgctccttctcttcctctcccttcactcatcttcttctttcttcaagctctttatcatgggcttctatgggtgggagcttctttctgactcatcttctgcttgaagtgcatctcaatcatcttcttcttcttattcactgcatnaactacagaacaaagactcattgtgagagatcaggcctcagctcacatgagtcatatctgataaagctctcgctngtatgtctttgctcttactttgtcggcatcatcattctatctcattatctctgttgctcctgcanggtgtgtgtaagaataaaacataactaactcctgttcgtctcgtcaattaag

SEQ ID NO: 12395 - DNA, 657 bp, Glycine max
  unsure (1)..(657): unsure at all n locations
tgatgtctcgtcgcgcatcntctnagcaaccctgtggcatgcangctngtgaaaacaactantnntgtannggagaaagaaagtcgccacanacattagtatggannagtataacatgtatntaaggtnnttgtgcanatacaaaggaaaatgctattaccatcttgctcctcttagcctcttcatcactgtcattaccatcatcaccaacagctntcctggaaaagttcatagcattcttaaatggtaagtacatcaataacaatatgcatatcagagaagtgaaacaaccaaacanaataaagatattggacttacaccttcttttgcaatggcccgatcataagaccagcctcagcatggtcatggccatggctgtagtcaggaaccctgctaacaacgtccctcagaaagtcaagacattatagctntgacacaatgtttctgcatatcatcaccactcgtaggctcatagtcgcagtantatagagcctgaaacagatatatcatctcaacaggattgatatacatagattatatttagaagagatgtgaaaccaataaacagtggtgtgtaaagcatccatgcatattctaattgataacaagaccctntcattaaatctnagtaaaaagncttctatgattgcgacactt

SEQ ID NO: 12396 - DNA, 106 bp, Glycine max
agactgcataaatgaccagtttccttctttagatattgtgtgccgtatgtcagagtgcaactactggttgggaggttaactcgaccagaagcaatgctacgcttga

SEQ ID NO: 12397 - DNA, 580 bp, Glycine max
  unsure (1)..(580): unsure at all n locations
tgatgacccttggantcagcgtcgtcnacagngatccctctagagtcgacnctgcaggcatttgcaagcntngtgcanantcannatcannctactncatcntcattctcgtagccttggcattttgcctttctttacgccacntcccctcacgtgttggttnnnttangagagaagcaccnataacttaaactgcgtcgcatggggattccctatcgcaccagatccaaatctagatcgatgggtgatcataagagacccggacagatanagccgctgtccgtctaaagacaatggctcatatgagccagtagttaacactataagaaaccgcccgcgcgtgcattcgtgcgacaaccacttttgactcccctctctcacttagatgaggacccttgccatgtcctaatgatcaccacgctcctatgatgcgcacatcccaccgttgagaatctgccatgcttcgtctgaaaactctacgccgcaatcacagactagattgctgagattagtttcccatccaggcgacagactgtaccacttatcacatattgtccgagcgccaactagaggacttctt

SEQ ID NO: 12398 - DNA, 659 bp, Glycine max
  unsure (1)..(659): unsure at all n locations
atatgtagcattcatangcacacttagatactcagccttgagtagtanggcatttctagccgttggatgtgcantangagtaccattctattgtccattntaaggaacctctcttatgggcattntgaagaaccatcangatagccattgtgatgttnnttgtgattgaatgcctactctgatgaattcctttgatgaagttcagatngatatctncatttgatgtagcacaacttcatcactcttaacacttcttcatagcttcaanacattatgaagttgattactctagagatatctagtagaagttcacttgttggtgtgctagttttttgtccaacgtcanaatgagtagtattcttcagtctttcattctgatgctttttatcagtggttctcatggacaacttcatctattcccaatctagctcttcttatgcaataagttcttccttctgatgtgctataatgatagtaacatgtggaagtgaagactgtcgactntactctctgatttcttaaggagcatctagtgtagaactatagtaagctcatatctgtcaacttactacttctttgttatgtgtctctgacatcatgacttatgaagctgtgtatttctctgacctatcttaggagcactctattatgctccgatg

SEQ ID NO: 12399 - DNA, 566 bp, Glycine max
  unsure (1)..(566): unsure at all n locations
tgtgnnctttgtcagctcgtcncgngatctctgagtcacctgccgcatgcaagctnttcgattattctatgtacccatgtggtccacattgtgttcggcattttattctcgtttgggtactntntataccccctcttgacgtgcttaagccattttacttaagtcatttctcgcttaacttaaaataanataaatntcaccgaacgttngaattgtaattatccgtaacttccggttaaataaatntcgaccgttcggtcgtgccgtaaccacgttgggaatcaaaanagaggtaacaatatataatatcaatnacatctttaataaataagcggaaatcatcgatgttctcttggattctatctatcgatgatatactaaggaactagctaatactcctatcagctgcacaataggtntgagtgctttattctatagaaatgattttaggcacgctaatgcacctaataaagatatgtaaagactctgtgtttattaatggatctngcaggaaccctggccaaagaattaagatagctaggacgtatagccttgatatagtcgct

SEQ ID NO: 12400 - DNA, 299 bp, Glycine max
ataataatatatccggcattaaaagtcatttttaacataaagattgctaaccataaaactattaatgctgttcgtaacattctacaactactcaataaccaaaatgacctttactatggaatactctttcatgtctgtaacctgaggattagcaatatgatgatacaactacatatgacacttgattgtattttgttctatctgacaaaacgatgtagtaatggagaacttatcttgtcaatcgatcaaatgtgtcattggtgacacttgattgcgtattatgcaacatactagaagat

SEQ ID NO: 12401 - DNA, 481 bp, Glycine max
  unsure (1)..(481): unsure at all n locations
tatgctgcactctccggatcttatactgcgctgcacttgtgctgtctaacctaccgtccatttgtgtatttgcggctgtaagggaaagttctgaggctaactgggatgaagaagttgaatatcctggaacatttggactgaaatattgtacattcaaattcaacaaggcagagaatgacattaactgagatgatactactataatcagttgcagtctattagcaaacaatctctaatgacaaaatatacaaatgcacttgacgtacgtaagtaatactttttatactgagatttgtgtgactcatcctacatatgcgacctgttattaatcagtgtctttgtgctcatcngatctgcacatccaatgagtgagttcgttatataactatatctgttagttactcctgtcagatacttcttcacangatcttgttctgataagatgtgtaaaatatctctttatattatgtgccaagacaat

SEQ ID NO: 12402 - DNA, 133 bp, Glycine max
  unsure (1)..(133): unsure at all n locations
ctctanaacctcaatcgttcacacgtgatatattccacttctcagatgaactttaacccaattaatgtggaccgcattataactaagaatggatanaacaattatntatgtnttcaatatagtgctacttaat

SEQ ID NO: 12403 - DNA, 676 bp, Glycine max
  unsure (1)..(676): unsure at all n locations
tatgatctttgtcgacgtcgtccgngatctctgagtcacctgcggcatgcagctactggagggctngcnncatgataataaaagtatgtgatagacatgcatatttaagatacgtgagagagttgactggtagcacatcacacgtgatggtngtgtagcttatgtgtgaactttgtgcaagaatttgtttggatattntggaatggataggtggacctttaggtcataattgttcgctagttcatgccggagaatagagactcacctatacacncaacattnttcanataaacttatagatgtagttcgtgtatcaaagaagaaatggantcactacatcaatcactaccagtgtagaatgacttgttcgtganagaaagacctttcaggataccgttagacattgggatgacccaccaatctcttatatgtntgatganaacaangattataatatgtgttattaattctgttgcatgtaagcaatacggctgatgacttaaagcacaatagtgagactatccatagtggtacctatctactggagcangaggtcttgtcnnatcatcgacaccantgaatatgactttatttgaatatcattatgcagttatatatttgtataggataatctctactttgagattctgaagcatgaaaggtaatctgcnaatag

SEQ ID NO: 12404 - DNA, 616 bp, Glycine max
  unsure (1)..(616): unsure at all n locations
tatgtagccacattnggcactatgatctcagcttcaagtttctgtttcaacctganactggcatgatcttgtcattccttctcctgtgccaagagaatatgcaaggactaaccgcttgaatactatttgtgtctctctcctcccttntncanaagaacgaaggactaaccgcctgaattcttttgtgtctnccttctcgcttgtcaaagaattcagaacgacacagcttgagaattctttngattcttccctctcccacatacataagatntcacaggactaaccgcctaagaattcttttgtatcctcattcacagagtgtcanagggttaaccgcctgagaactttgtcttaacacattggagggtacatcctttgtggacaagtaangggacatctactctggttgtgactgatacannaacgtacatctcttgtgatcagtctagtgatggtcatcactnggtgtcaagagacagganggtcatcctgtgatctgctgttaagatttcaggtgaaaaatcaggacccgtctgggctgagagcacgtgtgtacaataaacctgggtgcctctctacttattcgtggcctatcgttacttgtagtttatctatg

SEQ ID NO: 12405 - DNA, 122 bp, Glycine max
  unsure (1)..(122): unsure at all n locations
ctgagctcatgtactctcaagtagcccatatcctcgtntctctcaacaccgagtccccatcaatcctcccaagcttccncaacatccaagtaattcaacattcagacaacacaaactatcac

SEQ ID NO: 12406 - DNA, 228 bp, Glycine max
tcctctatactacttttgatcttagtctgatgcaacttaatgtgctcatccctcttctttctgcaaaagaaataaatgctgcaacatggataagtctaaatataatatcaaaaacatggtaatccattaaaccaagatcttcaagtcttggtattgcttgctcttatggggggttgtaataattatcttgcttcaaaaactatactaatcttttataatccatttgat

SEQ ID NO: 12407 - DNA, 620 bp, Glycine max
  unsure (1)..(620): unsure at all n locations
tttgatcactcgtaccgagatctctaagtcgacctgcggcatgcaagcttagaagtcgtattgattgctatattattatgacattcgaantcgaacaatactagtacaagctatactagattatgtgtgatggcgtatggtacattactggacagaaaataaatatacacttcataaacaaatgtattctatctatgtaaattncgtatgctatatctcttttagataaatgacagattgtaggtgaacgtcaacacaataaaaaaaaactgatataaagataacacatttatatgccttcattttccaagaagcanattntaaaggagactagatccaatagctagcgattgtttaagagagtttagatttcacacagatgattcactttttaacagactanttatcattgcacttaattgccttctctctttcntatattatctacctngatactgcttttgagaagtgaccactcaattgtaatttcaaatgtagacacacttatngggaattactctctattaaatggtgataatcgaaagagcgtcaacctatttcggaatcatactatatacttgcgtgcttagaattccaaggtcctaatnaagtgatcnatg

SEQ ID NO: 12408 - DNA, 57 bp, Glycine max
ctctatctttgtcgggaatccttactctgtctatctattctgatatctctgctgggt

SEQ ID NO: 12409 - DNA, 148 bp, Glycine max
cggatgatggactcataatgcagctgatgtgactacggccatctaccttattcaactaagaattatgattgtactgtagcattctgtatcacggaattaactgtgacctatttgtgttgtaatcacgctcgtacgttgagaacgtttg

SEQ ID NO: 12410 - DNA, 269 bp, Glycine max
  unsure (1)..(269): unsure at all n locations
gctatgatcgtatccgagagaagttatggatgtgtatagttatagatctgtaatctgganacttatggattcgtaatctacatgtaagcaaactaattattaaaataanattaatngttacnagaattattatgtaagattacatgtgtattatanaatttagtattatatatagcaacattaattattttataacataattgacctattaattcagttgggtagaacatcatgttaataatgcgaaagtactctcgaatctacaaaat

SEQ ID NO: 12411 - DNA, 77 bp, Glycine max
ttatctactgatgctggccattattcttgcgctcttaaacgcccttccattcaatcttctctatgggattatgacct

SEQ ID NO: 12412 - DNA, 428 bp, Glycine max
tatacttgcgcatcttagcacgcgctcactaactcgtgagtgcgtgtgcatcatacatcactgtcgatcacgacccgctaaaaactgccagacgactttcaaccaagaattgaagtggaacactctatttagattgacacatctaggtctatgctctctatctgatcctagattctatgacacaccaacgtcaatatatgatatcgcattatctgacaaccgagctatcctcaatgatataaactgaggcctctggcgaacgcacttgaatctctctactcgatgaagcccaacaacatttgaaacgcgtcctatgcataatacatctgaagattgctgaggctgtactgcggtcaatttctctcttttacaaacggtccgagctgcaaatggtaaaatgtgctcctgcgtacgaacatgcaactgtt

SEQ ID NO: 12413 - DNA, 681 bp, Glycine max
  unsure (1)..(681): unsure at all n locations
atatgtacattngtgacttgactctaagctgaaatataactgatgcatgtagangntggcataggacctantgatacttctctgacgactacataacgatanannaacactanggggaaaaaacccctcatgcacttagtaagtttgaagaaagagtcgtagatgctcgaaccanattctgtaatttatagtttgtgattgccgaanggaatattgacacgtcacctcatgannaatacttgatcatctttatagaagagtctcagatagaatgtcattaacactttnttaataaagtatcanggttggacgagtatttgacttcttntaataatcntctcttccatgctatatatgtatttgacctttttcactgntcatntaatctgntnttttttttgagaaaanaacgagaggaacatatttattctcttttattttacattatacaggggatatccgcacatgaaagtanatgggaagttantangtcacagaactanacatattgagnaaaattcttctacactcttatatattgatttacntttagagacacgtttatagattatctcagtataatcctctctattatataatagatcaagtacatctaacttatatttagtactctacatcttctataaagatctgagaagtaggcctaatcttatattctct

SEQ ID NO: 12414 - DNA, 309 bp, Glycine max
ccgatcttagcactgcgctgcactggacggctcctactattaactcttatgtgcctattaacttcttatgtgctctatgtaacattgtgttttgaaatctgcctatttgagttttattcctcaattattcacataaatgcaattttcttcatttagaaagcttaaactatggtaaaagtctttgattatagacaagcgtcaccagtgtaatattatattcggtggacattacattaacttaattgggatgaaaaagaatcaaaagatttttttaaactttctctaaatatagagaatctgcaagcctca

SEQ ID NO: 12415 - DNA, 178 bp, Glycine max
  unsure (1)..(178): unsure at all n locations
gagtttactctaaggcccataattgatgcctctcaaagctaagaacatgatacctgcaagctatcttggattacagccacatgtacaaatcngttattagttataccactacatatttgttctaagtcatcaatctcttactacagactaattaatgcnagttgttataatatgatac

SEQ ID NO: 12416 - DNA, 290 bp, Glycine max
  unsure (1)..(290): unsure at all n locations
actctactcccatcacctatcatacctctaggcactcactatagctaanaagaattctaccacattctagttctcttggttnggttcaagcttaccttntctatggttgtctagcttaacatcaactatggaanggttggtaactatttcttaactccactntgagttctactccttaaggtctctatggacttctcanagtcttacactagagtcacaaccatatagaatgggtggtctatctagtgggatccatcatgttcatagaagattaatttgatcatgttcat

SEQ ID NO: 12417 - DNA, 591 bp, Glycine max
  unsure (1)..(591): unsure at all n locations
gatactgtccggatcttagcacctgngctgcagctnntctctctctattantgcctagggctntcttgctctgcattctagaagggaaccaatggtaaccttattgttgctttgttctgggtcagttcagnttgaaacctatgccgagacagtatggaccatgatggggtccacctgctcatacactgaactagtggcaatnaacatacctgaagtggcaaagcccttctatgtggagtgactctcaacaagcaaagatactagatgaatctagttgcatctttaacacacaaaaacacctttgatgtctgttgtcctcaatggacatacgatataacggctgtaaacctttcatccaccttaaatctgtactgtanaacagaaaaaccccataatatatagcttggatagggtgtgaaagatgaaccttntggtctgatgaactgtgtactccgcacatgtgaccaacacatagcataagatctacattactgatatgcaatcattctgatgtgattggatgcngaacacacactcaggccttctgatctggagtctgtgtgaaaacttcagttctaattattctataat

SEQ ID NO: 12418 - DNA, 80 bp, Glycine max
tttattgaataactttcttgcaagcagttcaatgagatgactccaccgaaatcctctggaggaaatttattgatcaatgt

SEQ ID NO: 12419 - DNA, 541 bp, Glycine max
  unsure (1)..(541): unsure at all n locations
gtgacatagtgctcgtccggatcttaagtcaccgcggctgcagcttacttagagtgtcctgcgacatatctcgatactcctaatctcatgttatagagcacaactgtgaattagaatatgatattgcttacaatatgatctatgccatggaccacacccaagtaagaanatatagagatgtcccctactgatgtggacggatgcaacccactctcaacggatgtccaagaagcatcgatataatccgccaacacaacacagtgaagcttgatgagagcgacccaagctagtaaacactcatcgtgatccgcaaacaccaatcttcttgagaggtgggatacccatcctttgagaagaccaggagcaatctgaagatgcctcaataagaagatatcccatgccgatctctcactgaacacatgagataatcgtaagacagtgaggtagcggcataagaatccacatgtgcgcattgacactgatggtcccttcgcctcaaacataggcacacgtgagctcaagagctgttgtatactgaccg

SEQ ID NO: 12420 - DNA, 682 bp, Glycine max
  unsure (1)..(682): unsure at all n locations
ataagttgcgatccagtangtgcactcatgaatactcagctatacggatgaccactctggtntnntccgcncgtcaacgtgactcaatngtgagtatgacagatcatgtgagcgcggaagatgacgtatatctctgcgtgtgaacgggcttgtcngccacngtngacgaagggcgcagaagacgacgttagtctctgcgtgctgtcaagctntncgtcttacagacagcacanaagaatgtntatacggataaccactcgtgtatttccgtccgtcagcgtgactcatatgtgagtatgacagatcttgtgatcgcggaagatgacgtatatctgcgcgtgtcaacaggcatagtnagctgccattgacgaaatggngcacaaaacgacgtagtctctgcgtgctctganggctttctctctacacactacaaatataatgtgtatccgagtagcgtccggtatgtcactcatcaacgtgattatatgttttatgacggatcgtggagcgcngagaatacgatatctctcgtcgcacggcttgttgtgtaatacgacggtcanaaacacttatcttgctgctctgtttctctactacagaaaaagatgtatctgtatcactctgtttccgcgcaccgcataatgcagttcgactttgcgcgaagatcattctgtgactgtct

SEQ ID NO: 12421 - DNA, 515 bp, Glycine max
  unsure (1)..(515): unsure at all n locations
tgtggcctttgatcgctcgtaccgngatctcttagtcacctgcggcatgcngctntcttgnanagctctntgagaaaacttcttgagaagctagagcttagctacacacacncnctctcataactaagctcacctnctttgagaagctccttaagaagattcctaaagaagctagagcttatctacacatacctctctatagctagctcacctctgagatgaaactgactactccacccttatctactaccctgaaaactgaattaaaaagctttcaaacctaatgccaatacagtaaccttctataaggcaaacagctaaaagaaacttttatatacaatacggcctctaccatggtgaacacctatgtataacctaggcttctgatttaccactactgagcttacatgcctgggagatgtatctcactgaagatactaatcgagctatcttggtctctcaacgaaaacaacctgtatgtgtgtggaaagagcgacatttggcttcgagaagtn

SEQ ID NO: 12422 - DNA, 661 bp, Glycine max
  unsure (1)..(661): unsure at all n locations
tgtgtgccactatagtacacttganactcagctgaataagagtgtganggtganacttctgctnttatngtgaccacagagtggtacctgtagatatgtcgcggnggtcacgagaccttgnggacgtcacgtggagtgctattgcccaanaccaagcttgaccaatcccgaccccaacccggcatagtcggtcagtgagaacctgtgatgtacctaagcatgcgagctcctggcagtcaacagataatatggaaacaagaccacatagcaaggaggcttgtggtggctggccagactgtgaatttgtgtaatatgtggattgtggcctctggtaatcgaataccaacgggtgggtaatcgattacaaggcttannaatgaagacnggaagctatgatggtctctcggtaatcgantaccacggggtgtaaatcgataccangcttgaaacnatgtcangaagctatgaacctctggtatcgataccaggggtgtatcgatacangctanaaagaactggagtgatgaactctgtatcatacacctgtgatcataccagagatggtactgaatcatacancatggtactataccatgatattgtattatgtctgagctgtgataagttactctgatcatacaggctgtacatcctatgaccg

SEQ ID NO: 12423 - DNA, 715 bp, Glycine max
  unsure (1)..(715): unsure at all n locations
tatgtagccactattgtacactatgatactcagcttannattgaatanaacgtcagaaactgctggtaatcantaccatatatgtgtaatcattacacaatgcannatntgaattcnnatttaatagatgttgtanatcagttntggccattggtaattgattacatcctctggtaatcgattaccagagagtaaatntcttgtagaagactntntaacttanatntcttgaccannacctttgctacttcaatnggaattcccttcctatntaatataccctntctaagactctaaagactgtcttgatcatccatctngaatatctnntaattctntgtcttanataaagctttgagacgcatgtgatccttttggcatcatcaaacatcaagcttgttcttttgtctacatctcnncctcnttgatgatgacantcctganatcaagaacagctatatacangatgatagcacgttcacacaaccctttactcccnttatctntggcatgtatgcctaaacttacttantgatannattctaatngataatnganttctaacnccaagtctctctcaagtctcttcccctttggcacatcannaagactaagcacatantnatatccaacagagcatacataacccatataatcatcattgcataccacccantcnagtcagaatattatatagtcangattcgatactagt

SEQ ID NO: 12424 - DNA, 278 bp, Glycine max
tctctctctttctctcttcagtggtcttggttctgaccttgatctcagcttgtaatgactcatcttatctaactgattctttattcttgtctattcttatactgaactgcatttttactctaaggaattgaaaactgatttttatttcttcaattctgatcttagagaaggggcttcacttgacctgggtgtgtaactctgaatgtcttgaattgactgtgctgctactgggtgacattctgatttatgcaatgatcttctgtaacatatactaattc

SEQ ID NO: 12425 - DNA, 478 bp, Glycine max
  unsure (1)..(478): unsure at all n locations
gggaggaagtgaagaagatangggtcatccncatagacacttctctctcttcgaattgctaggaaaactgtntccgtgaagaaaatctacgccgangtgctttcgaaacgtttncgtaaggaatntcgngaaagttntcgacccgtcttcgacgatcttcatatcgtcttcatcgttcttcgatcttcaacgggtaagtacctctaaccaagctcgttgatcattctatgacccatggtggtcacattgtgttcgcgtattatattctcgtttattactttatcctctttgacggcttcattataatattctcctaacaaataataatccacacgtgatgatatcgtactcgtaatgatcaccgcgctccttccctgaataagagtatatttattaagtttttcaatacaaaacgcgttctggatttctacatcatacaagatagttacctcctcactgctaatgttattctcatcct

SEQ ID NO: 12426 - DNA, 109 bp, Glycine max
  unsure (1)..(109): unsure at all n locations
ctgatactggggacagatgtcgtacaggatgtcacgacatcacgcttcagaacatgccagatgtctttgactgtatgaacaaattaagcaagtanataacacaagagaa

SEQ ID NO: 12427 - DNA, 561 bp, Glycine max
  unsure (1)..(561): unsure at all n locations
atngcaccgataccatcgactggtgagcangtatatcagcggggtcaacacctgataactgtatttgtaaagacccaaaagaaggataaaagtangacttgcatatggaagaagaggtccatnnnttctttatcntccgtactggtctgatctagacgttagacattgtattgatgttatgcatgtggagaaaaatggttgtgacagtgtgaatgggacgcttcttaacattcaaggcaagacgaaggatgactngaatacccgttaagatctagcttatatggggatacgatcacagntgcatccaaggtctgatgggaagaaatatacttgccccaacttgcctactctgtccaaaaagagaagatagtnttgcaatgtctcgtctgtgacggttcacacgatctcctcaatatatagcctgtgtggtgatggagtatgatgttgggtaagtctacatgtacgtctctgcacantgtagcatgcttataactctgcaacaagcggtacatactcctgactttctctcttagacaagctgtctgcattatactgaatagn

SEQ ID NO: 12428 - DNA, 105 bp, Glycine max
  unsure (1)..(105): unsure at all n locations
gctgatcttgagcttcanatgggtccttcatggtgtatttaaccatggatatgcagcgaangatanaggagaatatgtgagaggaggtgccatctactatagaat

SEQ ID NO: 12429 - DNA, 188 bp, Glycine max
ctctaacctcataattttttcttacctctttcatgtgttctcattttctcatgatctctacatgtctgtctaatgttgtacatgattcttaagttcaccgataacttgcttgaagctaattgatttcatgcttcaattctgtcttgtctgaccatgatgtgtgagttaggtcgttgagtttgcttgta

SEQ ID NO: 12430 - DNA, 499 bp, Glycine max
  unsure (1)..(499): unsure at all n locations
tatactgtccgatcttaagcaccgtgctgcagctgtcttanatatgtgttgatatntgagttagatgctgactggatcatcattctatttctagttaagtattaatcatgtggttgcnngtaaatggttaccttacagttacattgtggtaaaaaagacatgactttatattatggtattaaggctattaaagtaagcatagggttggtatctactgaataagcttactgaaaatgcttgtgtaggacatattggagctgtgcttaaatattgatgaaatttgattaaatctgactggacatcattcttttctataatataatcagtgctgcgaaatgttactacttacttgtgtaaaaaaatacttattatgttttaggtattaataactaggtgtatactaaatgtactaaatgctggatacaatggactgcttaatttgtgatttattaagcacggacactttttgtattattagcggacgtactgtcttgtaaat

SEQ ID NO: 12431 - DNA, 437 bp, Glycine max
  unsure (1)..(437): unsure at all n locations
tatgcacattagagccttgatctaactngacatagaaatcataccaggtcatcangaacaggaagtngaagctggacctactggaggccttcgagtgacgactgccaatgaacttgactcccactaatgaagaaatcaaacatggatgcccatctaatttatntatgatgctcaacaggtgactttttctataattgtgtcaaataaaaaagttggtgaagttacangccccgggaggaggaactgctaatatgataaaaatcattcttactatattttggcatctagacattcaagtcgaaccagttctggattgcaccaagatggctgtattcaagtgaacaacactggagtgcatagaacctctgtattcagtatacagtgctgagtcactggatgctgtatcagttaccgtctgacttctagtccagcagact

SEQ ID NO: 12432 - DNA, 640 bp, Glycine max
  unsure (1)..(640): unsure at all n locations
atgtggtagccatcaagtgcgctatgantactcaagcttgantannagannaggggatttctacncantgtagagatntgaccttnntntgggtgtctaccatgatatggaccttattcagaagggcagacagcctgacgtgtattcttttttgcgaagaatacacaannacatgtgtaacatttactganntaagaaagctcatacgacatctggtgttcacanggttaagcatgagacacactgcactgcaggaccagtaattagaacttataactctgcatatatacacgtagatgtcaatcttgatcaatntcataactggctacggaatagtgattcttctttcataatcttagacatgcacatcattgttctcagctctcacacctctntatggcgatagtgtccttaaatgctacagtggacaacagatctatctatttgaccttagcagtgctgactgtgcagaactggacatcctgctcaatatagatggagcactatatacaaatgctatgatgtcgacgaccatttctctgctgcttactcctatagtaattatatcagttaattctaatatacctgccagacttgacaccaggtgtgtatgtgccttatctattaaggctataacaag

SEQ ID NO: 12433 - DNA, 126 bp, Glycine max
cgacttagtcacggctgcacttacataaggctactactcgatgcgtcagcctaattcaacctcaatgaatggacttgacatcatgctaacttatcgagtcatgagcatattttaacctaatgcacg

SEQ ID NO: 12434 - DNA, 522 bp, Glycine max
  unsure (1)..(522): unsure at all n locations
tatgcactcttgtaacttnanactcagcttcacaatntagtataccactacctaaataaatactatgctaaccaggaataacaacttatggctgatgtactgaattgtgggcaccaaagtacccccacagccacaagtcagcaccatttgtctccaaaggtatccaattgccatggccttataaacttgacaaagcctttagtgaaaccaaacatatttgcagcacttcangattggctattaacaacaacacttaatgaataagtgggcattagtctcattggcatgaacactacaacttggacttctctgaaactggctgatcaatatatgacgactgtgaaagctctgcttcttgcttacctgatagtctcagtcttaatgatctgcctgctttgcatgctatatacgacacacacatcaganaggttgcgtaactgtcaactcgtgaaatcacattattctcaaccatcgcatcataagttgcttattgtaacttgtctattacgctatctagtacat

SEQ ID NO: 12435 - DNA, 651 bp, Glycine max
  unsure (1)..(651): unsure at all n locations
atatgtacttagtaacttngatctcagctcactgcagctncatcgagtagtgcactcatgtcaacaaccttctcatggatgatggtgaaacatttgatgcacaacctgangggtttgaatggatggaagaaaaatatgtatgtanngtgacanggttatatatgggtngaaacaatctccaaggaagtggtaccagagattcgatgagttcattattactcatgggtacaacagaagtgcctatgattcatgtatctattatagtaanggtggggatgcgtntcgcatctangtgctactctatgtggatgacatgctcatagcatctcaagacaagtctganattcagaaattgaagtcactactttataatatattntacatagaagaaattgaagctaccaaatagatttttggcatggagatcangagagggtgattctagacgaagtgtttcttatgtatgaagaatacattataaagtgtgaatcgtttcggattgcatctcaaaccagntngactccttgatacgtcattctctactaactcatgccatcgtagatcaaaaggaccatgctatttctatgcatgttagatcatgttcatgtgcgcaatactaccacacactgtatagtatgtactgaagattct

SEQ ID NO: 12436 - DNA, 446 bp, Glycine max
atgctgtgcctccggacttagtacgcgctcgctgaagccgtggatctgaacaactgaactggagtgaagttctctagaacatgtgtgtgtttgaaattcatcccatcaggctgattttgttaaatgagtgtgtcacactggaatagaatgtctctgtgatataaagagctgctgtcagatgaattggatgtctgaccctagtcactagagtcacagaaataccttagagatctctatagatgtatctacaatatgaaactgatcttgagagcatgaagtaacaaaaagggtgggctgaagtaataatctactgtatccctttatttgattctaggtaatatgtgaggttgcaggggtgtgttataactttctcgggaagctcatgactgtagtgtctcttgttgagtacatatgaacttgcttgagtggaaaccaacctttgtatg

SEQ ID NO: 12437 - DNA, 219 bp, Glycine max
  unsure (1)..(219): unsure at all n locations
aactgtctctgcgctnggcggccacgctcaacanagtactttcgacacctactgtacgtngattngaccaatggctgtatgggaatgtngcgacaatccttcanataccttgtgatacattctgagagggtggttgtcatgtggccatatcgacgtccttctctatataagccatcgccattttcctttgaatgcatcaatccatgtgtatggtggctc

SEQ ID NO: 12438 - DNA, 141 bp, Glycine max
  unsure (1)..(141): unsure at all n locations
tatgctctcttatcaatatatgcacacatccgagcccatntaggcattcngaaaaattntcacggcattcacccttcagatgtacacatattntntctttcttttttttgaaaccttgtttaaagaaaaataggagtcact

SEQ ID NO: 12439 - DNA, 211 bp, Glycine max
  unsure (1)..(211): unsure at all n locations
gaagagaatgccatgtatcactgtatataccagacagtcagtgagagtaggaaattgttccttgtattatacgtagatcatantttgcttgcgactaatgataagggtatgctatatgaggtgaatcaatttctctcanagaaccttgatatgaaggatatgggagaggcatcttatgtcatangcataaagatccatagagaaagatctc

SEQ ID NO: 12440 - DNA, 515 bp, Glycine max
  unsure (1)..(515): unsure at all n locations
tgtgacttgtcactcgtccggatcttgagcacctgggctgcagctatcgcatcgatacatgggtctttntagactggtngattnttcaggagtctctacttcaatcgantactagtagatataatcaattacttctctctaaaagtgtttagaatgacaagacacttaatgattcatcagatctattaatacattgttcttgaagtttcatgtttgggaaaacacttaatcgatgaatgatatataatgatacttttgaatatcatgctcgatttaatcatacagggtataatgttctcttaatagcacctggtctacttaacactttgagaataatacagcgttataaagaaaagagaaagtctaacatgactcactctatttgtataaacattggaaaggatggatttctgattagggcccttatcaccagctgcttgtgaagttgctttattcttttggtacctgagtggtgatcgagcgctaagttttgctttaagccagtgtctatttct

SEQ ID NO: 12441 - DNA, 206 bp, Glycine max
  unsure (1)..(206): unsure at all n locations
cttctaaaacttctgaagttcttgaaaactnctgaaattaagttatctcaccaccattaaaactaactacctcttgaaacttctgaaagctaagctactacccancatctaaactactcactcttgaaagcttttgaaactagactatctaccaccctatatactaactaccccatgaanaaaactgaaatacaaaaatctactca

SEQ ID NO: 12442 - DNA, 680 bp, Glycine max
  unsure (1)..(680): unsure at all n locations
atgtgatgcgcacgattanagtgcactatagantactcangcctctatctntntctggatcanaggggtgtanatanncctgatggcccctagtcatgtactatatgcagcanataatgtgttcctcaacaagcacctaacaagggggtaanactacagctatactcanacaatatcaagatgagctgaaatnttgtgaagaacacnctataatcatgataagatagaatcagaaatttcaaacacaaattcagagtctaattatgagaactacctacgagaaagttataantaataagacaacagttcttatagaatanaatataaacttagtacacgactgatttttggatgttgtgagaccacaaccaacttcctcatggtggcaaagtntggaagatttttcctaccccaagcgcttataataatagtacgtctgatacctgaacaaaagtatagccgcttaagtctagcaaaataagtctcaagttttaaattctacatcagcacaccagtgtcctggatttcacacatatatgagtatagacctctcacatagtcagcataatactacctactatcaacagatcgccattaatgaacagcgtcgtattagcctatgtatgtggtatagacacaaataattattcgtgtacacatcaagtcgaactacttcgagg

SEQ ID NO: 12443 - DNA, 94 bp, Glycine max
atagattgatgttatctcacactgctatatgtacattgtcatcaccaattgatcacttattgtctttatgaagtgtagacctaagtggaactaa

SEQ ID NO: 12444 - DNA, 688 bp, Glycine max
  unsure (1)..(688): unsure at all n locations
atgtgctccccttgngatgatgtgcnacctattangtacactatgaatactcagctttccgactgcgatangggttagacacatgttggacatgtctcacctncttcancatgagcttatgcnctatgtnggtcatanaagtgatgtcaccaatgcctactagttntcttgtgacacnaattcccattnttaccgtaccanagtcacccatttngatatggtgagataaatccctcatgtgggctaacgtggaaagatgcacccgagtcaacaatccatgaacaatcatcacatgcatcattaagatagntgtcttctccaatgaggaatacatcatcatctatatctgctgcaatgaccatagtgctcttatcctcctctntcttagaatcaatatggtctggcttaacaatgccgatntnttgtctctcttagaatgcacacatcaaatccttgtgaccctgcttgccacatagtatcaggtaatcctagaagagagagattagatcatctcangatacgacttctacctgcacttctgtggatctacttctatgcggttctacatgtagctatatggacacatacctcgtctctctactgtcatcacagcttcacacggatcatgtgagctctctgggctgatactcatactatacgtgacactctttgacgactatgagtaaag

SEQ ID NO: 12445 - DNA, 180 bp, Glycine max
tacttctgtctaccgcagcttgacaccgtcttcttccggatgctttcttatttgctgatggctatgctaacatctccacattcttggatataactatagcgcgtgcttgccaaccatccggtcgaacgtccacatactggcctatatgtgatcggcagcagtacccaaagatcacgagaa

SEQ ID NO: 12446 - DNA, 441 bp, Glycine max
  unsure (1)..(441): unsure at all n locations
atgccctgacttatctgctaacgcactgtcagatggcacatcagtgagtggtttttgtgttattaactctacatgttgaggctctccaatagtttgctctccttatacttaggcctatctgcaatttgacttactgcttagatgatgttaacaacctatactgtctacaaaatgcaactctggccacattgctaatcagagtgaggtctgtgtgtgcaacatggacaatatctgactgaatatcancaagaggtcttgtgctttcatgngctactcgcaaaaatgcatcatgtacgtcgtgcatntctctgtcggatagaatgtattgtaactgatatatctgagttagcgctgtgtcacggaagtaaagtaatgagatgtgtatactctacaatttatcgggattgaaacagactgggtactcagacaaagtctctgtgg

SEQ ID NO: 12447 - DNA, 513 bp, Glycine max
  unsure (1)..(513): unsure at all n locations
tatgtacatagtagctgctctcgctggctcatcctgtaggatgcatatgtctaaactgactgatcatntcttcaatgttctgccttgcngtgacacccgccaacatctgaagaattcatattgctgctcaccatgaaaccccatatgtccagaggacacatatttttaaggctttcctattcttagaggagggcaaggactgctatataccttgctcangtcatcacagctggatgactcagagagatcttagaaatatttcctacttcangccacgcctcagaaggattntatgatatacactcatggaaagcttataatctggaagataanaatattccagttcctccacaactcttgttatctatttcacacaccaacttgctctgcacattaacatgacactgactatcgcacttcaaactctactaccaatccccaatattacttccacgcatcgtggattcactatgcatctcaccctaccacactttatttgcacactctccctct

SEQ ID NO: 12448 - DNA, 183 bp, Glycine max
gctctaaagaaaatagtacgtagggtggttggttgcatttcattcctgtcttatttctgacatgtttctttcaatatagatctgaactgttgctgctctgttcatttagaataaacctgaatttattatgctctgttttgatttaattgtaaatactcatgctctattcttatcaaatgagta

SEQ ID NO: 12449 - DNA, 192 bp, Glycine max
  unsure (1)..(192): unsure at all n locations
tcttcattacctagaatatntacatgtacttncaaggtgtatttgttatttacatcacacacgcctncttggctaaatntacatacatgcatactcanagcatttcggggtaccaaanatngcacatgcgctcatcttggtatttctaatacctatacatatacaaacttcatgatgaatcttgactaccta

SEQ ID NO: 12450 - DNA, 566 bp, Glycine max
  unsure (1)..(566): unsure at all n locations
tatgaccttgccgcgatcttgagcactgcngctgcagcctctctctgattctctctctcananaantcacncattgtgcatctgtgcttcccttttgtatnntctacttccaagcaataaccattcaccatccaagaagttccttggttntttattctctnttacttgtctaaactntanggtagaagacttcacttgtagttntagattnttagggttttaatgctctgttagaattagtttaagaatacgactatatatatgtgtatactgatngacatgtgccacttgctgttgattcctttagagctgaaaggcagaacgactacttttgatttctgatacgcatgactcactaacagatgtgcctagcagtcattttgagatgacctctctctctatggctgtgctacagctatcctaccagtactatcaattttgtgtaccggcctagccacttctgactaccattgtgcgcaacatctagtattctactgtgtgcgtaccacctgagctactaatctgcggagtcgtatggctgcatacaattcagtggttgatcctct

SEQ ID NO: 12451 - DNA, 653 bp, Glycine max
  unsure (1)..(653): unsure at all n locations
atatttacattngtagccttgatactcaagctggataggaagtgtgagggtganacttctgtnnttattcgtgatcacagagatggtacctgagaatatgtcgcggggtcaggagacctttgggacgtcatgtggtgtgctattgcccanaaccaagcttgaccaatcccgacccaacccgagcatagtcagtcagtgagaacctgtgatgtacctaagcaggcgagctcttggcagtcaacagattaaaggaacagagaccacanagtanggagtcttgtggtggctggccagctgtgaactntgattgatatgtgngttatggcccctctgtaatcgataccaacggtgggtaatcgattacaaggcttananatgaagacagaagctanaatgtctctggtatcgataccacaggtgaatcgataccaggctgaaacaggtcngaactatanggctctggtattataccaggggtgtatcgataccngctataatgaagtacaggtgtgaggccttgtatcatacanctgtgatcatacacaagatggcactgttatcatcccgttgtgatcataccatgcttgtcagttatgcctaactggtgatcagttgcctgtatcatacatgcggaacatacaggtgaagcttcg

SEQ ID NO: 12452 - DNA, 185 bp, Glycine max
  unsure (1)..(185): unsure at all n locations
gtgtcgtccttctttttaacaagcaacactagtgaagagtanggactatggctgggtcanatggggtngctntgtagcatatcctcaacttgcctcttgatttcgtgcttctagaaatatggatacctatatggtctgacattcataggtngnngagtcangacaagatgaatagtgtgatcagt

SEQ ID NO: 12453 - DNA, 87 bp, Glycine max
actcacacatcatatacccttatctaggatttgggcaatatacatttgcccacaacaccgattagctttcaaccaaccttcacactc

SEQ ID NO: 12454 - DNA, 199 bp, Glycine max
tgtaggagcttcactctcctcatacaaagcagtatctaattgatgaacttataagaatagaagcaatgaaattacacttatagttataattatatgattataaaataataaaactctgagtttatgttaatatcatagaataagtacaatgtctgaagcaattatctattttatctacaatacgatattattatcactt

SEQ ID NO: 12455 - DNA, 629 bp, Glycine max
  unsure (1)..(629): unsure at all n locations
cgtgttgccactatagcgacctatgatctcagctntnctctatagctctgtaggggtccaagcatagagagaagagaagagatggagccttcatttattgtcaacgtgtgagacannattctccctgcaataatattatttcacanattccaaccgtgagaatgtctgaaatggattcannagtggtgccatagtgcacgatgatccagcggtgaataaaagccatactctntngaaagaaggactntttctttataaaaggtccaccgacanaacacanaggttntgaaaaaaaaagagaaaaaatgttgtcacctgaaggggaatggtcgtaaatttttcgaagcctaatggctcgaatgtatgcataatgataaaaaccttgtttggaccactgggtgatttnaataggaatgaatctagcctagtgtaatgaccctactngaacttgatgtccatggtgatgctgatagtttgctaattctaatatcgtgtattgctgcatgaatatatgggcattctttatccctgatgtgacanacaagacctgactatgatgctncttctgtagactcttggcaaactcatcgttgcctagctgacanggngatntacctatctcaaagaag

SEQ ID NO: 12456 - DNA, 440 bp, Glycine max
  unsure (1)..(440): unsure at all n locations
gctagatgctagctactcacacncatctatnaactaagctcacctgctagagaagcttccttgagaagctagagcttagcaacacacacccatctaaatagtaagctcacctgcgtgacaaatacatgaaatacagagaaaagtcctctacaagatactcctaatgccctgaatcaagctaaacccttctctaaatggcgatcaggccaacaagaagacctattatattacaacaaagtgatcacctgacctggctaaattactacgtataaccctggctctttacctaccaccttgagttttcatacctgggagatgtatcctctgtgaagttactcatctagtcttacttgtctctacctgaaataaattatacggtgtttaaaggagtaatctctgcttctggatgtcccacagaggtcataaaagaactcgattac

SEQ ID NO: 12457 - DNA, 701 bp, Glycine max
  unsure (1)..(701): unsure at all n locations
atatgatagcgatcattangtacactatnantactcangctnngttaacagtgaactgatagatatgatattcagtggttngattctgtatganattagctgttgtgaatgactngaatgagcacatgtatgaattgagtggattagaagagaaagaacatgtgattagaagtatggctgacaatgcttattcagttgtcagattgattgtgaangaatgcattgaccatatcccagtgatagtgatccttgaattntgagagaaacaactataatttagtatcgattnttgcatgaatctctgaagtatggactgaatgcatganattgaggatgatgaacgccatgtntgattgtgatagccacttagccaanaagctgaccacgtgctttgatgattattccnttggcccaactttgaactgaatggatgatggatngaaccctgagcttatacagntgtatcttcagctacgttatctcanngtgangagagcatcatccacaataaactcggttcacacagattgtccantattgnnggagtatatgtaagcaaattgtcccatttanggggacactttgtaacaataaatggtcatactagacagtataccctatttatgttactanaacacttgtgttcactagatgttacatgtggngctgatcaacatgaactaggctaaagagacgctgtg

SEQ ID NO: 12458 - DNA, 590 bp, Glycine max
  unsure (1)..(590): unsure at all n locations
ctgtgacattgtcactcgtcgcngatctctgagtcacctgcagcatgcangctcgcctcatagaagtccaggaaggacacggcngcagaatgaactagttccgctccggagtatgatagtcaccgctttatgagcgcggtacaccagcagcgcttcgaaccatcaagtgtggtcgttctcgggacgaccgtcactcaggacacagatactgattcagagaataggcgccggggtggcccactgttactccatgccaagttgatcaaaataatcttgattttgccatgctggcaacaagaggcggcggactgaacctggttagggcatgatccgtctatccgacctataaccactcctggatatccattgttttggagaggggcagatgctacttggctaaggaggaaccgctgatggttnatatgaagcctctccactgtatgttaccgggcngatttgcccgctgntcnggagcgaggcaatatgccacaattacacctgctcatttgtgatttgtgttaaactcctgcacacatattcactcctgcgatgcagtgtgcgctccgctgtagatctttgtcatatatacg

SEQ ID NO: 12459 - DNA, 152 bp, Glycine max
  unsure (1)..(152): unsure at all n locations
tacatcannagtgtaanatcagcacacatgtaggttangaaatgagaaaacactatanagaacacaacctgntagttgccatactccacaagtgcatgtccattcacctannatgacctcaaccttanttccccacatgtggacctcatatc

SEQ ID NO: 12460 - DNA, 670 bp, Glycine max
  unsure (1)..(670): unsure at all n locations
attgacttgacacatcttcggatcttaagcgccgcggctgcagctgagacatgcaactccttcaaatctgattcagcttaataggtggcttgttcgtgttgcacgcttagcgcaactctaaaccgcttagcgtgcattagtgaaattcagcttagcacatgctctcctcgctcaacggatgggctgaagcggtgcgcttcgctggatgacncttcgcatagcgcaatttcacaactcatccttcttccagattcttcctcgcgcttagtcaaggagtggttcgctcaacggatggctcgctaagccacaagatnggcttagcaagagggtgaaaaatcaacacttacanacttgcctaantatacctgatattgagagaagatgattattanacacacannatggacatactaagtatttattacctatnncttacaaagagtaattataacactacacaataaccctanagtggagggagttgatacactnacacangtnntatcacanaagtactgattgatgataaagntaagcaaatgcctcatacttgctntcacaacatgcagtatcaagagagatanatgtacctgtcattgatgagtggctanacaaatcaggaagagctaacacagctacggtctgtcctccgccatgttacattatctag

SEQ ID NO: 12461 - DNA, 720 bp, Glycine max
  unsure (1)..(720): unsure at all n locations
atgtgtagcatcagtacgtgcactatagatactcangctntaatntcantgcnaggaaagcatgactatgcctangaatctanatnntggttttgaaatgtataaggcatgactattatgacactgttgagaggttnntattanaatntanattcngctgcctcatgaggaataccttgcacctatgtagcatggaaaatacctttcaacggtatgtatatatgtgaacatatatggcatannaatacgtcgcacagtgtgtcgaatatatggcataaaatacctcgcaaagtgtgaatgaatagcanataatgcatctcaaaaatctgtatgtgtaggataggtagcgtanaaatgcctntcataatatgtatatntgtcgataggtagcataatgcngccttcatanaaantgaccccctgcatatattgaacanggatgctttccaatgntatatgatgtggatngcccctcacgtgatatagatgcatgaaaagtcttttcanatgcaagtgtgccatgacgtgagntggctctcccatgtcatatatgtataataatatgaataaactcnnaatttgatgtaatacatactcaactggtgtaggtagttggggacaaatatgacatatgaatntnacncatacctnancatcngttcgcatctttcaaaaaatatattggtggaactgatgttanatntcgatgngattataagn

SEQ ID NO: 12462 - DNA, 68 bp, Glycine max
atacatcactggcgcgttacacgcggactggaaacctgcgtaccacttatcgcttgacacatcccttc

SEQ ID NO: 12463 - DNA, 575 bp, Glycine max
  unsure (1)..(575): unsure at all n locations
tgtgccccttatagnnctgnnnnannnnattgttgactctgtccgagatctctgagtcacctgcggctgccagcttgatgcacattgagaggtaatganacaacgagatgatgcgctccatgaganggtggatcanatggagaatagagatcataatgaagaagaaaggaggagaagagggataatggtgtcctagacaaaccgaatgatggataaactcacatcctcattaaggaagaatgaccgagcctactggatggagataaatanacatgtttctatgcacactataagagaccaaagtgaagctgccgccgagttttcactatgcttggtggggacagctcaaaagaagacagaatgagagccatgttgtcatgacnggataaangacatgagaacgttgtccgctgtactanggactgagtcaactcaacctacccangacatgggtgagagtttacgaatgattctctgatcacaaatgaagatgagagacttactattctatgttgctatattcggattgtactgagagtgtgaatgtattgtccancatcagtacacataaagat

SEQ ID NO: 12464 - DNA, 203 bp, Glycine max
  unsure (1)..(203): unsure at all n locations
tcttcttcatcatcctcattgtcaactccaccagcatcttccccacgggattcactcctatactcagcatcattctcctncacatcatctgctgttccattcacctnnctcactcaaggccatattgtggcaaaggtctccgtggtatcaccaccataaccgcgccttgctccacacctttcagagactgagaccaataatga

SEQ ID NO: 12465 - DNA, 369 bp, Glycine max
  unsure (1)..(369): unsure at all n locations
ttacgtcggatcttagcacggctgcactttgtaccaaactaaatttgaatgcttccctacgccctcgagcacctatctgcctgatggtacagctgactcctactattactaacattttttttgctgccacgctacttgctacgtatatgcgtgatagctacaatgtctaccatcgctaacagccctacaccttgtacctgtaacgttctactaaagcttctacattgcaaatttctatgtacatattttatagccacactatctacccctgttattagcgctataaaagacattttagtttgcaagtaaagaaacttcgctcactataggtctnaacgatatccaccacgcctcaaagcctttcatgag

SEQ ID NO: 12466 - DNA, 227 bp, Glycine max
  unsure (1)..(227): unsure at all n locations
tcgatgtataatctatgcgatctatcacccatggcattatggagtnntgattatttatgcatgaatatagatgggaaaaaatattctgtgcatatatatganatcanatgcataatattatgtntcaattatgacattatatatgaaaaatntattcatcattggattatatctngatcttgaaatgcataatatganttattctcatatgaataagttntatgtct

SEQ ID NO: 12467 - DNA, 56 bp, Glycine max
cgctctctagcatctctctgctcattatagtggcttctttggtcacatctggatgt

SEQ ID NO: 12468 - DNA, 599 bp, Glycine max
  unsure (1)..(599): unsure at all n locations
tgatgtgctttgtacttgatctagcttaccgtagcttatccaatctctctaactggaggccatagatcaacaccaattggactattcttgtgcccactatgtgtctatgggtctatctgaaaagatctgtacgaacgcactctaatagcctttaggttataccgaggcccaaactaatactaatgtaatnccttgagggtggggtagtaagggaatagctgagtctgctagtagtagtggtggtgtgagcatttctgtataaaggaagtgtggatgattgagatatatctttggatctataatagaatgagagtgagagactttctacttgaggagcactactctatgaatttcattactttcttgccttcaatgcaccaccattctgcggaccttgatctactcaatcatgtgcttcattggagtgccctttctgatgtcactngatgacatcacattcatgcctgagctgactgcgcataactgtcatccatgatcttattaccaatctcagccgattctactctcatatgactctcagctgctcactttgtataatcgacatttgtcttcactcggggacgtcactaccccgcacg

SEQ ID NO: 12469 - DNA, 177 bp, Glycine max
  unsure (1)..(177): unsure at all n locations
ctgcagctagatatggctataactactgtccgaggaatcttaatnacctccatcttaatggagtggtatactactggaaacccgctgcaatcttatagaggcaatagattatatattgggaagcctagacaacgacctatgtccctctatatagccggagtgcaacaatagaaaacc

SEQ ID NO: 12470 - DNA, 218 bp, Glycine max
  unsure (1)..(218): unsure at all n locations
atatgagaattttccanaagagagatcaccatattacatntattngtacttgatacatgtntattatataccctaatgaacttgtgaccatatggtagtcaaattcgagatgctaatgactcagaaaggggtcacacnattgtaatacgagcaatcgtaactcgataccaacatctataanaataatatatatgcatatactcattatgtatgaatcg

SEQ ID NO: 12471 - DNA, 572 bp, Glycine max
  unsure (1)..(572): unsure at all n locations
gtgaccttgagcgatcttaagcacctgggctgcagctancananntgatatagatttgtagacanantcatatgatagaaatagatnttgcaatacaaaaataagttttcaaaaattaaatanattcacaccctaagccaatctaatacagaagataaccaaaagaatattgacacaagattatattggtttgccctaccactaaatacattcattcttagtaacctgatcaatctacccncagggcattggtatagactcataagatgagccaaataaggagaagcctaggtctatgagcctaggagatatggctctagctaaaatagtcactatcttgactatagatngttactctttggcctgatttgcattatgttgacaataaggccctacctcaagtagggacctatactaggttagctgattcgggcattagagcttgtgaagatttttgattcatgatctgggcggggggggcncncanacttgtcaccttcatactcctttttatcttgattntctcatcctcatccaatctacttcttatcactatcttctatatcatatcc

SEQ ID NO: 12472 - DNA, 680 bp, Glycine max
  unsure (1)..(680): unsure at all n locations
atatggtagctttangtacactatgactactcangcctctnnacttatacangaatgaagctctgataccactngttcgacaagtggcctcagatatcttaagaaaggngggggttgaataagatattacananntatttcccccaataaaattctatntaacattctattcaagttatanattcccttaataatgaatntcttanatgtngattcanatagaacaatntgaatatgaatataaaacaataataaataaagggagttaagggaagagaaagtgcanactcagaattatacctggttcggcacacccttgtgcctacgtncagtccccaagcaacccgcttgagagttcactatcttgtaantccttttacanngtctaacacacangggacaccttnctttngggtaacnantctttcacacaagagacccctcgtctcttaatccttttcagatanagaagagaaaagaagaatctctcttgaagagatagatngaacaatntgacactcaatntccctattgatcacaagtattggccaggaattgtagggataaacgatntgttatagagatagacctttgtcaaaacttntcaatctgctaagactatttggcttgtgcatcagacacacaagagactgtgatattctaactcttagacatcagtg

SEQ ID NO: 12473 - DNA, 635 bp, Glycine max
  unsure (1)..(635): unsure at all n locations
atatgacttgtctgcatctcacaggcactgaagctgcacgctgatngatatgggacacatcacatgtggcactanggtggcggtctggcgatggtgcacaacaagtnnttcacatncacgatgcgcgcatgaactcaccatcgcctggggcgcacctncgactgagctcacgtactcccacgtagtccatatactcgtttgtctcaacacgcgcgccncatcaatgctctcatgcnttcacaacattcaagcataacaacattcatgcagcacaagctatcacatgcaagcagaacagagcatatgcagaatactctgctanacaccaaccagaatacagcttgtgtacttatagacccagtacaantccttcgatcaattgcgtaccgtggatcaactcaanatntactggaagctatagtgatnagctacattgtgaccgtggatctgtagcaacatacgaactattctgactaggtttcacaccacacaactagatntctaccttgtgaaacatgctgcaatacagaacactgcaagtggatttgaatcaactctcaatcatctgcaatcatctcaatcaatatgtaaatgtagcaagagctaagcaaccaattaggcaacctctcatgttg

SEQ ID NO: 12474 - DNA, 75 bp, Glycine max
gctctatattggctagcttagagtttctttgtaggcttggttttgtttgattatatcaggacttttattgtctac

SEQ ID NO: 12475 - DNA, 504 bp, Glycine max
  unsure (1)..(504): unsure at all n locations
atgctgtgcctccggtcttaagcacgagctcagcttacaggactcantatgcctctcccttgctattctggggtgatggctcgtcaaatcctgcatatgatggcttcatcttatcttcatagaatatntctccgtagctgacatgttcatctaatacattcctcatctgatacacagatatagctccctcgaccagcgagctctatccacttgtggaacacgacctatttccttctgagactcanataggccttagcgaacganagaaacangataagagtgataatgcccccgattttatcgtgaaaaccttcatgtagagtaaacccagaccgctataattctcctataagtgagtacatgcttctattaaagattcttcactattacggatgatacatcttacttacatgtggaacaactttttacatcttgttgtctttgatgagaaggattcattccagcctattagaaggtgtcttaagagggtcaaatatctcatac

SEQ ID NO: 12476 - DNA, 624 bp, Glycine max
  unsure (1)..(624): unsure at all n locations
atgtgttcgcagcattngtgcactatgatactcagcttatcagagtggccattctacagagaggggtgaagcnanantnntagattctcacttatatgattgctcaagttggtcttgtttggaatgcttcaacttgttcaaggtggctcttcaaaaaacctgatanagctcataagaagatgtngaagtgngttccactcaactgacangcttctagagcaagtagttagatttgatagttatcatgaagtgacagctcgcagaaccattctgagatagtccataagaggttctcattntaaggaacctntctgatgagcattatgaagtatcaacanaataaccattntgatggttgtaagaaacatcctacatgatagattntgtgatgaagatcaactantattcattttgagtacacacctcatanacttacacttcttacactctagcatttgaaggactgctctaatatagtaaggtcaatgtgtggtatgtttgcatgcaactggagatctagctctattgtgtctatgcaatcacttacaattatcttatcgtgctcctttatgcctatggctgactgtgagaatgtcacataagatggtgctgtcgctgaattct

SEQ ID NO: 12477 - DNA, 653 bp, Glycine max
  unsure (1)..(653): unsure at all n locations
tgatgtctttggtcacctcgtcgcgngatctcatagtcacctgcttgcatgcagctgctganaatatgacaacttatgcattcataaaatgtgtntgaaattttatgctngtgtgtgcgcatactatccacagtttactttgaagttntacacatagcntgctaatttaacatgatagattaatatcgtgcacgagntatcttggttaatgttatcngacaactgagatctgataaatactggtctattacgtacatgaagaatgtgaattgacanatatacattactttaatagtcagcactcttccaagtctaagttcatgtcgtatatatgattgagtatcatgttgacatacagtaaacttaactttgcactgaccaaaacattatgcaatgacctccctatggaacataatttcacctaattaagcttaatataaattactatatgcacagaggttaatttattagataacatatcgtaacaagaaatcatcaatacatggtgctttacatagagcttaataaataaatattcattccatcttccaaaacaacttatgttcacatgattatcttgcgacaacacaacaccttaatatgtcatgctcaactactatagaaaatggtgcaacattatatcagtcgtgtcg

SEQ ID NO: 12478 - DNA, 688 bp, Glycine max
  unsure (1)..(688): unsure at all n locations
ntgatgtgcgcaccattangtacactatcantactcagcctcgtagttgatggctggaatctngctatgannatctgagtagatgctctngcatncacanactcttggtctnngtgtgatctgcatgaaggtaagcaaccaattggttgcanatgggtntacaagatcaagcatcatgctgatggatccattgaacgatacaangggcccgttggtggcataaggatacactcaactagagggtgtggattattttgacactntntcaccacttgctaagcttaccacaattcgcacccttctatctgtggctggtattaaggactagcacttataacaacttgacatcaacaatgcttttcttcacnngtgatctgatgaagaagtatatatggatctgccttctggttcttgcanctggttcttcttctataaattctgcacttacataatccttatatgactgaacaggctccagacagtggtctccaagtatccactgctctatctccattgatactcacatcatctgctgacattctttgtcacaaactacataatctcatttcactgtctctagttatgtgacaatatgcttgcacgtatgattgccgaatacatctgcaacaatcttgatccatcaaataaaacctgcagctaatctcttgttgactcgaactacacgctg

SEQ ID NO: 12479 - DNA, 113 bp, Glycine max
tgcatggcttgaccccacgtaatgattttgttagtacccatgtaaatgtggttcaagggtaatcctggctagactctcatactgaacttgtgttgacctgcttgccttcactt

SEQ ID NO: 12480 - DNA, 618 bp, Glycine max
  unsure (1)..(618): unsure at all n locations
tgatgttgcgcagcattanngtgcactatagantactcaagctantngnantcnancangatgatanantatcctcacattatatantanatanatcatgagtcatcataacatanatcatttggtctagtcacttgcatctagagtcctaatttcttcaatggtgagaaagaatcttggtagtggtttgtgaagatgctgaagttggttttagtatctacaagttntaaaatacagtcaccttttctaaactaagtgtaattgctaccacacttccaagatatggtgtgtaacatagaggttctatatataaaataatttattaggaatcaatatataattttgacagcatancattnnttgatcatcaatcagtattcaacatattaacaggaatatccaggttgacggattgatccagcatatcaacatcagattgttaagatattaaacctagaagtcaaaactcatgatatgaacatatttcttgaactactgctatatttatatatgctgcaccttttcaaagatctatattgaatctaacaaaattactatgtttgaaaaactatatgactagcagatcctgctataatttcngactcaaattaactctcg

SEQ ID NO: 12481 - DNA, 476 bp, Glycine max
  unsure (1)..(476): unsure at all n locations
tgttgtcatcncagtgagcaccattagtgacttaanactcagcttctagtgatagggctcgaattcctatctctatctctagaccatcaagtgattgcctcaacatatgtgttcttatatctcataacaagtatgtcagcctcctgtctctagaccatctttgtagtctaagattgtactactgacttctcagatggacatcaactgaatgcatgctttgccttgcaacctattcttcggatatgtttatatcgaatatgttgatatgctatgatacggttcccgctagtcaagccaggcgcaggttgagtgttgtcactataaaacacggaagggcaagcttcttattctgactactcctagacatgctgtggctaatctagctacacactccaggacgtctattacacatgctggactctccatgtttctaaacttaggagtagttaatgacgagaaccatgaagaataaaaac

SEQ ID NO: 12482 - DNA, 660 bp, Glycine max
  unsure (1)..(660): unsure at all n locations
tgtgancnatgatgntcncatgananntgncngttgatcacctctacacgagatctctgagtcacctgcngcatgcagcttagagacctatcacattatatgaaaattnctgtgctacccatcngtattcaagtgttcgcactaccggaatattgccattcgcgcatcgtntcaccgttaccaattatttcactcacaatntcaatataatacatgaagactaatgagacgctgctatttacanttctcaacatcatctaaatatgtgtttcaactttactcatatgaatgagttaagaatgatgagaatgataattataaaccatcaaagtatatgtgataccacccagcaataatcaacactattactattgaacattcactgctataaatgctgcattctactatgccgaaatgacgactgttcctgttgaccngtataaatttaatgcggtagcaantttgaatataattacttaacaatacaggatataaaaccgattngaaccacctaccgacggtttcgtagacgcgagttaatttcttcaacaactactggctattatccacctactacgcacctcacctccataaaaaacctatattctcgcggataactcattgcatatgagacctgactcggcgtaactgactagacgn

SEQ ID NO: 12483 - DNA, 682 bp, Glycine max
  unsure (1)..(682): unsure at all n locations
acgttgttgcctctntatgttgtgcnactatttangtgacactatgantactcangctggtctcttcacactccancaactacancatcngcatcaccacataagtctcatcctntggtcagaactgttgatgggtcaccatattacatgaagccaacatgcagttcacatgcataanaggagctnnttctggtaagccaaaggaacactcatacctgttcttgatttaagaatcttnnctacgaaaattccagtgattccaaagctgcatggtgtaagaaaacctgcaanagcctcgacaagaacatctaaatagttgagtctggtgagaacattgaccaataccactagtctcaaagcttctagagctctgtctagaaaatccaccagggcttgtatgtgtgctgaccacacagaagtacattgtctttcactttgangaactcaaagttccctgataccttatgctagctctgnggaaactantcagaggacttcaccatgagggttgcctacacatatgtctctaatggcatcacatctgattgcaccgtgagagctctgtcgcagaagccctttgagagcgaactgtgagctgacttcacctcgaactganggtcctgaacacnaggagnttatgtgacgatgtttatcgaactcgtgatgaatgcatgtattattg

SEQ ID NO: 12484 - DNA, 472 bp, Glycine max
  unsure (1)..(472): unsure at all n locations
gtgcataagactganacnatgacctgtccggatcttagcacgagctgcactgctaacaaatatcaatcattcagttgttccttaatggggcgagtggaaagtcagcagctctgactatcactctgagcaatatatccggagtaactgtaagaactattgatgaaaattttattgactcgctgttcttcataaaagttgtccatatggcacatatgaggtttgctcacaaggacacatccccaagccaactatttgcaatatcactgataagaatattaacggggcttacatgaagtgatgaagaaatgccttcctcccaagcctgcatagattgcacccatggatagatgaccacacatggcttgagggaatgtggatattttgcccaccagttttggaaatcattaaatagatattattatgcttcctttataagccttaatgctataatagactgtataaattgaagatn

SEQ ID NO: 12485 - DNA, 561 bp, Glycine max
  unsure (1)..(561): unsure at all n locations
tatgacgtcacgatctaagtcacctgcngctgcagctgangngantgtgtgaactgntatatcctaagaaatatgtcttgatagtggaataccaaattcatgtatagtggctattaagtgtatggggaagtaccagtcctaatattaattgtgctctttnnatgtanatcaatctcgaaatgattattacatnaggggtacctgtngactgcttctaatttcatcatatattcttctcttcacaataaacttgatcttaaagggtctttgactttcaaaggtcatagacaagtcccttatctatcaaatcaatgaccagtcatgaacttttagtcaggctcacagattctcagacttcatntcatttgagataatccatttctgtgtgagatgatataaatctcagtgattacttactagtatgccataattattaacatggtctataacatatgttttagngctatnacattgcctgtagacaaatgatgaaaaaaaagattttgctataaaacaaatgaaaacttctcagtcctacagatttccaacacgactacaaaa

SEQ ID NO: 12486 - DNA, 58 bp, Glycine max
cctatggtctgatggtggagaaacacctgcccagtttattgatctggagtgaggtctg

SEQ ID NO: 12487 - DNA, 516 bp, Glycine max
  unsure (1)..(516): unsure at all n locations
tatactgtaccgcgatctaagtcactgtggctgcagcttgtcntttacaattttatgctngtacaccattangttatcttcacagtctatgctgctctaagtaaatgctacgtaggtgtgttgttgcatatcatttctgtnttatttctgaaactgtntcatttcaaatatacgatctgaaaatgttggttgactcttgttctattntagaatacacactgaaattatgaatatgactactgtttttgtatttaaattgcttaaatacatcattgcatctatttcatttatcaaatgaggttatgtttcactgaaacctgaaatgaaattatggttcattctgatgttctgtgcacccccgaacgtgcgaagtcaccaacctttgcaccttcatttatgagtgaacaaactcaccatgcacttttactttatgccgatacatcattctgtcatacatatatatcatctttgatgccactttagcgataggctgaaattcaccctcttcattcaacg

SEQ ID NO: 12488 - DNA, 542 bp, Glycine max
  unsure (1)..(542): unsure at all n locations
tgtgaccttgancagcgactcanagtcacctgaggctgcagctagtctggccagctcaggttggtcttccgattcaatctccctcgtcgntatacagacgtctctgggatggggatgggagccattctctcacagaatcatcacccctctcgccttgttcagcaagctctttggctcgaaactgctcagtgctttcacttatgttcgcgaactcgccgcgatcaccgtcgcgttaaagaatggaagcaacaccttctgtggcatattttagattttactgacatcgagtaaaagagtatggtaactggcaacccgacacaattattgggctctatggcttgaatacatcattcagcgaaagcatatacgcgtgttttagactcccccttcagcactttgtgtacatacattcttttgagactcccacctgtgtatcaatttctcacacacgtgcgtactctctgtggctgaaaaccgttgtaggccttgtcttaattatatcgattgcactatcactcgggcatggttaattctgtcccatt

SEQ ID NO: 12489 - DNA, 153 bp, Glycine max
  unsure (1)..(153): unsure at all n locations
ctagtcaaagatctctaagtctaaaataatagtatataaattctattagagcaactntgacctatcttacttcaacttcctcattgagaatagagaagataatatgacagccatatatacttacattgcacttataaccagcattgcttacat

SEQ ID NO: 12490 - DNA, 659 bp, Glycine max
  unsure (1)..(659): unsure at all n locations
gcttcctcttctcnnctcttcatctaagnatcgtaactatactttngtttttcgagtccagatggcgatgaggactcnnnnnnnttgtatactctgaccggatcttaagtcactgagctgcagctactctctggcctcaaatgtgtagagaaccgataanattccgcanaaccacaattacattgtctctctacatactgagactctctctctctctctctctctctctgtataacacaacactatgcacagcnnaatgctagaataattaatataatcacgcaacgaagcgcaccgagttcgagtcnttacactctgagtgtggaatacatactcaattaatcatacataacagagacagttattcacacacagctagacaagactgtgtgtatagatatatccattactaagaaacacattgtgactgaactaccaataatatattaatgttataaccctaatgctggaaagcacatgtaatatgtagtgacccattggtcatgacaaactagaaacaaagtatcgagataacatcacctaatatctaaaattagaagtgcataagaatcctacgctctagtttttctgaaaaaaagatacaacgcttactctggtgcttaatgcacaataggggaaacacttaagactccttgcag

SEQ ID NO: 12491 - DNA, 576 bp, Glycine max
  unsure (1)..(576): unsure at all n locations
tgaacactcgtatatgtngaagcaagctntcntggtgaccanatacagaaataattcatgtgggtntgatgataacanagatgatgacananagctcaagagaatgatttcaagaatgagtcaagaacaattcccaagagaatgatttcaagatggagtcaagaacaattcaagaatcaagaganattggatttcaagaatcaagaatcaagaataatcaagatcaagattcaagactcaagaatcaagaatcaagagaagactcaatcaagatangtattananaagtnttcanaacattgagtagcacatgaagtnntcacaaatctttaccanagagttntactctctggtatcgatactanttactgaatcgataccantgacaagttgtntcaaagcttcactgattacacgtccaatattcaatgtgatcgatcagaatgtatcatccatggttgacgtantaatcatggaagccatcttcaaatgcttggacatcatattgatcgtcaggtagtgataacaaatgacctcatgttagttctaggttccttatgtctgcgctaagataan

SEQ ID NO: 12492 - DNA, 306 bp, Glycine max
  unsure (1)..(306): unsure at all n locations
cggtcttacacggctgcactgtgtccatatgctttgaaattgtatatctgtatgtatggcctgacattcttgattatgagaactggctttaggaaaacacgtgctactccatggtacgcttccctacccttcctctacgctagaattgcgacatcactaactgcctacgaaatctgcctaggcacaggcttaccgctactcaatgcctaccattctcttcaccaggggtactactcntcagctttgctttgcaatgcctttctttcctttcgcggaagcttccgcttgaactacaaaactgctact

SEQ ID NO: 12493 - DNA, 709 bp, Glycine max
  unsure (1)..(709): unsure at all n locations
tgtgntctcatgcattngcacactatgantctcagcttgacacatccacnccacncgggcatagtcngtcagtgagaacctgtgatgtacctatacatgcgagctcctgncagtcaacagattaaagggaaacaagaccacanagcanggaggcttgtggtggctggccagctgtgaattttgtaatatgtggatggtggcctctggtaatcgattaccaanggtgggtaatcgattacaaggcttaanattganggcangaggctaagatggtctctgngtaatcgataccaaggggtgtaatcgattaccaggcttgaaaacgaagtcangaaacttanggagcctctggtaatcgatttaccagcctgtgtatcgatacacagaagaatgggcactgggtatcgattacaagcttgtgtaatcgatacacagtgtatatttgatatttcatgntctganggtgtgtaattcaaagttagcctctgggtaatcgattaccaaggtngtngtaatcgataccagagatgaaaagcctcangatacttctttctacgtcatgtagtgggtatgagatgcattgtgtgcncngtcgtagattcttgtaaagagtctacccttctcttcttcttgtgatcgtatgcngcgcactaatcgtatcagtnagatgagtgctgaggacgtggaacctcaggcacacagtgtattt

SEQ ID NO: 12494 - DNA, 525 bp, Glycine max
  unsure (1)..(525): unsure at all n locations
tgtggcttgacactcgtccgnatcttaagcacctgngctgcagctatgcataaatacatcagatgtagctactacaagactattcaggagctctaaatattttatgtccagctatatggagcctgtgtcctgacttcattgtgcatgtngagacccagaatggtgtttgaattnactaccatagatatacatatctgttaagtgtcatctatctaatattgaaccaatatatgtccttcaactatctcaatccacaatggattgtcatcngataaaagcatgagcgtccncgaacctatcaaagtatatactattgagttactattcatgaattatagctgcataaagaaagcacatcttcctacctctcatgcactactcatgatattactaaaccaaaccatacattatctctgacatcaacagcagatcctacattaagtcagatgtctagccactactattttgcttgacatccacatggtgcaagactgaataaagtactgactgttcatgaagtcanag

SEQ ID NO: 12495 - DNA, 688 bp, Glycine max
  unsure (1)..(688): unsure at all n locations
tgtgttcgcagcatttgtacactatgatactcngcctctccncantntctataatnggggagaagtgaagagaaaagggtcagcnnccttggcacttctctctctntcgaatntgcttangaaaaatgttntcatgaagaaaatccaagcggaggcgcctccgtaacgtttccgtgagtgaattcgcgaaggttntcgaccgttcttcgacgttcttcatcgttcttcagtcttcaacgggtaagtacctcanaccaagctnttcgattcattctatgtacccgtggtggtccacattnggtttcatgcattnttatntaagcccatttatntaagtcatntctcgcttaacctaanaatanaatanatntccaccgatcgttngaattgtatatcccgtnnnacttggtggaatggaatccgatggatcggtcgtgcccgcaaccacgtgggaaaccanaanangagggtaatntantataatantanannataaanangatcccctntagtaaaatanagtgaaaaatcaattgacgtttctctttggattctcatctaatcgatngactatactaagtgaactaggctanatcactcgctagtcactcgtcacaaatagatttgaagtatattcattctactaganatgatcatttagggcacgctaatgacactcagtaaacat

SEQ ID NO: 12496 - DNA, 137 bp, Glycine max
tactctgataaattatacggcctaacccagcaattatgtttttttgtttgtgaataccatgctactctggttatctatattgaatgcttaaaaagaagtctttcaccttcagcaattgacgctcgtacattaaaact

SEQ ID NO: 12497 - DNA, 150 bp, Glycine max
  unsure (1)..(150): unsure at all n locations
cctcgcattctngctctctctctctcncacgtaagtntctcctctctctctttatnnttatttatcanaatggttgngattaggtggaanatcccantttcgtaggcccacatngtgttttctaatgngagtngataatggtccctacta

SEQ ID NO: 12498 - DNA, 544 bp, Glycine max
  unsure (1)..(544): unsure at all n locations
tttctgtacctccggacttagcccgcgctcagctctatgacttgcctaacaacttgactaaatctagtnaagagagggtgtcgctgtgggcaaaaaaaggaacaccactgtgggacctgttntccttgccctagaaataactattggtcattacattcaacatttctttaatataggccaagtgatgaccggctcaggctctataagaataagagcatcagatcaactctcttgtctgccaaggtatgataaagctggagccttgcgagagagtngaatgaccatatggtatctatcaagacaaccgcaatgtcatgtcatcctttactaaccataaccacctagcttgccatatcagttgggtgtggagtagatcangtgagatacatacctcatgctggcacgagtagatcttctagacttcatgtggcctcacgtagacaagccttcnggatgctgtagctcatctttgatcaactattgaaattagtagggacatcccccttaaccgggctagaatatctgtgtcattttgctcacttct

SEQ ID NO: 12499 - DNA, 593 bp, Glycine max
  unsure (1)..(593): unsure at all n locations
ttgtgcgcataggccttgatctagctggcttcaatctgtaggtgttcattgtctcagactggactaatacattngctgcccaagtntcatggtcttgtaggtgaagatcctcataagcatcttaaggagtntcatattgttgttccaccatganacaccatcgatgttgttccaccatgaaacaccatgatgtccaggaagatcatatcnttttaaaagctnttcctcattctctgganggagtggtgaaagatgggttgttactaccttgctccaggtcctttaccagctgggatgacctcaagaaggtgttcttggagaaaatcttcctgatctangaccattgcatcananagacatttcagcatcaggcaacctatggagaagcttgttgattcttggaagatcatgaatgtgtcagctgtctaccacnactctgacactcgtctcatatttatgtgactacactgaagagatatgagctcatgtgactctggttacactgtggctgattatgaaatgtcactcacatccgcgaagagttgtctagacatgggccatcttcttcgaatactggactgtctgcacaactc

SEQ ID NO: 12500 - DNA, 53 bp, Glycine max
tcccttctatatatactgtcttgctctatcatatcccgaaagagaatgcttct

SEQ ID NO: 12501 - DNA, 387 bp, Glycine max
  unsure (1)..(387): unsure at all n locations
gcacacgtcttaatcacaatatcttgaatctaatgccaacttgtagtctaacatgttangaatattatatatctatttgctatttcatgataaaagatgtacaaataattacatgttggaacagttatattagaaaacanaattcttataaataactgttttttaattaaaattgaactatgttattgcaatatttttttctttttaaccgtttatactctttgccggagagngatatttaaatcatttacaactatcaacttttattatataaaatttgaatattaatttcattatcaaccatatgatcgtaaagacttccattctgtaactaacaaaacatgatttatttctctcttntatatactgcgctaatgatacgcaacg

SEQ ID NO: 12502 - DNA, 607 bp, Glycine max
  unsure (1)..(607): unsure at all n locations
agatgtaccnntnnatgttgtgcagctattangtacactatgantactcaagctgttatccaggctcatgtagtggtgagactccntcttcatgtgctactccctagnggatggctcctgctctcacctctattnctatgtcttccgctgcatctacagcgtggaagatcaccattaaaggacctcattgaagctcaaagatccagcctgcatagaagcgccataagcaagctcgcatcaagtggtaatcatagcacaacagctcactacgagctcttaacctcattanttgttcttaccgctcttcattgtgtacttcatttttctcatgatctctccatgtctgagaaatgttttacatgatctctaagttccctcataaagtagtntaaactactttgatgctatggtacaattcttgtttgactgacctgaatgagtatatatgtccttgagattgctcgatattttgtgtgaacctaacctaactcttctaatataagtgaaatactcaaatccaggactgtcctattggtggctagagttgtagctaactgccacactttaggagcaattatntgtctgcacattgctcgtggaaattact

SEQ ID NO: 12503 - DNA, 424 bp, Glycine max
  unsure (1)..(424): unsure at all n locations
tgtgtcntcntgtggcaccttaggccttgaactcgctgggcacgatgctggtactggaccactggctgaccaaattgtcctgccaaggctgggttggttcttgtgacacctcaacttgcttctcgaaccgactgacaccactatctgaaattacaaactctacctacacaaatcaccagaacatttgacttcacacaatcacctgaggaaaacctatttgtggtgctacacaccacgcgtctcttcagttgcacactctctcatccaactccaacgcacatagcctccactctcaacttgagaagattcgacatcgtcacaaacaactgatataatgcatgtccatgtacacgcatattaagtctcacgcaaccaatgagctttggtgagcagagctccgactcatgagatgcacttttcaagg

SEQ ID NO: 12504 - DNA, 340 bp, Glycine max
cttgctagatgaacatgaaaattaaagggaaaaaaataaaggttatacttaattagcatctaatcatttgtataaatttgtagagcaaaacaccaccacatgtatgtgtatgagcgcatacacagagaagctaatatgtttgtatatttgaaaagtaggagttcagagtcatccaaggcacaccaaaaaacaggttcaactaaatacaagactttatagaacgatcaatatgataaacttccaatctaatgatacactttgtgagaaagtcatactacagaaataatggtgcaagacagttttgatacacacttgtgtctactctgctgaatcactttac

SEQ ID NO: 12505 - DNA, 250 bp, Glycine max
  unsure (1)..(250): unsure at all n locations
aagtaatttaaatcccgcatattactctgatgatgattgctgacataaggtgatcacggacttttagttctgtttattggaaataattccgtgatgaaaatgatttgttttatacattattaagtagccagcctcaatcatacacacatatatacgatatagaataagatcatgtatctttctaattcagaattctcttacttntgctgtgagctgagtctggctatatatacgtatatatctcgcattc

SEQ ID NO: 12506 - DNA, 376 bp, Glycine max
  unsure (1)..(376): unsure at all n locations
gtaagagtatccttgggaaccttcacccaacgaagacactgacaaaaacttatcttctccttcttggacaaagtatggcaggctgggggcaagtaaattttcttcccatcagaccttggatgcaactgtgatcgtatacccatatcagctagatctatgtgtgcggctgtgtgtgtatggctgtgtgtgtgtgtttctgtgtatgtgtgtgtgtgtgtgtgtgtgtgtgtggttgcgtgtgtgtgtgtgtgtgagagtgtaattcccaaantaacaacaattttacacatcttctattattactacgaacttccttgaaagctttttgagaaaactccttgaaagctaaacttttatccatgagctttataaaaag

SEQ ID NO: 12507 - DNA, 454 bp, Glycine max
  unsure (1)..(454): unsure at all n locations
agcgcatgaagactgagcgcttagcacaaggtctgtgtataacttatagacaatcgcaaaaaaaatagctaagtctttttctgtctatatcttcacacaagcttaaaaccccttgttcattactaagcaaactaaaattaatcacaatcacaatcaagatatcctaactacatgcaagaggtaataatgaaaatagaaaagggaaagaaaagctaggttgcctcccagtaagcgctcttttaacgtcactagcttgacgcatcgtcctgttatccaggaaccaagagagttgctacttcaaggaccttcttctcaggtctctnttcctccatcacatgcactntanaataaacattttggctaggtggatccttgttctcctgaaacaaatcaaagctgatcttctgatcttctatgcccantccgcagtatctttttcccatgtncaccacac

SEQ ID NO: 12508 - DNA, 427 bp, Glycine max
agcttgaggttcatgcaaatttaagcaaagtttgaagattaaatacatagatggataatattcataggaaagcaatggtaagtgccattacaaaggttaatatgcatataaatttaaccaaagattgcaatctttaaggttcatataagattaaattcatagatgaaccatgaagcatgataaagtttaatattcataagagagcaattgttcaaacaacaaaattaacaaaacatctaggccaaaattcacaaaatacaaaatgaagtttaatctccatgattgaagtcgctctcgatgagaaagtcatatcacaaatttccttaaaattatcatatgattaccatattcattgatatgtcttgctgcagaggctggaatttcctgcagaattaaaaaaaacaaattaattttttcaacagcaatg

SEQ ID NO: 12509 - DNA, 441 bp, Glycine max
tagacttatgaagacttcctgacgaggctaggcgtcaagtctttttctcctttgtcgaacatcctcagaccaacggttaggcagacgcagccaaaagagttatcctcagggccctgcatattagacttagcaagtctaagggtttacagaaagaggaactccctagtatactctcagcctaccattgttcaccccagacaacaaccaatgaaactccttaccgactcatatatgatacaaatatcatgatcatagtcgaagtcagggaaccgtcaacaaggaggctgcttttctaggaacagtagaacaaagatatcccaaggaggcttgtcaaacccgaggtccacccttggtgagtctcgtttctctaaagcctcacaaaacccaaggtccccttttgtgagtctgccctgatgagcccctcttttgctatgttccatc

SEQ ID NO: 12510 - DNA, 419 bp, Glycine max
  unsure (1)..(419): unsure at all n locations
agcttgccgatgtacctggatatgctattttgctctttctattttcattttctttatctggggaggccaagagatggttgcattcattcaagggcaacagtttaaagacctgcatcttcattccatcagtttcctgatgaatctttgagtgaggcattagaaagattccgtagcttgctgcggaaaactcccactcatggtttttcagagcctatacagctgaacatcttcattgatgggttacggccgcaatcaaagcagttactcgacgtttatgcaagaggaaaaattaagttgaagaaacctaaagaagccatggacttaattgaaaatgtggctgccagtgaccatgcaattntgcatgatagagttcatattcctaccaagaagagtttattagagctttcatcacaagatgc

SEQ ID NO: 12511 - DNA, 456 bp, Glycine max
  unsure (1)..(456): unsure at all n locations
aatagtataaacttcgtagctantaagctggcctatttcaacaagaaggatttgaagatgaagcttattttaagttagtctaaacctatgagggctgtctaaattaagcctagtccaacaagagggatctgaggatgaagcttggattgattcagcctaactagggatcgaggtttagtaatttacgctacaacatagaacacaaaagcatgattgattagagaaatatctttatatacatcagcttgtttgttagaaagacccaacacttctacctactgctgtcaatcttacttacctgcatttttactgtttttagcctagacttagtttaattctgttctaaaccatcaatcgccaatgtttctttcaacaatgccttatttctgaatttaaccctgtctaatactagttccctgagttcgatactcggattcttctcgtttaaattaaata

SEQ ID NO: 12512 - DNA, 369 bp, Glycine max
gaaagagatgatgaagctactaaatacgctataccctattcgtgccaaacaagacgcaataataatgaaatatggtgaaactacctatgtcatattaagtgaagttaatactaaatggactgaaattttacaggacaaccgatgaggacaatgcttagtgctgtactactgacgctggaggagtgaacttctatgtaggttataaggaggaagtgaacataccgcaccaaccttgaatgcaccctgagcttgcctgataccttctgatatgaaaagaagaaaatgaggggttatagccgacgctggtggatcagctgctttactatgacgatatccctacaacgccaaaagaatatgatcgagatcgtg

SEQ ID NO: 12513 - DNA, 250 bp, Glycine max
ccctatgctgggagggatgatcattccacaataacctcagtctgcgatctccgacactaatggaacgcctactaggtctttaaacatctgcacttccgacctcaagacaaataagactgtgccttccccagagttaagagtgaccatggactagatgatcggatcagcctatatactctatgctgcccatacgatggctgaactcatgtaccctctgcagccctcacagcacaacagaatggcatgattg

SEQ ID NO: 12514 - DNA, 438 bp, Glycine max
agctggcgcatgcaagcttgctagtgggccttctatgtgttgctgtatctttgagcttcaatgaggtcctttaatggtgattttccaccatggagatgcagcggatgacaaaggagaagaggtgagaggaggcgccatccactagggaataagccatggaagaaggagcttcaccaccaagatgagccttggataagaagcttggaaggatgcttcaatggaggaaaagaaagagagaagggggagcacgaaattgaaggaataaaagagggagagaagttgaactttgagttgtgtctcacaagactctcattcatcaaagttacaacaagtattacacatgcttctatttatagactaggtagcttccttgagaagctttcttgagaaaacttccttgagaagctagagcttagctacacgtacccttctcataac

SEQ ID NO: 12515 - DNA, 406 bp, Glycine max
  unsure (1)..(406): unsure at all n locations
ctaagcttgaccaatcctgacccaacccgagcatagtcagttttgttatcctgtgatgtacctaaacaggcgagctcctggcagtcaactgataaaagaacaaagaccacaaagcaaggaggtttgtgtggtggctggccagctatggatcttgagtaatatttggaatatggcctctagtaatcgattaccaagggtgggtaatcgattacaaggcttaaaaatgaagacaggaagttaagatggcctctggtaatcgattaccaatgatgtgtaatcgattaccaggcctagaaatgggatcaggaacgtgagagggcttctggtgtaacaccctgatatatatatctatatattattagtaattatgtntgatgttngattatttgttgtgttattttcatcc

SEQ ID NO: 12516 - DNA, 407 bp, Glycine max
  unsure (1)..(407): unsure at all n locations
agcttattatataagataatntaattctattttatatcgtaaaaattatagttactatatatttaattaagtttgttattcatataagatttttattatctctttttattacataattcatattataacatttttttactattaaacatgtagatcaactaaggattatatctacttaacaaagtattgccaaattttaattttaaatatataattatgttaaattttcggtcaagataaaaaaaatatatattttctcatgaatataaagaactttgtaacttctcaatgaaaatgggccctgcttctttagttcactcaattcaaattaacttctttcttttcttactttntatctatctttnttaactgaaaaataaagtaatgtttttttatttctaatcaaa

SEQ ID NO: 12517 - DNA, 415 bp, Glycine max
  unsure (1)..(415): unsure at all n locations
atccttannaatttatcttatggtgctcttctatttcttttaaggttgaatatgcactaattacattaaatctccccttccactacaaacttaagaactataatcctatcaacatcactcttccaatacttgaagttctcaatgacaattttacccagcctatttgtttttagcaatgtacaacaacttataacctacagtgtctaattctctttcctttctcctacaaacttaattgtatgcagtcacataaaattaatcttcctactaatcatggtgtttcatggtgtttactacttcaattgttttacctacaagagtgcctatactccatgttccaaagcaaatcctcttcccatgaactaaatgttttaccacacacacatgtaagcccctgcttattttcactacatct

SEQ ID NO: 12518 - DNA, 416 bp, Glycine max
  unsure (1)..(416): unsure at all n locations
agctttgagccaactcanacgatattttctttntactcggatgtctgattgaggcccgtaacatatcgagacgctcgaaattgaatgttgaacctctgagccaattcaaacgacaataacttttttcacggatgtctgattgagtcccgtaacatattgagacgctcgacattgaatgttgaacctctgagccaattcaaatgacaataactttttactcggatgtctgattgagtcccgtaacatatcgagacgctcgaaattgaatgttgaagctctgagccaatacaaacgaccataactttttactcggatgtctgattgagtccctgaacatatcgagacgctcgaaattgaatgttgaagctctgagccaatacaaacgaccataactatntactcggatgtctgattga

SEQ ID NO: 12519 - DNA, 389 bp, Glycine max
taaacattcaacttcgagcgtctcgatatattactggacttattcaaacatccgagtaaaaatttattgcggtttgaattagctcagagatacaattatcaatttcgagcgtatcgatatattacgggactcaatcggacatccgagtaaagagttattgtcgtttgaactagttcagagattcaacattcaatttcgagcgtctcgatatattacgggactcaatcagacatccgagtaaaaggttattgtcgttttaactagatcagagattcaacattcaattccgagcgtctcgttatattaccggactcaatcgaacatccgagtacaaagtgatcgtcgtgtgaattggcacagaggttcaacattcaatttcgagcgtgtcg

SEQ ID NO: 12520 - DNA, 418 bp, Glycine max
  unsure (1)..(418): unsure at all n locations
agcttgtagccattagaagagaatgatcatttgattggaagtatgactgaaaatgttagtcagtttgtcaaattgattgtgaaggaatgcattaaccgtatctcagtgagagtgtgctccttaaattttgagagaaacaactatcatttagtactgatttttgcgtgaatctctgaagtatgggctgaatgcatgaaattgaggatgatgaaggccatgtttgattgtgatagccacttagccaaaaagttgaccatgtgcttgaatgaattatccattgtacccagtttgagctgaatgaattattgattgattgaaccctgagcctatacagtgttatctcctgctaccttgacttangttgtaggagagcatcatctacaggaagcatggttcanagcaaatttgtcccanatat

SEQ ID NO: 12521 - DNA, 467 bp, Glycine max
  unsure (1)..(467): unsure at all n locations
tccctgccccnaatggacttcctataaataaccatgtttgtataggggtttagggggttcaaaaagtttgggatagaggaaaaaatgtacgaagaggaagagaagaagaaaaatgaagtcgaggcgccgtcaaatcgcgaccgtgggtcattccctacatcgcttctcttgctagccttgtaccttgtgcaacatccggctagttcttcttcatttttcttttcttttcttaagatttgaatataatccatatacccttatgggtcctctctgttattttgtatgtactcatcttctcccctttacgggtcgcaatttcactttacttgtaaggtttagttctagccgatcattagtgttgtgaagtctcttcctccttttgtggcactagaagctaataaaccaaaaataacacataaaggaaatcaattcacaaccaaacttattctttntatcanatatcactt

SEQ ID NO: 12522 - DNA, 432 bp, Glycine max
  unsure (1)..(432): unsure at all n locations
acctgcggcatgcaagctntaagcagattntagtaattacccatattctagaattaaaataactgaatgccattaacctagggaattaaaaaaaaaaaaaaaaacttaatggctgagtgtaactgaaattgtggcaaccaaaagtcacccccaacagccaacaagtcagccaccatttggtctcccaaaaggctgatgcctaggttgccaattgggcccttattacaacttgaactaaacctaactaaagcacttttagttgattcacccaaaacatatttttggtcagccaactttacaaggattgggccattattttgacaaactaaacactctaaaattgagacaaagtggtgtcatttagtcctcctccatttgggccatgatacaactcacaaccttggactnttctccttgaaacttgggcttgta

SEQ ID NO: 12523 - DNA, 348 bp, Glycine max
tttcttcgagcgagctcaaccgaagttgtatttcggccgacgccggcattttgtcggccaggaaaacattatcccacctcggcaaaaaaaaaacatgattcaccggtattgacagaaaaaaatgctggccttagtcggccaggaaagatgaccgatcgaggtctaaaaaagaagcatgaccggattacgccgatcgaacgtttcctaatagatatcctccaagtattattcagggattgaatggaaaaaacaatagccgacatcggtagttaaatagccgtgactgatatttttcagccaacattgcgcaacttctttcacaaacgctggccgataatatttctttac

SEQ ID NO: 12524 - DNA, 420 bp, Glycine max
agcttgtattatagtctatattgttatgttacgaagaaagtaaagttagtactttttttgaagaggagtaaagtcagtcctaaatttcaataattgtgaactagttcagttttaaaataaggacacaagtgtaccctaaaattaagaatcaataatcgacagataagaaagcatacgaataattcagtataaaaaaagaaggtataggaataaattacttttgttaatgtttcaaattgtttgactcctaataaaattaaggattaaattttttattttttaatctgaagaataaaactaatcaatcacatcaatcttgaaaaataaattggcattcaatatattgtaaaatttacatcataaataaagattttatttcttttctcttgcaaagtaaacttgtattccatgtttaattta

SEQ ID NO: 12525 - DNA, 340 bp, Glycine max
  unsure (1)..(340): unsure at all n locations
acatgacaagtgtagcatgctntctacttattccttcacaaataactaccataaggcataaacctagtaaaactacccatcatatctcccaaaacccaatacccacgaaaatttatgtgagaagaagtctacccaaacctgaaatttgaagtcccacaacgtagaggtgcgcttcacgactccgaaaatggctgcctttcgcgatttggagcagaaatggtgagcaaaggtaggagctttgatggagcttcaatggtgaggaagaagaagggaatagcaacgtgagagagagagggagaaaagcttctgaacttttgggcagagtgaggagagagaacgt

SEQ ID NO: 12526 - DNA, 414 bp, Glycine max
  unsure (1)..(414): unsure at all n locations
agcttggaacatatagactgtttttgggttctcttanggacttaaacaaaatatccgctggctggtcattaaaaccaaggaactcactgacgatctccttggacagaagcttctctcgaatgagatgacaaccactctctatatgctcagccctttcatgaaagactgggtttgaggccatatgaacagcagcctgactatcacaatacaccttcatttgcaactcttcacatgacctcaattcttgcagaaatggttgaatccacatgagttcacaagtaaccatagccatcgatcgatattcatcttctgcactagaccgagctacaaccgactgtttgttgcttttacaagagacaagagatactccaatgaagacacagtagcgtgatgtagacctcctatccatgggac

SEQ ID NO: 12527 - DNA, 405 bp, Glycine max
gaggaaccataaatctaactgtggttttcattttatatgctaacatcaattaattaatttaatataaatacttcttgattcaaacacatacattatgccctaccgcattttgtaggagcaggaattcttcaacattgagtatatcattcctaaaataagtttttgataatatttttaaacaaagaatggaagctagatcgcaagaggtacatcagctacattatcattttcttgccacaatcacaaggactctacttcagccaaaaatgtatcatactcatgcataggtttctgaataatgcttctaagctgtgtaacctgcatactcttaaaatatcccaaatactaacagactaacagtgggaatttggcaattagactacgtaatgagccaatcattattac

SEQ ID NO: 12528 - DNA, 257 bp, Glycine max
  unsure (1)..(257): unsure at all n locations
gagcttcaccaccaagatgagccttggataagaagcttggagatgatgcttcaatggaggcaaagaaagagagaaggggggagcacaaaattgaaggaataaaagagggagagaagtggaactttgaagtgtgtctcataagactttcattcatcaaagttacaacaagtgttacacatgcttctatttatagactangtagcttccttgagaagctttcttgagaaaacttccttgagaagcttctttgagaaaac

SEQ ID NO: 12529 - DNA, 451 bp, Glycine max
  unsure (1)..(451): unsure at all n locations
ctcgtttccatattcaaatcaaataagtgtttcgttagttgttcttttatcaagtccatgaaaaaatatctaagttcatttggtttttgagaaagtccttcattgtttttcattctcaaatgttttcaaaagaaatccttttgttgtgttctgatccaaaaataagtttcacaaatactggttcatgattctttccaaaacatgttatgttcaagacnaaatttctatttaattcctaaaaaagagttataatttataactatactaacagaatatcaaagcacgcacaaattagtcaaaataaacttgcgtaactttctcaaaaaattaaaaacaataaataaggtaataaagtattgaaatttaatacaaagcgataagtaaacacatagacaagttcacgaatatttgaagatcatggctaaggagctcagtctctttgacgatcatg

SEQ ID NO: 12530 - DNA, 187 bp, Glycine max
agcttcttagaatggaagctgcttggagtgttgcattatatttcgataaaggaatacatgttcgagggtcaaagactaccagacatgcttccttcaggtggaagccaaaagcaggaatcgacttaattgtgaattgtgatggagtaagggatacgataatagtaaatgtgtcttggggggggggggg

SEQ ID NO: 12531 - DNA, 468 bp, Glycine max
gctaatggagctcatcatattagtctccctggccctctttttctctaatgtaagatgaatgggtttggattatgaaaaatgggagtgaaaaaataaaattcaatttcatccatattaaatatgtggaaattcatctaatgttttttttaattatttattcatatactttaaataaattataaattaagttattaattatagtttaattctatgtatgtaatgtatattttcataatgaataataaataacttatatatttagttaaatgtataaattttaattttgttataattagtattatgattataatattatttatttaactattaaaataattattctatatctttatgattataaaaaaagtaaaatataaaaataattagataattatataattaaaaattacatgtaaatatatacaaaaataattatagatagacttatagttatatttattaataata

SEQ ID NO: 12532 - DNA, 426 bp, Glycine max
  unsure (1)..(426): unsure at all n locations
agctnttccaagaggcaacctatattctattttatgtctttaagcttaggtagtctaggttgcaatttatgtttggtaaaaaaaaaaactgttggaacaattagtaaaaatagcgcaagaacaacaaaagaaacttatgtgtaacccctacataaattatgcatgtggcgtgcataatcattagcattttgaaaactatgcacccgtgcatatccaacacacgcccctctccaaaaaaagaggtgtgtgtaggaaaaatagaatggaatggaatctaggcaatttcctgtaattcgctaagtgagtggcacctcactaagcgtagcatctcactaagtgagttgaccttttattcaaaaacaaaaaaaaacaaagatttttgcccaatttaaagggtcttatcaacggaatcaatggaatatcaat

SEQ ID NO: 12533 - DNA, 454 bp, Glycine max
  unsure (1)..(454): unsure at all n locations
cctaagggaggacctttcagtttggagattatcttatctttgcctataggttggacctcccagaagagtatggagtcagcaccacttttaacatttctgatttaactccttttgcaggtggagctgatattgaggaggaggaactaacagatttgaggtcaaatcctcttcaaggggaaggggatgatgcaatcctccctaggaagggaccaatcactagaaccatgagcaagaggctccaagaagattgggctagagctgctgaagaaggcctaaggttctcatgaaccttanggtagatttctgagcccatgggccaaggttgggtccaattatctttgtacatattagactaggatgtcattatatttggtccttgtatatagggctccatattgtaggtagggtaccctagaaatataggatttttcagcccttgtatttttgggcacct

SEQ ID NO: 12534 - DNA, 448 bp, Glycine max
  unsure (1)..(448): unsure at all n locations
ttaagtcacctgaggcatgcaagctttcactttntcaatcataatcatcgtttctgatttatctaataagctttgatactcctggatactaagaatatacacaaaattaaaaacaattggaagaaaatgcttaaacagaaaggtgctataaaatataagggacaagttataatggaaatcaaaacaaacgttaaggcttaaagtaaatctaaaattagagaaaatgaaggtaaaccacccactaacaattcatataaaatacaaggaaaatcctgaccacggtgaccagtactttttttttacaaatagccacacaaaaaagagaaccatagctgttcaatgcagcctaagtcaatcagaggatcaataatcacaaacataaataccacctactatacacccagaaaatttaccttgagctgcaatatggaagacaaagaacgttctc

SEQ ID NO: 12535 - DNA, 465 bp, Glycine max
  unsure (1)..(465): unsure at all n locations
gcgacccannattgcaagatcatctntacaccattggccttttctaaatacgtaatcaataatgacaacccgatcagattntaagtgagccttcgaatgtaaggtttttttttttttttgaacacccaaactaatgtattttatactttaattactgtgaaattaacttcataaaataatttttctcaaataccaatagtgacacattgatttttagacaataatgttaggttcattaacaaaatacttgtacaaaattatttgaaaaggatttaactatataagtttacaacagtaagaattaaaaactctaagttgggtagttgggttgggcccgtccactaagttttttgtggttaattaagtttaaggttctattaaggtgtgtttcggtctgtatattaatgattagaaacgactgcgcttctgctgttaaaaataacacagtatatactaatttactac

SEQ ID NO: 12536 - DNA, 423 bp, Glycine max
agcttgcaccaacattcagtagttcaatacttacttttttttagtcatcatccatccacaattccaatcattcatgcttaatatgatgcatgcacctgacctcaactctcatatgcaatgtggtaccatccccaaggaagtagcctaagcgtgtccacatgacactctcacttaggaaaactaggaagtaagtgtcgaggtcaccctatcgtggacaggaaactctcccccccacatggtgatcagcctgagtctcaagggagttccaaaccgagtgatatgccccctagtacaagtattcctcctcacaagaaactataattacttactaacaaagtttatactatttccatgtcatatgaagtatgaaacacgggcaccatcaaatgcactaaacgtggataattaagaattctaagccat

SEQ ID NO: 12537 - DNA, 473 bp, Glycine max
  unsure (1)..(473): unsure at all n locations
agctntcttgtggagcttctatagaggctggatctttgagctcttatgttgttcttcaatggtgattttacaccatggagatgcaacggaaggaaaaggagaagaggagaggggaggcaccatccactagggaataagccgaggaagaaggagcttcaccactaagaattgccttggataagaagcttgaagaggatgctttaatggaggaaaagaaagagagaaggggggagcacgaaattgaaggaataaaagagggagagaagttgaactttgagttgtgtctcacaagactctcattcatcaaagttacaacaagtgttacacatgcttctatttatagactangtagcttccttgagaagctctcttgagaaaaattccttgagaagcttctttgagaaaacttccttgagaagctaaagcttagctacacacacccctctcataactaagctcaccttcttgagaag

SEQ ID NO: 12538 - DNA, 422 bp, Glycine max
  unsure (1)..(422): unsure at all n locations
agcttatcttttatcaatgagttatatatatatatacaatcaatcaacatgtagcaacaaaatacttgcattaataataataacgttaaacaatagaaattaaaaaaccaaacaacaaacgtcttgattttaaagacttgtgttcacaggattatttgaccaagtaatagataacttcctatgccaggaatgaaagtagtgagatgtttttagtttttcacataaactaattctaaaagcattttatcttaaacaaaaatacaattggcaaagaaaatatttttcaacaatctcatactaaattaaaatttcaggaaataaataatataataattttttttaatggaacataatgcattgtgttttcatccattaattnttcatgcttactagaaaggcactactacaaaaactgtatttta

SEQ ID NO: 12539 - DNA, 441 bp, Glycine max
  unsure (1)..(441): unsure at all n locations
tcttatggcagaggccaaggtcgtggaagccatttattatgtgtaagaggtcgaggaagaggatccaagatttgttcttactgtaacaaaacaggctatatggtagacacctgttacaagaaacatgattaccccctcacttgtaaagagggagtactatcaatcaatactctttggatgatcaagaaattgaagatgatttgcaatcccttggacagaaagaggtggctgcagatacttcatctacagcttttacaccagagcaacataaggctctcctttctttattgcagcaaacttcacaagcctcttcttctcacaccactaatcagctgattagttctcataagaatggcaattcaggtatattctgtgccactcttcatgcttatagttctaacataaattctcgggttcttgatagcggagctatngatcatg

SEQ ID NO: 12540 - DNA, 423 bp, Glycine max
  unsure (1)..(423): unsure at all n locations
agcttgcccagagaaggagtccacttaggaattgcttaccacctcaaaagactggaaagcggtttctaatgactcctctgcggcttccacataaggcatagaggatgggcagctcaccaagatgtcttcctcgcctgatacgatgaccagatgcccttccactacgaatttcaacttttggtggagtgttgagggaacaactcctactgagtggatccacgggcgccccaacagacagctgtaaggggggttaatatccattatttggaaggtaacttgacaggtgtgagggcctatctgtactgngagatcgatctctcccctaacctctcggcgggtgccgtcgaaggcacgaaccaccattgaacttggctntaagtgggaggcattgaatggtaatttctccaaagtgctcttangcat

SEQ ID NO: 12541 - DNA, 394 bp, Glycine max
aaagatggacgttgatgattgaaagacattccaatagtatattctatgggagcatacgcagaaagcatcctccttcaactctgaacacattcttgaatcaaatcaaagtgattcaatacaagtactatgtccaacaagagtctatcattttgatgatacaaatgaaagctgtgtaaaggacctagatgaaaatttcattaagaggatgaagaaactatcaatcatttccagccacgttgtgttcgacttaaccacaatgattgagggtaagctcgaatctcgtgtcatgtgtgttcttgaactctaacaaaaaatatagagctagatataaatagtagtggaagattagactatgcaatgaagagaagagaaaggttgaatcaagacagttagc

SEQ ID NO: 12542 - DNA, 418 bp, Glycine max
  unsure (1)..(418): unsure at all n locations
agcttatcaaagaatnttgtctcgtttggtttttaaacaagaacaaagtgtgtgtaaaattaaatgaactttgaaaaaagtaaacaaaaacatcagaagctgttaaaaaactgttttaggcccgataatcctgacccaataaaagtaaacaaactccaaaaatgaaatcacaaatccattaccagatttaaaccatgacaagtgtcacgtcctatgaaatataggtttgaaatataatttttttagtcagttttcttattatattttctttttttacatctaaaataaaaataaattttaattttaagtattaaactagtaattttgtggaaattattatttattaaatatttctaaaataaatatttaaataattgtttttaaaaaatgagtttccttcaatagatttccggatctg

SEQ ID NO: 12543 - DNA, 384 bp, Glycine max
  unsure (1)..(384): unsure at all n locations
attagagaatcgcanattcacctcataagggtttatttgtatttaacaccattatcaatttcaaataggatgaccagccattatgaacaatgcaatatgtgaatacactcaatttgaaggttcttatatataaagggtcaaggcaaactagagttgaatattataatactgaaacaatgttcatggctgaagcaataccattaaggtcaaccagcacattttcaacgacatttttaggaacatagagcacattttcaaacacaaagcaaagacgttgctcagagagcacattttcaagtactaacctgaggaggaagtcgtgagggaacatgccancaaaccaaataaggctntaagtcgcgaggtatcaaagacaaaacaatg

SEQ ID NO: 12544 - DNA, 420 bp, Glycine max
  unsure (1)..(420): unsure at all n locations
agcttaaagtatgcccgagtcattcatccttatgaaatgttgntgaagtattggcgatcagaattgccattccttggattatagggttgaaccaagctcatgcttttacaaaaaggttcatcaagtcaagttgaaatatggaagtaaccgtcttgcaaaattggggcaaaagatgaatcgagtcacatcactgcttcgtctactgccaaagatatttaggattgtttatgtccttgttacttccagtttcaccttgacaaagatgtcatggaccatgttgaaaatctaaattgattcaaccccatatcctgcgtaaaaattcgcaatacttcaactgtacatcattcgcatacatccatgcttttcattggttgcattgctcattgcattctttccttgaaaaataaaataaaataaaat

SEQ ID NO: 12545 - DNA, 430 bp, Glycine max
  unsure (1)..(430): unsure at all n locations
catgcatctgcatccctaanaatcatgttaactgcatttattntctacatctaatatccagtcgtgtcgatttgggatgactgaccctctcgatgagtcgatctcttgctttctcataagggtgaacccttgggtactagtaccctcacctccagaggactacatgtcctcgccttcagagggccacacgccctcgccttcaaaggacttcacgtcctcaccttcagaggactacacgtcctcgccttcaaagggtcatgtacctttaacttcagaggactacacgtcctcgccatcaaagggtcatgtaccttcacctttgtagggcaacacgccctcaccttcagaggactacacgtcctcgcctttagagggccgcacaccctcgccttcagaggactacacgtcctcaccttcagaggactacacg

SEQ ID NO: 12546 - DNA, 417 bp, Glycine max
  unsure (1)..(417): unsure at all n locations
agcttcccgcatccacattnggaatgatcttanttctgccttcattaggtaatatcagtacaacaccgatatggctcccaaccgaacccagctgcataacatgagtaagcgagagcatgagtctttcaaagagtatgctcaacgttggagagatctagcagcacaagtggcccctcccatggtcgagagggaaatgattacaatgatagtggataccctaccgtgttctactgtgagaagttagtgggttacatgccctccagcttcgcggacttggtattcgctggagaaaaggatcaaagtgggtttgaagagggggaaatttgattacgtctcccccgccggtacgagcaataggaggactagagtagctggagcaaagaagaaggagggagatgcccacgccatcacttcaac

SEQ ID NO: 12547 - DNA, 399 bp, Glycine max
tagcacaatagtcatcagagtatcccaacagccctcatgattattcataatgtgccaagatgttcaaacttaaagctcacttctaccacttcattgccttgcttctttatcctcttcgtcgtcttaagaggtttcctaacatcaatgaaaactctgatgcgcaaatagggatgccatggattgttgttcttctcatcatactcaagatattcccctacgcagttgcctatgctttggccaattgtttgtgacataaactgtagaaccaaaatgactttggtgttttgatgatgatcatgatgatttgatgcaaatgatgcaaatgggcttttcaagtttaaatccaagacaatgattcaagaatacaagccacaacatcaagatgatcactagtatttt

SEQ ID NO: 12548 - DNA, 410 bp, Glycine max
agcttgtcactagtaccattttcctttcatacttaagagcttagacaactaacaaccttttagaaaggtgtaggaattcacatattgaactagtagagatgctttcacaatttccactgtgtcgcatgctggagagatagaagtacaagaataaaagtatccattagatataaaggatagacaaaggtcaaataaaaagaaagagttatatatgcttagcatgatgataaattgcatttttacaatgatatatttttgggaaaaatccttgttttagccataaagtttaatttaccgctcaaatttaatgatatttttctttcaaaattataatattctgctgtttgctcttgttattacaggttatagccagcccagctgatcttgtcaaggtgaggatgcaagctgat

SEQ ID NO: 12549 - DNA, 323 bp, Glycine max
gattaatacctcccaaacatcaatggtaagaagtggctgcaagaaattaagataaaatcacatcagaatttaccagggaaatgaactcattagacccaactatcattcatatttcaagataagtaaggaacaataatattattactacttacataatagcctccccaaacaagggggttcacagcattgggactcttgagcaccactagcttgttggcctcatctggtgaaggaggatttgctgcattttccccatcaaatttgcttgctctatctatatttcatcaacaaaaaagtgaatgaacaagaaggatatgtaactc

SEQ ID NO: 12550 - DNA, 375 bp, Glycine max
  unsure (1)..(375): unsure at all n locations
agctntgaccaaattcattctatgtttttctttttactcggatgtctgagtgagtcccgtagtatatcgagacgctctaaattgaatgctgaagctctgaccaaattcaaacgatgataactttttactcggatgtctgattgagtcccgtaatatatcgagacgctcgaaattgaatgttgaagctctcagcagattcagacgataataaattggtactcggatgtccgagtaagtcccgtaatacatcgagacgctcgaaaatgaatgctgaagctctcatcaaattcctacgacaatgattctgctagtcagatgtctgatcgagacccgtactttatcgagacgatcgacactgattctgaagctctgagc

SEQ ID NO: 12551 - DNA, 357 bp, Glycine max
  unsure (1)..(357): unsure at all n locations
tgccttgccccttgatatattngagggacttatggttattatgaatgacaaattccttgggataaaggtagtgttgccatgttttcaaagcccgtactaaggcatacaactccttatcataagttgaatagttaagggtaggaccacttaacttttcactaaaataagcaattggatggccttcttgcatcaacacagccccaatcccaacatttgaagcatcacactgaatttcaaaatatttttgaaagtttggcaacgcaagtatggggcattagttagctttagcttaagaacatngaaagcttcttcttgtttctctccccatttgaaaccagcatttttcttgagcacttc

SEQ ID NO: 12552 - DNA, 426 bp, Glycine max
  unsure (1)..(426): unsure at all n locations
agctntagcagataaaatatattacaagcttttagttactatgtacaacatagagaagcagaatctcttttcaatagaaaactgaagcgaacttatcctcccccactaataataaagtatttgatcagatttcagaaagctcataaaaaagatagcaaaatacagccacaatgttagtagtatgaaacacacaggttcctgcttacaagttccctaagggcactggttatggaatcaataaataaaatgtttttattgaaaattacctaggggttgcattgggaatcatgggggaatgcattgttacactttctaataaaaaaattgaattctgattccttaaccagttcccttggttagcgtttgccaaacaaaaaagttaatccaaacacaatttttaactgataagttagaaactacactact

SEQ ID NO: 12553 - DNA, 467 bp, Glycine max
  unsure (1)..(467): unsure at all n locations
ctgtgagtaagtttccggaagaatgggcttgaactattactttcttaaaatgatgatgaagactttagcttattctctgttcctttntcaatcttgatagcatcttgtatagccaaaatgatttcttgcatccttggcctggaggcaccatgttgttcaacacattgcatggcaatttcaaccaccctccaaatggactcagttttggcatttccttctagagaagggtcaatgatgctcattgcatctcctttatgagttaaggatcttgcctgcaaaacgatgctttttaaactagtaagattttaatgctgatttaccattaagtctacaacagaatttttaagatatggctagttgaacttaagtgtgttaaaattntgcaatatacttctgggctcctggcagaattaattgcattcgatgtacaatattgtacatgttcgtgttttattcttgtttaacat

SEQ ID NO: 12554 - DNA, 263 bp, Glycine max
  unsure (1)..(263): unsure at all n locations
catctgngcattcatcgcatccactaacagacgttgagcgccgtccaactgatggtactcgtcaccaccaccacctgctccagccataattcaacaggaaaaaaaaaatgtgcaataaaaattattaaggtttcaggacctcacaacactctactcacgtctcttagatggtagtacactcgtgtttaatgctctcaataggcttttgtgtaatgtattccctcttgccttttaccactcgtgtttcctcttaagttcctgga

SEQ ID NO: 12555 - DNA, 439 bp, Glycine max
  unsure (1)..(439): unsure at all n locations
aacacacgtttttttatntataanattagagtttatctcttttatcttagtgagagtgattctcctaaattcttgagtgattcaagaacaccttggctgtatcaaaggactttcacaacctttgtgtgttgccctcgctggaaagagtgattctttccttcctttcatcatcacccttgttctttcaaaccacaattccagaaaatccacctctgcccagaattatctcgtggccataactcccattntacgcactcaaattaagtgattcttgatcctaaattgaatttcaaaacgagaactttcacctcgttttggaatcacctcatttggagccctgtagcttcagttattgacatttctatatttctgttcagccaccacttaacctacgttntaccatcccattcatcccatttatgccaagaaccaccttatt

SEQ ID NO: 12556 - DNA, 419 bp, Glycine max
  unsure (1)..(419): unsure at all n locations
agcttgtatggttcagccacacctganaattttatttttatatgtaacacggcatgcatggtatggacaatgaatgatcaagaagagtctgtttggaaccacgaatttattaaattgatgatgatttgtcattgaaagtaaattatattacgggaggaatagttgaattaccatcctgcagtcacaatagggtgaattggaactgtttcagcatgcattgctctgcacattgacattagcgcatagccttcaaattagaaaacatacatacatacgtaagcatcaattccaatatacatactaaggtagtgcttggcccaacttattttgagtttctcttttgaaaaggaaaagttgggctaaacaaagctttcaaagaaagagcttctaaagaagtagcttctttaatatagaaaagt

SEQ ID NO: 12557 - DNA, 401 bp, Glycine max
agcactgcaagtctgttacatcttgatgaagagctagattgttattgtttctaattgcgaatgaaaacataatttcagatgcaagacgcttaaacaccacatgagaacaggccaactctagatatctagcacatcattcacatgatcatcatagctattattttccatacaatctttatcttcatcaatatccatggcagcttctctagattccatcaagctcattatcagattaagcttcttcaagctatctagaggggcaccaacaacaacactaacatcctttcctacttgaaccaagtttcattcggagtatccatatccaaaccaaagctatatgacagttcatcattattcctaatctaatcatcataggaagagaggtcatcaattctatactc

SEQ ID NO: 12558 - DNA, 416 bp, Glycine max
agcttgtgatgctccattgattcatacacttttctgttaatgaaaaggctagaaaatctctttctatctataaacacttatatagcctattttaattggggaaaaaccttagggattaaagctggatagtatggactccaaaagtatgttttggtgcacccttcggctcactaagagatatattcatttttatctcgagacctaaaattttaaatttctcacatttggcatgaacgcatgtctatgtacccttgctatacagctggattatatgtgaaaatgagtgagaattttatgtgttgagattagtatgatgtgttcatctgtctctagaaaaacccgtagtaagccacttcgctatcgagtatccatgaatgttttaacaaattcacatattgattggaaggatgcatatt

SEQ ID NO: 12559 - DNA, 467 bp, Glycine max
  unsure (1)..(467): unsure at all n locations
aagcttgtcgaatggctggacatgatatatgttaaggtgttggtttggttttttgttcaaggataaaggaatgtcccacattatttccatgacacacgtgcaacaatgatgattcaaagattntatgcaaaactggtcatgcatgcacctatgtggacactcaagcatcaagttttgcggtcatgtgacactagggcttacaattcatttttcctatttaagtcaacccagtgtttccaaaacatgctctttcattaattcatgcattcattcaagcccattttgggtgttcggaaaaattttcacagcattcacccttcaggtgtatacacattttttcaacaaaaactcttttgtgttttgattggtgaatctttttcaaagaaagagctggagtttatttcttttcgaaagcgtcttggctttttagtcaaaacatatatanttttcttggtttttttttggtt

SEQ ID NO: 12560 - DNA, 439 bp, Glycine max
  unsure (1)..(439): unsure at all n locations
gatccttaagcacctgcggctgcagctatgactcgnttcttgggtattttttctatatgatgatgaggatgggattttgtgaaagatggagaaaatggatccatggatgcctttctagtgcaactatatcaattttgatcaatgacagccctactagagaatttgtgcttgagaggggactgaggcaaggagatccccttgcacctttcctatttaatatagcagctgagggactcactggtttgatgaggacagttgtctccaaaaaccttttcagcagctataaagtcgggaggcaaaaggaggagattaacatcttgcagtatgcagatgatacactgttttttggaactgcaactatagctaatgttagagtcatgaaatctatcctcagaattttcgagttggtttcaggactcaagattaactatgctaaaag

SEQ ID NO: 12561 - DNA, 424 bp, Glycine max
tcattcatctctatgaggtgtggttgaagtattgccaatgaaaatttcttttccttggattatggggttgaactaagcacatgatttaaaggaaaggttcatcaagtcaaggtcaagtatggaagtaaccagcttgcaaaaattgggtcaaaaaatggattgagttacatctttctttgtctactgacaacacataaattgtgccaatttacaaaaaaattgaggactgttgacgttcatatgttactttcagtttcactttgactctgacaagatgtaataaacaatgtcgtatgaattgattcaaccccatatcctgtgaaaaatttgcaatacttcaacaatgcgttattcacatgcatccatgcttttcattggttgcattgctcattacattctttcctcgaaatcagaactgtaatca

SEQ ID NO: 12562 - DNA, 414 bp, Glycine max
agcttataggatgtgatcggactattatgatcacttctgtcgccgcatagataggtaaatgggcttctctaattgctgagatgtgcaatgatccaggatcattcagcataccttgtatcatagggaatagcaagcttgacaatgccatgctagatctaagagcttctgttagtggtatgcctctgtctatttttaattctctatctttaggtccgttgcagacaactgatgtggtaattcatttagctaacagaagtgtcgcctatgctgttggtttcatagaagatgtcttaactagagttggtgaactaactttccctgttgataattatatcttgaatatggaagatggattttctcagagatcagctcccatcattctaggcagaccctttatgacaactgctagaacta

SEQ ID NO: 12563 - DNA, 303 bp, Glycine max
tggaacattcacctgtatctcataagacttgcgttcatcaaagatacaacaagtgtcacacaagcttctattgatagactaggtagcttccttgagaagctttgttaggaacactcactcgagaagcttctttgagacaacttgcttgagaagctacagcttaggtacacacacccatctaacaactaagctcacctccttgagaagcttccttgagaagctagagctcagctacacacacgcctgtaataactaagctgaccttcttaagaagagaagctagagctgagctgcacaccccta

SEQ ID NO: 12564 - DNA, 377 bp, Glycine max
gagagaaagagagaggggggagcacgaaattgaaggaataaaagaggtatagaagtggaactttgaagtatgtctcacaagactctcattcatcaaagttacaacaagtgttacacatgcttctatttatagactaggtagcttccttgagaagctttcttgagaaaacttccttgagaagcttctttgagaaaacttccttgagaagctagagcttagctacacacacccctctcataactaagctcacctccttgagaagcttccttaagaagattcctaaagaagctagagcttagctacacatacctctctaatagctaagctcacctccttgagatgagaagctagagcttagctacacaccccctataata

SEQ ID NO: 12565 - DNA, 410 bp, Glycine max
  unsure (1)..(410): unsure at all n locations
cgagatgaggaagtgttgaatggtgaaacttcctgtttttantgttgaccacagagtggtacctggagatatgtcgcgggggtcaggagaccttggggacgtcaggtggggtgctattgcccaaaaccaagcttgaccaatcccgacccaacccgggcatagtcggtcagtgagaacctgtgatgtacctaagcaggcgagctcctggcagtcaacagataaaaggaaaacaagaccacaaagcaaggaggcttgtggtggctggccagctgtgaattttgtgtaatatgtggattgtggcctctggtaatcgattaccaagggtgggtaatcgattacaaggcttanaaatgaagacaggaggctaagatggtctctggtaatcgattaccacggngtgtaatcgatta

SEQ ID NO: 12566 - DNA, 412 bp, Glycine max
  unsure (1)..(412): unsure at all n locations
agcttcttgcgtagccgctcttggttgtcataattattccaaaaacaaatccctcttattactagctattttgaattctttagttcctgaatgtacaactttcaaattgttggtcgttcccctctttgttttatgcaaaaaatgaaatcaatatcaaacaaaacatgcatacaattgtcatcgttattgctacttgaaccataaggaatacgatctaaagaagtacttcaaaacgtttatttattttttttggtattttttgaattacaatttgactttaatatctaattttttaatgtacttaggtggaggatgttgacgaagagaaggagaaggaagaaagtaatttaaagaagattaaggaagtgtcacattnttttttcctcagcaaggaagtgtcacatgaatgctc

SEQ ID NO: 12567 - DNA, 459 bp, Glycine max
  unsure (1)..(459): unsure at all n locations
aaggtttctggaatatatgttnttatatctatttttttttgaagaataatcctttggaggagtaaaaggaatgtgaaaaaatgaattaaacaggaatttgtttatagtaaaaatatatgggcaaataggcttatggaacagtctcacctcatttgttaggttcaaaactcctgtggttttaattttgacaaatttttctaaaccaaatcctatgctttttaaattagttctattgatgaatttgagaatgtaacaaggataacatcactttgtaagagaacatcaatttgtgtgagatattgatcaaaatgcaagaactgttactagaaaggtgaatgtgctcacgaagttatgaacaaagacccagaaagtgttaacgggttttaccttacctatntagaaaatggagttggagaggatctttanaggtaatcagtgataacgatccaatatttgtgt

SEQ ID NO: 12568 - DNA, 355 bp, Glycine max
  unsure (1)..(355): unsure at all n locations
ctgcagctataactacaactgacatttttattatttttaagcngcaaccaaggcaaggaattgactcaaaatagtcctgctaaaggatgatcgaggggagattcagcatttttaaaccaaaatatgctggtcattacttcaaggtgaggaacgccttattatttaattagcaaaacaaaatcgtaatataagtaccttatacaacaaaatagaagagtaaattaacaacatcaccagtgaatctcttattattaaagcaaaaaaattctacaatttttttttcatttttatacatgcaaattccactaaaaaattcacgtagatcacataacattaatattattaaagatattat

SEQ ID NO: 12569 - DNA, 404 bp, Glycine max
  unsure (1)..(404): unsure at all n locations
aactgaccttacatactgcgtatccgtgccctgagatgagtatgctgtgtttcccttaaagaaaggcacaatacccaatagaatgaacttgaaatttaactcaaagaaaggaatcgagtaatatcttgttccataattccctgctacgacaaggcgacataggtttctttatttcgttgcccgttttcatttcacttcaataataactagaatgacgaaccacgatgatattaaggccatactggagggggcagaggcaccagtaactgacaagtgttgcatctacagagtcccctttcatatccgcaagttcaacgatgatgcatacacaccaaaggttgcttctattggcccttttcatcataaaagccatcctcgcctncaaaatatggaaagacacaaac

SEQ ID NO: 12570 - DNA, 434 bp, Glycine max
gatcttaagcacctgcggctgcagcttaccctcaagccttcttttgttatggaaaatttggatgacttatgagggtgaatttttctctaaccattttattttccctttcagatttggtgccccatctccacacagattaatcaaatcatgtcatgaaaagagcgatcatcactcaaccgaaatttagcataagaatctaaaacctaacctaacaatcaagcatagatgcttggcatgaattacaatgaacaatttcaactcgtatgcaccaaaattgactagagagtccaacagcgtcaaaattttaaaactgaattaaaaatacgacccagatggcaaaaaaacatctagaacgcagcccaagtgcttgtacttgatctgtagctaagttagatctgattaagatgcaaaattcagaaactgaagacataaat

SEQ ID NO: 12571 - DNA, 362 bp, Glycine max
  unsure (1)..(362): unsure at all n locations
actcagcttaagcgaacctagggtaatagagttctactttttggttgaaaacccaaaagggtggcctaggccaaaattaaggaaataaaaaaggaaaaacaatcaggggtgtgttatcaaaggttttgttccaaaatccaaactgtaaaagtctctattcaagatttgaaatgacaaatggccgtgtttattcatcccaaacactaatttatcccttgttacccctcccgagccaaatcatgtttcttttcttttaaaaacaacaacaacaacaacaataacaacaacaacaacaacaacaacaaaaaaccctaagtaggaaccaccactaaacttgcaaaaagagaaatgcannacacaca

SEQ ID NO: 12572 - DNA, 382 bp, Glycine max
  unsure (1)..(382): unsure at all n locations
agctatgaggaaatncaaattaaattctttttaactcgnatattcgattgagtcccgtaacatatcgagacactcgaaatagaatacagaagctgtgagcaaattctaacgtcaataactttttacaataatgtccgattgagtcacgtaatatatcgagacgctcgaaattcaatgcagaagctctgagcaaattctaacgacaataattttttacttagatgaccaattgagtcatgtaatatttcgagacactcgaaattgagtacagaagctctgaggaaattcaaatgaaaatacatttttactcggatatccgattaagtcctgtaatatatcgagaaactcgaaataaatacagacgctgtgagcaaattctaac

SEQ ID NO: 12573 - DNA, 414 bp, Glycine max
  unsure (1)..(414): unsure at all n locations
acagcagattntagtaatgacccactattctattattattataacttaatgccattaacctagggaattaaaaaaaacttaatggctgagtgtaactgaaattgtggcaaccaaaagtcacccccaacagccaacaagtcagccaccatttggtctcccaaaaggctgatgcctaggttgccaattgggcccttattacaacttgaactaaacctaactaaagcccttttagttgattaatccaaaacatatttttggtcagccaactttagaaggattgggccattatttagacaaactaacccagacttatcttccttcattggaagtggcgtctacccagacttatctttcttcactggaagtggcgtctaccctgacttatcttccttcaccggaagtgcgtcatccatg

SEQ ID NO: 12574 - DNA, 426 bp, Glycine max
  unsure (1)..(426): unsure at all n locations
agcttccctgttnntgctttaacagttgatgtctttattcatatgagaatatgccttttctttntattgtaaagatgaaatctcatacaattgtctaatttccatcagaaggcaatgaagatgccaatcactgtggaaggaaatgagctgagtagatttagtgacccgccaggagatgcctacttggatgatttatttcatccattggataaacaacctgnggaggttgtagcagaggcgtccacttctacatccacttcacatatgactaaaggtaatgcatctgcaattgatggtgtgaaaaatgacttggctaaagagttgagagctacaattgctcgaaagcaatgggagaaggaaagtgaaattggacaggcaaacaatggcgggaatcttttgcaccgagtgatgataggcgttctaaaa

SEQ ID NO: 12575 - DNA, 355 bp, Glycine max
  unsure (1)..(355): unsure at all n locations
gcttgaggatgtttctctactagcaatgttataaggctagatttngtgtatttaatcggataagagagaatgcagataagaaccatggaaaaggttaaatgtgttttttttgggtacagaaaaggttaaaatggttggttgcaagcttttgacgatgttatcttttgacaattttttttagttatggagtgtgcgaagggactgagatataattagtttttaaatatattcgtcagtcattttatatttgaatttattatatgagtgtcttaacgaaatctttaacctgtgtaaacgtttttatgtgggaaaaaaaagacaattttgactctagatctagtttaaattaactgta

SEQ ID NO: 12576 - DNA, 419 bp, Glycine max
  unsure (1)..(419): unsure at all n locations
agctnggatttcctttagtagggaatctattcttttattatggagccaaaccaagtcaccctcattaagaactagctcttttcttcctctatngcctttagttgaatacacctttgtttggttctctatttggttcttaaccctctcatgcatcttctttacaaattctgacctagattccccttctttatgtataaaaaaagtgtccagtgggaggggaatgaggtctaacggtgttaggggattgaacccatagacaacctcaaaaggggactgcttggtggttctatgaacccccctgttgtaggcaaattctacatgagaaagatactcatcccaagacttatggttgcctttcagaagagcccttanaagggtggataaagacctattcactacctctgtttgcccatcagttt

SEQ ID NO: 12577 - DNA, 463 bp, Glycine max
  unsure (1)..(463): unsure at all n locations
nttcgattcattctatgtacccgtggtggtccacattgtgtttctttgtattttattctcgtttcatttacctttttatacccccttttgacgtgcttaagccattttctttaagtcatttctcgcttaacctaaaaaaaaaaaaaaatttccaccgattatttgaattgtattattcgttaacttcggttaaaatgaattccgaccgttcggtcgtgccgtaaccacgttggaaatcaaaaaagaggtgaaataataatataataatcaaaaaatgtcttttagtaaaataaagcggaaaaccaatcggacgttttctctttgggatttctcattcttaattgaattgactaataactaaagtgaagctaagactaaaatcaattcgcctagtcaagctcgtccataaaaataggtttttgaagttaatcatccaattcttactaagtacatggatcatttc

SEQ ID NO: 12578 - DNA, 422 bp, Glycine max
  unsure (1)..(422): unsure at all n locations
agcttcttatccaaggctcatcttggnggattatgcttcttcttccatggctnattccctagnggatggcgcctcctctcacctcttctcctttgtcttccgctgcatctacatggtggaaaatcaccattaaaggacctcattgaagctcaaagatccagcctccatagaagccccacaagcaagcttccatctgtggacaaaggatcaagctgaatgttttgatgatgccaaagtttcacatgcgtctcaaagctttattcaagacaaagaaattaaagatattcaagatggatgatcaagacagtctctagagtcttagaaagggtatattaaataggaaggaaattccaattgaagtagcaaaaggtttgaccaagaatcttaagttaaaaagtctttttcaacaaatttactctctg

SEQ ID NO: 12579 - DNA, 472 bp, Glycine max
  unsure (1)..(472): unsure at all n locations
ctaagctnttctttcnaagtgtttctgatcctagttgtgtataagttctattctttgatgatatngatagtttcgggtgtaaccaataagttttaaagataagatctttctcttcatttagcgtccaccatatttttcttccatttcttgcctacaataatacccgttccattctttcctctaactntatcggtgaaccaaagcctaaatcctgtattgtctagctctttagctatttctccaacctattcagtttcttgaagacacattatgttaatccttctccttattatggtgttcgccacctctaatgacttactcatgaaagtatcgatattccaagtactaaacctaatcaactctcctggacttgcttctttacttacatccatccagaanatatgaggaactttgctcatttaacactacatttggacgttgataggccccatacggtggctctagctcattt

SEQ ID NO: 12580 - DNA, 411 bp, Glycine max
agcttgcttctacattaagttggaagttgtttcactttctctttccacccattgttgaaacattatccctattgatataccattttctaagtggtaattttgtatgagtttttatgcaattttccatgtattttctcgacataactcacatttggacactagttttgtattgtagaagcaaaatcgctcaattgagtgaaagagttagaaattacacaaatttatggagatttgaagactctacacttgataatggtcataattcatttaccaaagttgtggtaatcaacatagtcgcaataaagtgataataatcctccagaacaacgtcaaaatttgacaacagtcgtggtcaattgatgagggttgtggttcaccaagaggggtcaattgatgagggttgtggtcaac

SEQ ID NO: 12581 - DNA, 468 bp, Glycine max
  unsure (1)..(468): unsure at all n locations
ctaagctagctaacacacctctctaatagctaagttcacctcctttaaatatatgctagagcttagctacataccccctataatagctaagctcacccgcatgacaaanaaacatgaaaataccaaaaaaaaagtccttactacaaagaatactcaaaatgccccgaaatacaaggctaaaaccctatactactagaatggccaaaatacaaggcccaaacgaaggaaaaacctattctaatatttacaaagaagagtagatccaaccttgacccatgggctcaaaaatctaccctaaggttcatgagaatcctagggccttctttagtagctctagcccaagtctcttggagtcttctatccaatacccttggggggtaggattgcatcagcagctataggcaggatttatatccattacttgaaacaccacattgcaagtgtgggggcctatctgaatgggaatgt

SEQ ID NO: 12582 - DNA, 422 bp, Glycine max
agcttgctgatacaattattaggggattgtttagtactggcctataacaaatagtccaaaggaggttatgttcctgggtgagttggaagaagtcttggaagcaactcaacccccagaatttcagcgttgtatggtgccattgtttcgtcgcattgcacgttgtttgaatagccctcattttcaggtttgaatttttcaatactttcctctggctccttttctgtttctcctcttatttcatgatgaaaatacacctgaatttcaaattaattctctctggcaacttccttcatactgattacctgaatcctatatctcaattcacttcctctagttgataagttgttttaattagcaagaaaaggactaacctttttgcatcatcctatagctaaatgcatattgtcttatggttttgaagt

SEQ ID NO: 12583 - DNA, 473 bp, Glycine max
  unsure (1)..(473): unsure at all n locations
ccaagccacacccatcagaatacactgacctgtttattntcaaggaaggacaacataatgaacattcaaatattatcacagtaagaatgaagctagatataagaatcaataatgtttgaccactgtcatgaatcttgaggttgaggatccagacttctcgtgcacatacatgtaacaaatgaaaattaaaaaagagggaagatatgtttgtcagttaaagaatacatcataatgaaaagaaattgtcttttccctccagcaccttagtatgcttaaaaatgagcatgcaaaacttccctaatttgtataatataactaccaattagagttgctctttataaaaaaaaatagcaataggaagaaaaggagaatatagctggagctcacattccactgggttgacaagccagacaaagcagatagcaatatccagcagcaatttgcaccactggtatgttttcaagagcacctaa

SEQ ID NO: 12584 - DNA, 422 bp, Glycine max
  unsure (1)..(422): unsure at all n locations
agcttagaattatacaataacactttttgtttctccatgaagtccttcttaattatcatgctatcatggaacttcttggtcttttctttgtagaacttggcattctcatacgcttctaggcggatctcatctaactcactcagttgcaactttctttcctcaccagcttgatccatagagaagttgcaagtcttcactgcccagtatgctttgtgatgtaatcctaccccccaagggcattggatagaagactccaagaagattggaccaaagatgcaagagaaggccctagggttctcatgagccttagggtagattttgggcccatgggttaagtatgtgcccacttatctttgtacatattagattaaggtttcattaattntgggtcttgtatttagggctccataatgtaggtaggg

SEQ ID NO: 12585 - DNA, 466 bp, Glycine max
  unsure (1)..(466): unsure at all n locations
ctttatttatgaacaccatggacaaaccagaatatgtttgtctcaaacatggcaatggatggcagatgatattaaactcaatcatagaaaacaaggtaattctatgtgtactaaataagaacttattacccataattataatgtttattacgataataatcacaagtattcagcttactgaaaaggaaacaatccatttatgcttgactaaaattgaaaatatgctacaagccaatagaaaaagcctacgagattttccttccatgccatacccaataggatatgcacccaaccaacaccataataaactcatccacaatgaaatggcatatgacaaacaaatactggcggcagaattcaacagatcttaccattngttgataggtatatacaaattnttacactttttatttggaccctncttaatcacaacaatgcatattactaattcttaatatgtcaatat

SEQ ID NO: 12586 - DNA, 418 bp, Glycine max
  unsure (1)..(418): unsure at all n locations
agctntagaatcagaatttgccctatagtttctgtaggccttgaactagaactctgagagttacaattctgattntgactctgctgcaaactccaattggaggaggaattgttccagttgctgttttgattcagattctgaccccaattttgattgctattcctgttgttccagttgttgttctgattatgattagtatcatttccataattgttgttgtttcaactattggcagcttgatactgagggttgaacctattgcaacaggtcagagctgtgtgattatacttgaaacatacttgacattgaacagaactccgaccaccaccgcgtcctccactgtggttgaaaccacctcctctgcatttattatggccaccagaaccttgcgaatctgaagaatactgattngtataca

SEQ ID NO: 12587 - DNA, 319 bp, Glycine max
  unsure (1)..(319): unsure at all n locations
ttcattttttccttatcaagtaaatggatcanttttaaggtccaacgccttanaatgatcacctttcaagtaaaagaatcgcttgattcacacttaaagaaagaactacgtaggtctgatttcctcttcgatggagggtacgtaggagcaaaagccccgcttttgtcgacctcaaaaaataaaaagaaataaaagttaaggcaatacaatttccacaattctaaaaaataggctgttgtccttcgagaaaaatgtaagaggtgataatactttcctcaagcgtaaatataactcccaaacttagaattttattttgacc

SEQ ID NO: 12588 - DNA, 420 bp, Glycine max
agctttgcggatttggtctttgcctttgaatggatcgatgtgggtctggaaaaaggcaaatttagtcatccggcttggacgaatgagaaaattggggcaaatgaagagggtgaggatgaaggagaagcccgtgctgtgactgccattccaatatagccaagtttcccaccaacccaacaatgtcattactcagccaataacaaaccttctccttacccaccgcccagttatccacaaaggccatccctaaaatcaaccacaaagcctacctaccgcacttccaatgacaaacaccacctttagcgtaaaccaaaacaccaaccaagaaatgaattttgcagcgagaaagccttagaattcaccccgattccagtgtcctatgctgacttgctcccatatctacttgataattcaatgata

SEQ ID NO: 12589 - DNA, 419 bp, Glycine max
  unsure (1)..(419): unsure at all n locations
ntnggtacanagaagaagaagaagttcanagagatttatttcttgtaaaagattgattgaataagtgttcgagattgaatgaatgaatgaataagtgtattgaaaagcaaatcanagccttgcttttatagactcttcatgtctggtcaagacaactatttagaagagttataacttttagaaaaacttaaaaccaatttgaaaaagtcaaaaaccttttgaagagttacatcttttgatttattcagaaacaaacactggtaatcgattaccaaatcagtgtaatcgattacacaaagcttttatgtaaaaggatgtgactcttcacatttgaatntgaatntcaacgttcaaaggcactggtaatcaattaccanaacattgtaatcgattacaactttttgaaattaattggaacg

SEQ ID NO: 12590 - DNA, 402 bp, Glycine max
agctttgagccaaaatcctgactcttcatatactttgacccagggtgagaatgtcaatccttaccctcggaagcaaagaaaaaaggagagaaggaaaatttccaatcaaaggaaaaaaggagaggaaaggaaattcccaatcaaagagtgggagaaagcaaaaagaaaagaaagaaaattcccaatcaaagaatgggagaaagaaaaagagaaggagaagaaggaaggaaagctcctgatcaaggatcgaaagaaaacagaagaaatgtgcagaggggatctctggaccagacaatatctaaacaaatacagaattgtcaccaaatgaacaaaagaaagaaaaggaaaccataacctataagtggtcttctccctttgattaccaaccaaaatcctgtgcgt

SEQ ID NO: 12591 - DNA, 457 bp, Glycine max
  unsure (1)..(457): unsure at all n locations
taccctgatgaggatgtcccatatgttctatttctggactgattcatttgcttccaaagtttcatggccttgcaggtgaagacccgcacaaacatttgaaagaatttcacattgtctgctccaccatgaaacccccagatgtccaagaggatcacatatttctgaaggcttttcctcattcattagagggagtggcaaaggactggctgtattaccttgctccaaggtccatcacgagctgggatgaccttaagagagtattcttagaaaaaattttccctgcttccaggaccacagccatcaggaaggatatctcaagtattagacaactcagtggagagagcttgtatgagtactgngagagatntaagacactatgtgccagttgcccccaccatcagatttcagaacagcttcttctccaatatctttatgaaggactcagtaatatggagag

SEQ ID NO: 12592 - DNA, 418 bp, Glycine max
  unsure (1)..(418): unsure at all n locations
agctntgctgatttagttnttgcttatgatttgatcaaagtgggtctgagaagttggtgggttacattaccaacggtcatttacatttcaaagactatcaaagtcttttggtttttctgacgtttttctcaaataaacgttggtggtgactctgcttgttttctcccttggagacaaacgctttggcccatctattttggctatttcgcgcccccatcgaagggtaggttgctacaattggtgactctgctggggactttttagagagttaggccattaaatcattgtgcaaatgcttttatcatgacttcttctttatttattttctcttttctcttttgttttgtccatatttgtataacctttgctatgttgttgtgtttggtgtgtgtttggctatcgattacattcatagtta

SEQ ID NO: 12593 - DNA, 450 bp, Glycine max
  unsure (1)..(450): unsure at all n locations
actgcaacattataatgacccnctcgttcatttttttaacagcagaataattatgatatttcaagcaacagatataatcccagttggaagaatcatccaactctgagatgggcaagtcctccacaacaacaacaatctgtccctcctttccagaatattgctgatccaagcaggccatatgttcctcctccaatgcagcaacaacaacagcaatcacaacaaagacaacaagcaattgaggctcctcctcaaccttccgtagaagagttagtgaggcaaatgaccatccaagatatgcaatttcagcaagagacaagagactccattcagagtctgacaaatcagatggggcagatggctactcagttgaatcaagctcagtcccaaaattctgacaaatggccttcacaaactgtggaaaatctgaataatgtgagtgtcatcaccttg

SEQ ID NO: 12594 - DNA, 231 bp, Glycine max
  unsure (1)..(231): unsure at all n locations
cttaagcacctgcagctcgctacctaagaatacttttttgggaaaacacgaatgctacnaatgactgctggagatatgtaggcccttcatggttgactatttttgagcaaggagacctgattgagacaatctttcagaagaggagtgagagactaccaggcagccatgaacactgagtcatgacaagcaacttaaacacccacacatataaacaagtgtattgatctgcat

SEQ ID NO: 12595 - DNA, 405 bp, Glycine max
  unsure (1)..(405): unsure at all n locations
tgttatccaaggctcatcttggtggtgaagctccttcttctatggcttattccttaatggatgacgcctcctctcacctcctttcctttgtcttccgctgcatctccatggtggaaaatcaccattaaaggaccccattgaagctcaaagatccaacctccatagaagccccacaagcaagcttccatcaagtggtaatcagagcacaagagcttcaagtaggtgctccttaaacctccattaattntttttctttaccttctgttccatttttgtttcttcatttttctccatatatctcctcacatgtcttgttctaaatgttgttaacatgattctttagagtttccaccgattaaacttgctatagaagttagaattgaatttctatgggtcaaaaattct

SEQ ID NO: 12596 - DNA, 413 bp, Glycine max
  unsure (1)..(413): unsure at all n locations
agcttcaggaaggaaagattgccttttttatatatctcaatggaaatagatacatagaaacaaacacaagatataaagaattaaaatattgataactatttattgaaaatttaaaactaatggccattcctcttaaaatcagtagtagatgcatttactttacaaaactagtgcagaaaataaattcagtgaatacctgtcctttgacatctactagagtaattcttgtcagctcaaaaccttcacttgttatgcactaagcaaatgaaaagaaaatgaagattgatcaagattacatatgtacaggataaccataaaaagaatgccataactactttaatntgtctcaataaaaatgaagttacttaaaattttgcctatgtatntgaataaaacctcagtcaatataattt

SEQ ID NO: 12597 - DNA, 456 bp, Glycine max
  unsure (1)..(456): unsure at all n locations
tgaagatgatgctntaatggagganaagaatgagagtattgtggagcacganattgaaggaataaaagagggagagaagtgaaactttgaagtgtatctcataagactttcattcatcaaagttacaacaagtgttacacatgcttctatttatagactaggtagctaccttgagaagttttcttgagaaaacttcattgagaaacttctttgagaaaacttccttgagaagcttctttgagaaaacttccttgagaagctagagcttagctacacatagccctctcataactaagctcacctccttgagaagcttccttaagaagattcctaaagaagctagagcttagctacacatatctctctaatagctaagctcacctncttgagatgagaagctagaagctagctacaccccctataatagctaagctcaccctcatgacanaatacatg

SEQ ID NO: 12598 - DNA, 448 bp, Glycine max
  unsure (1)..(448): unsure at all n locations
gatccttaagcacctgcggctgcagcttgaggaatttatatggngggtatcttatctctactcttcggcaggagggcgacgcggngctcatgagtgcgtcttccaagaaaggaaaatgcgtggagtcgccaccaacgtttatttgaggaaaacatcgaaaaaaccggaaaaggtgtggtctacgaactttaagtgtgaaaggttcgggagttgtttttacgcacgggaaaggtattagcaccccacgcgtccgtcacaagggacgacaacctttaattaagtgtgcaaatatgacttcaaaatgttttattttccctttttttatgtcttttggtgtttttatgctttttatgtttttttgtattttttatctttntgtggtcgacaagggtatttccctcgctcctacgtatcctcaattgcgatgaggaaatcagacctacgtagt

SEQ ID NO: 12599 - DNA, 182 bp, Glycine max
  unsure (1)..(182): unsure at all n locations
agcttctagccaaatggacttaccttgaatttatncttttgatagcccctttgagcctatgttcccctttctttgttttgaagctcattacaagccttaagtgaaaaaccatgataccaccttacccttaaggtattttggagctttggaattgttttgggaataagtgtgggggggggtat

SEQ ID NO: 12600 - DNA, 476 bp, Glycine max
tccttgagaagattcctaaagaagctagagcttagctacttacacttttctaatagctaagctcacctccataagatgagaagccagagcttagctacacacccccaataaaagctaagctcaccctcatgacaaaatacatgaaaaaacaaaaaaagttcctactacaaagactactcaaaatgcctcgaaatacaaggctaaaaccctatactactagaatggccaaaatacaaggcccaaacgaagaaaaaacctattctaatatttacaaagataagtgggctcatacttaccccatgagctcgaaatctaccctaaggctcatgagaatcctagggccttcccttggatctctggcccaacctacttggagtcttttatccaatgcccttgcgggataagattgcatcaatatggaagccttaagttgtcacaactcaacctcccaatttcaaaatgtatgactaacacag

SEQ ID NO: 12601 - DNA, 435 bp, Glycine max
  unsure (1)..(435): unsure at all n locations
gcaagcttgtagggattanntggggtacccgtcatattgtggttctattgtggcgattggggcgaatggtgcaatatcatctctcccacatccacaaatcaaacatgaacccaccatccccagttgcccaccttcaactgagctcacgtacccccacgtagcccttatccttgttcctcttagcacggggtccccatcaaaccctccaagcttccaaaatatccaagaaattcaatatccaaacttcatgaactaccctaaaccaagaaaacagggcagaggtagaaaactctgcccaaaacacattccaataccacaactttccctactcaaataccccagtaacatgcgttacgattctttaaccgttggatcgacaagaaaattttactggatgtccctagtacataattctacattntgaccgttgggatc

SEQ ID NO: 12602 - DNA, 465 bp, Glycine max
  unsure (1)..(465): unsure at all n locations
ggcctaattaacctgaaattgagagaaaatgattattattttcctttttggaagtactaagtatttattacctatacttaacagaaaatatttataacactacaaaataaccataaattggaggagtttgatacaatttacacaggttttatacaaaaagttagtcgtattcatcgactaacaactcctgcaaatttacagttttgcttgtcctcaagcaaataaagaacaactcacttgtcctcaagtgacaataacatgtagtgatcttgtacaaagttgtatgcaaaaaaaattactgattgcatgataagaaaaatgaagcattatgtactcatcacttgtctttcccaaaatatgttgttattcaaagagaagaataaaatgtaacctgaacaattagatggagttaggcttaagacaaatatcaaggaaagtagcttanaccacagtctcacgtctact

SEQ ID NO: 12603 - DNA, 420 bp, Glycine max
agcttgaaattgaacaacggaagctctcgataaactttatggtcataacttatcacacgaacgtccgattcaggcgcataatatatcgagacactccaaattgaacaacgtagggtcttgagaaattcaaatgttcataacttgtcacacgaaagtccaattcaggcacataatacatcgagaagctcaaaattgagcaacgaatgctctcgtgaaattcaaatggtcataacttgtcacacggaagtctgattcaggcgcataatatatcgagacgctcgaaattgaacaaccaaagctctcgagaaattcaaatggtcataacgttttacacggaggtccgattctggcacataatatatcgagaagctggaaattgaacaaagaaagctctcgagaaactaaaatggtcataactta

SEQ ID NO: 12604 - DNA, 454 bp, Glycine max
aacaacagaagctcttgagaaatcaaatggtatatttttcacacggaagtccgattcaggtgcataatatatcgagaccctcgaaattgcacaacggaagccctcaagaaagacaaatggtgataacttttcaaacggaagtccgattcaggtgcataatatatcgagaagcttgaaattgaacaatggaagctctcgagaaattcaaatggtcataacttatcacacggaagtccgattcaagcgcataatataccgagacgctcgaaattgcacaacggaagccctcaagaaattcaagtggtgataacttatcacacggaagtccgattaaggtgcataatatatcgagacgctcgaaattgaacaacggaaggtgtcgagaaattcaaatggtcataacttatgacacagaagtccgattcaagcgcataatatatcgagacactcgaaa

SEQ ID NO: 12605 - DNA, 373 bp, Glycine max
  unsure (1)..(373): unsure at all n locations
actgaaaatgttagtcagtttgttagattgattgtgaaggaatgcattaatcgtatcccggtgagagtgtgatccttaaattttgagagaaatgactatcatttagtactgatttttgcgtgaatctctgaagtatggattagatgcatgaaattgaggatgatgaaggccatgtttgattgtgatagtcacttagccaaaaagctaatcatgtgcttgaatgaattatcccttgtacccaatttgaattgaatgaattattgattgattgaaccctgagcccatacagtgttatctcctgctaccttgacttaggttgtaggagagcatcatttacaggaagcgtggttcatagcaaatttgtcccanattt

SEQ ID NO: 12606 - DNA, 469 bp, Glycine max
gctgcccgtggagcttctatggaggctggatctttgagctttaatgtagttcttcaatggtgatttttcaccatggagatgcagcggaagacaaacgagaagaggtgagaggaggcgccatccattaaggaataagccatggaaaaaagagcttcaccaccaagatgagccttggataagaagcttggaacgatgcttcaatggaggaaaagaaagagggagagaaagagagaggggggagcacgaaattgaaggaagaaaaagggagagaagttgaactttgagttgtgtctcacaagactctcattcatcaaagttaccacaagtgttacacatgcttctatttatagactagctagcttccttgagaagctttcttgagaaaacttccttgagaagcttctttgagaaaacttccttgagaagctagagcttagctatacacacccctctcataactaagctcacc

SEQ ID NO: 12607 - DNA, 415 bp, Glycine max
agcttgaggatatgggaacctatattgtggtactaggtggcggtcgggcgatgatgcataacaagttttccacatccacaatgcgcgcataaacccaccatcccctgttgcccacctccatctgagctcacgtattcccacgtagcccatatcctcgtttctctcaacaccgggtccccatcaatcctcccaagcttccacaacatccaatcaaaacaacattcaaacagcacaagctatcacagccaagcaaaacagggcaaaggtagaaaactctgctcaacacaccaaccaaaatcacagcttttctcactcaaagaccccagtaacaattccttcgatccaattcgttaaccgttggatcgactccaaaattttactggaagtctatagtgcataagcctacattgtgacc

SEQ ID NO: 12608 - DNA, 459 bp, Glycine max
  unsure (1)..(459): unsure at all n locations
tcacccttagtggatcccatatgggcacacttatatttatttagtgtatgtgacttagttgtaagcattcagcagcttcccttttcttttggtgaacaaatcagttccaataatgacgaatcaagtactattcttcttcccctcatgaacttgcccatttcacatggcttccagcccttcacctctcattgtttatgggtccaattattaacctttgattggaaaaacagaatgaataatgcattaatatgttatatccttttcatgttataccttcataaattttatacagtatatctatcataatctataataattagcatatagccagatgtacccatgtggtggccatcgaatgggacacaattgctntgtgccaggaatggggtatggtaggtgcagataatgattgcacataacacattcccctataaatacanatctcaaccttctgttaca

SEQ ID NO: 12609 - DNA, 416 bp, Glycine max
  unsure (1)..(416): unsure at all n locations
agctntntaacacttagaagatatggtatanttacaaacaaaatcggctactgcaggagatttaagaattaagtcaggaaatgaattagttgtactcctaataccaaatataacacatctagaaataatttcctaatagtcaatttacagctcataggttgaacaaaaatctcgtagagaaaatataaaaactaaaggctaatgctaaccagtaaggaccctgttaaggaactaaaaggagaaagctttttattagaatgtgtaaaattgtgttactcataactttttttgcgctcccctattatttccacaagaaaaactttcttcttttaattcctagctagagatttcatcaccaccataaaacaaaatttgagttataagctgataagcacccgccacccaagcacttggaa

SEQ ID NO: 12610 - DNA, 409 bp, Glycine max
  unsure (1)..(409): unsure at all n locations
cccgacagnngggtattattgaagcttcttccttatcgacaaagctcagtgaagagtgctcaagcagtgactggtaaattgtccaagcgcttctatggaccgtctcagatcatagaacgcgtgggtaaggtagcctatcgtttgaagcttcctgatggggctcgtatccatccggtatttcactgttcccttttgaagccattccacggagaccccattcttgattcacccaattcactgccgacacgctttattaacggtcaaccgatgcttacaccgcttgccattcttgattatctgcgacataaagagagggacacgtgggaagtattggtccantggcatggacttttcactgatgaatcctcttgggaggactgggaacagcttaagcaggatcatcaccttg

SEQ ID NO: 12611 - DNA, 411 bp, Glycine max
  unsure (1)..(411): unsure at all n locations
agctntgaganaaatataacgacttatactttttctcggatgtctgatcgagcccagtaatatatcaagacgctcgaaattgaaaatggaagcactaagaaaagtcaaacgacaataacttttgactcggatgtacaattgtgtcccgtaggatatcgtgacgctcgtaattgaaaacggaagctctgagaaaaatcgaacgataataacttttaactcggatgtccgattgagccctgtaatatatcgagacgctcgaaagtgaaaacggaagctctaagaaaagtcaaccgacaataacttttaactaggatgtccgattgagccctataatatatcgagacgctcgaaatggaaaacggaagctctaagaaaagtcaaacgacaataacttttgactcggatgtccga

SEQ ID NO: 12612 - DNA, 458 bp, Glycine max
cgcttggagtttccaagtgccaactcgtcttcttctttattctagtcttcttctggcttcaattcttcagtgggctttccttctgtgtccagcatcttgggatgttcccagcctttgatgacagctttccaggttctgctatccagtgatttgaggaaggccaccattcttgctttccaatattcatagttgcttccatcgagaattggtggtctgttcactggtccgccttctttctccatgttcatcagaatttatctccctagatctcactctgtgatttcgagtgttggctctgataccaattgaaattctgataccaggggacagatgtcgtaccggatgtcacgacatcacgcttcagaacatgcagaatgtatgtgtccgtatgaacagattaaacaagtaaataacacaagagaattgtttacccagttcggtgcaacctcacctacatc

SEQ ID NO: 12613 - DNA, 418 bp, Glycine max
  unsure (1)..(418): unsure at all n locations
agctntagatagatttatcagtatataagtttactttttgtatgtttaaatgtattgcctgtaatatttttacatttctctagttgtattccctgtagaatatggactaggttagtacgtctcatcttatgaatgttatcccactttctctttcttctcatgtagtttttgcttaatttttttggcttttgctttaggttgttgctcacatgatgcctgaccttcctaatgttggtgttgaaagggacatggaaagtttccgggagttttttgagagccccatgtttagagcagatgggcttaaaatatatcctacacttgtaattcgtggaactgggctttatgagctctggaaaactggcaggtatatatcanatgttttcttattattggactgctttttcctcaaacatctcaa

SEQ ID NO: 12614 - DNA, 426 bp, Glycine max
  unsure (1)..(426): unsure at all n locations
agagtataactctgttagttaaaagctacctatgttttctgtgtcatggttaggttaacagtgttagtcagttagaatctctgtatggtaactaattgtaaaatttcttgtcataatacaagatctattttctctctcttatctgttcctatcacaaatctttataaactcaaattaagtcatctctatttcatgttgaattaaaccaccacccttgaggatccaattaaggcagcccccaaagaagctgcagctaagggaggctaggggcgacttcaattaaggcaacattcaaacaatttctaaagcattagtcttagaatttggctntggacctaactcaaccctacaaaaccggcttgtaaggtgagagttgcctcctacttatacacactactctggccatatcatgagttgatgtgggac

SEQ ID NO: 12615 - DNA, 419 bp, Glycine max
  unsure (1)..(419): unsure at all n locations
agcttgttcttgattttcctcattttnttttcttctttgaacaatatacttgtccttcatttaactgtctcanggcttggaggccacactcaacanagtactttcgacacctactgtacgttgatttgaccaatgctgttatgggaatgttgcgacaatcctttaaaaccttattgatgcattctgagaggttcgttgtcatgtggccatatcaacgtccttctctatcgtaagccatcgaccatttttccttagaaatgcgatcaatccatgttgctatggctagactcagttcatgaaatttttctaaattttgataaaaaaatatgcttgcaaggagtgtaggctacataaaattagttatgaataacaattttaagtataaatgaaagtaaaataaacgtgaccatcaaatatga

SEQ ID NO: 12616 - DNA, 447 bp, Glycine max
  unsure (1)..(447): unsure at all n locations
actaacgctagggtgccacctgttgctgaccattntacacatttctcttctatatcaggaaaaattgcatttagaaagtaaaaataaaaataaacagcaaaaaaagaagcttaataagaagcagaaggaaggaaaagctaactctagtttagttgctaaaacaaagggagtgttatctggtcatcacatgtcacctaagccaaagcatcctcaatgtagtaacagacatgaagaatgtgaggtgtaagatgattgaggaacaagggatgtagctgattttgatgcagatgaagaagaaagtgtggcaaaggatttagctacttttgatgaaggtttcaaatttgctctagtttctcaaggaggtaccgataatcattcacgttgtgtaccattagatggtcatgtttatgcacatcctactattgatccaatctggaggtacataaa

SEQ ID NO: 12617 - DNA, 408 bp, Glycine max
agcttagagaggaagcttatttggttaaatgattgagagagagggggggcacgaaattgaaggagaaaaagagggagagaagttgaactttgaagtgtgtctcacaagtttcacattcatcaaagttaggacaagtgttacacatgtttctatttatagcctatatcactaactaaatgaaagcttccttgaaaagcttccttgagaaactttcttgagaagctagagcttagctacacacacccctctaatagccaagctcacctccttgagaagtttccttgagaagctatagcttagctacacacacccctctaatagctaagctcacctccttaagatgagaagctaaagcttagctacacacacccctctaatagctaagctcaccccatgccaaaatacatg

SEQ ID NO: 12618 - DNA, 352 bp, Glycine max
  unsure (1)..(352): unsure at all n locations
tcatcctcagatccctcttgttggacaagtgtttatatnttgactgctcctcctaggtttagattaacttaaactaagcttcatcctcagatccctcttgttggatgttagtcgctttatacgactaacttttgtatagaaatcattttccaaatcttgtatagttccccaatttgtggttattttggagtaaattttgtaaataaatctttttttatggttaacattgtctctagaacattatcattggatttaatgatgaaatctgtgcattttcaggtgaaaaaaatgctaagntttgaattgaaaaaagtanacagtgggctaagcgcttatccaccgctaagcacag

SEQ ID NO: 12619 - DNA, 379 bp, Glycine max
  unsure (1)..(379): unsure at all n locations
atcatatcttccgnaatacttatcacctctatcatatctaataattttcacatttatgtctaattgtcattttacttcattgtagtaaatttctaaggaatccatttcctaagaaatctcgggcaataaatagacataaccgtaacgtgaataatcatcaataatggtgataaagtatcattcctttttgaaagaactaacaccaaaaggtccacaaatatcagtatgcacaatttcaagaagttgagtgcttcttgtagctcttttctttgtatgttttgcttggttttcccttaatacaacccacacaaatatttagatccgtaaaatctagataaggaagaatttcattctttattaatctttccatcctttctct

SEQ ID NO: 12620 - DNA, 445 bp, Glycine max
  unsure (1)..(445): unsure at all n locations
tgtgttgaccttggagatgcctcacccttctttactacctctctttcattcttctaggtcacacttttccatggacccaaatacaaatatgaaaatgcttgaccaaaatgatatgaattggatctacctagatgaattntgtgttggttgttcagaatatgctttcaccaagtttgatccttttgctcccttcaaacatgatcaaatgtgagatgacaatgggagaaattcaggtgtaattaattatggcaataaactatgatataagtaataagtattaatagaatatttgtttgtgtttgttttaactttntttgtccatgctttgaaacatagaggaaaaggagagaacttatgggatgaatgtttcttggtttttgtcgctatgaatcgtttagtttatcgcattacaagaatagattattgttctaacattaaagtatat

SEQ ID NO: 12621 - DNA, 361 bp, Glycine max
ataagccattcccaaatttatatttccaataatttgagcaggatgcctcttttaccagttgcagaaatacactggctatagccaaatgaaatccaacatctccagcacttctgggcaaggtttatccaatcttacaaatagttaaaaacttaaatctaccactctatcctaacagaaagtcagaaacatactctaattgtagaaaaagagcaacttctcattttgttcacttgagtaaactagaaaacataacctaatataaattatgctccaatttcctctacatgtgatcactcctctgacaaagtagtaattatccagtagactgattccaaaaccacacatccataatccttgacaa

SEQ ID NO: 12622 - DNA, 417 bp, Glycine max
  unsure (1)..(417): unsure at all n locations
aacaaaataaagggactgagttgaatatttaaaatatacacatcaaaatcaatcaataatgaagttaccatgtaataatttataaatgatccccctttctgtataaaccttgcaactgaaaatgccaagtcttcagcaggtcgatgaggaacaggacctccaaactctgtaaacctgcaagcataaaagaggaatagaggcaatgaataatcacttgatatctctagcttgaatgattcttattcttatggaaaccaaagaaataagaaacaaggcatcaataccagccagtccaagcttctgtccacatctttggcttgtaagccttatttggagagaaataatcacaatagaagccattgcaagtgttaatctgtgaaacattntattacatttgaaattagaagtngaatactt

SEQ ID NO: 12623 - DNA, 438 bp, Glycine max
aagtcgacacgcggcatgcagctctcgttttgataatccagatatcacttgctgcagatcctgagtcaaatgtacatacctgcagttagaagaaaaattagtaagataataactctagacaataatcagatgttaattataaatggagaaaaaaactggaaaactagagatggagccaccgtaaaactgtgaacagtaggcattgcagatttcacagttgactcaatcacaaaattataatcgattaataggtgaacatatttgaaaagcatttgcattcacattatgcaacaaaagaaacaataaaaaactaagaacattacattagtgctaccatacctacgaaattcttcgcttctgctaatggcctcataatcaacatgttgcctatcatcagaggcataagactcaagaatggcagacataatcttggtaagc

SEQ ID NO: 12624 - DNA, 358 bp, Glycine max
tttggtgtgggcttggccgatagtggtggttctgatgtaggctttaggccgcgtgagtgagtgggttactgtgtttgcgtgggtttctgttctaacgtttcgatttctagggaaggaaatgaatagtatgagcaagatgattttggtttttttttttgtgttggtggttcacggagggggagggtggcgctgagtggtggctatgccgatggtggtggttcacggatgagaacaggggcactgaatggtggctagtggtggctcttggctgttccggcgctttggctgtccgtattccctcctctctccctctgacatgcacagtaattaatgcagcatttaaaggacataattaggg

SEQ ID NO: 12625 - DNA, 420 bp, Glycine max
  unsure (1)..(420): unsure at all n locations
agcttatcaaaattcattctcccgtgcgagttgatctatattttgtngcaaaacgggggcctaatttttttattcaggtcttatcaatgctatagagatataacacgtgcaattagtctgtatgtacattggatatatagtagatagaatggttattcaatatttgtttggtcacctttcaaatatgtcgtaaccattgcagggtgttgatgcattgcagggtatttagtcacaaactctttgcctgtgtattgctatgggtatttcaaatatgtcatgggtatttctatggcgcgtacccttttctcttgtctaataaatctttattttgtcaatgaaaaaaagttgaatatgtatattgagaagggattgaacttgtgaacttattcataggtttcataacttaatcaactaagctga

SEQ ID NO: 12626 - DNA, 427 bp, Glycine max
  unsure (1)..(427): unsure at all n locations
aagctgggcgagaagtctganaaggttaggtttctatgaaaacttttgttatttttgtcaacgcctctgnggaaccaattggntaactatgcccatataatattgctatatatgcaagttgaattaagtcagaaactagcaactagcttaaatagctatgagctatgcattatatggtctagtaaatgaaaacaaagggaggggaaaacaacgatagattaagaaccagtatagagtgtgaaagcttgaaaaggagccaatttaactatacaatatgcttgaatgcttgaggatgtaaattatatttgagtaaattaatttgaacactgcatcttactttcacactctcacaattagaaaaatagatttttaacaatataagactaaacttataatattatgtaataactttctttctatagactat

SEQ ID NO: 12627 - DNA, 421 bp, Glycine max
agcttgaccaatcccgacccaacccgggcatagttttcattgagaacctgtgatgtacctaagcaggcgagctcctgacagtcaacagataaaaggaacaaagaccacaaagcaaggaggcttgtggtggctggccagctgtgaactttgattgatatgtgggttatggcctctagtaatcgattaccaagggtgggtaatcgattacaaggcttaaaaatgaagacaggagactaagatggcctctggtaatcgattaccaaggggtgtaatcaattaccaggcttgaaaacgaggtcaggaagccatgagggcttctggtaatcgattaccaagggggtgtaatcgattaccaggcttagaattgaaggcagcaggttgtagaggcctctggtaatcgattaccagtctgtgtaatcga

SEQ ID NO: 12628 - DNA, 465 bp, Glycine max
  unsure (1)..(465): unsure at all n locations
tgattaatagtttatctcanaggctacactgcttgtagtttgcagtggagaggggagttgaagagaggcaaaaacaaaaataatatgtacatatgttgcaagtatattttcatggttgtagttcctaaaagatgtaatttttgaaggaaagtcaaagtatcattaagattgtttgcttcaagttcaactaattatttcattggaagttttcaaatttgcagaatgaatgtgctaaggctaacatatagctacaagaacaaaataggtgcatccaaaggctcacaccggagcttgataagatcactcaatttgatgtgagaaaagttttttttgtttttagacaaaacaagactttatgttctatgcaacatactctagtttcgattttgaggttttctatttatcatttcaaaattctatacaagtgtcccagccaaattagtttgagcaaaaacctaacattta

SEQ ID NO: 12629 - DNA, 291 bp, Glycine max
  unsure (1)..(291): unsure at all n locations
agcttgttaaagaacttagaaaaaatcaagtacaagtttgttcgcacatcgntcgcgtgtatgacatccactccacaagggttgaaatagaggagaccttcaatcctattacgcaacgtggcggacaaaagtgggcagttaacttgaatgttcattattgtcaatgcggaaggtattctgcgcttcactatccatgttcacatattattgcagcttgtggttacgtgagcctgaactactaccaatacatagatattgtttatacaaatgaacacatcttaaaagcttact

SEQ ID NO: 12630 - DNA, 441 bp, Glycine max
  unsure (1)..(441): unsure at all n locations
agctaacagaatnggaaatgaaagagcatagtagtggactagttgctttattgttgtcagcttagcatggcaattatatgaagcccttcaagtatgctggtgcactgctctttctcttaagcctagttactggatgttcttgcttgttatcatcccctttgccttccaaaatcaccttgtcctctatgtgatattaagcttgaagttgttcccgatcctcccacttcgtatcctcgagaaataggtcatcccactgcacaagaacctgcagcttagcttcactagaatttgagttttgtctagtgcccactatagctaatggcgtaataaggggttgattatcaattgcaataggtggtaacgataattgtggagcactgtcatcagtaggaggatgatgaaatggtttaagcatagaacaatggaacacgagatgaatat

SEQ ID NO: 12631 - DNA, 421 bp, Glycine max
  unsure (1)..(421): unsure at all n locations
ttaagcaccgcggctgcagcttatctgtaggtcggctctaaaattgacgatggagatcattgngtgtctaatctcatttctttaacccatctttccttctcgtccatatctaatctcaacaattctcatagcttcctccaaatgattaccaagctaccaaaacttagagaactgagtttaattgattgtagcctttccgatcattttatcctttcactgaggccctccaaattcaatttttctagttccctttccatccttgatctttcctggaacagcttcacgtcatcaatgatactccagtggctgtccaacgtcacttccaaccttgttgagcttgaccttagtcataacctcttggagggtgacgatttgaaatccttcgcgaatatatgcaccttacgttctttatatgcgacag

SEQ ID NO: 12632 - DNA, 463 bp, Glycine max
  unsure (1)..(463): unsure at all n locations
atgtcgactaatagtaaacccaaaactgaaataacttctgattgtgcacatattctatatttgagggcacatttgggtagtgaaatttttttgtaaatatcattggtaagcatgaaaaagtgttatcatttggtatcgtgtggctgcagagaaagtacctaagaagatacaagagaattccattaatgtttgagcctggaagaataaataagcttgctgcagaaaatgaacaactcaagttatgcattacataaaaagtgtttgaaaatttttatgcttgtgagtgtgccatactatccaaagttaactttgaagttttacagaaactggttaattaactgaaaaataaaattgtgaaggagtttcttgttaatgttatcgacaatgagttgataaatatgggtattacgtacagaagatgtgatngacaaaataattatttaaaattagcaaccttcgaagt

SEQ ID NO: 12633 - DNA, 414 bp, Glycine max
  unsure (1)..(414): unsure at all n locations
cgctgcagctatatattactgngattctattancttagtcaattgntccttggatatagcgaagaattcattttgcagccttgagatgagtagtggttggagtttccatgtatcgactgatgagtccagtagcatatagaatgtctagtcttgtgcacatcaaatatcacaaactatgtaccaaactcttgaaatttgtagcatccaccttttttgcttcgtcgaactttgataacttcatttagcactccacttgtgtaccaactggcttggagctatccatcttgaattttttgagcatctcctttgcatatttttgttgtgaaatgaagatttcatctttcttctgctttacctcaatgtcgacatagtatgacattagtctaatagtggtcatctcgaactctttgatca

SEQ ID NO: 12634 - DNA, 318 bp, Glycine max
  unsure (1)..(318): unsure at all n locations
tctcttgttacggatacacatggttaaattaagcaaccaaatacagaagccgttaaggaaaacttcctttatgataatacaattcccactacctccttgaaaattgaaatctttcacttatattaaccatacattctttctataacttagcaccaattaacactcacacccttttcagtttataccaaacaaatgatgttacagccttctttcttgtgcttctctttcatgtttctcatcacactccctcttggaaaaagctctaccaccttgaatgtacccaangacataatcaatcaaacatgccaaaaatgtgcc

SEQ ID NO: 12635 - DNA, 404 bp, Glycine max
  unsure (1)..(404): unsure at all n locations
tgtcccacanacctctctaacatctggtccatgttgggtttattataatggtcttttcttgtggctttgttggccttgcggtagtcgatgtacattcttcagccaatgaaaatccttgttgggattaggtcattcttttcaatccgaatgactgccatgccccctttctttggtaccacctggactaggcttacccaaacactgttggaaatggggtagataagcccagcctctagaagcttgagcacctctttccgcacctcttccttcattgatgggttgatccttctctggggttgtcttactggtctatagtcttcttccatgattatcttgtgcatacagtaagcagggttgattccttttagaattgatatgtgccaccctatttgcctcttgtgtct

SEQ ID NO: 12636 - DNA, 419 bp, Glycine max
  unsure (1)..(419): unsure at all n locations
agcttgtgcctctctctntctcgtttatactagctttacttaagtatatacttgttttactttcctcactcatattcttacttgagcgtcggagtcctttgtttcgcaggtcccccctcctgtcaaaggcacctctcctaaccaacgtgtgaagtttgggacctcactcaatcacgtccaccctaacgtgttatgattccggattttggtaagaacaatttccgtaaaagttatagtttttaaaaaatatacatctctatcaccacataacaacaacatgtcatacatttgaccatatcatatgttaataatcattgtgaggaaaatatatgtaatgtaacataactaattaatctacattaaatcattattgattattaagttgtgaaactatttttcttatttttgtaatttcataa

SEQ ID NO: 12637 - DNA, 461 bp, Glycine max
  unsure (1)..(461): unsure at all n locations
tactcaccttatttcagcatcattcgtgtctttgaagttttatttttttgccttagcatgtnggagcatcacatctttctttattgcttttattgcatgcttttaattaatgcaaacacatttgtctttactactctcttatgcattgcatcttttgatgatcctttagtcatgtgtagcttctagcatctatctcatgattaaagctacctttaaaagcatgattctagtcatatacaacttttgatttcaacattttgacatggaaaacactacttttggtatcaacaactttcgatataaacatcttctgaatgcgcacacacactattcttcgaaaaccttgactatatgccaatgattcacagatactatatgcttttagattaagtcttatctaagatcaagcactcaagacaaatcattagcagcacaagtctaaatgacttagaattttcttc

SEQ ID NO: 12638 - DNA, 420 bp, Glycine max
  unsure (1)..(420): unsure at all n locations
agcttatgcgcatatttccttacttacgttctcttgcacaagacattctattaaccgaaaaaaatgcacccatatacaatcaaggcagcttcgttacctagattatttacacgtacttccaaggtgtatttgttacttacatcacacacatctccttggctaaattcacatacatgcatactcaaagcattttgggggaccaaaaattgcacatgtgcacatcttggtatttctaatacctatacatacacaaacctcatgatgaatcttgactatctacacaataaggtgctacatttcatgctcttttcaagtttttgctacctaaggccgcatgcaaattcaagtatattttccttcgctggctaaaattgtattcaaattaaaaggtatacattnttttggtaatgtatcttcttt

SEQ ID NO: 12639 - DNA, 441 bp, Glycine max
cccatgtgaattgcttacatagatctgttatatcccactaattgttctccttttgaagttgtttatggttttaacccactaactcctcttgatcttttgcctatgcctaatgtttctgtttttaagcataaagaaggtcaagcaaaggcggactatgtgaagaagcttcatgagagagtcaaagatcaaattgagaggaaaaataaaagctatgctaaacaagccaacaaagggagaaagaaggctgtcttcgaacccggagattgggtttgggtgcacctgagaaaagaaaggtttccggaacaaaggaaatcaaagcttcaaccaaggggagatggaccatttcaagtgcttgaaagaatcaatgacaatgcttacaaagttgagctgcccggtgagtataatgttagttccaccttcaatgtctctgaattatctctt

SEQ ID NO: 12640 - DNA, 420 bp, Glycine max
  unsure (1)..(420): unsure at all n locations
agctntgtttgtccttaagtaaaagtaaattatactctagaaactaagttagattattggcaagaccaaggactatgaccaatcacaagtttccaagacacaagtttgctttcaaacacatcaagccacacaatctcaagatcacacttctaaaaatgtcgatgattgaatcataaagaaaatgcactctagagttcaagagatcaacaagcataacactaagtagtggcagatccataaatttttcttagtgggggcaagaaataatttctaatattttcacaaaaagtaaaatatcacaaggtaatacaaaatatataatatcacgataaaagaaatctaaagtgcttaagcttctacaaaataaaattgtcctctatgcattttcatactctgaaaatgttctatgattnttcattg

SEQ ID NO: 12641 - DNA, 390 bp, Glycine max
  unsure (1)..(390): unsure at all n locations
cccgactgcgataaggtttagacacatgtttggtttttttctacctccttcaacatgagcttatgccctatgttggtcataaaagtgatgtcaccaatgcctactagttttcttgtgacacaatttcccatttttaccgtaccaaagtcacccattttgataggttgagaaaaatcctccatgtgggctaacgtggaaagatgcacccgagtcaacaatccatgaacaatcatcacatgcatcattaagatagttgtcttctccaatgaggaatacatcatcatctagatctgctgcaatgaccatagtgctcttatcctcctttntcttagaatcaatttggtctggcttaacaatgccgattttttgtctctcttgagatgtcgacat

SEQ ID NO: 12642 - DNA, 404 bp, Glycine max
  unsure (1)..(404): unsure at all n locations
agcttgacgttaatctcattttgttttttatgaccttgngagaggtttaccaaggatgtcatacaaagatgaaacaaattaaaacctctttttcaagcaaaaactttgtttcctcaagaccacttgaactattacatattgatctgtttggctacaatgaatgactacattagatggacatgggtaatgttccttgctcataagaatgagtcctttgaggtattctttaaattttataaaagagcttaaaatgaaaaaaaagtatgcgttacttcaattagaagtgatcatggtggagagtttgaaaatgagaactttcgtctattctatgaagaaaatggaacttttcataatttcttcatgtcataccctaatttcattcggggacgaatgtttgtcaacat

SEQ ID NO: 12643 - DNA, 402 bp, Glycine max
  unsure (1)..(402): unsure at all n locations
ggacactataaaactaagcttgtaaaggctagactgatcagcagtgtttttttggttcaaagataaaagggatgccccacattatttccatgacacaaatgcaaaaatgatgatttggaaattttatgcaaaactggtcatgcatgcacctatgtggacgctcaagtgtcaaatttttatggtcatgtgatgctagggctcaggattcatttcctctattntaaatcaacccaatgtttccaaaatatgttcttttatcaatttgtgcattcatccgagtccatttcgggcgtctaggaaaattttcacagcattcacccttcaggtgtacacacacattntccaaaaattagtgaattttttcanagaaaagtnggaaatcatctcttttcataagcatgt

SEQ ID NO: 12644 - DNA, 428 bp, Glycine max
  unsure (1)..(428): unsure at all n locations
agcttcataaatcaaatcacaaccctaactattgctttcatttatgggaggagataaacacatcactacttccatcatattttaaaacagagggaacaagtagcagtaaagcaagacaagagggtggatgaaaagcttcctactctcctagcaattatccatcgcatccattaagaatgagtcttgctaccgacagtcactttagaaatcaacaaaatatatacttgaaactacaaactacattataagattttaacgagcttaatactgcattttatatggaaccaaattgtaagaaatttttgtattatataagtattttaaatttaaacaaaattctaatataaattaaaagaaaatatttaaaataataattaagaaatatatgcataactaatttatgtaaaattaanaatatagtaaaagaa

SEQ ID NO: 12645 - DNA, 461 bp, Glycine max
  unsure (1)..(461): unsure at all n locations
taagcactacaacatttaaaatttcaaagtctagtactatttaatagcaattgtacataggtttgatcacacataacacactatagaatattattcgtcataattaacaaacaattctaaaagctatagcgtcatggtactttaagatgacatatagagttttaggtttatcaaagaatttcccataacaaatccaggactatatcccaacattgcaaatagtacaagagcaagcaatcaatatactttagaatctcacacccatattccatttcaagcattatattttttcatatttagacataacttggcttaggttctaggccaatattggactntattttaaaccagcttattggactntaagaatacatcccgcaacatcaaatgactcanatccattactgcaaaatacaaatacccaaaggaactacaacacaacatagtttaattattagcaa

SEQ ID NO: 12646 - DNA, 427 bp, Glycine max
  unsure (1)..(427): unsure at all n locations
agcttacttggtctttcacaagaggaaaattctatttcattataactagctaaaaggggtgcttcatcatcggctgtattctccactggtgcccccgtgtcggcatacaaaagtgaagcaaaaacctgcaacagccaacaatgataatgtgaatattacaaatcctaactcctgtccgagagagcattaacttgcccagaataaaagccaggattataaacctcattctccttatctacaggctgtccaaaagcatcggatagaacaacatccaaagagaagttcctacgacaagatgcctgngccaaattatgcaaaggcaaagttgacattaaagttttaaccaaaaggaaaagttaacactggaattaatttgtgcattctcaaaaggatcaccataggaaagaaaagagtaaacatcaataat

SEQ ID NO: 12647 - DNA, 444 bp, Glycine max
  unsure (1)..(444): unsure at all n locations
aacctacatgacttatgtccatcaacctatttgattgtgcagaatcganggcctatttaaaaagatttgctataaagaaaaccttttattagactttggggttagattagatgatgaaaaaggttagaccaaaccttaaagaaagacctatgtcaagtaatatgctaggctcgaggccttacatctaggagataggtcaaacctattttattttcaacagagcatattaatgtgatattgtaatgaaaataatattttaatttaaaattaatatattttttataaattgtttcattggaaaaacagacaaaatattttaaaaaattacaaaaaacctcatcggttgtctaaaatcgatgtacgaagtatcttttaaagacattttctacatcggttcttttagaaccgatatagaaaatccttcaaaacacacaattcaacatc

SEQ ID NO: 12648 - DNA, 425 bp, Glycine max
  unsure (1)..(425): unsure at all n locations
agctntagcttctttaggaatcttctcagtttgtgttcttagttataagagggatgtgtgtagctaagctctagcttcccaaggaagttttctcaaagaagcttctcaaggaagttttctcaagaaagcttctcaaggaagctaccttgtctataaatagaagcatgtgtaacacttgttgtaactttgatgaatgagagtcttgtgagacacaactcaaagttcaacttctctccttttttcttccttcaatttcatgctcccccctctctctttctctccctttttcttttcctccattgaagcatcctctccaagcttcttatccaaggctcatcttggtggtgaagctccttcttccatggcttattccctagtggatggcgcctcctctcacctcttctcctttgtcttctgctgcatct

SEQ ID NO: 12649 - DNA, 455 bp, Glycine max
tagcttagaaacctaaacctaagtgttcctaaactatattttatatgaaacttcgccaagaatccccattgaaaaacctttattcaaacctttcaaagttagtgagaaggctaaaagaaaaattagggaacttagaaaaactaaatccttaattgaaggcgtaggtgacaaccatagtgaattactaaacaagattggtagtttacttaaagtcattccagataccccccaaacctcggaaaatacttccaaaatggtaacaagaagtatctccaaattaatcaatgttattaatgaagatagtgaccaaaactcagataacacaactgagataagatcagtgtcagaaaagaatataaatccaattaattccaaacactggaaaacaccctccaaattatattatcaacgtccaactgcccctgaccttctattagaagaaagaggtgaaaaca

SEQ ID NO: 12650 - DNA, 429 bp, Glycine max
agctttgaacataataaatataaagaatgtcttggaattatcttacaactacatataccacaatacaatgatcacaatgttttggaaacaatcttcagggctatttttataatcttttttttttatattctatttttatgtgggtggaggaagtattgtaggaatgcaatttttaatgagctaatgagattctcaaccaaatcaaacactaacatcaatttcacaaaattaaaatgatgaggacaattggctgaaaactattttgttggagttggttagtgtgtaactgtgcagttaattcctcaagaagcaaaataattgcattccttttttctccaaatgcatgacattttgacacgtgtcatttctttgccaattgaagcagtttttggatcctcaattgttagtattatatatatatatatatat

SEQ ID NO: 12651 - DNA, 474 bp, Glycine max
  unsure (1)..(474): unsure at all n locations
agctaagggctaaaaaataataaatcttatgtattataggattttcttattccttattagcctttcaatacatctatgaagttaatacatgttaatttgtcaattcgtgttcataattacgtttgaattttcactcgttggatttgttcttccgtgagttttctttacagatctaccttgagataatgtgaaactccatgtttagtactttttgcaaaatctttgaccaggggactactaccattgaggtatattccttgtattttcttcctaaggtaccattgcccccttcgcccatggtttttttcttttttgtcctttctggtgtcctttaggcttacgttgttccttcataagtattattccattcatgacctcatacttttcaagaaatatatatatatatatgctntgtttgaattaagaatgagatgaattanaaacgaaagagataagtattacaaaantaatttt

SEQ ID NO: 12652 - DNA, 220 bp, Glycine max
tttgtactcaatcagacatccgagtcaaaagttattgtagtttgaatctgctcagggcttccgtattccatttcgagcgtctcgatatattacgggactccatcggacatccgagacaaaagttcttgtcgtttgaaatttctccgaactctcagaattccatctcgagcgcctcgatatattacgggactcaatcacacattccaataaaaagttattg

SEQ ID NO: 12653 - DNA, 420 bp, Glycine max
  unsure (1)..(420): unsure at all n locations
cgacaataactntctactcggatgtttattttgttcccgaatatatcgaaaagctcgaaattgaatgttgaagctctaagcaaattcaaacgacaaaaactttntactcggatgtctgattgagtcccgtaatatatcgaaaagctcgaatgtgaatgtagaagctctgagcatattcaaacgacaataactttttactcggatgtctgattgagtcccgtaatatatcgagatgctcgaaatggaataccgaagctcggagcaaattcaaacaataataactttttactcggatgtccgattgagtcccgtaatatatcggaacgctcgaaattgaatgttgaagctctgagcaaattcaaacgacaataacattttactcggatgtctgattgagtcccgtaatatatctagacgctc

SEQ ID NO: 12654 - DNA, 419 bp, Glycine max
  unsure (1)..(419): unsure at all n locations
agcttgttgggactacgactgcattctanataattaaccctacccttgaagaatatggaaaaacactggttattggttgggactttcaatgcctgagaacgacatgtttgctagctctatctatctccctattgaaaaagaaagagtagctattaattctatccttttccatccgttcatttttgttttgcctgttccctgcaaacgaaaaacatataacataatttgagaaagacaaccaagtgttgttaattaatacttactagtactactagctggtagtgttttttttatatatatatttttcacctaggggtgagtgagtgagtctgtgagtgagagggacacggctacggatatgatgcaccaccgtatgtgtttgtgttcgtgtgtgtgtgtgagtgagtggtagcacagta

SEQ ID NO: 12655 - DNA, 403 bp, Glycine max
  unsure (1)..(403): unsure at all n locations
tgtacattcccatgtttacatccncaggaatcatcttttttttcgtgaaacaaatgcactcataaagattatcacagatgggaatagctccccaattgaagggaagctagtgtttgaggaggaaactctatgtatgtcttctgtatttgatgatatcagtttcatgcattcaggagaagagtgttgccctcaatgcctcagctggtaaccctgttactggtaacaattctttgagtaaggaaaaaaattaattttggctaatcatttacagggagtatttgtcttaatcctttttttctttcccttgttagttgttcccacatcattgtcccatcattctttgcctagctcagtttcaaacttggatcctgttcattctattacagggatcaacatgcgatac

SEQ ID NO: 12656 - DNA, 441 bp, Glycine max
  unsure (1)..(441): unsure at all n locations
gatccttaagtcacctgcggcatgcaagcttgttacccactgaagtttttnctantttttacagtcatgacgtaaaaaatcttgcagcaacgaagaataattctatccataggagccaaaggtacatacaacatcattatcttttgaagaaactatttcttggcattcacttttatccttggtttataaggctgaactatatttaaccctatttttcctttttcctgctctctcttctcaataattctgatgttgttccgtgtcctgtagttcatcgagcttcaagaagacgggaagcatttctggaattggttcaacttccaaagatcccgaacctacaaaaagggtattttgggggtagactgtgaaagatagcaatgccatgtatcatgattttcttttaaatgttaacatttatctccgcaataaggaatataaaat

SEQ ID NO: 12657 - DNA, 448 bp, Glycine max
  unsure (1)..(448): unsure at all n locations
gtgttgatttcaccttctcgctaagttcttcttttgttttagcgagcgtccgctaagtgcaacactcctgagctaagcgtgaggaagactctggaagaagatgagttgtataggttcgctaagtgcaccgcttcatctcactaaatgcaccacttcagttcatccgctaagcgagaaaggcatgcgctaagtcgaaattcactaatgtgcgctaagcggtccatacgtgcgctatgcgcacgagcacgaacaacgccacctatttaagcctgaaatcacattctgtgaagagagtttggactgggattcagagctntgcatgtctaggagttctggacagagagaggaccacgttctacagagttttgagagattatgctgtgtgaagatctgcagagactacagctcgaatcaagagccggtttgagagcttgagatgagtttgtga

SEQ ID NO: 12658 - DNA, 422 bp, Glycine max
  unsure (1)..(422): unsure at all n locations
agcttcaccaccaagatgagccttgtatattttcttggaaggatgcttcaatggaggaaaagaaagagggagagaaagagagaggggggagcatgaaattgaaggaaaaaaagggagagaagttgaactttgagttgtgtctcacaagactctcattcatcaaagttacaacaagtgttacacatgcttctatttatagactaggtagcttccttgagaagctttcttgagaaaacttccttgagaagcttctttgagaaaacttccttgagaagctagagcttagctacacacacccctctcataactaagctcacctccttgagaagcttccttaagaagattccttaagaagcactattagaaaatatgctttctacattggttatttatgactntcaacatcggttnttcaaccgatg

SEQ ID NO: 12659 - DNA, 378 bp, Glycine max
tagataccaccagcatcaaggaattagggcgattgttgtgtctccctccaaatgcaagccttccgcaagacttacggaaagatcttagagttgaccatagcagaggtgtccatagaagccattgcatcactcacccaatactacgaccagcctttgagatgcttcacattcggagacttccaattagtaccaaccattgaagaatttgaggaaattctaggatgtcctctcgggggaagaaaaccatatctttcatccgggtgtctcccctctttgagcagaattgcaactgtggtcaaggattcagcaagaggtttggacagcataaaacagactcggaacggcatggcgggcctaccacagaggtacctagaagac

SEQ ID NO: 12660 - DNA, 421 bp, Glycine max
  unsure (1)..(421): unsure at all n locations
agcttgaagtttgaatccctgttgtccacatgattggactgagaggtattatctgcagggttattttggttggtccgaaagcattgcagcttttctgtgtcagctttgtccttatcttcagggagaatttcctcattcctgtcgtatgaatgcctagagcagaaatccctagggtcaaaccttccgtttgcatgcaagtaagggagaggagggccgttgcatgcatcgttattggggccgtcaggtgtcagagccgcagggtgggatagagacatgccgcactggtcagatgacacgtcgtcttctgtcgggtttgcgttttccgatctccaaaggttgagggccgtggcccattgtcgccgccgtcgatgaaggagtccggacgtaagccttgnggtgtcgtcggataacccaacagagg

SEQ ID NO: 12661 - DNA, 457 bp, Glycine max
  unsure (1)..(457): unsure at all n locations
cttgtagcttcaatgcaaggattcatgtttatggctaggaatccagaatttggttttagaattagaaaaacatgaaaattaggatttgcttgtgaaagtttttgctcgaatttgggctgccccatgtttgatactttacatagaggtagcgtggaaaacaccttgcaatagtgtgtatacataggtaaatataaggagcatgaaattcctagcaaagtatgaataattgttttcttaaatgaatgtatgatagtgtggaatgccctttttgaatgcaaatatgtgcaggatgtaattagctttccaatatgcatataaataaataggagtgaaacagcaaaaatttgtatggtgtacttcaaatgtatgtaagtagtttgtgatagcaaatgtttaggatataaattangtgtaaagcttgactcaacactctgagcataaaaatgtgtnttctttt

SEQ ID NO: 12662 - DNA, 399 bp, Glycine max
  unsure (1)..(399): unsure at all n locations
agcttccctttctctctcctaaaactcagtttcaaactcctagggtgcggggtctctcttaggttatatagagactcgaaaattaggtataggggctctttggccatttccaaagtgtgatttaaaaaaacgtttactaatcatcctattgtaatgagtttgaatccaaataaataaactatatttcataaataattttatgagttcaaggcctttggaatcactcaaatcaagtttgaaaagaattttttatgattaaaacactaattatgctcaataaattaattattgatgaataataagatatttccttgaactaatcttaactataattaaaantaatttatcaacgtanaanattatttttagcttanaaaatcatataattaanaaaattcc

SEQ ID NO: 12663 - DNA, 458 bp, Glycine max
  unsure (1)..(458): unsure at all n locations
ntagccttaagcaattagctcgctagggcattctcttactcttaagcctaagcaactggctcgcctaggcgagcttcccctgcaccaaatggccttttcctataaatagtcatgcaagggaagggtttcagggtttgagaattgaagaaagagatgaaaaacatagaaaggagaacaagaagaatagataaagagaagtcgaggtgttgccgaatcgaaccatggatcatttcctacatcatttctgttgcaagccttgtaccctgtgcaacagtcggttagttnttcttaagactttgatgtaatctttgtacccttatgtatccctcttgatattatatatgtaatcttttctactcaaatatcactcgagatcgtttcaaggtccaacgccttaacgacttcgtctgcttttcaaaacctaaaacgtcatttcaaggtccaacaccttaacaact

SEQ ID NO: 12664 - DNA, 394 bp, Glycine max
tatttaattgttatacataattttgtaatctctatttaattaaatggcatgcattgttgttctgtctgcatgtccccgtcttgaggactttgctcataagatctttgcatgttactaacttttccagtgatgagcagttaaaaaggttaccaaaattggtcagagcagatatttctgattcgtttatatatatatatatatatatatatatatatatatatatatatatatatatatatatatatattcctttgacatggttttatcatgtggagtttctttgaactattaattaaattgcttcatcaatgccccactcttcagattcttgtaattaacaatatatgttgagtgtgaggatgacatctatctgtcgttgatgtttttaatcttc

SEQ ID NO: 12665 - DNA, 448 bp, Glycine max
tctggaaggattacgtgatatcttaactagtatgaatgtttattacaataggaatattaatattgcttgctgccagtaaccgtatttgtcacgtagcacataccatgcatatgctggaatattctagacagcactaatgattagctttaaatattccctttgatatgaaataaagcaagcagaatatattcagttcactttccctctctctctcgctttattgctttcttcacggagactccctttcggtctcgaatacgaaggatattacccatcattggtccgacctgccgaccggcgacgccatggccgaacaccatacacgttccaagactaccgaccgcctggaaaggccatcagccgcttacccagaccagtcacccttacagacgctacatgactcaccttcgctcgattcattcagacaactacttaacttaactcactt

SEQ ID NO: 12666 - DNA, 407 bp, Glycine max
  unsure (1)..(407): unsure at all n locations
agctntgactccacacacgttagattatttttcattnncttcattagtgctttctttctcttcgtgaaagccaaatcacgatctctcccatttgggatgggctttaagattaattgtgggcgtcccatgttctaaagcatatgcacatatatagaaattgatcaataaagcaaaacttggggtcatacgttggggatagagagatcaaatagacaactagttcatgaattgatcgaatgtttcggataagatgttgttctagaaatttaaaataaaaaataattcaacaaaaaagaaaatcatcaaggatcaaagaagaatggctcaagtctaatctctcctctcatcaaggattaaagaattctatagaagaaaaagtaaactgtctttgaataatagcaaaaatg

SEQ ID NO: 12667 - DNA, 347 bp, Glycine max
  unsure (1)..(347): unsure at all n locations
tgtagaatggctagacataatacatggctgttgtntgtgtttggctcaaagataaaagggatgccccacattgtttccatgactcatatgcaaagatgatgatttggaaattctatgcgaaactggtcatgcatgcgcctatgcagacactcacgtgtcaaatctatatggtcatgtgatgctagggcttaggattcatgtcctctattctaaatcaacccaatgtatgcaaaatatgttctcttatcaatgggtgcattcatactagtacattttgggtactcaggaaaaatccacaggattcacccttcaggcgtacacacattatatcaaaaactagtgatgat

SEQ ID NO: 12668 - DNA, 419 bp, Glycine max
agcttcatgatgaatcaagattgattcaaagagtttttattattacaaagaagatgacgaaaagctcaaaagtcaagaacacttcataataacaaagatgatgatctcaagaatcaaagaatgagttcaagattgaatcaagtacacttcaaggatcaagaggaaagttgaattcaagaatcaagaatcaagttccaagaatcaagatcaagattcaagactcaagattcaggaatcaagagaagactcaatcaagataattattaaaaagtttttttaaaaaactgaatagcacatgaatttttctcaaaaccttttaccaaagagtttttactctctggtaatcgattaccagattattgtaattgattaccagtagcaaaatggttttcaaaaaactttcatactgaatttacaac

SEQ ID NO: 12669 - DNA, 353 bp, Glycine max
  unsure (1)..(353): unsure at all n locations
actcagcttttatccaggctcatcttggtggtgaagctccttcttctatggcttattccctagaggatggcgcctcctctcacctcttctcctttgtcttccgctgcatttccatggcggaaaatcatcattaaaggacctcattgaagctcaaagatccagccttcatagaagccccacaagcaagcttccatcactgctgttgctgttgctgagggctggaccatctgaggatagggtgattcttctatccacggttgtatctgttgctggagaggtcataattgttctgctgtggttgattntgcttctgaggttgaggaggtctattgtaaatatttgcagcataagct

SEQ ID NO: 12670 - DNA, 426 bp, Glycine max
agcttgcatgactttgtcaacacggcttctttctctatttccagtcgacgcttattgctcgcgagctccatcacacagaaggaattgtagatccacctggtctcttgctcacaagagctcagtatgtccctcgaaacaagaaaggttggaccctccaacatgtcgacgaaaagaatcaatctggttacaaagaaaagtcttatttttcatccatcaaaattaaaaccaattaagtaagaaaactccaatataccgatgacaaaaatacttacttacaaaaaacataggtcaattttaagctaaaatcatgaagccacaagcatcaattttccatgtgccgcaaagaacaatacccataaacaagacatgcacatctcacaacaatcaaataatcaaacaaataagagatattaacaatctccaccc

SEQ ID NO: 12671 - DNA, 469 bp, Glycine max
  unsure (1)..(469): unsure at all n locations
ctttagtacaaagaagaagatgaagttcaaagagattcatttcttgtctttgattgattgaatgaatgtcaaagtatgaatgaattaattgaaaaagaaaaacaaagccttgcttttatagactcttcatgtctggtcaagaagaccatttagaagagttataacttttagaaaaacttaaaaccaatttgaaaaagtcaaaaaccatttgaagagttacatcttctgatttattcagaaacaaacactggtaatcgattaccaaatcagtgtaatcgattacacaaagcttttgtgtgaaaggatgtgactcttcacatttgaatttgaatttcaacgttcaaaggcactggtaatcgattaccaaaacattgtaatcgattacaacttttaaaaattaattggaacgttgtaaattcaacttgaaaactntntcgaatccattttgctactggtaattgattacaac

SEQ ID NO: 12672 - DNA, 428 bp, Glycine max
  unsure (1)..(428): unsure at all n locations
agcttaactagtttctatccccttcccactttttatttattgggttgctatgatcataagttattcttattttttttaaaagccaaaaataaactttaagtttattgcaaccagcccacaagagatgtgtgacgcaagattagaccgaaaggcttacaaaaaataaactgctagataaaacttgcaacaattctacaaatcaaagcctcataaattactcttataaagattttattttctctacaaatattttttttaaaaaaataaaatgttttgctttgaaaaattaattaattcatattaaccgtgtagttctagtttttgctggaagtgacaaaaaatgagagaaattctccctttcattgtcaggaatacgaggcattttccctatatgactaanaaacaaaaggcatggacccccgtaaagg

SEQ ID NO: 12673 - DNA, 468 bp, Glycine max
ccacttattttgatgattggatgcagtacatgttatatttctatcatgttcaatggttgatcaccaccaaaaggaaaaacatcctattaacataaggtagtttgcttagaacctctgagcctgtatgtgaagaaatgcatttggaatcatgaaccaactatcccaaaaccttaagttatttagaactctaagccacatggtcggctataatataatatcacaaatgatgaaccaactattccatacaaatggttttatatcaaacactttccatttcaatgcaaattttagagcaataagcattttgatcaaatctgaagaagaagaaaaatagaaatatggcaaagcaggtaaagcaactgaaccacgttaaaaacatattgtgagtaaatattaatttggtcatacaacaatcacttccataaatttaccgtttaagttttaaaaaaatcacaacttgcatgagat

SEQ ID NO: 12674 - DNA, 416 bp, Glycine max
agcttctcgatatattacgagactcaatcgttcatttgatgaaaaagttattgtcatttgaatttgttcgaagcttctattttcaatttcaagcatcatgatatatgacgggactcaatcggacatccgagtaaaaactaattgtcgtttgaatttcctcagagtttctattttcaattttgtgagtctcgatatactacacgattcaatcggactttccagtaaaaatgtattatcgtttgaattttctcagagcttctattttcaatttcgagcacctagaattattaagggactcaattggacatccgagtcaaaagttattgtcctttgaatttcctcagagcttctattttcaattctgagcgtctcgaattattaaaggactcaatccgacatctgtgtcaaaagttaat

SEQ ID NO: 12675 - DNA, 429 bp, Glycine max
  unsure (1)..(429): unsure at all n locations
tgtaagattatagggtacccatcacatgtggtactaggtgtcggtttgtcgatggtgcacaacaaggtttccacatccacaaagcgcgcataaacccaccatcccctgttgcccacctccaactgagctcacgtactcccacgtagcccatatcctcgtttctttcaacaccgggtccccatcaatcctcccaagcttccccaacatcaaagtaatacaacattcacacagcacaagctatcacagccaagcaaaacagggcaaaggcagaaaactctgctcaaaacaccaaccaaaatcacagcttttctcacttaaagaccccagtaacaattccttcgatccaattcgttaaccgttggatcgactccaaaattttactggaagtctatagtacataagcctacattntgaccgttgggatctact

SEQ ID NO: 12676 - DNA, 411 bp, Glycine max
  unsure (1)..(411): unsure at all n locations
agcttgtcaaaaagggatgtctgttttaatctctnttcaaagtaaaaacgttgtttctacttcaaaaccctttgaactacttcacatagacttatttggtgcctctagaactatgagtttgggtggtaattactatggcttagttatagtagatgattactcaagattcacatggactttgtttttgaaaaccaaagatgaagcttttgatggtttttgcaaacttgccaaggtcattcaaaatgaaaaaaggtcttaacattgtttcacttagaagttatcatggaggtgaatttcaaaatgagtctcttgaaatgttttgtgaagaaaatggaattcaccacaacttttctaccctaagaacacctcaacagaatggtgtcatggagaggaaaaatagatcccttgaag

SEQ ID NO: 12677 - DNA, 341 bp, Glycine max
  unsure (1)..(341): unsure at all n locations
ntcaattcttttgaaaagagagaagacattattgcattgtaccattcaatgttctctttatttttgaaagaggtaatatagctacatgttgattttagcccttttgaaatttacacttaatcgataaaagcggaaaagaccatttcaaggctttggacctttaaaaatggcttttttaggcaacgtcatttgggttatgaattgattttagccttagattcactttggttattaatcgattcgattaagaaagagaaatcccaaaggaaaatgtacgattgattcttttctatttaatttactaaaagatatctttgattattatattatgaatctaccct

SEQ ID NO: 12678 - DNA, 388 bp, Glycine max
agcttctattttcaatttctagcgtctcttatattatgcgcctgaatcggacctctgtgtgaaaagttatgaccatttgaatatctcgagagcttccactgttcaatttcgagtgtctcgatatgtgatgctcctgaatcggacatccaagtgcaaagttatgacccttttaatttctcgagagcttccgttgttcaatttcaagcatctcgatatattaatcgcctgaattggacatccgactgaaaagttatgaccatttgaaattttggagagcttccgttgttcaatttcgagcgtctcgatatgtgaagcgcctgaattgacctccgtggaaacgtttgaccattgaattctcgagggcttccgttgtcaattacaacgtctc

SEQ ID NO: 12679 - DNA, 401 bp, Glycine max
  unsure (1)..(401): unsure at all n locations
tganatggaacaacggaagctctcaagaaattcttatggcttatatcttttcactcggatgtccaattcatgcgcatcacatatcgagatgctcgacatagaacaacggaagctctcgagatattccaatggtcataacttttcactcggatgtccaattcaggcgcatcacatatcgagatgctcgaaattcaacaacggaagctctcgagacattcaaatggtcataacttttcacacggaggtgcgattcaagcgcacaatatatcgagacgctccaaattgaacaacagaagctctcaagatattcgaatggtcgtaactattcactcggatgtccgattcangcgcatcacatatcgagacgctcgtaattaacactgggagctctcgacatattc

SEQ ID NO: 12680 - DNA, 415 bp, Glycine max
agcttaaaagtcaagaacacttctttatattttagatgatgatctcaagaatcaaagaatgagttcaagattgaatcaagaacacttcaaagttcaaaaggaaatttgaattcaagaatcaagaatcaagtttcaagattcaagttccaagaatcaagatcaagattcaagaatcaagagaagactcaatcaagataagtattaaaaagttttttcaaaaacttagaagcacatgaatttttcttaaaaccttttaccaaagagtttttactctctcgtaatcgattaccagattattgtaatcgattactagtagcaaaatggttttcaaaaagctttcaactgaatttacaacgttccaattgattacaaaatgctgtaatcgattacaatgatttgctaaccaattaccagt

SEQ ID NO: 12681 - DNA, 340 bp, Glycine max
  unsure (1)..(340): unsure at all n locations
tagtgtgagagaaatngactatgcggagtgtcgcatcctatttttcggcgggagggcgacgcgagactcgcgggatgcgtgttccacgaaaggaatatgcgcggagtcgccaccaacgtttatttgaggaaaacgtcggaaaaaccggaaaagacgcgatctacgaacttttaagtgaaaggttcgggagttgtatttacgcacggtgaaggtattagcaccccacacgtccgtcccaagggacggcagcctttaatcgaatgtgcaaacatgactntgattattatgttcccttttatgttcttatatcctttataccctctatattcttttcttttct

SEQ ID NO: 12682 - DNA, 382 bp, Glycine max
agtcaatccttgaggatggatcgcatgattattttataaaccttaggtgataattttaagagctccactacacaagtggttgagctttttacccaattggatttgtgtaattgactaaaatcctagacaaaagtactacttagtggattgcaggtgtcaattggagctcaagggattcagctctccatagaactgatgaagcttatgcagaagatataattgtaatcatgtagagttgtagcctcaactcgatgtaacttgttttggcaatgttgacaagactgactcaaggtcaaccagaatatcccccaaacattttctagcccatgtgtattactgatataaaagaaaagtcaacagggttatgtatacatattctcag

SEQ ID NO: 12683 - DNA, 441 bp, Glycine max
  unsure (1)..(441): unsure at all n locations
aggcattgttgatgttctcactggcctgaggttttgattctctgaccaactgcaattttgtcaatgattattgatttactctatgttctgctttgaaagattntttttttttaattagtacttggaaaatgttaccacctaatttcttctttcgtgcatcctaatacttttgaaatcgntacatcaattaatctgcacttttggttatgttttctttccctttttctttctcattgactttttagttttattttaattctagcctggcagtggcatgtcttcaaataaataatgctactcatactttttttaatcattggcggtactcatacattaattatatatgagatttttataattcaattaagacagagaaagactaagtcaaataaataatgtgataccaatattaacataatcggtcattgtataaatatatta

SEQ ID NO: 12684 - DNA, 416 bp, Glycine max
  unsure (1)..(416): unsure at all n locations
agcttgtctcagcgtttatgcgagtcggtgtccaacatgctagctatcatcgccaagtaccaagaagagttaggtctagccgcggcccacgagcataggattgcggacgaatatgcccaagtatacgcggaaaaagaggctagaggaagggtgatcgactctttacaccaagaggcaaccatgtggatggatcggtttgctcttaccttgaacgggagtcaagaacttccccgattgttagccaaggccaaggcgatggtagacacctactacacccccgaagagattcatgggcttctcggctattgtcagcatatgatagacttaatggcccacataattagaaatcgttaggaaacttgtatggtctcccagaccttgactagatacgacttcctttntgaaataaaatgagt

SEQ ID NO: 12685 - DNA, 453 bp, Glycine max
tcgagttcgatgagaatgaaagagcttgaaagtttttctatatcagatgaccgagttgatggattagacataaagagtccaggtcataatgaatgtaaattgttcatgtcaagaataatgacgaaggtggtaagacaatttgatttcttgacttggtcaatgcaatgattagaagaaaaaaaaaaaagcaatatctcgaatgttgacgtgggtaggcagtgatcgccggtgcacaagagatgtggtacaaataaggagtggttcctagcaggcttttagcaagagggatacatgaacaaatcaaatatgcacctgcataagagagatccagaggctgtgtaggtatgatgtaacatcccaattttcttagattggaaagctttgtgtagaaattgcttgtgtgtgattgatatgcagtgtagtaagattattcttagcataatcatgtatatt

SEQ ID NO: 12686 - DNA, 411 bp, Glycine max
agcttcctcggggccatttctgcgatggcttacattgggaaagttagttttagtgggacattactcttaaagcaaaaatggcatataacctcctcccataaatacaaacatcaatgtaaatttagagcaagcttatgcgcatatttccttacaaacgttctcttgcacaagacatttaaccgaaaaaaaatgcacccatatacaatcaagggagcttcgttacctagattatttacacgtacctccaaggtgtatttgttacttacatcacacacatctccttggctaaattcacatacatgcatactcaaagcattttggggtaccaaaaattgcacacgtgcacatcttagcatttctaatacctatacatacgcaaacttcatgatgaatcttgactatctacacaat

SEQ ID NO: 12687 - DNA, 465 bp, Glycine max
actaagctgctctgagatgcccattggtctaactttttatcttgctacccacccatggagcttccacaaccttcaattcatctatccaatcattgaattctttgatgctattaaaccctgactctctttggcatgtaccaaatctttccgctggatccctgatgttattaaagtcacctaagatgcaccatatatctccattctgtgttattttcagctgtttgatctgctcccacagcgcccttttattttggatatcgcaaggtgaatatattgtgactatgttgattggcaatgcttctttgatccattccccacttagcaaaatgaaaccatggctgatgatcttattctgtagcttaaaggttctttcacaccataaacaaagaataccttcagctggattagtagcttgttgcatctaccaactgacctcaccatctccccacaatgaatggacatagt

SEQ ID NO: 12688 - DNA, 327 bp, Glycine max
  unsure (1)..(327): unsure at all n locations
agcttcatgatgaatcaagtttgattcanagatgcgnngacgataaccaagatgatgacaaaagatgatgacgcacgtgatgacgaaaagctcacatgtcaatcaaagaatgagttccagacattcaagatcgaatcaagaacacttcatgattccagcacgagaagttgatttcaagaatcacgattcaagaaatccagattcacgactcacgattctagaatcacgagaaggcttaatctagataagtatgaaaaggtgttctcacaaattgagtagcacatggcattttctcanaacatgtttaccaaagagcttntactctct

SEQ ID NO: 12689 - DNA, 267 bp, Glycine max
tctagcaagcaaagagacgcaccagtctggtatgattattctcttccaaaaatccaaatcaacggttgggaagagacacaacccttggttgtcccatccatcgtttcgaaattcaagggatgctatcattacacctttttttgaaaacacgcaaaaatattaaatgtgtttgaaacaactaccacacttgatagaatgatggttcaagtatctcattactcaatctcgacaccacgtatgtccacaacaaagatttaaggctcttat

SEQ ID NO: 12690 - DNA, 433 bp, Glycine max
cgggatcttaagcaccgcggctgcagcttagtcaacagaatttctttattgtcaaagaattaggtgttgaaaaagctgacgacattcatgctaatcgaaatgatcatgatgaaggagaattgattaacatcctctaatgtaattttctgcagagacagaggtcaccaaacctagtaagtgacaactacatttttctctgattgaggcatcggttttttgtttcataacaaaaaccgatgttaatatcataaccaacatcggttataatagaaaaccgatgttaacgtttgtatattaacatcggttttttgtgtataaccgatgtcagagtttgtattttaacatcggctatctgtggataaccgatgtcaactatggtacattaacatcggttaattataaataatcgatgtgaatatttgaatagtcacat

SEQ ID NO: 12691 - DNA, 308 bp, Glycine max
  unsure (1)..(308): unsure at all n locations
tctagggcattttagagaatcaactntggatcttttgtgttcagttcagagtctcagaatgtaacttgaataaaaaagttcattgtaaacagttgaaccatttgttgctagagaacttgattatctttgattcactggattcactcgggcagagttggctttaacaatttacaaagtcttcaagccattattgacaatgaaattaatatccgggacatgatcaagtctctcaacattttatctggaccaatattggcttcatgtgaagatgatccgattcgaagatatcaatcaaaacttggatgact

SEQ ID NO: 12692 - DNA, 567 bp, Glycine max
  unsure (1)..(567): unsure at all n locations
agctttgtcactcctactccaattcctatagttgccatgccagttcaaagttggctttggtctctgtgggagaaaaatcttgagaacttcacctgctatatctgcttcaattttagaccacaatttttttcttatgttttaacttaatttacgaccgtaatataagatatgattttgtgtttatatatatatatatatatatatatatatatatatatatatatatatatgttggcggntatgtcaggtatttattgtggatgtggtgagtttggaagcttggaaattggattgaggatgatatacgccacaaggaacacgtatatactgctgtggtttgggttggacctacacgatttgcttatcttatatacttgcttagacgtttcatagtctcttcaatcagttcaatggcctttcttgtttagattcacttcttttatagttgttttgctagcatttttcttcttatataaaaaaaagattaattattgttttagtttttaaatataaaggatatgtttttttaatctttcacatttaaaaaaaaaaatagtctctgaattt

SEQ ID NO: 12693 - DNA, 555 bp, Glycine max
  unsure (1)..(555): unsure at all n locations
tgcttctacaagattcagattcaatgcataaggagtgataagtatgcagatctgataaaaatggatggttcctaccatgaagaacaaaatcaaaatcaaacatataatcatcaacaatctgatcaattatctcaacacgaaaaatagaatgatcctcagatggatgtttcatggcatcaagaatgttaaaatgaacaacaatatcaccaaattccatagacaatgtgccagcataaacatctatcttggttcgggctgttctcataaatggcctgcctaaaataattggaactgaaccatgggaaaatccctcttccatattaagaacataattaatcaacaggaaaaataagctcaccaacccgaaccagcacatcctctatgaaaccttcggggtaagcaacacttctatttgccaaatggatcacaacatctgtagattgcaaaggtccaagagataaagaattgaaaatggacaaaggcatgacactaactgatgctcctagatctagcatggtattctcaaantactgttcccaataatgcaaggtatac

SEQ ID NO: 12694 - DNA, 506 bp, Glycine max
agcttcattaagaggcttcctccagaagcttcattaagaggcttcgagcacactccagataacttctaaaagatcccaacggtgagatcatgaaaacgtgtcttgtgaagtggtagaccaaatttcgagaagatccagcggttaacgaaggctgggcatcgtttttaccgaggtagcttcatgtagctttctctagaagcttcattaagaggcttcctctagaagcttcctcgtggcttctttgagaagctttctcaagaggcttctttgagaagctagatccttatctatccacacccctctattaactaaattaacttccttaaaaataattacagatgaaaataacgcaacaaataatcaaacatcaaacataattactaataatatatagatatatatatcagggtgttacaccgtgtggtgttagctggaatatggatgccaaagtggcaagcgcatccgccatctgattttcctctcggggaacatgatggaaggagatc

SEQ ID NO: 12695 - DNA, 653 bp, Glycine max
  unsure (1)..(653): unsure at all n locations
tattaggacctataaaactaagctttatagatacctataaacaattacggattaaataaaaacgctggcaatcgaagaggaaaaattgcttacctcgataatgctgacatggagggagaacaccaccctcaaaatgcctgggctattcaacaccaatgagcaccacgatcacagaacacagactcccagtccgaaggaagaagacgacgctcacggggggaacgcggcacgaagaacctcaacagtgggtcaagcttttctgaaaccagcaaccacttcatgcaaacaaaacgaaaggaagaagaacacggcttatgtgaggtcacgggtgaggaaagagaccaaaacgacttcacgccagcaagaagaagaaaaaatggtgaggggtcacgaggaagaagaaggccaacgcgggagggagggagggagagagatgaaccactttttttaaattaagccaggggtacaaaggtatttttgcatcaactgctgggtgaatcagcaaaaatgctgggtgcaccancaaaaatgctgggtgcacctancagcactcaaaataaaaaccctaaagccactaatacaacaaagggccgaaatcagaatatgccacaatcttgaaccccatgtcccttctaggtttataccccaatcat

SEQ ID NO: 12696 - DNA, 387 bp, Glycine max
agcttcaacattcaatttcgagcgtctcgatatgttacgggactcaatcagacatccgagaaaaaagttattgtcgtttgaattagctaagaggatcaacattcaattttgagcgtctcaatatgttacgggactcaatcagacatccgagaaaaaagttattgtcgtttgaattagctcagaagttcaacattcaatttcgagcgtctcgatatgttacgggactcaatcagacatccgattaaaaagtcattgtcgtttgaattggctcagagcttcaacattcaatttcgagcgtctcgatatattacgggactcaatcagacatccgagtaaaaagttattgtcgtttgaatttgctcaaaggttcaacattcaatttcgagc

SEQ ID NO: 12697 - DNA, 487 bp, Glycine max
ttcagccatttcaaacgatcataactttttactcggatatcatattgagtcccgtgatataacgagacgctcgaaattgaatattgaagctctgaactaattcaaatgacaataactttttactcggatgtctgattgaggcccgtaatatatcgagacgctcgaaattgaatgttgaagctgtgagccaatttaaacgacaataactgtttactcggatgtctgattaagtcccgtcatatatcgagacgctcgaaattgattgttgaacctctgagcgaattcaaaccacaataactttttactcggatgtgtgattgaggcccgtaatatatcgagacgctcgaaattgaatggttaagcttttagccaattcacacgacaataactatttactcggatgtctgattgagtcccgtaatataacgagacgctcgaaaatgaatgttgaagctctgaaccatttcaacgaccataactttttcct

SEQ ID NO: 12698 - DNA, 237 bp, Glycine max
agcttacacaaacattcactagatcaactcacactcaacaaatagtcatcatcaatccatagttccaatcaatcatgcttagtatgatgcatgcacctgacctcaactctcaaatgcaatgtgttaccatcccccaggaaatagcctaagcatgcccacacgacactctcactcaggaaaactaggcagtaagagtcgacgccaccctgtggtgcacggacaactcccccccccccc

SEQ ID NO: 12699 - DNA, 335 bp, Glycine max
agcgaccatctcccttaaagtcctcgctcgaggaggtggttgagcctttatatcataacgctcaaaatcatgatgttgcacatcaccatccacatcttgctcagactcaccagggacaacatgctctgtatgtgcacaagtcacaaggagttcaaggtgagtctgatgcacactatgcctcactaaaccatgaaatgagacatatatctcgggatcacaaggttgctaacctaacggagtgcccataatgatacaatactttgctcatgcacgactatctgcctactgatgctaattacaatgtatgttctgactacagctaccatcctatgata

SEQ ID NO: 12700 - DNA, 407 bp, Glycine max
agcttctcctctttttcaagacctaagcttatagacaataggtaagggaaattttatcttatgttctattgcttaatctgattggatggtttgtgtatgctccaaagcatgtttgattttctatgggtttatggaatttggtgttggattgcctttagagacctttccctttgtatgcttttgatttgagaattctcgatggaatcttgtatatgtttaattgattgttgatttatgtttttttttggacttgtgttgagttttgagtcatttatgagtgtctggaggggttgggagtgatgaatatgcgtttaggttcacaagaaccctgaaatcgcaagttgtaaatgttgcagacttgctaggcaagacaagctcattgtgtattaatgaattacaaagagctt

SEQ ID NO: 12701 - DNA, 313 bp, Glycine max
aatctccctctccatcattgggggcactacttgagctaatagaatccctccccctaggggggatcctaaaaaaaaaccatggcccgtcttacccaatatttggcctttcaatcgtatcttgaacatttcaaaattgaactgaaactgtgtgatgaaagcaaccattatggccattccacaaaaaaatcttgaaaggtccacaataatataccaaatgacgggttccccaataagaattttctgaaaaaaacgccttcacaaattttcatctttcacatattcccccatatttcttccctacatattgaagtga

SEQ ID NO: 12702 - DNA, 531 bp, Glycine max
tgccatcttatcaaagcaacattcttaatctatatgcaacagcgagaaaagaaagcacaaagaggaaattcacaaaaccaaatgagataaacatcaatccacatttggtttctggagaatataagagaaaacacccgcttcactcaggcagaggaaaacctctcaaaggcgcataattctcatgcaggcaattgtttcatcacaattccaataagtgatatgtcataaatcaatttttgcaagtcatttaccatcaaatcaaagataaattgcataatcatcatggatcattagggcttttacgatttggactaactttgaaagacatattggtttttctggatattcaaaaacaccttgagaataggaaagcaacataaaaacaaactgacaatttaaaataaatcattgcttcctatcccttcccattttaaccaaattatgactacttactataccaaaatcttcacttataataattaccaacatctgtatacagtttataacaatgcagacatttatctacttcca

SEQ ID NO: 12703 - DNA, 375 bp, Glycine max
atgctgcctacatctacaacacagcttctataccttcgctggcaaatcagccacgacagaatgattatctacctcttcggcgatatgtacggtcccagatggacgaatcatgcctaccttatatggtcacatccttcaccataacagcagcaccaacaacaaccttattttcgaaaagtagctggcccacgcagaccatacgttcctacaacaatccagcaacggcaataacaatatccccacaaacaacacacagttcaggctcctccgcaagcttaccttgaagaacttgtgaaggtcctctgtaaacctcacaatctctcaaaatctcatccaaagctaacaaaaatagattgctatgcgagctcaactata

SEQ ID NO: 12704 - DNA, 513 bp, Glycine max
  unsure (1)..(513): unsure at all n locations
agcttcaaaattgcaacaaaggagttgttcttgtaaaaaatattcgtcttcaaactcttagaggtgactttgagcgtttgtttatggaggagtccgagtcaatttctgattatttttctcgagtattggccgtagtcaatcaacttaaaagaaatggtgaagatgttgatgaggtgaaggtcatggaaaaaatacttcgaactttaaatccaagttttgacttcattgttaccaacattgaagaaaacaaggatttaaagaccatgacaattgagcaactcatgggttccttactagcatacgaagaaaaacaaaagagaaaaattaaacaaaaggaggctacggagcaactactacaactcaacgtaaaggaagcaaactatgcatattacaagagccaaagaggacgaagtcncggccaagatcgtggacgttgacgatgacatggatgagaacgaagaggtggttacaacaaccactccaacaaattcacaatggagaaagaatttgaat

SEQ ID NO: 12705 - DNA, 616 bp, Glycine max
taaacacaattatgcaacaaaaaatagaagtttccataagatataataaatttaaaatgtgctttctaagttgatacctaacatcataataacataagctgattgcaatttcaaagttctttatactcttagaaaaaaggtccatacactcttaatttctccttttctttcaaatctcatgattaagagaacacattctcaaatcaagaaaacaaaatcatatgattgaattgaatacttatcttctaatgatgtttctctgttcacaaataaaaccaaatggttgaacttagttacgtaataatcatatcatgaaatagcagaaaaaggtcagccatcataaattgaattaatcatttttacaccctaagtagtaatcataacaatcatgtctaatagagctgctaaatatttagctcacctctctgccatctatggaattcagtagttgaacttagatactcgtcctattaatggctccaaagatagtcttctatctttataaatcaataggaagtacgaagacaaaaaatcaatagaaaatagcataggtacagactatccatgataataaaaatacactctctagagaacaaaaacaagaataacagaattt

SEQ ID NO: 12706 - DNA, 79 bp, Glycine max
ccccggatccttaagaccaccgccgcctgccagccccgctctttcattataggaatgtttactcaacccttggtcccca

SEQ ID NO: 12707 - DNA, 457 bp, Glycine max
atactcagcttgtgcatccaataccctgatgaggatgtcccatatgttcttaaagcaggactgatacatttgcttccaaagtttcatggccttgcaggtgaagacccgcacaaacatctgaaagaattccctattgtctactccaccatgaaatccccagatgttcaggaggatcacatatttctgaaggcttttcctcattctttataaggagtgacaaaggactggctatattaccttactccaaggtctatcacgagctgggatgacctcaagagagtattcttagataaaattttccttgcttctatgaccacgaccattataaaggatatttcaggcattatgcaactcattggagagagcctatatgaaatattgggagagatttaaaaaactatgtgccacgagccctcactacccggatttctgaacagcttctccttccatattttta

SEQ ID NO: 12708 - DNA, 424 bp, Glycine max
agcttggaaggaaataccactgtcgttgtgaacaatggatccatttggaaaaataaaacctaatgtgaagttcacaactgtctgacttcttggccaaggttcgcaagctacttcgaacttcttcaggcattcatcaaactgctgttctgaaggacaattattcagagatccccagcaatccatgacataatgccaagcatttttttgcgcaattagtgatttacatttagccttcacattcttgtttatgtgaaagatgcacaacaaatttgtgcatttagggaatacatctttcactgcattcatcaatgcttggtctctgtcagtgacaataactccagggagggcatcacgctttaaaaaaggcctcgaaagcgttgtaatgcccataccaaattattaacgcgttcaccctccacatatg

SEQ ID NO: 12709 - DNA, 506 bp, Glycine max
tctatagaagggtcgttcctaatttctctacaattgcatcacctctcaatgagctagtgaagaagaatgtggcatttacctggggtgaaaagcaagagcaagcctttgctttgctcaaagaaaagcttactaaggcacctgttctagctcttcctgacttttctaaaacttttgagctagactgtgatgcctctggagtgggagttggagctgttttgttgcaaggtgggcaccctattgcttattttattgaaaaacttcatggtgcgacccttaactaccccacctatgataaagagctttatgccttaataagagcactccgaacttgggaacattaccttgtttccacggaatttgtcattcatagtgatcatcaatcacttaaagtcattagagggcaaagcaagttaaacaaaaggcatgcaaaatgggtagaagacctaaagcaatttccatatgttatcacatacaaaaagggtaaaacaaatgtggtagctgatgcc

SEQ ID NO: 12710 - DNA, 481 bp, Glycine max
agcttcggaagaaagtgatgaggtacaagccctaaaggcagagcttgaaagagcccgggtagtcaaagagaagttcaagtccatagccatcaaagtctgaagagagtatgatgaactaagggacgtcaatatggccaccgctgaagccttggaacgagaaaccaagaaggcccgaaaggaagaacacgaccaaaacaaagttttgaggggctttatagggcagcaatagtgagctcaagctccgaagaggtgaaaggaatcatcacgggtcaaaggcatgatcttgaaggacgagctaaaggcttgccttaggtcgaaaagaaatttgtcccaacagttaagcgagactgaagggaatatgtgggccaccatcgatgagtgcaaagagaagctaaatctatcagcgactcacgagcaaaggctagaggatgagtacgccaagatatcatcataaagggaagcaagggaaagggtaattgat

SEQ ID NO: 12711 - DNA, 587 bp, Glycine max
ctattacgtgcactataaaactcagcttacatggagctacatcaatcttctcatagtagaacacaggtagtgtgtctactatcattattatcatctctctctccatcattgggggcactacttgagctattagatccctccacctttgggtgtattctttgaaagatctatgctccctcttacacatgatttgtagttgcattctatccggagccatatcaaaattgtactgatactgtctaatgaaggcaaccattaggtccttccaagaatagactcgggaaggttccagattagtataccaagtgacggttgccccagtaagactttcctggaagaaatgcatcaacaatttttcatctttcacatatgcccccattttcctgcagtacatcttcaggtgattcttggggcaagtagtccccttgtacttgtcaaaatctgacaccttgaactttggaggaataaccacatcgggcactatccataactcttcctccttcaatggcccttagcctttcctctatatgatcaaatttatccctttccaccatggcaggaggcaatcttcccaccgtaaaatgtaa

SEQ ID NO: 12712 - DNA, 372 bp, Glycine max
agcttttgtttggaataataacctatctcctcgggattgggacaccgaaatgggaaaatcctttgccaatgctattcatggtgtggaaaaagaggagtttgctacttatatggccctcgcatagcacttcacggtcttgcatcggcgagtaaaacttacgctatttgagctgccgttcacagcaccattagatttctactggcaacactgaaagacgatggtgggcggggagaaagctatctttcatgcccaagaacaagttagacattgaatgctcaacggaaacaggatactctccggcctatcaaactgcattcaatacgcgagaacgtatgactttcacctcttatgatgcggatgactttagcacat

SEQ ID NO: 12713 - DNA, 400 bp, Glycine max
ttcatctgaaagaagtgtctcctaagctgtgggtactatttattctccactctttcgtacgagccaattaggttattagagccttccttcccggctctcatatgcgattaaaggcttcttttctctggctactaaatgtaccaagtctttacatgacggctggggggaaccgacaatatttcaagattacacgacacatctaaatacctcacattattatcacatagatggtctggaggcttaccttgcacctgcttggcttacaataatctatagcatgacctgcacgaggcaagcataaagtgcgcaatcatatgcgatgcataaaaaacatttttgaatccaaaaacaccctgttgcgagaacaggtgttgaatctctccaaccttctaacagcgat

SEQ ID NO: 12714 - DNA, 531 bp, Glycine max
agctttttggcaaaggaagaacaagaagagagatgagtagaaaggaattcttagaagttctaaaaaattgttaaagagttgtaaaagttctattgaatgcaagtcaaggtcttacataaactcttcatgtcgggtcaagaaaagcattggaagagttataaccttgagaaaatcaagtcaagagttacaacttttgactttttattcaaaagttatcactggtaatcgattaccataatcatgtaatcgattacacaatgcattttatgaaaagttgtgactcttcacaatcagatttgaattccaacgttcagatacactggtatggtaatcgattacattatttgaaaaatattttggaacgttgcaaatcagttaaaaacattttgaaatcaaatatgggcacaggtaatcgattacatgaaactggtaatcgattaccaaagagtaattactctggtaacttgaaaattttagaaaactcttttgaaaacaaaatgtgcttgtttggatttttttgaaaaaaacttc

SEQ ID NO: 12715 - DNA, 375 bp, Glycine max
tcaggctgttcaattgctccatattactgcacagaagggcaaaggtctgtatggtggtcggctgaggagcataaaccatagagtcttgcgacaggtacaaatttctgattcaaggccaggtgggttaccaggttaaccaaggcatctagtttaccctcaagcttcttagtttcagctgatgaagatgaattcatggctactttatgcactcctctaatgacaatagcatcatttctggcactaaattgttgggagttggaagccatcttctcaattaaattcctggcttcagcaggggtcatgtctccaagggctccaccactggcagcatctatcatacttctttccatgttactgagtccttcataaaaatat

SEQ ID NO: 12716 - DNA, 435 bp, Glycine max
agctttagcatggcctccgtgatagaagccatttgatcttttaaggctgataggtcgaccttcatctgttcttgcactccctcttcattatccatttttctggattgagtgttataggggtgcctttgcgcttttttagttatggtgagttccctaaagaaacaaacaatggtgagtatgccaccaaaacatgaatatgctaatgaatgatcagagcacttggattcacctcaaggccttttatagataacgtgatgagtttcagaacttctctgtttataaaaaggaacaaaacttttatctagccaagatcatacaaaagtgttataacagaacctaacggtttctaattatatgggccatcaaatctatcatgtgttgacagtaattgattagcctgtgaatttcctcgggggctgaacacacttcagcgat

SEQ ID NO: 12717 - DNA, 531 bp, Glycine max
tgactaggcgagttgattttagccttagttttactttagttattaatcaattcgattaagaatgagaaatcccaaagagaaaacgtttgattgattttccgctttatttcactaaaaagatatttttttgattattatattattttttacctctttttgatttccaacgtggttacggcacgaccgaacggtcggaatttattttaaccgaagttaatggataatacaattcaaacgttcggtggaaatttattttatttttaagttaagcgagaaatgacttaagtaaaatggcttaagcacgtcaacagggggtataaaaagtaaacaaaacgagaataaaaatgcacgaaacacaatgtggaccactacgggtacatagaatgaatcgaaaagcttggttcgaggtacttacccgttgaagatcgaagaacgatgaagaacgaatgaagaacgtcgaagaacggttgaaacctctgcgagattcctcacggaaaacgttacggaaatgtttcggaagcgcctcggctt

SEQ ID NO: 12718 - DNA, 327 bp, Glycine max
  unsure (1)..(327): unsure at all n locations
agctntgagctaatttaaacgacaataatgttttgctcggatggctgattgaaacccggaatacattgaagacgctccaaattggatggtgaaactctcaagcaattcaaaccaccaatacctttttactccggatgtctgattgggtccccgcaatacatcgagacgctcgaaattgaatgttgaagctctcagcaaattccaacgacaataacttttttactcagatgtctgattgagtcccgcaatatatcgagataatcgaaattgaattttgaagctctaagctaattcaaacgacaataactttttgctcggatgtctgat

SEQ ID NO: 12719 - DNA, 451 bp, Glycine max
tcagaattcaatttcgagcgtctcgatgtattacgagactcaatcagacatccgagtaaaaagttattgtcggttgaattagctgagagcttcaacattcaatttcgagcgtctcgatgtattacgggacttaatcagacatccgagtaaaaagttattgtcgtttgaatttgctgagagcttcaacattcaatttcgagcgtgtcgatgtattacgggactcaatcagacatccgagaaaatagttattgtcggttgaatttgctctgagcttcagaattcaatttcgaacatctcgatatattaccggactcaatcagacatttgagtagaaaagttatggtcgttcgaattagctgagaggtgcaacatccaatttcgagcgtctccatgtgttccgggactcaatcagacatccgagtaaaaagttattgtcgtttgaattagcctc

SEQ ID NO: 12720 - DNA, 403 bp, Glycine max
agctttgagcaaattcaaacgacgataactctttactcggatgtctgattgagtcctgtaatatatcgagacgctcgaaatggaataccgaagctctgagcaaatttaaacgacaataacctttttactcggatgtcagatcgagtcccggaatatatcaagatgctagaaattgaatgggaacactctgatcaaattcgaacaacaataacttttaactcggatggccgatcgagtctcggtatatatccagacgctcgaaatggaatatctaagctctgagcaaattcaaacactaataactttttactcggatgtccgatagagtcccgtaatatatctgaacgcttgaaattgaatgctgaaagcttgagcagattcaaaccacaataaatttttactc

SEQ ID NO: 12721 - DNA, 234 bp, Glycine max
tctacattcaatttcaagcttttcgatatattacgggactctatcggacatccgagtaaaaagttattgttgttagaatttgctcaaggctccagcactccatctcaagcgtctcgatatattaccggactcaatcagacatccgacggaaaaggttttggcgtttgaatttgctcaaagcttcctcatgacattccaagcatctcgatatattacgggactcaatcatacatc

SEQ ID NO: 12722 - DNA, 444 bp, Glycine max
agcttgaaggtgtgtaacccaccattttccataatagaacactagtaatatgtctactatcattgttgttatttctttcttcggtattgagggaaacacttgggctgctagatccctccacctttgggcgtattctttgaaagatctgtgccccctttttgcacatgttctgtagttgcatcctatccgaagccattatactgacactgcctaacgacgacaaccattaggtccttccaagaatggactcgggaaggttccaagttagtgtaccaggtaacagctaccccagtaagactttcttggaaggaatgtatcagcaattcctcatcttttgcatatgcccccatcttccgacaatacatctttagattgttcttggggcaagtagtccccttgtacttgtcaaagtccagcaccttgaacttgggaggggtgatgata

SEQ ID NO: 12723 - DNA, 511 bp, Glycine max
  unsure (1)..(511): unsure at all n locations
tataagctgaacatcaggaaacactgtagtatttttctattttatacatttatatggggaacatagacaaaatcagaagcaggctcaaatttatgaacagaaaagagaaatatcgctgtcagtgttcatcagaaattctaatttgcctcctaccaaaaggattacctcataaatggcttgataattgatggagtggtagtttttttaagcaaagctatatatgacaagcttaaaggcacataattttaacaatctaaactctaccacacgggaatccacaatgaagaacaggctaactaaagaatttagattataaaattcaccgtcaacagtcgtgtagaaatgtgtctcttccaatatcccaaattaccgaaacaatcttttagtaatttagattatataattcttgtagaaaagtcactttacaaaattccatgcctctgtacctcanatttccaagacctttctaaatttactttcgctctacaagagtcaacaacaaacagatcag

SEQ ID NO: 12724 - DNA, 495 bp, Glycine max
agcttccttaagaagattcctaaagaagctagagcttatctacacacacctctctaatagctaagctcacctccttgagatgagaagctagagcttagctacacaccccctataatagctaagttcacccccatgacaaaatacatgaaaatacaaaaaattccctactacaaagactactcaaaatgccttgaaatacaaggctaaaaccctatactactagaatggcaaaaaatacaaggcccaaacaaaggaaaaacctattctaatatttacaaagataagcggtctcatacttagctcatgggctcgaaatctaccctaaggctcatgagaaccctagggtcttcccttggatctctagcccaatctacttggagtcttctatcgaatgcccttgcggggtaggattgcatcaacatgccttatgacacttaagcacacttagtggagaatcttggacttgatctttgattagtgggctgaactttatgt

SEQ ID NO: 12725 - DNA, 479 bp, Glycine max
tgcatcgtagaatgacggttgattttgtagctccaacatttgtgaatggtaaagctaaaattacgattgatgaatctgatgtatctggggaacttgaattttgggaaaattctattattctctttgcactaggtgagtctctttctatgaatgctgtgaagaagtttatggagaagacctggaatttcatttcagaaccagaattatcttacaatgatgatggttactttattgtgaaatgcaagaatagggaagacatggagctggttatggaacaaggtccctatttcatttacggtaaatcattattcctccgcaagtggacatctgattttgagatgaaggaagatctattgcgagttcttccaatctggataactctacctcaatttcctctgcatctgtggggagaaaggagtatttcgaaaattgctagtatggttggtaaacctataacaacagatgaatgttctgcgaag

SEQ ID NO: 12726 - DNA, 367 bp, Glycine max
gcaagcttggttcgaggtacttacccgttttttatcgaagaacgatgaagaacgaatgaagaacgtccaagaacggttgaaacctttgcgaaattcctcacggaaaacgttacggaaaggtttcggaagcgcctcggcttatattttcttcacggaaacaatttttccaagaaaattcgaaagagagagaagtgccaaaggggctgaatacttttcttcttcacttcctcccctatttatagcaaaataggggaggtggttgccgcccagctcgtccaggcgagcttagctcgcccaggcgagccatgttgcttccttcagaagcaacaacccttctggaggaattttttggagggcccaagtgggc

SEQ ID NO: 12727 - DNA, 481 bp, Glycine max
ccaaaaaactcagcttgtcagatccatgctcttctctggtgttggtatgtcatcaattcgttatgaattagatcacataaattctgtaggacaacaccatgtgacatattgtatgaccttatgctccataagtcctctgactcttatcttatacactaattgttgaagtagccaacaatttggtacatatcctttcatctatatatattgatggctgcaagaacttaggaccgaatcgtccatgtcttgagatatttgaaattcaaacactttcatgttatatttgcttagattttttattatctgtcttggttcagcgctgcgagtcatcttaacttgtaccaaaataaaagactaaccaatttaaactaaaagatatacaatatgtttagacctcgtacttatggtgaaacttggttttagtcctccaaccttaacatataagctctgatggaaaggagaaatactccccaaaatatta

SEQ ID NO: 12728 - DNA, 516 bp, Glycine max
agcttggacaatttaaataaataagtggatgtcttcaattggttaggcaaggcaaagaaccaagatttaagtttttaactccaggaacacttatccaattcctgtagctcttatttcacagtaatatgtatttgtattattccagggcatctaggaaatttagatttaactgtcttattgtattttgcaatttttttctagactcattcatgattaggttaataattttttgtcaccaccatcttttcaacaaggtgagaaaaaagaatctcacctaaagttcctttcccaatgatattcatttcattcagatggttagtggccgcatacacttctgtaataagaactctgggacatgcagttttccttaacatgtcttcaaatgttactgtaaaaaacaataaatagttcatgacacatgagcataataaccttaatctatgatactatctaacatgagtttaaaataatagtgggcctaaggattttttttttgggtggggctgatcttgagta

SEQ ID NO: 12729 - DNA, 613 bp, Glycine max
  unsure (1)..(613): unsure at all n locations
ttgatttacatattgaatttcatccaaatttttgacaagtcattgttacttccatcaatattgatattgtatcatgcttaattatatgcatttgcttattctgatcattgtgtgttgtgtgattatttcttccatgcaggtacatgattcctatttgttgtgagagtgaaatgatgggcagcagcaccaactgaggtgagtttatatttccttttttttgtctttatctttgttagtttgttatatatttttttattttatatgtttgagttttaaatgtgtaaaaaatagaaatagaaaggtctgctgattgcttacgaattccttgttgtttcatggcattccttttgaacctcaaaaggtgttggatgatgccttaattctaccttggtcctagctaaaatgtggagagaaaggtttcaatacatcatttaaccattggtctaccaatcttatgatggccttttggtaaatttctgattatatgtattgnggtccttgtgctgggttattgttgggtttgttttgctttttggaaggtggcacttttgtgtcttggcatctttattttcagtaccctctgtactgttctgtttaatattaatatacatat

SEQ ID NO: 12730 - DNA, 506 bp, Glycine max
  unsure (1)..(506): unsure at all n locations
agcttgtccataaaaataggtttttgaagtttgtcatttcaatttctgactaagtaaaatggatcatttttaagatccaacgccttaaaatgatcacctcttaagtaaaaaaaaaaaatcacttgataagcaagaactacgtaggtctgatttcctcatcacaattgaggatacgtaggagcaaaaggcccgcttttgttgaccaccccgagagatcgttaatggtccaacgccttaacgtttctctcctttcaaaatcaaaagatcgtttaatggtccaacaccttaaatgacctttttgttcaatcaaaatatatcttgcaaaaagataaaaaaacaacttaaccaaacactttgttccgaaagaactacgtaggtctgatttcctcatcgcaaattgaggaatacgtagggagcaaagggaaacacccttgtcaaccacaaaaaaggagaaaatataaaagggtataaaggatataggacatanaaggaacataaaatcaaag

SEQ ID NO: 12731 - DNA, 503 bp, Glycine max
  unsure (1)..(503): unsure at all n locations
ttttggtcaataggattgaatatacacaatcatgtccttcatcatatcctcatttatacattacattctaaaattcagagattgatgcgaagactattactcaaagctagtcgttcactcacagtttaagatcacactctcaccggttatggttcaagcttttcattctcaatcaatctgcctactgactaacaattctaattgcgagctcacattcttgttctttgtttttgtaacatacatattttctcaaactcatggaatgaaacacaaactccatcacaatcattcattcaatccaaaatcaattcatacaccaattttcacaaaaagataaaagtgtttcgctgcaatatcatcaaagtcaagacagactgttctatatgcttcaaataacaactaaccgtaaataaaaatagcagtgtatataaacatttaccaacatcactaataacactatgctggaactataatcataatantaataataataatccaaaaag

SEQ ID NO: 12732 - DNA, 509 bp, Glycine max
  unsure (1)..(509): unsure at all n locations
agcttgtagaatggctagacatgatacatgtcagggtttggtttggttcaaggataaaagggatgccccacattatttccatgacacaaatgcaaaaatgatgatttggaaactttacgcaaaactggtcatgcatgcacctatgcggacactcaagtgtcaaatttttatggtcatgtgatgctagggctcaagattcgtttcctctattttaatcaacccaatgtttccaaaatatgttcttttatcaatttgtgcattcatccgagtccatttcgggcgtccggcgaaatttcacagcattcacccttcaggtgtagacacattttccaaanattggttatgatcaatgaattttttcaagaaaagttggaagtgatctctttcanaagcatgttggtttttcagcttgacaacttaatttttcttttgtctccttttttttttaatcatgaccaatgtttaattccttttccttgttggtttttttttttttttttttttttttt

SEQ ID NO: 12733 - DNA, 451 bp, Glycine max
tgtgaaatctcaggatggaccattgggtcaagcccagctcatcaaagggtgagatttatttgatagtatgatgaaaaattgcaagaatctattattccgaaaattaaaaatataaattgttacttgtcccttttttcttggctaggtttgaatctgttctcagcactttggaagatgcggttaatgatgcccccaaagcaccagagtttcttggccgcatttttgccaaagctataacagagcatgtagtctctttgaaagagattgggcggttaatacatgagggtggagaggaaccggggagcctcttataagctggacttgcagctgatgttcttggaagcaccttggaggtaataaaaatggagaagggtgatgctgttttgagtgagatctgcacgagctccaacttgcggttggagaccttccggccgcttgaacctcttacatc

SEQ ID NO: 12734 - DNA, 536 bp, Glycine max
  unsure (1)..(536): unsure at all n locations
agcttgctttgctatgggtttcttggttgatgataaggattatattgaggctttaagagaagcattccattgggattttggccaattccttgaagactctttgtaacaatgttgttatcaaacaacattgagagaccaaatcatgtatggtctgaaacaagggagtgcctaattgatggtatccttcattagcagagaaggataagaaacatacccgataacatatattaaaccatgacttctttttttagttacaattattgttcagaacttaaatactctatttcttttttgtgtccaaagatttgcagctggaaactaaagagttacaaatcttgaaacatacttttcttctctaacaggttagcaaatactggtgtactntttaattgactatgtagtattaatacaatataaacaatgatggctcatggagtagctacctttcttttttcatatgcaaatacagatgaacagaagcatatctttgatactatcattaatgttgtcaatagaagcactggtggaatgttttt

SEQ ID NO: 12735 - DNA, 554 bp, Glycine max
gtttatgaagtgctgattggtataaacaacatctacatattggaagtgattcatgctcacgtgaccacaagaagcaataatgtgtgaacatagatagtgaagagcagaatactttccgcattgacaataaagggcattctagttaactgcccacttttgtacgccacattgcgttctacgattgaaggtctcctctacttcaaaccttgtcgagtggatatcataaacgctgacgaagtgcgaacaaacttcttcaagagttttttgaagtgctttaacgaccttataacaatatacttgcacttcattttactatctttgggcttggcgaccacgaccaacaaaggactttcgacacctactttatgtggattttaccataactgatattcgttggttacgataaggattcaagtacctattaacacattctgaaaggttggggggcatgtgaacaaaaatacgaacgtttttaaataagtaatagtccattttccttggaaagggatcaagccatgtcatatggctggaatcaacagacaaaactttttaaa

SEQ ID NO: 12736 - DNA, 270 bp, Glycine max
agcttctagccaaatggacttaccttgaattaattcctttgatagcccctttgagcctatgttcctctttctgtgttttgaagctcattacaagccttaagtgaaaaaccgtgatatcaccttacccttaaggaattttggagctttggaattgttttgggaataagtgtgtgggggtcccctgggttacatgggatacaccctgcctatccattaatataagggggttcacgattaaaaactttaaccatgtttatgaggcctttgtct

SEQ ID NO: 12737 - DNA, 537 bp, Glycine max
  unsure (1)..(537): unsure at all n locations
ttctcttttgtgcgactatctcatcctctttttcagatgtagaatgaagcttgacaggttcaagtgtaggtgctgctattattggaggcacttgaatttggttgccacacctcaaggtgatggcactcatatttttcggattatgcacagtttgtgaaggcaatttttcagaattttgggactgagcttggttcaactgagtagccatctgccccatctgatttgtcagactctgaatggaggctcttgtctcttgctgaaattgcatattttggatggtcattttcctcactaactcttctaacgaagattaaagaggagcctcagctgcttgttgtctttgttgttgttgctgctgtattggaggaagaacatatggcttgcttggaccancatcattctggaaagaaaggacaagcctgtgttgtttggaggacttgctcatctcanattttgatgattactccaaactggattgtatctgttgcttgaaaggccataatattatgctattgttggatttggtgttgaaggggc

SEQ ID NO: 12738 - DNA, 461 bp, Glycine max
agcttcaaggtatttgcatgatacattagctactactggatgtgtatttttcaagttaggataggttcaacatcatgattggtaatgtcatgttactttcaattgattgaatttccatcgtcagtttgtcattgatttggtgcaggtcataaagattctgtatcaagtgtagcttttagctatgatggacagtttcttgcatcaaggtgcttccatggaattgttcaagtctgggatgcatatggaaatctgaaaaatgtattttaaagtcttggagggggcatagaagtgacattattaatattcttggttttctgctttaagtcgttactaaataatttgccttgaaattttttcaagggctcatgggggattccaaaacaacacacacttcttagctggttctgaggataccaatgttttggatctggaacagacttgattaaattacccccccctac

SEQ ID NO: 12739 - DNA, 419 bp, Glycine max
tgtagttgagcccttttgaccctggttgaaccttgaaatttttgcttcattgaatcccatatatttattgtcatgtccctcttgaggattgtttcaaggacttcacgatctattgcctggaaaaggtaattctttacctttaagtccttcaacttctgctcctcgatcaatttgcattgtgcctccgtacgctctattccatctgccaccatcaatatcccattctcaatgagatcccaatattctttggagcagaaaagattctccatcaacattgcccaatgatcataatgaccattaaaccttggaattgcaggctgcacgaaactgctactcccaccttctgccattcttctcaactcgttctactcgaaagagagaaaaactgcagtttctttcttgaatacactcactgtttt

SEQ ID NO: 12740 - DNA, 445 bp, Glycine max
agcttgcaaaatggaagcaaatatatctctctatgggtggcagaataaccctcattaattatgttttaacagccttacgcatttacttgctgtcttttttcagaatccttaaaaaagtggttcacaagatagtctccattcagagaaactttctttggggaggtggcaatgaggcaacaaagatcccttgggtcaagtgggatacagtctgtctatttatgaataaaggggggttaaggattaaagacttgaacaagtttaatgaggccttggttggcaaatggggctgggagttggtgaataaccagaaccagctatgggctaaaatcttgatgtctaagtatggtggatggaatgctttattctatggcagaaacaatacagactcctcttcttggtggaaggatttaaaatctgttttccaacaacaacataataatagtct

SEQ ID NO: 12741 - DNA, 538 bp, Glycine max
tcttgcgtagccgctcttggtgctcagaaaatcccaaaaacaaatccctcttattactagctattttgaattctttagttcctgaatatacaaccttcaaattgttgctcgttcccctctttcttttctgcaaaaaagaaaatcaatatcaaagaaaacatggatgaaatcctaagaaaatcaatatcaaagaaaacatggatgaaatgacaattaaaaagcacaactaccaatctttcagagtcctttggttaatttgtcttgtctccttatgtggtggggttttgtttaataatattatacttttgccttccaaaaaaaacttatgactgatcctcttttcattaatcctattttgcatgttattgcataaaagatcatgggttctccagctgcctccactactcctcctcctcctccttcttatacttctcctcctcgtcttcctcctacttcggatgcatcggcttcgacgtctgccgtgaagcagacacacaaagcctcacgtctacgatcgttggccactagaccacctggt

SEQ ID NO: 12742 - DNA, 529 bp, Glycine max
agcttttaagggtatttgactatttaggttttatgtgtacccaacttatcaaggtttagtgttacttgaccaaatagggtttatggatatttgacaaaataaggttgcttgactaattgagattacgggtatttgacaaataagggtttatgggtatttcactaattagggttatgtctacttgatagttaaggtttactgttcgttgaccaattagggtttatgattattttaaaaagttggggtttacaggtatttgacaacttattgtttacggttcacgggtattggactaatgatggtttatgtgtagttgagtaattagaatttaatgttacttgaccaattagggtttaagattattcgacaaattaagggtacttgactaataatgatttaggggtattttacaaatttggttttattgctacttgacaaattaaggtcaagcggtatttgactaattaggtttatgggtactttagtaattgaggttatgggtatttgacaaattagatttatggttact

SEQ ID NO: 12743 - DNA, 545 bp, Glycine max
  unsure (1)..(545): unsure at all n locations
aatactcaagctntgcctacttgtatgcccaaagtgtctttgtgttgatcccctatacatgtccaagaaaagcattaaaaaaaaaacataaaatccatattggagcattcacattatgatcaaatatgtacatgtggttgatataaaacttaggttgcatgaacattaantatttgaccagtgaaaggagtgaatataggttgaatgccagtacattacataatgtccgttgagaaacaacacactcaatgatcatcagacagtacggcgagaagagacagcaccaacctgatggaactgtatagctggttgagcatgtcttctttggctttctctacttggcaaagaacaactgcctgctcagtcaaagtgaaatcatcttacaaaccgcgtcaaattagaagagaagaactatggtagttgataaaataaactcacttttggaacatttgcagcgaggctgttaagatcagcttcaacataaccacgcactttcttgagacatacatctgaagctctttttttggatctgcaagttttcttgc

SEQ ID NO: 12744 - DNA, 434 bp, Glycine max
agctttttctacacatttgtctcaatttttcttgctttccattcatcccactcaagtaagtgccatctctatctatttttacttcttccttgtggtatttggtgctttatttgttgttttcttggcaatatttgtgaggaaagttatgtggatccatgggctgaatgctttggttaagggatgcaatggatggctttaggcctatcttgattccgctgtatattttgcatgtcatattgttccccgttcctcatttttacatgtttgaacatgcacccaccaatccgttgataaaatgccacaacgaccattccatgtgttgttttgaaatttgaatgagaaatgagccttattcatgtccagccatcatttaaaatgtatgagcaacttatgttgatagatcacaatgccaatagcatgagttatgcttggaa

SEQ ID NO: 12745 - DNA, 404 bp, Glycine max
aatactcaagcttgggactgcatttgggcatctattttgacattgctacgctttctttacatacacaaaataaccccaccatcccaaatttgcaaaatcatattcagtcatcattggggcatttcaccgaacacttggggagcgcatgtttgaacataaattgcaagatgatggggacaatgtggcatgccccattgcttcataatacaacctatgactaaaggcttctcatccaaatcctcaacccaagaaaacaaggatcaaagctaaccaaaactgcctcacaaatataagcatgttctcacaatttagagtaccaaaagatgaagaaaacacatcgatgggaagcaaaaaacatcaccgatggaatacttgcttgttggagtgaattgaaacaccaaaaa

SEQ ID NO: 12746 - DNA, 489 bp, Glycine max
  unsure (1)..(489): unsure at all n locations
agctttgaaaagtgttgtttttcaccttctcactaagccaatctgctggcatagcgagcatccgctaagcgcaacactcatgggctaagtgagaggaacactctagaagaagatgagttgtataggttcgctaagcacaccgcttcatctcactaagcgcaccacttaagtccatccgctaagcgagaaaggcacgcgctaagccaaaattcactaatgtgtgctaagcggaacataattgcgctaagcacacaagcacgaacaaggccacctatttaagcctaaaatcagattttagagagggattttggactgggattcagagctttgcatgtctagagattctagagagataaaggttcaggttccaaagagttttgagagtttttgctgtttgaagatctgcagagactatagcttgatgcacgagccggtttgagagcttgagatgatnttgtgagtgattgtgagatccacttgtatttttga

SEQ ID NO: 12747 - DNA, 438 bp, Glycine max
tgtccttggtttagacatgattgatacatgatttgggacttgtatgattcaatttgggcaaaattggatgagggaaagtgtgatttcgaaaatctgcactttatgcagaattttgctgtcaaataggtgcagcagaattttggctttgtgtagaaagtgttgtgtatttgctggttgtcgaaagagtagtacagagtgggttttggccgttttctagcagatcccaacggtcataatgtagatttatgtgctagagacttccagtaaaattttcgagtcgatccaacggttaatgaattggaacgaggagaatattactgtggtatttgagtgtgaaaagctgtgatgttggtttgtgtttgggcagagttttctgcctctgccctgttttcttggctatgttagctcatgatgcttggatgttgaattacttggatg

SEQ ID NO: 12748 - DNA, 527 bp, Glycine max
agcttctccaaaaagcatagttatttccagtttcctgaaaatgtctaggaacctccccagatggtggtccttatctttcttggaagataccatgggatatggcacttccgtacccttttctgaagctttttctttcctcttttctctttcttcttcactcctactcttttgttcatctttagttttttcaactttttctttttcttctttttctttgtcttttcctacctctatttctttttcttggtcttttatttctttctctttgaccattatttgtttttccctcctctaactcattgtatctgttacctcattcttctttttaacagtagtgtccttcaaagcaacttgctccttcaaagcaacaacatcctcatcctcagccgccacaagcttcctgcttcttgttacaaaagctctacaatcttctttgggaatcttctcagtattttccccaagctgttgatgacttttcagctactgcttaccaggtgacccactgatctcaagttttttagggtgac

SEQ ID NO: 12749 - DNA, 419 bp, Glycine max
tgagatgaggaagtgttgaagggagaaacttcctgcttttattgttgaccacacagtggtacctggagatatgtcgcgggggtcatgaaaccttggggacgtcatgtggggtgctattgccctaaaccaagcttgaccaatcccgacccaacccgggcataatctgttagtgagaacctgtgatgtacctaagcatgcgagctcctggcagtcaacagataaaaggaacaaagaccacaaaccaaggaggcttgtggtggctggccaactgtgaaaactgattgatatgtgagatatggtctctggtaatcgattaccaagggtgggtaatcgattacaaggcttaaaaatgaagacaggatgctaagatggtctctagtaatcgattaccacggggatgtatccattaccacgcttga

SEQ ID NO: 12750 - DNA, 584 bp, Glycine max
  unsure (1)..(584): unsure at all n locations
agcttctctgtctaaatttctttctgtctcactattgggtatcgtcttgttcagcgtgtgttcaactgaaccttaacacactctntctggagaaagtttacataacaagacaaaaccccttcagtcaagaacagtaacattaccgttcctttactctgtcacagggttgtcctttacagatactcttattacagataagctcaatgtctaatcttatgcaatagtgaagattcctgccccttttcttttttttctttttttttttaacttttctttgggcaggatacatttgtcatcaactcttgcttgcttttgtaatcgtaacattttcttcatcttggatatttccagaacagaatatgtcagaggaatcttccattgaaagatcattttaaagggaaggatgattttgttgttcatggcacccactggcttataaatcgtcttggcgttttttttttttgaaaaactgaactaattgttgttgaaatccacggaaaggaatgaaaaattttcattggatatgggaggaacagtttcgatcaaggggttttttattaaatcaaactagggtttgttttttt

SEQ ID NO: 12751 - DNA, 556 bp, Glycine max
  unsure (1)..(556): unsure at all n locations
tgcactggaggataatttantgtttagcaaattaaataaaaaaaaaggctaaatgacattataaataatatatttgattctgtcgtgcatccatttccttccctctatctagttttagcgctctcttcacataagtaagttttgctttcaaccttggtagctgctactttcgcttattattatggccttttagcactcaaaagttgtcataatactagttctattacttaaaaagtaaataaactgcacactactttttttataaaaaaaaaattacaattcagtaatgtgactactaaacattctataaacctagttacttaaattgggacttctgatttttttaagactagaatttcttattcaagtctaataaatgtatatatatatatatatatatatatatatatatatatatattaatgttatctaatcactatactgaatcataagatccaattatctatgaggtgtgggaaaaaaaatcttattacctaatctttctagttctttttcaaaactttgtcgcattgtcggataatgcatgcttaacttt

SEQ ID NO: 12752 - DNA, 440 bp, Glycine max
agcttcaccggatgacgccgatcgaacatttcctaaccgacgtcatgcaaatttcgttcagggattgaattgaaaactcgttaggcgacatctgtcgtgaagtagcgaccgatatttttcagccgacattgcacaattctttttagaaaagctcgctggtcgataatggtctttttacggcagagtaagttttcttgttttggtgttgcataaaaaagttacaatgtacttcggctaggtttttcgtgcgagttcaaccgacattttgtttcggccatgaaaacattagcccacctctgctaaaaaaatatttgctaaccgtctttcatgcatatttcattcaacgattgaatagaaaactcaatagccgacaacggtcgtgaaatagtcccgactgatatttttcagccggcattgcgcattttctttttaaaaaaaac

SEQ ID NO: 12753 - DNA, 545 bp, Glycine max
tctttgttagacctcgatcggtcatgtttccaggccgatgtcgaccgtcatttttttcgatccatttcggtgaataatatttttttgccgagatgggcaaaatgccagtttctgccgaataaatgggaaaatgccagtttctggcgaaacaaaaagtctgttgggctcgcacaaaaaaacctagccgacctacattttaaattttttatgctacaccaaaacaagaaaacttcttgtgccgtagaaaaaaaacattacatgacagcgagcgttttgaaaaacaaaattgcgcaacgacggctgaaaaatataagtcggggctttttcacaaccgatgtcggctattgagttttaaattaaatacctgaacgacaccttcatgacgttggataagaaatgttcgatcggcattataccgagaagttttatttttaggcctcggtcaattttcatatctgaccgacgtcgacttgccttttttttgatcaatatttgccaaaatatttttttccgaggtggctgagttttccggaacaaaaaaatgc

SEQ ID NO: 12754 - DNA, 478 bp, Glycine max
agctttgcctttagggcttgtacctcatcactttcttctgaagctttaacctcattgtctctcacagtctttagatttgggagccaatccaatccttgtgtccggactctcagccacttatgatagccgccaatgatcccattactgcttcccctaagctctctgtcctttcttcacgccgcataccatgccttgcgaactccttggagtaccctcatgttgtggtcactgaaaccccgtgcgatgaaaggcgtgatgctttcgtctgatggcactcctctcatggggtagccaagctgtcttatggtgaggacgggattataattaatacaaccccttgttcccatcaagggaacatttggacatccttcgcatgaagataaaatcctgattcttccttccttctagcgagggaaccaaattaacagacgcccctccatgctagccaagagttgggtccaattcgccttttcttttt

SEQ ID NO: 12755 - DNA, 516 bp, Glycine max
tcttcacaatagtttctttcagacttcacaccgatttgtttcaaacatgaaatttatttttacctaaaagagtcatcggttcatataaatgttccttttctttgcttgcttatgattttgggagtttatacacctgtttggttatatatatatattttaataacaaaaatccttctcctgtaattttttttcttttttatgatgaaatgcactagcttgttgatttgttgtgtttcattttttggggtcattttttgttcttattttggttgatgtttcctaaaacatttaaatatttctttttatttaggtttaacaaaatgtcacgtggtattataatgctcagtttagtggcatatgatatacctaatactaagttttgagctttgtttctatttcatccttttgatttatattcttattcggtgtcattattaataagaatatgaaccttcttttcagaattaggattaacatatgtggaaattaaaataaacaagtgagctaatattactt

SEQ ID NO: 12756 - DNA, 446 bp, Glycine max
  unsure (1)..(446): unsure at all n locations
agctagtaagactcaccaagggtggaccttgggttttatgagccctttaaagaaccgactagggaattgttcgtcttgggttttagagagactcaccacggacagaccttgagttttgcgaaccctttgaagaaacaacctatgagactctccaagggtggaccttgggtttgacaagcctttggagaatcgaccagggaattatccgtcctgtgttttggagagactcaccaagggcggaccttacgtttgacgaacttgtaggactcaccaaaggcggaccttggatttttcgagccctttgtagaaccaaccaacgacgcgtccatcttggattttgggaagagtcactaagggcgggccttanttaaaacctctgaagtcgaaacccttggttttgccttttgggacaaaatacttgagtaagataaaaaagatagccttgt

SEQ ID NO: 12757 - DNA, 481 bp, Glycine max
tgctcccatcgttgttcaccttcatcacccggccactgcattccataactcttcattttagttttcaactcctctacctgaatgtagataatattttaattcactggcttcatcattcatgtggattggcttagaaacttagccaaaatagcaggctttaatatcaacttttggaattccactaggaataacaccagttatgctttgtgcaggaaaccaaaaacaaaggccatcttctataaacaactaaaaaaataaaggagagatttgaaaataaatatttggaaatggaaggaaggggtatttggggtgtcataacagaaatgttgagactcattttggaattccaattcaagtggaggtattagataaagattctttataacttaatttaagctgctttcttcacggaagcttctatgctgattggcagctttgtcataataatagattgctatccttgttccgtattgtagtgggg

SEQ ID NO: 12758 - DNA, 361 bp, Glycine max
agcttcaacattcaattttgagcgttttgatatattacgatactcaatcggacatccgagtaaaacgttattgtcgtttgaatttgctcagagcttcggcattccatttcgagcatctcgatatattacgggacttaatcagacatccaagtaaaaagttattgtcgtttgaatttgctcaaagcttcgataatcaatttcgagcgtcttgatatattactagactcagtcagacatccgagtaaaatgttattgtcgtttgaatttgctaagagcttcgataatcaatttcgaccgtctccatatattacgggactcagtcagacaaccgagtgaaaagttatttgcggtttgaatttgc

SEQ ID NO: 12759 - DNA, 402 bp, Glycine max
ttgagcaacttcaaacgacaataactttttactcggatgtctgattgagtcccgtaatatatcgagacgctcgaacttgaataccgaagctctgagataattcaaacgacaataactttttactcggatgtctgattgagacccgtaatatatccagacgctcgaaattgaataccgaagctctgagcaaattcaaaagacaataagtttttactcgtatattcgattgagtcccgtaatatatcgaaaggctcgaaattgaatatcgaagctctgagcaaattcaaaagacaataacgttttactcggatgtctgactgagtcccgtaacatatcgagacgctcgaaattgaatatcggagctctgagcaaattcaaacgacaataacttgttactcggat

SEQ ID NO: 12760 - DNA, 401 bp, Glycine max
  unsure (1)..(401): unsure at all n locations
agcttggaggggttgatggggacccggtgctgagatgaannaggataagggctacgtaggagtgcgtgagctcaagttaaaggtgggcaactggggatggtatccttgtgccttacttgtggaaatgagagagttgatttgcgccatcgcctgatcgccacctagtacaacatatgacgggtgtcccataatccaataagcttgatgtgagaaagtgtggaagagtcagtcttcctacttttgtttgttgaccacacagtggtacctggagatatgtcgcgggggtcaggagaccttggggacgtcaggtggggtgcgaatgcccaaaaccaagcttgactattcccgacccaacccgggcttaattaattaatgagaacctgtgacgtacctaaacaggc

SEQ ID NO: 12761 - DNA, 485 bp, Glycine max
ttgaatgctctattcaatggagttgacaagaatatcttcatactgatcaacacatgcacagtggccaaggatgcatgggagatcctgaaaaccactcatgaaggaacctcccaagtgaagatgtccagattgcaactattggccacaaaattcgaaaatctgaatatgaaagaggaagagtgtattcatgacttccacatgaacattcttgaaattgccaatgcttgcactgccttgggagaaagaatgacagatgaaaagctggtgagaaagatcctcagatctttgcctaagagatttgacatgaaagtcactgcaatagaggaggcccaagacatttgcaacatgagagtagatgaactcattggttcccttcaaacctttgagctaagactctctgataggactgaaaagaaaagcaagaatctggcgttcgtgtccaatgatgaatgagaagaagatgagtatgaccctgatactgataa

SEQ ID NO: 12762 - DNA, 311 bp, Glycine max
agctttgcggatttggtcttcgcctgtgaaaggatcgaagtggatctgaaaagaggcaaatttaatcatcctgcttagacgaatgagaaaactggggcaaataaagagggtgaggatgagggagaaacccatgatgtgactgccattcctatacggccaagtttcccaccaaacccaacaatgtcattactcagtcaataacaaaccacctccttacccaccaacccattatccacaaaggccatccctaaatcaaccacaaagcctgtctaccgcacttccaatgacgaaaaccaccttttgcacaaacc

SEQ ID NO: 12763 - DNA, 463 bp, Glycine max
ttacagcagattttagtaatgacccactaacctagaattaaaataacttaatgccattaacctagggaattaaaacaaactaaatggctgagtgtaactgaaattgttggcaaccaaaagtcacccccaacagccaacaagtcagccaccatttggtctcccaaaaggctgatgcctacgttgccaattgggcccttattacaacttgaactaaagcccttttagttgattaacccaaaacatatttttggtcagccaactttacaaggattgggccattatttatacaaactaaacactctaaaattgaaataaagtggtgtcatttagtcctccatttgggccatgatacaactcacaacccttggacttttctccttgaaactttgggcttggttttcaaatagtatgggacagcacttgttgaagagcggccttggctttccttgctctaacccctgtc

SEQ ID NO: 12764 - DNA, 509 bp, Glycine max
agcttcaaacttgacatgaaaactgaaaagggtggaacaaaactagcaaatccaagattgagagagagagaagtgtgtatatgtgtggcataaaaagtagagaatttctgaactgggattttgtattaagaaagagagccaacgatgaaaacttcattggaaaaagtattgattgttcataatgagttaataatgatgacgacaaaggaaaaagctactatatagtatttcaaagtgtagcaaaagggaacaagtcctctaattccattgctggaagtgaatgaatgaatgaaagcgaaggttccttccctctctgctatttatttagtgaattggttaatcattcattctcgtatttttcattctttcttttttgataattctgctgtcactcgtgctgtactattgagcaattgctcaccttttttttttttgttttggtctaatgattagactcgtgggttcgtgtttttttcttaattcgaactatcacttttcttgtgagtttt

SEQ ID NO: 12765 - DNA, 570 bp, Glycine max
tatcagttccggtctccttttgaatacatttctgctctcttggcaaaagagtccccctcttcctctaagagcttcaaaacggtttgcactttttcctccatatctgcagttttgttcatttattttagttagccagctatatgcatgtataaaggcacaacatacaagtgggttatgttgatcttacacgggcatctccatgtgattcaagcaaatttttaatttacattttaattaacagtgagtaaacaagcgtccatcgctatatccgcatgtaggatagtggtaagcatatcgttaagttttaaaatcataggaaacaacttcaaggaatgcaaactatacctaatttctcaaataagtatatgtttaataagaaaactgaagctgtgcaacataattattgtctgaaaggcattctatcaagaaaagtgggcaaaaattggagtcattctgtgtcgcaaattctatttcacaaaatggctaaaaatagcataatgtgaattgagtcacacatattgggatttgggaaaaatcaaatttgaaaagtgatagagggaggggcgtatg

SEQ ID NO: 12766 - DNA, 446 bp, Glycine max
agcttctacttatgtggcagggcgggtttccttcactttcttgtctccaacgcgagctctgaccactgtccttccttcccgcggtgcttcttttcatgtccgcctgagtgggcttatagcctaaaccatacttcccacgatttccttgggtttttatcaggctagttatgccgccattgtctttgcctaaacccatcccgggttcataaccgttccccaacataactcgggccatcattaccgccgcatcggacagacaaggttgcccaaagagggagtccacggaggaaatgctgaccacctcaaaagactggaaagcggtttctaacgattcttctgcggcttccacataaggcatggaggatgggcagcttaccaagatatcttcctcgcctgatacgatgaccaagtgcccctccactacgaatttcagctttttgtggagt

SEQ ID NO: 12767 - DNA, 505 bp, Glycine max
acgtgacctatgaatctcagctttttaaaacaacaacttatttttaattctttcaaaagaagttttcaagatggggttagtttttgttttctccaatttttagttttaatataaactcattttaaaagtttcatattctatgaaattagtttaagagtgcttttgtgtggtggtgacgacaatgttgtaggtgattacaacatggtgatggtggtgctgatgtcgactgtggcagttgtggtggcaatattgatgacaattgtggttttggtgaggatggtagtcgttgcataagtggtgatcgtggtagtagtatcggtgaatatggttatcactactacaaaaagcacatttaacatcgtacgtttaacatcggttttcctcaaaaccgatgtttaacgtaacccgatggcataattgtaattaatgtaaagtttttaacatcagttttttagaaacaaatgttaattaccttacgttaacatcgggtgtttaaaaactgatg

SEQ ID NO: 12768 - DNA, 380 bp, Glycine max
agcttgcatacaagattctccttgcctggcacttcaaaaccttctggttgggtcatatagatgtcttcctctaaatccccatgcaagaatgcagttttaacatctaactactccaagtgaagattctctgcagctactatgctcataataactttgatggtagtcatctttacaactggattgaagatctctgtgaaatcaattccttgtttctgctgaaaccctttcaccacaagtctcgccttgtatcttcttctaccgttagattcttccttgagcctatatacccacctattctggaacgctttctttccttctggcaatttagttaaagaccacgtcttattcttctgaagggatgtcatctcatctttcatcgc

SEQ ID NO: 12769 - DNA, 656 bp, Glycine max
tgttgcctttccgattttctttatgcatggacgacaaggtttattacttataagtcatagcacatggctcgacttcaaagtcgtaacagtggccacgactttagtactttatgtaggatgggagtggcattctacttcaggagtcgtgggttatggcacaactttaaaatcgtgacatttggcacgactttaaagttgtgtttattattattttttaaaataatatgtcatatgttaatattattttacggttttagttaattaaaaattttatatgttataagtaaatattttgttagggctttagttagataaaaatgttatatgttataagttaatattattttaggggtttagttatttaaaaatttatatgttataagttaatattttgttagggtttaattaataaaaatattatatgttataaggtaatattattttatgattttactcattaaaaaaagtactatgttttcaggtaatatttctgtaggggtttaagtaattaataatggctatgttataagttatattattttaaggcgttacttatttaaaaaggcttttgtgataaactaatattattttaggatttcactattaatattattattttcccaaaatgttttaatattatttatttaatgaaaaac

SEQ ID NO: 12770 - DNA, 479 bp, Glycine max
agcttgtgccagatcaaaatgtttgcttgcaggtaaaggaggttgaacagaaggtcctgaaggtgagggctgaatttgatatcacccattgaggtatattgttggatttcccctgcagttactttttggtccaattttcctttatacaaatatgttcaagggaaatctgattagccagaaagcacaccgggtcgtcaagtatttaaaattaaaatggagtgatccaagtatcgaactcaaggaacttgcttattagacagagttttattcagaaataaggcattgttgtaacaacattgataaagaatggttaaaaacagaaataaactacttctatggtaaaaacaataaatgcaagtaaaaattgacagcaatatgtaaaaagcgttgggtctttcaaacaaacaagcttatgcatatgaagatatttttctaatcaatcatgcttctgtgttctatgttgtaccctaaaaactaaa

SEQ ID NO: 12771 - DNA, 487 bp, Glycine max
  unsure (1)..(487): unsure at all n locations
tatgcgcatatntccttacaaacgttctcttgcacaagacattctattaaccgaaaaaatgcacccatatacaatcaaggcagcttcgttacctagattatttacacgtacttccaaggtgtatttgttacttacatcacacacatctccttggctaaattcacatacatgcatactcaaagcattttggggtaccaaaaattgcacatgtgcacatcttggtatttctaatacctatacatacacaaacttcatgatgaatcttgactatctacacaataaggtgctacatttcatgctcttttcaagtttttgctacctaaagccgcatgcaaattcaagtatattttcctttgctgactaaaattgtattcaaattaaaaggtatacattttttggtaatgtatcttctttacataacatgcaacatatttatgtatatttttttgtgagacattttgactaccacaaaatatatgtacataca

SEQ ID NO: 12772 - DNA, 464 bp, Glycine max
  unsure (1)..(464): unsure at all n locations
agcttcaacctttggccatcatttctgctccaaatcgcgaaaggagagcatttttggagtcgtgaagtgcgtggctacgagtgggtcttcgaaaattcaggtttgggtggacttctttctctcttaaatttcgtgggtatggggttttgggagatatgatgggtagtcttgctaggtttctgctgtgtgatgattatttgtgaagacatttgttgaaagcttgttgaaattgccatgtttggatgagttagacatacccactctgttttanggtttttgtgatgatgtttgtgatgtttatatgttgaaattgcttatggaaaactgttagagatgaatggtagagtttaacctcaggttagaaagtgagaatgtgatgttatgagtggaaaaagaatgaagcttttgaaattggaaagttaagtctgaattctgtggtaaatggaggttaaagtgagttaatc

SEQ ID NO: 12773 - DNA, 901 bp, Glycine max
  unsure (1)..(901): unsure at all n locations
tctctcgatctctttgctgccaccgtcttccgctccacctctatcttcctgctaccatatctcagatttnctctntagcgannttggttatctgggtccttcggattcctcgaacactcatactctcactcttaactcagtgtgtgggcacccggggcgtttgggtccgtacttgtacggactagtcaccctcgcttgaactccttagtttaggaatagaatgcattgactaaagcaacatggagggtaccttttgtcccaccccctcctttccatcaagaagccaccttccctaaaagatgaattcctatttacaaattctattggggaaatatatgagagcacattttccctttctagaacacaatgtcttactccccttgtaaatgcatgcataatagcgtttaacatatttccccaaaaaccgctggagggaagtggaattctaattcttttttatgcgttaagcatttacacacactacagatacatttgatgctataacaacaaccagattgtggcgctgttgtgacttagcgactttttaaggaatagatatgtgatacacgttccttgtatgacaccaacatcattctggatacctctagggaggtgtgtctttcttagaaatattaaactttgaactctaaaaacaaccttttaattcttgatcccatgcctcacttctagcctgataaggtcttctaatctctctcaccacaatgactctctggaggtgatgaaaacaaagaattagacttctgcctccgtgtatagtgagaatctaaaccttggcctgatggaccataaccgtgcccccgggttgacaccttccctcaaacttcccatgagtaccccacctacctttcggcacaattactctctctttgaaacacgtccc

SEQ ID NO: 12774 - DNA, 564 bp, Glycine max
agcttagataccaccagcatcaaggaattagggcggttgatggaacctctccaaatgcaagctttccgcaagacttacggaaagatcttagagttgaccttagcagaggtatccatagaagccattgcatcactcacccaatactacgaccaacctttgagatgcttcacattcggagacttccaattagtaccaaccattgaagaatttgaggaaattctaggatgtcctctcgggggaagaaaaccatatctttcatccgggtgtctcccctttttgagcagaattgcaatagtggtcaaggattcagcaagaggtttggaccgcataaaacagactcggaacggcataacgggcctaccacgggggtacctaaaagacaatgcgaggggtatggccaatcaaggagattgcgtcccgtttatggatgtgttagctttgctaatttttggcgcggccctcttccaaacgtggatgggttgggtgacctagcaacaatcgacgcttttcttgcctacaccatacaaggaaagtccggggtagttgtcttggctatctattttg

SEQ ID NO: 12775 - DNA, 975 bp, Glycine max
  unsure (1)..(975): unsure at all n locations
ctccaacacatcctgtctactattactactttctctttgtctacacttaatgtgcgtctaagtccggctcgtgtatttatttcnnnnnnncaaggagtgtttgagacatgctactacngagccaaanaaacacacacatctctatcccgtcgtccttcggatacataaccgggttgttccaacgagcagcctgttatacataagctctagaccggacgcacataaactccatagctgccatttgagacaataccaataactagcaaactctaatcattgcttttgggagcaggaatcacctgggtaatgttgatgaaatgcgtgaatttccaatcgatcacaggctatgcattgatttatattactaattagggcgtttgtaaataacatcatctttatagccgtgatgaagagagaggtacttcggtcctatttaggaaagttagtcggaaaagctcctggggatgcaaacgtatggcaaagaactgaaattgagccaactcgtttagcattagaagaatgataactggtggtaaagaaaattatttggtgggatatcggattgcatgccagggaacgcggagacccaatagggaggagctcttggagcccctactttgtgtatcaaaaaattggtgtgttaaattaacagaaaaagtgggactgtcatcttagcactatgggatttgtggggaagataataatctctaaatatgtataggaggacgggctcttgcatgttttgtgtatattagagccccaaaaccgtagataaagagcccgttatgaaacccctcccttggtggaatgcgaaatcaattcatacattgcgtgttggggagcaatattcctaagaggagaaatgggttctatctgctcaagccgataacaagatacaaattttctcctgtaatgcgcgttacaacacaataggcagaaaatctttatgagggaaattattgtgtaaccacctcg

SEQ ID NO: 12776 - DNA, 1172 bp, Glycine max
  unsure (1)..(1172): unsure at all n locations
ccgtctctctccctacantgcacactgtatcntcacntcctttaccaccactttacttattgantctncagtacanatagactgntcttatactctccntacacatacancactcacccacagcacaggcagacnnntntttgttagacactggtacgagccaccgcgatgactctcttaatatgaccaagctggcaagtcgtgagcaatctaccaaatggggaccgtgcgatgaaatgattcttttgttcggcgactctgaaccaccgaacaaaaaacaaacgtggccttgaaatcccctgcgccagaatatttattaggaagcatctctagtcgatgaaagaaaaaccataataacacaacttctcaaacgaccaattcctgtggggatgctgcatccaacacacacctctatatctcgcgcagatgaggggtattaacccgtagaatcgcacatactatgagtgtgttcttaattaccttgcatactctacacagaacatctttggcttaaacctatattcagaaccgctatgttgtactaatcaccacacttagtgcccgaatactatagaatactcatcgcacttagttgtgataattccactttctagatcttctcaaaaccgcaaagtgttataagaagcgtgtcaaaccctccgtgatatttcgtctgtgccatgtaactaacacaaatcacgaaccacgatgacagttgaataaaacacaactcaaataataaatgcacttattgactctcagttaccaagaccgaattcttgatagattggctgctgtctatagaatgatccctccataccaagtcgggacctgtacataaacgagagaaacatagccatgttgtgttacgtacacaacacttcgctctccatggaaaaatggctaaccttgatgtggtttttcgtacatttgaccacgcgacacaatcacggggcgagtgttttgtggccacattaaacacgggctataggacacaaatcatttccctctctttatataactacatctccatgatagtaaacaaacacattctcttattatctttaacacgagaagtatctattagatcacagtgacccactaagccatgcctttctctaatatatatatatgaacaaccactttcgctatcattcgcactcatagaaccg

SEQ ID NO: 12777 - DNA, 676 bp, Glycine max
ttttttaagtacgaaatcaaatcctggggcgcgggcattaacatgttcgagcctctcgcagcattaaggtgatattatttttattatcatcatcattatttcaataaattatagtttatataataatctgtcaaaatccattttggcattaaagctaggatcactctcaatgatattttcttatgaacataaatatcgtaatggaacctgcagggagtagttgcgtaaaggattttacctcttccagttctcaatccgattcatccttgtacgttccactatggcaagaaaactcgtattcatgagtattcgtccaaattcatcccgactttgacgggtaatattcaagtcgattgggtatgggtatggattcaggtttttcccgataaccaaaagttgggtacgggtactggtatgaaattactatacccgttccgaaccccaacccgaacccgcccttgcactttaaatctttaaaatttttgcataatataatcacaagtatctaatttttattactacgtaattttattttaaaattttacataatttaataatattttcttaactaattatgggaacaccccgcttataataaattattggtatataaatagtaaaaaaaaatgttaacaatcaatttattttttttaaattaaaattttaatattttttt

SEQ ID NO: 12778 - DNA, 779 bp, Glycine max
  unsure (1)..(779): unsure at all n locations
tgctggcncnttgtgacctctagacccccgagctcttatagacctgctgcatgctacttgcgtccaaaaaaatgtctgcttttttttataagaggctaacatgaagtcctttaagggtaggcttaaatctcggtgacgcaatgggggatataggaggagatgtcctaagcgaactctttctctaagaaatattctatgcaaaaatggactccgtcaccccagatgaactctggatcacaaacttgtggaggaatgcttttatgtgtgaaaggaaagaaggagaaatctgaataggggggagctcttttttgacagaatataactgctaaaaaatggatctttgggccgtctcacaaaactcttatttaataacataaaaaaactggttctcttgcgaaaaatattagagccaggttgcatcttgagaaacttgtttaaaaaaactttcttttgaaacttcctgggaatacctaccattatacttataaaattctcctgggtgtttataatatagtggtgaccccaatgaggtatccttatcttctctatctttaggcagggaggtccttaatgttcccctagccttcctttgtattaataagggcttatcttacttatgcttttctcagaagtattcttactatctgaagcgcggctttcctctcccgatagttgcgattatatacactctccctccccctttttaagggaccctatcttgccctatatatggctcccctatatcactaatttgtccttcttgcctcaacatcgcgaat

SEQ ID NO: 12779 - DNA, 357 bp, Glycine max
gaaaaagatagattttgtttgtatatatgacatggtgggataaccagagaatctacctctagtcatcttgtgttactggatgctaggcttcaaagaaagattcgaccctaaagagaagaagaattttgtcccttttaagatgctatccactcatatcatgaggaacgttgggtcaactccactagccttgctaatatataatcttaggattatatttcacgttagatcccacttataagccaagtgttacccaatcatgatataataatacgaactatcatccaagtcgtctcctatatgaataaatgagggatttcatgttattattttactaagaactacgtttttgcaggtttg

SEQ ID NO: 12780 - DNA, 366 bp, Glycine max
agcttccaatgtgatagaaattttctccattcatgagaaacattggtggagcatttccatcattgatagatttaatgacttttccatgtgaaagataacatactgttgaaggatctaatgctttctaagaagaatttattcctcttatcatgtttgtgatataatcatataatggttgtgaagcagatagatactgaggcattgtgatccgatcttacatgcatcacatagaaaattttggatttttatctttgaaaagcttttgtatactttttcttcaaaccacttaacgcaccacaaaattgacaaatacatgagggttcaccactgttctaatattcaacattgacatctacacttataata

SEQ ID NO: 12781 - DNA, 440 bp, Glycine max
tgctaattgtttattatgaaattgatgagtgctattgcttcttaactcgagtgggtgattcatgtgtcatgtgattagtgattcaaaaaaatgaattttaaagataaattggtgaattgacatgggctgtattgagtcaagttatgttataaatattttcataattgatttcgattacgccttgggtatttgtattgttatttttttgcgataactcacttcctatgtgccatttgtgtcaggatcctgttatgatctctgaccttgcgctcatgggaatagatcactacgtgaatgactttaaagaatcccccgtcaaaacacattgggacacaatgctctgatacgatgggatattgtgaatgagcttttattttaagcgcccgatggtatgttattttaatttacctcaccgattgcacacagcatttttttttttt

SEQ ID NO: 12782 - DNA, 491 bp, Glycine max
agcttctatataagctgaaccattttatctataaacacaagttgagttttattcagaaaattagagtttatctcttttatcttagtgagagtgattctcctaaattcttgagtgattcaagaacaccttggctgtatcaaaggactttcacaacctttgtgtgttgccctcgctggaaagagtgattcttcccttcctttcatcatcacccttgttctttcaaaccacaattccagaaaatccacctctgcccagaattatctcgtggccataacttccattttacgcactcaaattaagtgattcttgagcctaaattgaatttcaaaacgagacctttcacctcgttttggaatcacctcatttggagccctgttgcttcagttattgccatttctatatttctgtccagccaccacttaacctacgtttaccatcccattcatccattttatgccaagaaccaccttattaagacccacgaaattagc

SEQ ID NO: 12783 - DNA, 566 bp, Glycine max
tcaccggatgacgccgatcgaacatttcctaaccgacgttatgcaaatttcgttcagggattgaattgaaaactcgttaggcgacatctgtcgtgaagtagcgaccgatatttttcagccgacattgcacaattctttttagaaaagctcgctggtcgataatggtctttttacggcagagtaagttttcttgttttggtgttgcataaaaaagttacaatgtacttcggctaggtttttcgtgcgagttcaaccgacattttgtttcggccaggaaaacattagcccacctctgcaaaaaaaatatttgctaaccgtcttcatgcatatttcattcaacgattgaatagaaaactcaatagccgacaacggtcgtgaaatagtcccgactgatatttttcagccggcattgcgcatttctttttaaaaaaacgctcgctggcagattatgtttttttcaccatcgaggaagttttcctgtattggtattgcataaaaaattaacaatgtatgtcggctaagtttttttgtgcgagctcaaccgacgttttgtttttgccgaaact

SEQ ID NO: 12784 - DNA, 445 bp, Glycine max
agcttaacatcaatcaccttgctgaccaaacaaatgaggaatttgtggctttccataatggatacaaacacaagggatcacattcacaaacaccattcaagtatgaaaacgtcactggtgttccgaatgcagtggattggagggaaaatggagctgtcacaacagtcaaggaccaaagccaatgtggtaattaaataacaaaaatttttttatcttatgaatcgaaggcacataacatggagtttaccactacttatgtgttcttcttaaccaactgagcttgactccctcggttatacagaaaataaccataaatgaaagcgatccattttctttttcatatattactgtgatgaggggcttaaataatatttgggtaatttgtaaattaaccaggatctggttgggattttcaacagttgccggaacaaaaaggattctacca

SEQ ID NO: 12785 - DNA, 391 bp, Glycine max
tggcatcaatcaccttgctgaccaaacaaatgatgaatttgtggcttcccataatggatacaaacacaaggcatcacattcacaaacaccattcaagtttgaaaacgttactggtgttcctaatgcagtggattggagggaaaatggagctgtcacagcagtcaaggaccaaggccaatgtggtaattaagtaacagaatttcttttatcagtaagaatcgaaggcaggacaacagggagtttacaacaactcacatgttctgctcaattaactgagctagactccctcggttaacacagaaaattaaccataaattaaagtgatactatgttctgttctatatatcactgttatgatggcataaataataatggttaatctgtaaataac

SEQ ID NO: 12786 - DNA, 507 bp, Glycine max
agcttagtaaagctaggcactaacaatctccccctttggcaaattttgtctaaaacatacttagacacttcctgagcaggtacgagcagttatgcaagtgggatcaacaactttcattatcagagtaatcaagcacagcggaaattctgcaagttgcaagtcgtttccaggatgtcaagacatctcacatgacatcagctttctgcttttgctccccctgtctccatgctcttactccagcatcttctatcagctactaatctttttcaggatgtcaagacatctcatgtgacatcagctttcccttgtctccatgctcttactgcagcattttctatcagctactagtagcttacatcagtaatcatcagcagcagcagtctccccctaaaaacatgtacatacaacttcccctcaaaatcatgaataatgcttacatcgtatcctacttctctaaatcataggtaatgctttatactactactgcgtacaccaaaccatccatat

SEQ ID NO: 12787 - DNA, 506 bp, Glycine max
aaactcagcttcttataagctgaaccattttatcaataaacacaagttgagttttattcagaaaattagagtttatctcttttatcttattgagagtgattctcctaaattcttgagtgagtcaagaacaccctggctgtatcaaaggactttcacaacctttgtgtgttgccctcactggaaagagtgattctttccttcctatcatcttcacccttggtctttcaaaccacaattccagaaaatccacctctgcccaaaattatctcgtgaccaaaactcccatttcacacactcaaattaagtgattcttgagcctcaaatgaatttcaaaacgagacctttcacctcgttttggaatcacctcatttggagccctgtagcttccgttattgtcatttctatatttctgtccagccaccacttaacctacgttttaccatcccatttatctttttttgtcggaaaccaccttattatgacccacgagataaacccccttattt

SEQ ID NO: 12788 - DNA, 506 bp, Glycine max
agctttcagccaattcacccgacaataactttttactcggatgtctgattgagtcccgtaatataacgagacgctcgaaattgaatgttgaagctctgaactagttcaaacgacaataactttttactcggatgtctgattgagtcccgtaatatatggatacgctcgaaattgaatgttgaatctcagagccaattcaaacgacaataactttttactcggatgtctgattgagtcccgtaatatatcgagacgctcgaaattgattgttgaagctctgagccatttcaaacgacaataactatttactcggatgtctgattgagtcccgtaatatatcgagacgctcgaaattgaatgttgaagctctgagccaattcaaacgacaataactttttactcggatgtctgattgagtcccgtaaaatatcgagacgctcgaaattgaatgttgaacctctgagccaattcaacgacaataacttttactcggatggtgtgattga

SEQ ID NO: 12789 - DNA, 373 bp, Glycine max
tcaacgttcattttcgagcgtctcgataagttacgggactcaatcagacatccgagaaaaaagttattgtcgtttgaattagctcaaaagttcaacattcaatttcgagcgtctcgatatgttacgggactcaatcagacatccgagtaaaaagtcattgtcgtttgtattggctcagagcttcaacattcaatttcgagcgtctcgatatattacgagcctcaatcaaacatccgagtaaaaaattatggtcgtttgtattggctccgagcttcaacgttcattttcgagcggctcgataagttacgggactcaatcagacatccgagaaaaaagttattgtcgtttgaattagctcataagttcaacattc

SEQ ID NO: 12790 - DNA, 504 bp, Glycine max
agcttcaacattcaacttcgagcgtctcgttatattataggactcaattagacatccgagtaaaaagttattgtcgtttgaatttgctcagagcttcaacattcaatttcgagcgtctccatatattacgggactcaatcagacatccgagtaaaacgttattgttgtttgaatttgctcaaagcttcaacattcaatttcgagcgtctagatatattacaggactcaatcaaacatccgagtaaaatgttactgtcgtttaaatttgcttagctctccagctttaaatttcgagcgtctcgatatatgacgggactatatcagacatccgagtaaaaagttattgtcatttgaatttgcttagagattcaacattcatcttcgagtgtctcgttatattacgggactcaattatacattcgagtaaaaagttattgtcgtttgaattttctcagagcttcaacaatcaatttcgagcgtctcgatatattactggactcaatc

SEQ ID NO: 12791 - DNA, 499 bp, Glycine max
tccacaacatccaagcaaaacaacattcaaacagcacaagctatcacagccaagcaaaacagagcaaaggcagaaaactctgccaaaacaccaaccaaaatcacagcttttctcacttaaagacccccagtaacaattccttcgttccaattcgttaaccgttggatcgactcgaaaattttactggaagtctctagtacataagcctacattgtgaccgttgggatctactagcaaacgtccagaactcattctgtactactctttccacagcctaccacacacaagcatttttctgcacaagccaaaattctgctgcacctattttgacagcaaaattctgcataagtgcagatttcgaaaatcacactttccctcatccaatcttgctcaaatcaaatcctacaagtcccacatcatgtatcaaacatgtctaaaccaaagccaagcttctaaccacagcaacacaaaatctaggtgtccaaaacccctcaattta

SEQ ID NO: 12792 - DNA, 704 bp, Glycine max
tattcatttgttttaaggatcctgcaaaatgtttttctacaataataaaggtgtttgttttaatattttttagaatcgttctgtcaagatacttgtttttaacagttttgagtagagggaaccattctgatttggttctttttaacatttttgactgggtgatcctggaatttgcctatgattttatcaaatgatccgttgaagcttttttatttttttggtcacggaagaaatgtggcaatcagaacaatttttgttcacgatgtgaaattgatttattcacgaagttaaattgaaatagtttgagtgcatggtcctgctctggatttatgctttcgttttcccttttgtttgaggaaatgaccaaaataattgaatgtataaatcattcttacaataaaatttgaaatcaattgattattgaatgagaaaatattttagtaacgaaaactttcaagcttaaccgagaaagcacaaactttttaatttaaataagaaagggcattttaaccaattcacacttttttacaacatttttatttaaaaaaatttccaacaatttcaccacagttaaatattttgatttattcaaaactcaaaaatgtttcccaatgcatttattataacccaaatggttgctttttcgctaaaaaaaggggcattaatggtttctaacccaactgcaggtcactttttttttagct

SEQ ID NO: 12793 - DNA, 556 bp, Glycine max
  unsure (1)..(556): unsure at all n locations
gaccttaaaactcagctntgcatggcctccttgatagaagccatttgatcttttaaggccgataggtcagccttcatctgttcttgcactccctcttcattatccatcttacttctggatcgagtgttataggggtgcctttgcgcttttttagttatggtgagttccctaaagaaacaaacagtggtgagtatgccaccaaaacatgaatatgctaatgaatgatcagggcacttggatccacctcatggtcttttttagacaacgtgatgagtttcagaacttctctttttataaaaaggaacaaagcttttatctagccaagatcatacaaaagtgttacaacagaacctaacggtttctaattatatggtccatcaaatctatcatgtgttgacagcaatttattagcccgtgaattttctctggggctgaatacacttcagcgatggcctttgctttggctagtattcgcgggaagacctgactttcatttaacgtcaaggtgaacctattcatccacatggtcgctttctgatgcaatgcctcaatcacc

SEQ ID NO: 12794 - DNA, 402 bp, Glycine max
agcttgaaggaggaaggctttgacatgaatggattgtttgatgggggtgggttggacttcttttctggaaaattttagcatctggcactatggcccctatgctcttttccggggaacggctaggcaacatggattattgttgggacttaggtggtgatctctccaaccaccattgcttctatgtttgagtgtgctctaaatggtctgaccatgagaaaagattgggagaagtcctatgaagaaaaatattgatccttatcaaaaggcgcattctgttgtggcaaatctgctatgatgaaaaatatgacttttctactaaagtacaacacatgctagcacagtatggactttgcatgaaaaagggacgtgcatttgatgcaaacattaaatgctccaattttc

SEQ ID NO: 12795 - DNA, 446 bp, Glycine max
  unsure (1)..(446): unsure at all n locations
ntataagtgcgggtctgggagacgaaagtcaagtggtcgctatatgtgaagatgatgttccaagaactctggatttggtccgaccatgccctcctgatttccagctgggaaattggcgagtggaggaacgccccggcatttacgcaacgagcataatgtaaacctttacggttttaaaagctctatagttgggcctaggctttagagttttcattttgttaaggctttgtgtcttttgaatttataatacaaggatctttcttcatctgttcctagtctctacccattctcattcatttgcatgtttacttcttttttctaaaacggcagattcgatgacgagtcccccgaaggtactaatacctgtgacccgtctattaacttcgagcaggaaatgaaccacacggaagatgaaggagatgaggatgtgggactttcttcggagc

SEQ ID NO: 12796 - DNA, 537 bp, Glycine max
agcttcttatccaagactcatcttggtggtgtatctccttcttccatggcttattccctagtggatggcgcctcctctcacctcttctcctttgtcttccgctgcatctccatggaggaaaatcaccattaaaggaactcattgaagctcaaagatccagcctccatagaagccccacaagcaagtttccatcaagtggtaatcatagcacacgagcttcaagtaggtgctccttaaacctccattaattttttttctttaccttctcttccattgatgtttcttcattttgctccatgtatctacacacatgtcttgttctaaattttgttaacatgattctttacagtttcacctattaaacttgctatagaaactagatttgattatctatgggtcaaatttcttgttcttgctcttgaaccatgaaattgtgttgagtataagttcctttgagatttggctagttatttgttgtgggtgaaaccttaaccctaaaaattttacaaatattttaaagtagaagaaaaccttaaa

SEQ ID NO: 12797 - DNA, 506 bp, Glycine max
tgcaaacaatctttgtttagttggcgcccacttaaagtggaattctacttagaatatacttcaagtgcattaacaattaaataatgctcaagataggcgatccttacttaaatcttaccctttccttgatgtcaaccagaggcggaaagtacaaccttattaaattcctctcgtggatgcgaccacaactcctaaataacgtctataaaccaccttcaataaaacaattcgaaactgtttgatttggctaaatttcatggaccaccccatacatcaactatattttagtattgtcacttttaaaggactatatatgaattattgaccataattgatatattaccatttgggtaacattaactcgctcttacttactctgcctttctacatgcaattaccacttcattgcgacgcatcatctgtgtttgctttataaacctgtgcacctaaccattgtttgatggagcaagcttaagcttctaacttctaaccacacgatgcattga

SEQ ID NO: 12798 - DNA, 368 bp, Glycine max
agcttatgcacatacttctctatgaactttcacttgcgcaagacattcttataactaagaaaaatgcacccatatacaatcaaggcacctacattatttacatgttcttccaaggtgtatttgttacctacaccacacacactttctttgctaaattcacatacatgcatactttaagcactttggctatcaaaaattgcatacccgcacattttggtatttctaatacccatacatacacaaactttatgatgaatcttgactatctacacaataaggtgctacaattcatgcctttttcaagtgtttttactacctaaaagcccatgtcaattcaagaatattttcttttgctcaccaaaaaaagt

SEQ ID NO: 12799 - DNA, 447 bp, Glycine max
ttgatgcaacatttggagaggttaatgaaacaacatcattatgcgctccatgagaggttgggtcgaatggagaatttagatcataatgaagaacaatggaggataagagggaatgatggcgttcctagacaaaaccgaattgatggtattaaactcaacattccttcatttaaaggaaagaatgatccggaggcctacttggagtgggagatgaaaatagagcatgttttctcatgccacaactattatgaggaccacaatgtgaagcttgccgcccccgagttttccgactatgctcttgtgtggtggaacaagctacataaggagagagcaagaaatgaatagcccatggttgatacatggaccgagatgaaaaagatcatgaggaagcggtatgtgcccgcttgttactcaaaggacatgagatttcaacctccaaaaactaac

SEQ ID NO: 12800 - DNA, 976 bp, Glycine max
  unsure (1)..(976): unsure at all n locations
accgccgaacacacaggacatcatgccatcctctcgcatacctcaangcaacgtatgagaatatcaaagccncccccctcagagactcncttgtgactcgatgcatctccggagaccttaaaaacagctgcgagccgcaaccagaattaaggagggcacccatcttctctaagcacggagaataaaagcagccacaatcttgtagccagggagcgcaacaacaccctaattataaaaatcagccgcctaaattactgctgcggagacgttcaaataagaccaccgctaaaaactacacaactcccgttagaattgtaaacaccgccccaacgaaaactacaatcattacacaataatgacttatgaaacaattgcgcagtgaatctcaaaactaaactgactcacaacatattgggggtatatggccagactaacattcaacctaagactcgcaccgctattaaacaaaacccgacggcgcagtatgataggacggcgaaacaaatcgcaatatataccgcagccataacacgaattgggtagcgcttaaacagaattgcgttggtaggaattcacacaaacacactccttcgtcgatgtctccaacggttggaccaactgccctacctcaaaatacgactattccgagataacatgaggtacaacgacgacggcggtgctttgttccatcaaaactccatcctataacccgaaaaaagcggaacaccatagaatggacagcattcacttcatgcaacgcctataaaaaagttccaccaatcctcaaccttaccctacgattacattgcacaatacaccccttctgaccttttcggggagaataaaaaccacccgcaagtaaacggctgcattttgaaatttccgagccgaggaccacaatggaagcgatggccccccccataacggaggcaattcaagattagaaaacagtgagggaaatatcaccaaaggcgag

SEQ ID NO: 12801 - DNA, 942 bp, Glycine max
  unsure (1)..(942): unsure at all n locations
ccacactatccgtacactggtgcgcntaatctctgctaggacntatattgntctcgtggagtaactacgtcgngcacaatgacatcctnctccncnncctagatgagtttgttgatcgcgctcctatgtacgncacactatanaanactcaagcttcgggttctcactctccaagagctatatacgaacatatatttgttgcgaagatagcgcctaactggcgaagaacaactaatagaaataacagacaagtgaaatgagataaatgggagaccctcgctgacaagcaacatgctttggtgaatatatcattcgaagcctctatggcaaacatatagtaatacgatggtcagtaccacacctcgtgaacgatgggaatttattttcaaacatcaccaaaaacagggggttctatacgatgcatacgctaccacataacaagcaatttttcttgcacaagctcggaattgatgcgaaaaacacaatcttgacagcgtaagtgggtatgacgggaaaaaatgaaaaggcaactggactaaagcaattgtaggcaaagaaagaatcctacaattttcccaacgaggagtggaaccatgtgtaatccataagcctaacgtgcaatacccaaaaagcatataaggatgggtgtggtataacccaactaataaaagaaacttctttgcgtggagaaatggaaataataaacatggaattttggaatcataaatttaccccacacatgccgtaacgggattttaacatgctgcaacagaataacaacaatagtttctccaaccagaatagaagtttccggcgcccattgttcctccaaaacgcgttattcacatgaaaatgggtacttccccaacacaccaaaatatgtggcaaagcggaaatacatttcagctagatatactttcttttacccacagtatactcagg

SEQ ID NO: 12802 - DNA, 374 bp, Glycine max
agcttctagccaaatggacttaccttgtattaattcctttgatagcccttttgagccttgtttccctttccttgttttgaagctcactacaagccttaagtgaaaaaccatgatattaccatatccttaaagaattttggagctttggaattgttttgggaataagtgtggggggtttttgtttcattggacaacttgttttgttggctatgcttcatgatgtattatgggccatacttgatgtacattgtatattggttaaatgttggacatgctgaatgaaatgttgtttctcaaaggctatatagttaaaaaaaaaaattcgaaaaaaagaaaaagaaaagccataaagttgagtgaataagatctttaat

SEQ ID NO: 12803 - DNA, 476 bp, Glycine max
atactcagcttctcaggaagctgcctaatctatgaatagaatcatgtgtaacacttgatgaaactttgatgaatgaaagtcttatgagacacacttcaaagttccacttctctccctcttttattccttgaatatcgtgctcccccttctctctttctttttctctattaaagcatcatcttcaagcttcttatccaaagcacatcgttggtggtgaagctccttcttccatagcttattttctagtggatggtgcctcctctcacctcttctcctttgtcttccgctgcatctccatggtggaaaaataccattaaaggacctcattgaagctcaaagatctagcctccatagaagcttcacaagcaagcattcatcacgcactaacaaatactggctctttcctatcactttatcttatatgctatttacggcattggttgctatgttcaaatttgtttcaagctcggatacat

SEQ ID NO: 12804 - DNA, 388 bp, Glycine max
agctttttcgattcattctatgtacccgttgtggtccgcattgggtttcgtgcatttttattctcgatatgtttactttttataccccctgtcgacatgcttaagccattttacttaagtcatttctcgcttaacttaaaaataaaataaatttccaccgaacgctttgattgtattattcattaacttcggttaaataaattcccaccgttcggtcgtgccgtaaccaccttggaaaacaaaaagaggtaaaaaaaaatataataataaaaaaaacatcttttagttaaaataagcgggaaatcattcggacgttttcttcttgggatttctcattcttaatcgaattgattaataactaacgtgaaacttatggcttaaatcaatt

SEQ ID NO: 12805 - DNA, 319 bp, Glycine max
tccatcaagtggtattagagcactagagcttgaagtttgtgcttcttaaacctccattaattatcagctttaccttttcctccattattgtttcttcaatggttctccatgtatctcctcacatgtcttgttcgaaatgtttttaacatgattttttaaaatcttcattgattaaacttgctatagaatctagatatgattctctatggttcaaatttattgttcttgtgcttgaaccatgaattaagttgagtttaggttcctttgagttttgtttttgccattttttgtggctgaaaacctaaccataaaatttcta

SEQ ID NO: 12806 - DNA, 495 bp, Glycine max
agcttaaaatccccccaagggctgagatgttctcctggagattgtttagggatagactccctaccagggttaatttgctcaagagaaatgtggttctacaggatactatgtgtcctctttgtggaaatcaccaggaggaggctggccatctcttttttcattgcacaatgactatagggctgtggtgggaattcatgagttggacccacattacaggagctttctcagatgacccagctagacagtttattcaattctgtgatggctttggggcacacaggaatcacagtagatggtgtgtatggtggattgctctaactagtactatttggcagcacaagaattccctcctgtttaaaggcgccccatttgaacctcccaaagtgatggatgatgctttatttcatgcttgggcttggcttaaagctacagagaaaagtttcatattccatttaaccattggtctaccaatcttccggagtccctttggttaac

SEQ ID NO: 12807 - DNA, 603 bp, Glycine max
ctcaagcttgttgatctcttcaggatgatcaacacaatattgcatttgctgcttcaattttgggctgcagatttcataagcaatgcatttagtatgtttacttggtaggtttaaattttcaataaaagtaattaatttttttagaatataattttttatgcaaggtcaatgtgagttcttgttacacaaatgtaattcattttattaccatattacccaattcattaatatgatgcagtgaatttgcattaaaaaaatatacttgtaattatatataatatagaagttttagcatttagcagctcactctttaacacatttttatataagaaattttattatacgttaaaatttattaacaaatataatagaaaaaagactcacttaaattatgatcttttattaattttaaacaatcttacctaatgcattcaaaagattgatttagaaaggatctttgttaatatttttataattatgaaggaagttattaaactattatgattgaactgaatataataattaaatgacagtcatttaaaactaaaagtttatacgttactatttatacaatatatatgttagtgaagataaatgggatac

SEQ ID NO: 12808 - DNA, 685 bp, Glycine max
tcaattcaaaagccttttgtgcttggtcattccacccaaacgcacccttcttgaaacattcggtcataggacttgctatagtgctaaaattctggataaagcgtcgataaaatgatgcaagaccaaggaaagatctcacctccgaaactgttgtagggctcggccaagtcttgatagcatccacttttgtttgatcaacggatactccatctttagacaccacatatccaagaaacaccacacttttaaccaagaaatcacacttttccctcttcccataaagtttttgtgctcttacggtctcaaatatttgcttcaaatgagtgaaatgctcctctatagatgtgctatacaccagtatgtcatcaagataaacaacaaccaacttacccaaaaaaggcttgagtacttccttcatgaccctcataaaggtgctacgtgcatttgtgagcccaaatggcataactagccattcatatagaccatgcttaatcttgaatgccggtttccattcattaccttcacgctttctgatttgggatatcccccctttaaacaatttgagaaaaaaccgatcctgtacctattaagcatatattttattctggatggaaaaagaatttgagggtttttgtcactgcccacttcataaaatttcaataacatcttttagacagaatgtgaa

SEQ ID NO: 12809 - DNA, 478 bp, Glycine max
ttttttgttcgatgttgcctataaaagatacaatgctgttcggctaggctaggtttcttcgtgcgaactgaaccgaagttgtgtttcggccgactggcatgttctcattttgtcggccaggaaaacattaacccacctcggcataaaaaacatgattcaccgatatttgacatgaaaagaaaaatgctagccgacgtcggccatgaaagatgaccgaccgacgtctgaaaaagaagcatgaccggatgactccggtcgaacatcttctaacagatatcatccaactattattcggggattgaatagaaaaaacaatagccgacatctgtagttaaatagccgtgactgatatttttcggccgacattgcgcaattttttttacaaacgctggccgttaatattttctttacggtaaaggatggtttgctgttttgggtgtcgcctataacattttcaatgtaggtcggctaggttttt

SEQ ID NO: 12810 - DNA, 423 bp, Glycine max
agcttagagctctagaaagattatttatggaaatccgacaaactactttacaaagattcagtttcactaatcctttaaagaattctatatattaagggaattattttttaaaaatctcaacctaatccaaaataatcattatttaattttaaattattgctttaacagtgccactaattatttatggtatttgatctaaatatttaactaatttatagggattttaatttcgactctattaataatgaaaaacattgttcgatcgggaactcatggagtacttacaccagttcatgagctaatgattatgataagtttagagaactatacaacaaatccactaaggtaaattttcattatcatcatttatagagagagagacaattttgacctataattttctatcccccacaattgctaata

SEQ ID NO: 12811 - DNA, 489 bp, Glycine max
taagtatgatctattccactaattacaggtatattttctttatattgccacctctggggtactttaatacgagttgaaaattaaatcaataccaatcttgcgtaaaccttacgaaaaataattaaaagagtgacatttttttaataacatctaatattttagtttaaataaaaacggaggcaaaataaataacgacttcaatttatttataaaaataatataaaaaatcattgccaaattctaatatgacattagagcaactgttttgtttgttgttggtttggactgaacacaccgcaaggaaggaagaaagaaaagagtggattaatatggagcttaacatgtgaaagaagagagaaagaaatctgattctatgtaactatgttactcagtgaatgagtacatgcgatgtgaaagttatttattattgtttcacttatggagagaggacgatattcactacacaatttattacattcaactcaattg

SEQ ID NO: 12812 - DNA, 488 bp, Glycine max
agctttatacttaataattaagaaaacatttataaattaattacatgcgaggaaatatactaggtttctatctactccatggacgttgttcattaattaacactatgtataaaagcccactaccaatctcaatctatgttaatttccttataataatcaaatgtacgtgtaatttaaaaataattaattaaatgtataataacatgcacttcttttatcaatagggtatgttttgtctattgtcttccccacccactgaatgccaaaatgccactatatttacatgtcaagttggatgatgcatgtccattcattcatttcgcactatccaagaagatgttgataagccatatcaatatgtaagggtcattgaagaggtacctcatgaggttttggcagaacatgcaattacaaatttctttcaattcatgtgcaaattttatagcttaaacaagacaaaaacggtacttgtttttttttttccaatc

SEQ ID NO: 12813 - DNA, 497 bp, Glycine max
ttgtgtaattgatttcatttttatcattgtatgcattgcttgtgcacatggagactctcttgcattacttattattaatagtaagttatcttatatttttcaatgcattcttaatgtgaattccaataaaataattttattttgatttttttaactaatgctctcaagacatagacccttaaaataataagtgcaattcaataattcttacttttgtaaaaggggcatttttgtatgcaagttatgttaagtttctttattggaggtgaggttgttgaattctaatcatttgacttattgatgttccacacacatacataagccttttattgattgtgtatcaacttgttagaaatggggtcacttttttttcattcaactgaatttattaagacaaatctataccctaatatggtaggtcatctattaaaaatatacttatttcaatatcttatgtgactattgtacattttgaaaatattgataaaatattttgt

SEQ ID NO: 12814 - DNA, 480 bp, Glycine max
agcttctgagtcagatttagaaacacatattggcaagacactgaatctatcatgtgaaacctactatgagctaatttatttcaagtttttcctatgaagtaacaaattaatattaaaaaaatttagtgcttgatcaagtttttttaagaaaataagaatgtactgaaaaaaatgatttctgattattttgagaaactactttgagtaatagtttctatttttgttgttttctatctaaaattcaaatttagtgaatttagggttttatatgaggatactatcctagcctctctactaaagactgaccattttcattaatttaattagagtcgtttcttaaaatttgaccttcatttaattcatcacaacatttattatgatctgtatacaggacgggaagattcgggggcaattagtcctacaaataagatttgacaagtttataacttttttaagaactatattacatgggaggaaaaa

SEQ ID NO: 12815 - DNA, 421 bp, Glycine max
tccttgggaccttgaacaagcaactaactcctgttttagaaccatgctatgtgctcgcgactggtccctctcttcccttcacagcttgagttcactattgctaccccatagagctacgcgaaatttattacggccatactcttccttgcgagccctcttggtctcgtgttcaacggctcttacgggaatggcattctctttccgtaacccggcacactccttccgaatgtgtgttgcggacgacttgaactgctacttggcgaatatagcctttcctaactcgcttatgagagcttggacttcttagtcctcttccggtgcttcaaaactctattcgctgatgacttttaacttggcgagccgatctaaacctcgcatttgaactttcagccattcatgggagccaccaatgatgccatta

SEQ ID NO: 12816 - DNA, 221 bp, Glycine max
agcttcaatggaggaagagaatgagagagcggggggggggggggcgttttaattgaacgagatattggatagaactcctactttgatagggattttactagtttctcattcatctaagttacgactagcgttacacatgtttctatttgtagcctatcccatggtaacctctctttatattccttgaaagtgtcttcctagtgaagctatatgaaaaatat

SEQ ID NO: 12817 - DNA, 515 bp, Glycine max
  unsure (1)..(515): unsure at all n locations
tattgctcaggaagaaagttcagaaagtattgctagctcaactttgtcctacttaaaataaactgaatgcaattcgtcaacaaattacagacattcgatcatctaaagagtcgaatgagaaacaaaaagaaatgttctattcggtagctacttccaatgcaataattttaaatgaacatctggaaaagaagctagaagagattatttaaaacaagctcaagtgcaatcaacaaattaatgcattatctacttggatcgaggctcataacgaacacaaaatgccgtcagcaacccaattcatcttcaaattagcttcagtcttgacatagttgttatagagcaaaaaactcccgtaacaatgtgatacaactgctatgctcatggactgccttcgagggccaggacctctagataatgagaagagaggcaagatagcagagacgcaaagattgannaggatagtattggtcttatagatttgctggttatttacatatgtatatataatgcctact

SEQ ID NO: 12818 - DNA, 543 bp, Glycine max
agcttctagccaaatggacttaccttgactttattcctttgatagcccttttgagccttgtttccctttcctcgttttgaagctcactacaagccttaagtgaaaaaccatgatatcaccatatccttaaggaattttggagctttggaattgttttatgaataagtgtggggggtttttgtttcattggataacatgttttgttggccatgcttcatgatatattttgagccatacctgatgtacattgcatattggttaaatgttggacatgctgaatgagatgttgcttctcaaaggctgctgagtaattaccaaaaaaaattcggaaaagaaaaagaaaagcactatagttgagtgaataagatctttaaaatgacacaagaatgatgagactcttggttctctctttacgtttaaatatatcttacctgctttgatttcttatttttcttaaaaggcttatccccatgctccttatttctttggaataaccccttattcctatttttttggccttggccttggcccctacaaccttaa

SEQ ID NO: 12819 - DNA, 357 bp, Glycine max
taagcttgtagaactaccacaaggaaagaaagtaatgggtgtttataaactatatggatgaggcaggtaaggttgtcataaacaatacaagattggttgccaagggttactcacaacaaaaaggtgtagactatacaaaaacctttgctcttgttgcttgtctagaggcaatatacattttactcttatttgcatgtcatacaaaaatgagactatatcaaatggacgtaaaaaatgcattcctcaatggagtaatataagaagaagtctatgtagaacaacccactgggtttgaaagtaacacttttccacacatgtgtttcaactctataaaacattgtgtggacttaacaaagc

SEQ ID NO: 12820 - DNA, 308 bp, Glycine max
cttgaactatctctgattctggatatttatcattaccacgaacttctctgttccatgaaaactcgtaaatactgaggtaactaggaaatacaatagaggtaagatccttgcattacaataccttgctgaagtaccgttggaacaaacactctttcaacaagccacacacaccatagaagtatatcatatttgacatcacctaaaattagaagcagttttattttagtaaagctatcatactagataactcatgaatgcatattgtctgcaggcatttgaaaggaacctttgttattaaaccattcttt

SEQ ID NO: 12821 - DNA, 610 bp, Glycine max
gtatgaaattcttgattaggaaaaaagccattcttgaatttattcaataaaggaagggacctctcattgtcctatttcttgagactattacatcaatcccccataagagctatgcatttcatattgtgcaccttcattacataagcacaacatccaatgccctattagaaggaggatgaatagtttaagacagagattatgaagccaaatatgaccatggcaaacagggtgtcaaatttaaaagttaaaacaatctaaaggctagcctaatgtcagacaaaattccatgtgataaaaaacacaaagcaatattagcaataaattctttgacacactgttttcaacattctttcctcataccatagttatcaatcccgtatagtggctgaatccaaaaatgctataacacacagcatgggatgaccactattttgaaaactttttatatagtttatatgagtcattctaaatccacatgaatgttcagttatttttaagaaaaatacatactaaaaaattttgacatgttcataataataaaaaaaatattaggtctaacttttaagttaacataaaggaaaatgtaatagcggatccatggcttaccaaa

SEQ ID NO: 12822 - DNA, 541 bp, Glycine max
agcttgtaggattatggggtacccatcacatgtggtactaggtggcggtcgggcgatggtgcacaacaagttttccacatccacaatgcgcgcataaacccaccatcccctgttgcccacctccatctgagctcacgtactcccacgtagcccatatcctcgtttctctcaacaccgggtccccatcaatcctctcaagcttccacaacatccaagcaaaacaacattcaaacagcacaagctatcacagccaaacaaaacagggcaaaggcagaaaactctgccaaaacaccaaccaaatcacagcttttctcacttaaagaccccagtaacaattctttcgatccaattcgttaaccgttggatcgactccaaaattctactggaggtctatagtacattatcctacattgtgaccgttgggatctactagcaaacatccagaacgcttttacattacttctttcacaaccagcaaatacatggatttttctgcacttgtgcaaaattctgctgacaaattttcagcaaaatctgccaa

SEQ ID NO: 12823 - DNA, 512 bp, Glycine max
tgtagaattcaccccaattccagtgtcctatgctgacttgctcccatatctacttgataattcaatggtagccataaccctagccaaggttcatcaacctccatttctccgagaatacgactcgaacgcaacgtgtgcttgtcacggagaagccccggggcgttccattgagcatggtagggctctgaagcgtaaggtgcaaggtctaattgatgcgggctggctgaaatttgaggagaattgcgtgtaaatcctgacattgacaagagatgccacacatggggcaattttgaaagctgttgttaggtgtccctaatgactcatcagggtttccaagtttatgccattattgtaaaccacagcttcaatgtttaatgaaatggataaagttgatatctttgtccctcatcctctcacaaacgcatgtttgcttattcaactttcatcggaatgtgggtgcaagccatttggtctgtttgctcaagcgacctgcgctcctgagtgttgacttc

SEQ ID NO: 12824 - DNA, 487 bp, Glycine max
  unsure (1)..(487): unsure at all n locations
agctttacattatattaaaatcaatgactttgatgtaatacttttgatattattctgatataattttatctctcctctttgtaatgagataatttttcaataacagttttttttctccacttttacttagttgattttattcctgaattaataaaaaaaattaccaactaatatccttcccttcaactgttcatgtataattgcaatctgtgtattatttttaaaatttactcttcaacggatggaaggaactacacaaagccgctaagtcaccaagaataactacatccagtttttatccagatttttacataatagctacacgttatttttctgtaagtgtacattatttttctctattatttttttctatctaactcccacgcaaggaagtgcatatccaactgaatcatgtcctaattgcatnccgtgtccctttatattgtctctgttcttttttttttctcctactaacacatatttaact

SEQ ID NO: 12825 - DNA, 559 bp, Glycine max
tgatggtgagctaagcctcacatctcaggctaagcgcatattgcagaaaaaaatttgtgttgcagaaagtgctaagcacagcctgtcgcgcaaagccccagatgcttatgggactttacaacttagagttaggcttatcgcaaggctaggctaagcgcttgggttttaaactcaaatgtcacgttggcacgctaagcgtgccatacgaatatcagtttttaaaaaatcaaaggcagaggcactttgggtgttatcttttgttcagattccggaaacttgttcagattccggcaagtgcaccagatcgcacaagtagtataaaacggtaagaacccagtattgaagtctcgaggaacttgtgttatttggtaagctatttcaacaaataagtgtctggtgtgtaaagataagtgtgaatatgaacaggtgtataaactatctgtgcaaaaagaaagaaaatcacacgagataaataatgtggtaaaacaagtagaaacacgttgggctccttaataagtgcctgatgctgaaaagacattctctatctaacaatgctcat

SEQ ID NO: 12826 - DNA, 339 bp, Glycine max
ataatgaagactgattttatttacatgaacttagttgttgtatcttatgtacatttaacataaccacttagtacgtagaataatagtgtggagtttatctaatagtattgagttgtgaactaaatatagctgtattgaacattccaaagaaaaaatatgacgttcaaacaagattttttatttaaaactggcggtctcgaacagaaaatatacattcatacatacaatgaacatgtaagatagtattcttaaacatattgttgtatttgatagagtaatgagctattatttcaaatttatcactccgctatcttttatttgttaactacttgacaacgc

SEQ ID NO: 12827 - DNA, 902 bp, Glycine max
  unsure (1)..(902): unsure at all n locations
cccgactccggtcatcgcttctcatcctntgctagtgccacactttgtgcttcccaagattatacattttatnatnnnnnnncnnaaggagagttgtgtcgctgtcctatctcgcgacacgatanaatactaaagcttcattaagtgcgggggaactacattgtgacaaccatgtctgagttgtacaggagctgcatacatagtactagggggagtaaatctcataactatcatcctcaaaaaaacaatcataagccatttatggccgccaaagcagagattgacattgccatataagagggctttttaggcggagaagttcccctcagtgtaagacataaccaccccgggggagagagatttaagcgttttagacatatgccgcagtcacattaaggatctgcgtgaaaaagaaccggcctatatgatcaaaaacaacagaaaatggactggtttgcaccacacttgcaggttcctagggatgtgacagattttttttttgcaaaagaaattaccttaccgccagcacgtgtctaaaggggataaaaccggaaccagccaaacattcgccaatctcacccatgagcttggtttttatcacaaaaaggttattacagcccataaatggcaaatcgacagtgtccccaatatagcaggattttccatttcacccctttacttcctttttggaagcttccttggagagttaaaagttggaaggggcccaatactggaagatagcttttgttttttttttaaaaaaaatatttagggtacaaggaagaataaaaaccttcgaaagctcttgaattccaaccaataacaaaagtggaggtgcgtatattagtaaagggaggtgttcttacgaacgaaaatatcttttcttgcactccaacatatcg

SEQ ID NO: 12828 - DNA, 454 bp, Glycine max
  unsure (1)..(454): unsure at all n locations
agctttggaaaatgatttctatacaaaagttagttgtataaagtgactaacggggacccactctgcatgtctgtcaattgaccatgcgatatccacgtcgtgtaattcttcttaatcccatcacacaatagatggtcccatatgtcgtccagtatttgtcgccttccgttcaaacaattgatacgaggacactaatattttccatcttcatccagtcgacttctttttgaagtaaattgcaagaactgctcgacgccttcctcatattctgggttgatgtgactttcattcatcaaacttcgatccatctcagtaataactctgtgatactcaaaggtattcgatgcttgaaaatctcacttttttattataagtggggccctatcccattcaggaaagaccgtcttttatggtagcttcatacgtcaaggttatntttttttttaaaatttga

SEQ ID NO: 12829 - DNA, 400 bp, Glycine max
ttacatcagatgttagtaatgagccactaacctagaattaaaagaacttaatgtcattaacctacggaattaaaagaacttaatgactgagtgtaactgaaattgtggcaatcaaaagtcacccccaacagccataaagtcagccaccatttggtctcccaaaagactaatgtctaggttgtcaattggacccttattacaacttgaactaaaccaaactaaagcccttttagttgattaacccaaaacatatttttggtcagccaactttacaaggattgagccattatttaaacaaactaaacactctaaaattgaaacaaagtactgtcatttagtcctcctctatttgggtcatgatacaactcacaaccttggacttttctacttgaaacttgag

SEQ ID NO: 12830 - DNA, 396 bp, Glycine max
agcttcggaagaaagtgatgaggtacaagccctaaaggcagagcttgaaagagcccgagtagtcgaagagaagttcaagtccatagccatcaaagtctgaaaagagtatgatgaactaagggacgtcaatatggccaccgctgaagccttgaaacgagaaaccaagaaggcccgaaaggaagaacacgaccaaagcaaagttttgaggggctttatagggcagcaatagtgagctcaagctctgaagaggtgaaaggaatcatcacaggtcaaaggcatgatcttgaaggacgagctaaaggtttgccttatgtcgaaaagaaatttgtcccaacagttaagcgagactgaaaggaatatgtgggccatcatctattagtgcaaagagaaactaaa

SEQ ID NO: 12831 - DNA, 323 bp, Glycine max
tccacttattagtgcacagctccttcaagaatttaggagctgcatgtcaacgtgctcacatgcctctggttgacaaagggtgcagatgacgacgttagtatctacatcctataggactccgagtctgacggatagcaaatgagtgtgtacggataaccacatgggtatctccgcctgccacatgacttcacagctcaggattaacagagtcgcaacatgcccttttgcgggcgagcgaggcgaggctcacgggtgcgctttccaagggaggaaagatgcgcggagtcgccaccaacgtttatttgtggaaaacttcagaaaaa

SEQ ID NO: 12832 - DNA, 374 bp, Glycine max
agcttttacgaaaaggttcatcaagtcaagttgaagtatggaagtaaccatcttgcaaaaaattggggcaaaagatggatcgagttacatggctgcttcgtctactaccaaacacatttaggattgttgatgtccttgttacttccaagttcaccttgacaaagatgtcatggaccatgttgaaaatctaaattgattcaatcccatgtcctgcgtaaaaattcacaatacttcaactgtgtgtcattcacatacatccatgattttcattggttgcattgctcattgcattctttccttgaaaaaaaatgaacttaatcatttttatcaaaaaggaaagaacacactttacggcgcccttaccgaacccgtgc

SEQ ID NO: 12833 - DNA, 521 bp, Glycine max
tatctgggcttgggtcaggatgctatcataatgcggctgggcaatgggtctataatagggtccgaggtgaggccaccctcatcatcatctacaatcaacaaaaatactttataagcgcatttgtggccacgacgatatttttcatcacaattaaagcaaaggccacgttcgcgacacacggtatcttctcagaggataatcttttaacatgcactggggttgatggttttaaagggttgagcaacgatgaccatggaaaggaaagggtggacgaataaggagctgaggcatgtggaaaaaaaatgggagcatgaatggcgttgggacaaccacggaagggccgactagtgtcaacaaacttctctttctagagacaagctaaccccgccgcttgcaccaatgttaacggttgcaaagcctgtacctcccaacgaatatccagtgacagtccgaaaatgaagcagctcacacgaaatggtggcgacaacccaatgataccattcgtgagatcttcaaactcc

SEQ ID NO: 12834 - DNA, 441 bp, Glycine max
agcttgtagccattagaagagaatgagcatgtgattagaactttgactgaaaatgttagtccgtttgtcatattgattgtgaaggaatgtatcgatcgtatcccggtgaaagtgtgatccttatattttgagagaaacgactatcatttagtactgacttttgcatgaatctctgaagtatggattgaatgcatgaaattgaggatgatgaaggccatgtttgattgtgatagccacttatccaaaaagctgaccatgtgcttgaatgatctatcccttgcacccatgttgagctgaatgaattattgattgattgaaccctgagcctatacagtgttatctcctgctaccttgtctaggttgtaggagaacatcatcttcaggaagcttggttgaaagccaacttggctcatatttgggggaggcattatcaagggaaat

SEQ ID NO: 12835 - DNA, 421 bp, Glycine max
actaagctttaaaactgctcggtttaaagtatagcgccgctcttatttaaggggagtatgcagctattccatcaactgaatatccttctagtgtaataactaatgttacaaaaaccaacaatcataacttcgaatcttttccaatggaggtgtcaatattcaataacttatcatgtctcaagaaaatattattttcttgaataaaaaagaattaattatcaatttatttttcaaatctattttaaaatattcaatttgatctccaaatttttaaaaaatttaatttgattatcaaaagatttttaaaaatatatcaatttaatcatttctgtctaattttactgatagcgttaaaattacaaatttaaaataaactattttgaataatagctttgttaactgttagtctatttattatatt

SEQ ID NO: 12836 - DNA, 531 bp, Glycine max
gcttgcccaggtgagttgttgcttcaacatgaagtaaccttgctcacccaagcgagctagttacttcactcctaagttttatggtgggcctaagggtctgaaaaaggtccaaaatgaccctttaaccctcccttttgggtattttccacattctcttctgaaacatcgaaagaccttacagattgcacgacaactgtattaagcatctcaatttgacttgcaagaatcaaaactttagcaaatgatcatccccagacgaaattatggtttgacaggtagttgaaaggaaaaatagaactctgtaagaaatggctaagatcatgctttgtgagaactcacatcctaagtatttatgggcagaagcagtgaacttaaattgcttaccttaaaataaaaaaattgatcaagtcctttgataaaaaaaaagactttttatgaattatagagagaaagaagaccccatatttcattactttggccatttggaagtgggttttatcctcacacccaagaacaatttactaagtttga

SEQ ID NO: 12837 - DNA, 533 bp, Glycine max
tgagaggattgatggggacccggtgttgagagaaacgaggatatgggctacgtgggagtacgtgagctcagttggaggtgggcaacaggggatggtgggtttatgcgcgcattgtggatgtggaaagcttgttgtgcaccatcgcccgaccgccacctagtaccacatgtgatgggtaccccataatcctacaagcttgagatgaggaagtgttgaagggtgaaacttcctgcttttattgttgaccacagagtggtacctggagatatgtcgcgggggtcaggagaccttggggacgtcatgtggggtgctattgcccaaaaccaagcttgaccaatcccgacccaacccgggcatagtcggtctgtgagaacctgtgatgtacctatacaggcgagctcctggcagtcaacaaataaaaggaacaaagaccacaaagcaaggatgcttgtgggtggctggccaactgcgaattttgtgtaatatgtggattgggggccctggtaatctattaccaagggtggggaatcgat

SEQ ID NO: 12838 - DNA, 424 bp, Glycine max
agcttgtgcttgttttatttaaattcctatgatcatgagcaactaggtgtgtcctactatgacttgagaaacaaagggtgatcaaataacaagcagaaatttaaagggtactaagttgcctcctaatagcgcttctttaacgtcttgagctggacgcgtgatgacttgttgatcacagacctagtacttttgcatacctttggctttggacttggtcacctactggtcggcgatgggtcgtaagcaacgctccatcctttgtaaatgagctgaagggctcttgaggtggcggcggtgcatctattacctactgccggacatttctatgttgctgtggtgtattgccctgtgcctgcctggggggcacaatactttcttgattaaagcccggcttatagggtgcttgatgaccttgctgggggcg

SEQ ID NO: 12839 - DNA, 291 bp, Glycine max
tgttacagaacttaggaaaaatcaagaacgagcttgttctgacatcgttcgcgtgtctgatattcactccacaagggttgacgtatacgagaccttctatcctataacacaaagttgcggacaatagtgggaagctaaattgaatggccattattgtcaatgcggaaggtattctgtgcttcactattcatgttcacacattattgcagcttgtgggtacctgagcctgaactactaccaatatatacatgttggtttcaccaatgatcaccttttaaaaacatacttcgc

SEQ ID NO: 12840 - DNA, 434 bp, Glycine max
agcttctaaactttgtacaagaatgaagctcttataccacttgttagacaagtggcctcagatatcttaagaagggggggggttgaattaacatagtccaaactgtttcccctaattaaaaaaatctatttcactttttactcaagttatgaattcccttaatgacaatcttcttaaatattaattcaaatgaagcaacttgaatatgaatataaagcaataataaataaaggagattaagggaagagaaaatgcaaactcagttttatactggttcggccacacccttgtgcctacgtccagtccccaaacaacccgcttgagagttccactatcttgtaaattccttttacaagttctaaacacacaaggacaatccttcctttgtgtttagagatcctttaccacaagagactcacagactcttaatccct

SEQ ID NO: 12841 - DNA, 482 bp, Glycine max
tgttggccgcgatagacaaagggtgcagaagacgacgtttgtctccgcatgctatcatgcgctgagtcttagagatagcaaaagaatgtttatacggataaccacttaggtaattccgcctgccccctaacttcacgagttagtctcgacagaggttgtctgcgtggaagacgacgtaaatctccgcgtgtgaacaagcttgttggccgcgattgacaaagggtgcagaagacgacgtttgtctccgcatgctatcatgcgttgagtcttagagatagcaaaagaatgtttatacggataaccacttaggtatttccgcctgccccctaacttcacgagttagtctcgacagaggttgtctgcgcggaagacgacgtaaatctccgcgtgtgaacgagcttgttggccgcgattgacaaagggtgcataagacgacgttagtctctgcatgctatcatgcggtgacttttagagatagcaaa

SEQ ID NO: 12842 - DNA, 409 bp, Glycine max
agcttcacccccattttcctataaatagggggagatgtgaagagaaaaattgttcagccctcctggtaattcgagaatcacttgaaattagtgaaaaaaatttgttccgtgaagaaaatccaagccgaggcgcttccgtaacgtttccgtgggtgatttcgcaaagattttccaccattcttgaacgatcttcgttcattcttcatcggtcttcggtcttcaatcggtattttcccgaaatcgaacttttcaattcattctatgtacccttagtggtcctcatttgtttcacgtgcttttattttaatttcatttactctccgtacccccttttgacgtgtgttagtcatttgcttaagtcatttttttgcctaatcaaaaaataaaataaatttccaccgatcatttg

SEQ ID NO: 12843 - DNA, 233 bp, Glycine max
  unsure (1)..(233): unsure at all n locations
tgtagatgcttnaggctctccagggcaaaccttgggtttgatgagcctttggagaagcaagactcactaagggtggatcttgggtttgacgagcctctggagaagtgagactcaactaagacagaccttgggtttgacgagcctttggagaagtgagattcaccaaagatagactttgggtttcaaaaacctattagtctcaccaaggacaaaccttgggtttgatgaacctt

SEQ ID NO: 12844 - DNA, 466 bp, Glycine max
agctttgcttgcttgtgtactggtataactctagaccaagtcaaaaccaacataactcgatgacttgaactagttgaaccagaggtcattcccactatggaaataaagcacaacaaatgccaaagtgtactagacccacccaagtacttgtctcaaccttccattcaagtttggtttatttatatgtaataatgaaaagaagtcataatgtagatattacaccaagtcaagatcaacataactttgtcacttaacaagaaagttagaccataaaactcctactatagagagaaagcacaccaaatgccaaagtctacttgatctgcccaaatacttgccttgaccttccatttaagtaaggtttatttatatgtaaaagtcataatgtaaagatcatgccaatcttttttttttataggccagatcacatcattcataattgtaacaaatattgcttggatcacta

SEQ ID NO: 12845 - DNA, 440 bp, Glycine max
ttgtccgcaaaaatcactaaaaaccgttttaaggtcctactccttgaatggtactctttgattttatcggataacatggaccgttcaaaagcataaaatcaacatgtaactttattgctttagctagaactacgtaggtctaatttcctcatcgtaattgaggatacgtaggagcaaaagtcctgcttttgttgaccaccccaagagatcgttaatggtccaacgccttaatgtttctctcctttcaaaaacaagagatcgttaatgctccaacgccttaacgtttctcttctttcaaaatcaaaagatcgtttaatggtccaacgctttaaatgacctttgttcggttaaaattgatctttgcagaaaaagatcaaaacaacttatccaacgtttagttctaaaagaactacgtaagtctgatttcctcatcgcaattg

SEQ ID NO: 12846 - DNA, 329 bp, Glycine max
agcttttatatattatatataagatgtttatcatttaaatatatttagcgcttttatttggcttaagttagtaacattaactatgtcaaataataattttttataacaagtcattgtgacctttgtggcatgctatattgtttttaaaataattcaacttcctttttttctaaatgtttagtgcacacacacagttacatatacatcaatttactgtggcacataatttattaattttatagcattatgaaagtctaaaaaagaatacttattttaatttgacaatacaatgagttagcttctcttttaggtgaatactaataaatttt

SEQ ID NO: 12847 - DNA, 894 bp, Glycine max
  unsure (1)..(894): unsure at all n locations
ccccggtggattgttggtcttcttctacgcgcacttttcgtctgtactacgtttaaggtgatcttttttnnnnnncaagtggttgtgtttcctgctctccggcactaataaactcagctggcgtggactctgtggcatagctgaagctaggagactattgactatcgtgcgagtgcatggagatcccatgttggaggaaaatgaccaccctggtgatctgaccatgaagcgtatcctaaactgcgaatggtgtgaaggcttctttctattgcattaagggaaccatacctccttgttagagggccacggagcccggtactattacaatgccggaagcctcataggggcgcctgatggcatacatatgtcgcaattggtgcagactcatataagaattctcatgtggaaattaaaatgggtacaatacatctttagttggttcaaagaacgagaacaaacaggttgatggtaccctcctttgaccactatctctgtatcagaaacaaatcccaacataggggcgatttctcgataaacggagagagtatttgagtcaacacgctccaaaaacttatgggggagaactttactatttggaaggactatgcgcttggttctgaacactggttcggaatagggtccccagccggggctttccaaaatctactataattgtttgcgacgtgtttgcgctgaacaactaggaaggagtaaaagaattgggtttgggacacatgagtcaagcccttaactttttgccgcggtgaataaaatagggaccttttggaggaaccagagggtaaaatcttttaaatgaggcacacagggcgccccaactttttggatcaacttttggtagaatagtgggttttctcctataaaagaggggaggtg

SEQ ID NO: 12848 - DNA, 322 bp, Glycine max
agcttctacattcaatttcgagcttttctatatattacgggactcaatcggacatccgagtaaaaagatattgtggtttgaatatgctcagggcttcggtattccatttcgagcgtctcgatatattacgggactcaatcggacatcagagtaaaaagttattgttgtttgaatatgctcataacttcggtattccatttcgagcatctcgatatattacgggactcaatcagacatcggagtaaaaagttattgcagtttcaatttgctcagggcttcagtatttcatttcgagcgtctcgatgtattacgggactcaatc

SEQ ID NO: 12849 - DNA, 420 bp, Glycine max
ttgagaaaattcaaacgacagtaactttttactcggttgtttgactgagtcccgaaatatatcgagacgctcgaaattgaataccgaaacgctgatcaaattctaacgacaaaaactttttactcggatgtctgagtgagtcccgtaatatatcgaaaagctcgaaagtgaatgtagaagctctgagcgaattcaaacgacaagtaactttttactcggatgtctgaatgagtcccggaatatatcgagacgctcgtaatggaataccgaagcttggagcaaattcaaaccacaataactttttactgggatgtccgattgagtcctcctatatatacgaacgctcgagatggaatgttgaagctctgagcaaattcaaaccgacaatgactttttactcggatggccgaatgagtcccg

SEQ ID NO: 12850 - DNA, 265 bp, Glycine max
agtccacctgcacgcctgccatcttaaataaaaagatggcctcagctcttttcttatttgcagaacggaatgctctcaatatacctccaatctttgagggataaggttaccactactggaaaacccccctgcaatataataatcgagcaatctatctatatatctgggaagccctataaatacggccttatatacccaccacagtagagagagtttcattaatatggtatgtcatccagttgaaagcctaaccatataaaagcct

SEQ ID NO: 12851 - DNA, 497 bp, Glycine max
tcatgaagacacatttgaagatcaagtgagactgagtcatgagtctcaagttgttgaggctgaaaaagctacattaacagctagagaggcaaaagaggcatcactcaagcaacctgaagaagaggcagcactaaagaaagctaaattggatgctaccattgtcaaaaagaatcaagtttttggttgccttaaacatacacgatgaagtgctagtggatggtgagcactttgccaatcaagtgcccaatctgatcgagacaaatgaggcagatggattcaaacttgatgatgtgtgtgaagaagggatttcttatgacaagtccactaaggaagagcttattcaagaactacctcagactgagcagactaaaacatcctcatctgaagatccttccaaagctcttactactcacatggtggtggacaacaattatatgagttcgagggggacaatgcccctgtcaaatatattgaaccacaaagtgttactcaagatg

SEQ ID NO: 12852 - DNA, 527 bp, Glycine max
agcttgtaaaaaatgcaaaactttaatatctattaactcaaatgtccgattgagtcctgtattatatcgagacactcaaaattgaaaacagaggctctgaggaaattcaaacaacaataactttttacttggatgtcagattgaagcaattaataattcgagacgctcgaaattgaatacagaagcgctcatcaaatccaaacaacaataaattttgactcggatgtccaatttactcccataatagttcaagatctcaaaattgaaaacagaagctctcaaaaaattcaaacgataataactttttacttgaaagtccgattgagtcttacagtatatcgagacgcacgaaatttgaaaacagatgctttgtgcaaaattaaacgacaataactttttacttggatgtccgaatgatttccgtattttatcaacacgctcaaaattgaataacagaacctctgagcaaatttagacaacaataacttttgactccaatgtgccatttgagtcctttaataatttta

SEQ ID NO: 12853 - DNA, 332 bp, Glycine max
tctgtattcaattttgagcgtctcgaattattaaatgactcaatcggatatccgagtcaaaagctattgtcgtttgaatttgctcacagcttctgtttgaaattccagtgtctctatttattacgggactctatcgatcatccgaggtaaaagttattgtcttttgaatttgcttaaagttactgttttcaatttcgtgcatctccatatactgcaggactctctctaacttttccttaaaaaggtattgccctttgaattttgtgagagcttgtatattttatttccagcgtcttgaattattaattgacccgatcgcacatctgattcaa

SEQ ID NO: 12854 - DNA, 352 bp, Glycine max
agcttcatgagagagtcaaagatcaaattgagaggaaaaataaaaactatgctaaacaagccaacaaagggagaaagaaggttgtcttcgaacccggagattgggtttgggtgcacatgagaaaagaaaggtttccggaacaaaggaaatcaaagcttcaaccaaggggagatggaccatttcaagtgcttgaaagaatcaatgacaatgcttacaaagttgagctgcccggtgagtataatgttagttccaccttcaatgtctctgatttacctctttttgatgcagatggagaattcgatttgaggacaaatccttctcttgagggagagaatgatgaggacttgaccaa

SEQ ID NO: 12855 - DNA, 444 bp, Glycine max
tgaaattgaataacggatgctccctagaaattcaaatggtcataacttttcactcgaatgccagatttaggaacaaaatatatagagacgctcgaaattgaacaacagatgctctctagaaatttaaatggtaaaaatttttcactcggatgttagattcaggcacataatatatcgagacgtttgaaattgaacactaaagctctggtccaattcaaacggccataacttttaacatgggtgtatgattgaggcccatgatgtatcgagatgatagaaattgaataacggatgctctcatgaaattcaaatggtcacaagttttcactcgtatgttagattcaggaacaaaatatatagagacactcgaaattgaacacggaagctctggtccaaatcatatggcctaaacttttgacatgcttgaccgattgaggcccatga

SEQ ID NO: 12856 - DNA, 864 bp, Glycine max
  unsure (1)..(864): unsure at all n locations
ggactggtganntttgttagcctgagtaagcatcgctaagancccccgcgantctatatagtcggccttgcagcatgcatgctataagatatgagggaacgttttctacttttatgttcataaacccacttctaatatagtaattgaacgtctatttaccttcgatatatgcaccatgccagacagatacataaatttatttgcgacatgaaagattcttcctatataagagtatgacgaggatagttacctcaaaggataaacttagactcttgtttgttgctccagcgtattgaactcaaatgggccaattttatgtctttttttttcatcataaaacacttttctttaaaacgtaagcgcctttttgtatgtagatcttgtgaaaaggaaccagaaaaaacaactctctcttacttcacatctcattttacaaaaacgaaccacttttgtaagtacaagaaaaagaacttcgcacacatttacaattttttttctctatcataaatgcgctgataaaaccgtctggctacgtctagattaatcttaaaatggacagacccaagatgaccctttggaatcttattaaaatgactgggaagtcgggtgctcgagaaaaaaacatttggtggttcttatatggattcggccatattgtatcattggagtcctagagaatactatattacagcccgcacttcaacaaagccttgctcattctggtgcacgctctctaagatttactggttactacctccatatggcgcattgcgttcggacccattgtaattggtggtgcaaaggatgcgattacatattgcaattgggttgtataagagatcttctcctctacatacatctacc

SEQ ID NO: 12857 - DNA, 353 bp, Glycine max
tgtaacattatttgtggagtttaatgacatacatactgtttattaacttgaaataaccactatattttatggctcttgattgcgatgaatgataatataaataagttgagtctttgtttaccaatggtttacaaagttggtgcaccccagcatcattgtagcaaacatgggccttggcaagctgccacatccaattactagtatcatcaacaggaggagtaaccactcgctttgaccgggaattatgtccaacatgaaggaggctaagttctatagccacatgcttgagagtgccacgaggtgtctataaaaagacggagcgtgtggcatatgactatctaccatctaaggca

SEQ ID NO: 12858 - DNA, 503 bp, Glycine max
  unsure (1)..(503): unsure at all n locations
agcttgtggaagaatgtggaaacctctggaatattctggagatgtgtggaaccttctagaatcttatggaagagtatggaaggatatagaagcgagtagaagagtgtagagactcctagaatgtgtggagcattctagagaattaatctccaccctagaatacaagtaatctccaccattcagtgtggaggtagagtagtataaataagggtaggagccttcattcctaaccatccaagataagagtgaatccacttcttagagtgaggaagctagaaagtttgagagtctcttagagagagaagataaatagcttgggaagtctctatcctcgagcttgagtgagccaccgtagaagtagtcaattttgtaaacagtgaagagtgacgctcagtgggagttactaaatcggaaagccgttgctatgatccgtaagtacattgacaaaactctttntgagcattgttctacttactcaaatgtttatgaattatggacaaagc

SEQ ID NO: 12859 - DNA, 544 bp, Glycine max
tcatgcagataagattttattgcatttagccacaaattttattataaatagcaacagttctctgatgcaatatacatgattatttaacttggtctaatgataaattgtattaattatgtctctaaagtatgaaaataaagctcattcagtagccaatccacagctccacacaagttcatgacaaccctttcaaagcttcaacttgatagcagtttgaacatccttatcacctcggccactgaagttaaccacaaccttggctccattaggaagggttggacacactttctctagatatgccaatgcatgagatgattccagagctggaattatgccttcaagtcgtgaaactctcttaaaagctacacatacaaaaaatccaaaaataagatacacgggcaatatctgataccatagaaacatttacttcttaccacaaagaagaggataatataaccattttctttaaatgcaatatgatggaaaatggcaagatgtggtggatacaatggaattatgtgttagcacttttttactaccccat

SEQ ID NO: 12860 - DNA, 394 bp, Glycine max
catgttataaaataataaacacgcttattaagtttaatacatttatgaagattggtcaaaaaaagacatttatgaacactacaagaaaattacatattaatgagggaatattcccgcaaatcccacactaatatgtttggcgaccaatttgcaaggaactaatatctcgctaaattcaagttgtcaattagctacaaaacgttccctcgctattgctttgatatgtactcattattccattactaatccctcacaagctatcccttataaaaattacaaattatatccttttaaaaaaatgtgattgatatcttgaggatatttatccaaaagtccatggttctctaaatttatttgggtttgcaaaggttgcaaaaattgtggcacgatgaat

SEQ ID NO: 12861 - DNA, 411 bp, Glycine max
  unsure (1)..(411): unsure at all n locations
aagcttgtccatcacatatcctctatagaagtcgtctttagagttttgtctcctataatgcattagaggttcagccctccactaggccacctaaaatcatagtttaaactaaaagaatgatctacagaccactataatagccaatatgattcatgagtggattcttgtttgtacatgagagcataatttcaaacctcattgcttcagttatatattataaaaacattcaagctcagatacctttcagatcttaaaataatcttctgattacaatattaaaattaaagaaggtccctagatattattgtcttaattttaaaaatgaggaaaaaaataatataggaaacatcccttattatgacaaagaaatcttttacaagcaaagagacaatntataacaaatttccccct

SEQ ID NO: 12862 - DNA, 407 bp, Glycine max
agcttataagtgaagccttgggagaggatttgtccaaaccctccaacaccagtacttgtagtaataaagctgacactactactactaaggcaaggataagatgcagcatcgaccaaagctttctgaaaaacaaatctgtaaagggtaccacggaacttcttgaacagcatgtgtggaggccccagagagggttgccacaacgtgcaatggcaattcttaaagcctggttatttgagcatttgcttcatccgtatgtatgcctctatctatgtctcttattaataaatgtctagctccgcgactctcttttctgcattctaaaaagacatttggattgaattgtggcctttttttgctgttgatgaatatttttttagttaccctacagacactgataaacacatgct

SEQ ID NO: 12863 - DNA, 521 bp, Glycine max
ctaagctttctgaagctatgatgggaaagaacttagaaaaattttcagtcatccacctcgctcaacgcaacatccgcgctaagcaagccataacttatccgctaagcgagtggcactctcgctaaacgcgccaacccctatctattggttgttgaggtctcgctaagcgagacagtcgtgttaagcccaaaaccttctcgagttgtgcatttattgaaatagggctaagcgagtcaccttgctaagcgcatctgtgtgctaagcgcaaaagtctctctgtctgggctattatgttaattgggccaagcaagccatctcgttaagcccaaaagtctctcttgaatggaaattgtactaagcaagaccaactcgctaagcgccaccccactactgcatcctcattcatttaatcccgtgagcgagccatgtgccgcttatcggaagttgcagaccaatcagagttgtagaactcgataaacgcgcatctgcgcactaagcccaaaaacctctcgggttcatat

SEQ ID NO: 12864 - DNA, 427 bp, Glycine max
agcttgttgcatttcttttttggttatactttcacttgcgtattatggtccagaatctcattctctgcatctccctgtaaatttcattccacaatgcaaaagctagctaaaataaataaattaggtaatcgatatttgtctttgaatatacaacaaaatctgtgtaagtacctccaccaacacaaggaattgcacttgattaacggtacgctcgtttaattttaaaaaattcaattgaaaaattcattttataagaatttatataaaaatctactttaacttagaaccgtgtttttataatatgaccatccagtcaccaagttaattttaagtcaattttatgggcagaaaggtcagctgtaacgcttatttaacggcaaggggaagggattggaactaaaccaccccttatcatatttataatgca

SEQ ID NO: 12865 - DNA, 337 bp, Glycine max
attactcctttaaagcacttgaaataagcttcttttaacttctgctagaaaaaaaccgcaaagatgctaaatgcttcattatttcattaaaaaccagggtaaagagaaaaaattatgattattattagcccaaaatgactatcacactagctgagattctgcagctataatccatcaagactgctagtgtggcgcggagaacattggtgctctctcattgatacctccacaccagccatgtccatatgattgatggatgttcctactcctttctcattggccttcattttggctggcttctgcccccctataacaatattccctaaatagccctaac

SEQ ID NO: 12866 - DNA, 458 bp, Glycine max
agcttggagaggatgcttcaatggaggaaaagaaagagggagagaaagagagaggggggagcacgaaattgaaggaagaaaaagggagagaagttgaactttgagttgtgtctcacaagactctcattcatcaaagttaccacaagtattacacatgcttctatttatagactaggtagcttccttgagaagctttcttgagaaaacttcctttaaaagcttctttgagaaaacttccttgagaagctagaacttagctacatacacctctctaataactaagctcacatccttgagaagcttccttgagaagattcctaaagaagctagagcttagctacacacacctctctaatagctaagctcaccctccttgagttgagaagctagagcttaactacacccccctatatagctaagctcaccccttttccaaaatacttgaaattcaaaaaaaa

SEQ ID NO: 12867 - DNA, 576 bp, Glycine max
  unsure (1)..(576): unsure at all n locations
taactaattgtgaatacaactggttttttgggttcaatacttggacggactttcaaccttctcttaccctctaagtctcaagaagagtatacattgactaatgtaacttggagattaccttctagccacaccccctccaagccaataatgaagccatgtcccctaaaggatgaattcaaattaaaaaattcaattggagaaataaatgagagcacattttccttttcaagtacacaatgttttagttccccttataaagttgtaattacatagttagcttttagtcattatatcaagataaaacctctggtggatttggaattctatttcttttttatgcataataatagtaagagaataaagacacttctaatgctataagttcaagtgttaatgacttgttaggacttaggactatcaatgatatgatatatttagcactaaaaagatgatggaactcactcacaaaccaagagggggtgtgaatngatttctaaatcaaattaaacttgaaaaacaacttcttttcccataattgtatcacaagcttttgataaactaatatttaatcaatca

SEQ ID NO: 12868 - DNA, 461 bp, Glycine max
  unsure (1)..(461): unsure at all n locations
agcttgttaagaaggggcattccatatggtgttttccaggataaaagcaactaagcagtgacagcttataaagaagcaagttccacaaacaagggaattcaaacataacagttgttgcatgttccgtcacatcttcctttccaacaatttctaccaacttttgacagataaatatttgaagggtcttaagcttcccaagatttcgggcaagggacaaagggaacaatgttgccaggcttctacattcagtaacatccacatcttgcaaattggaaaagctgagaattccttgggggggtttgttccatacacatttcaaattaggcaagcgtnttagagtaagttttttcaaacgaaagactatacccttggggttggcatcagtgtcatctatgtcaaatattacctgcgctgcatcggagctatgtacattcaattcttttaaggtcttcaagtaagga

SEQ ID NO: 12869 - DNA, 435 bp, Glycine max
taacaccaaaacatgagaaaatttcgatacaagtcctgtatcctgaaaacagaaccaaccttctgcacttatcatacagtccaagacaccctgaagctaaaacatcaacctcaagcaggacaatacgtgatacacattttgtgtacaaattaacaatagttaacccatcaaggagctaaacaacttgtgtgcagctgtatgctagacttcttccacttgatccataagataaatcactgaagttatataatggtattgacaccaacaagacaaaattcgtgctgagtcatgctagacttctagatatcaagaatgatatcccaccataaagtgaatagaaaacgtctgaagaatgaacagaggcgagtgaagaagagaatatatagaaaataagggtgtcgtgtccacctttccccttcacaccttaatatggat

SEQ ID NO: 12870 - DNA, 525 bp, Glycine max
agctttaattttgtctcaattcagtcaattaatccttaaactttatctcttttgcaaataggcaccatgaactatatttttgtttcaatcaatccttaaagtttacctctttagcacataaatacctaaatttcaatttcatctcaattaattcttaaaaaaattatttctttcataaataatctcttacgttaaaataaattgaagttaaatgaccaacaaaaaagaaatttataaatttttccaaacattaaaacataataaaatttataattaaaaaacaaaatgaattttttttaattaattttattattacccctttttatttatatatcttctaactaatattatttattatattttaaatatgaaaaatgagttgtaacaaaaaaaatcaaagaatatatttaagataaataacttgaaaaaaaatattcataaaacggatcaattttaaagataaattgaaatgcaattaaagttcaaggtcttcttatttacaaaaaagaaaagttaaatatcaat

SEQ ID NO: 12871 - DNA, 490 bp, Glycine max
ttgaccaccatctcaatgcaataggcctatgttccaagaattcttcaatggcatctgatgacaagttttgaatgtgtgagtgtgaatcaagcctgggtagtaaaggttggtgctccaaagagctcatggttattatgtgcactgcaatacaagtgtcgcaactagtttcagtgcatggaatgaggcattgcaaataaccaattatatatgcatgcatgtgcacaagtggaatatttgctccaccgaagattatgtagctaaccttccaacatgttttgttggcacctttcagttgtgttcacgtgcttcttgacgtagagacaagtagataaaactaccttcagttattaaccttttattttatcagccttcagttattaatttattataggcatgtcacatatgggatctatatattttgtacaaaaaaaaaaacaaaaagtggttgttggatagcaataaaaattcaattttttacacctttgaatga

SEQ ID NO: 12872 - DNA, 433 bp, Glycine max
agctttgatgatatggtcttcaccgacttaaaggatcgatgtgggtctaaaaagaggcaaatttagtcatcctgcttggacgaatgagaaaactggggcaaatgaagagggtgaggatgaaggagaagcccgtgctgtgactgccattccaatacagccaagtttcccaccaacacaacaatgtcattactcaggcaataacaaaccttctccttacccaccgcccagttatccacaaaggccatccctaaaatcaaccacaaagcctacctaccgcacttccaatgacaaacaccacctttagcgtaaaccaaaacaccaaccaagaaatgaattttgcagcgagaaagcctgagaattcaccccaattccagtgtcctatgctgacttgctcccatatctacttaataattcaatggtagccataacccta

SEQ ID NO: 12873 - DNA, 416 bp, Glycine max
ttgaaggctgatttcatttgcgaagtgaattacaccaattggttagccaatgtggtcatggtaaagaaagcaactggaaaatggaagatgtgcatggattacaccaacctcaacaaagtgtgtcccaatgatgcctaccctttgcttagcattgacagactatttgatggggcatgtgggttcagggtgctcacttttttagatgcctactcaggctatattcaaatcaagatgtatctacccaaccaagaaaagacaacatttgtcattgatagggctaattttttctataaggtaatgactttttgatgcaatcctccctatgaagggactagtcaccagagccatgagcaagaggctccaaaaggattgagctagagttgctgaagaagttcctagggttctcatcaatctca

SEQ ID NO: 12874 - DNA, 471 bp, Glycine max
agcttttcgattcattctatgtacccgtggtggtccacattgtgtttcgtgtatttttattctcgtttcatttgctttttatacccccttttgacgtgcttaagccattttatttaagtcatttctcgcttaacctaaaaataaaataaatttccaccgatcgtttgaattgtattatccgttaacttcggttaaaatgaattccgaccgttcggtcgtgccgtaaccacgttggaaataaaaaaaaagaggtaaaataataatataataataaaaaaaaacgtcttttattaaaataaagcggaaaatcaatcggacgttttctctttgggatttctcattcttaatttgaattgactaataactaaagtgaaactaaggctaagatcaactcgcctagtcaagctcgtccataaaaataggtttttgaagtttgtattttcaatttcttacttagaaaaatgaatcatt

SEQ ID NO: 12875 - DNA, 610 bp, Glycine max
tgaaggcaaactggatgcattggttaacttggtaacccatctggccttgaatcacaaatctgtaccattcgcaagggtttgtggtttgagctcctctactgaccaccatacagacctttgcccttccatgcagcaacctgaagcaattgagcagcctgaagcttatgctgtaaatatttacaatagacctcctcaacctcaacagcaaaatcaaccacagcagaacaattatgacctctccagcaacagatataaccctggatggaggaatcaccctaacctcagatggtccagccctcagcaacaacaacagcaacctgctccttcgttccaaaatgctgctggcccaagcagaccatacattcctccaccaatccaacaacagcaacaaccctagaaacaaccaacagttgaggcccctccacaaccttccctcgaataacttgtgaggcaaatgactatacagaacatgcaggttcagcaagagaccacagcctccattcagagcttaaccaattaaatgggacaattggctacccaattgaatcaacaacaagtccagaaatatgacaagctgccttctaagttgttcaaaattccaaaaatgtca

SEQ ID NO: 12876 - DNA, 422 bp, Glycine max
agcttcatgagagagtcaaagatcaaattgagaggaaaaataaaaactatgctaaacaagccaacaaagggagaaagaaggttgtcttcgaacccggagattgggtttgggtgcacatgagaaaagaaaggtttccggaacaaaggaaatcaaagcttcaaccaaggggagatggaccatttcaagtgcttgaaagaatcaatgacaatgcttacaaagttgagctgcccggtgagtataatgttagttccaccttcaatgtctctgatttacctctttttgatgcagatggagaattcgatttgaggacaaatccttctcatgagggagagaatgatgaggacatgaccaagagcaagggcaaggatccactttgaagacttggaggacctatgacaagggctagagcaagaaaagccaag

SEQ ID NO: 12877 - DNA, 517 bp, Glycine max
  unsure (1)..(517): unsure at all n locations
tgaaattgaataacggatgctccctagaaattcaaatggtcataacttttcactcgaatgccagatttaggaacaaaatatatagagacgctcgaaattgaacaacagatgctctctagaaatttaaatggtaaaaatttttcactcggatgttagattcaggcacataatatatcgagacgtttgaaattgaacactaaagctctggtccaattcaaacggccataacttttaacatgggtgtatgattgaggcccatgatgtatcgagatgatagaaattgaataacggatgctctcatgaaattcaaatggtcacaagttttcactcgtatgtcagattcaggaacaaaatatatagagacactctaaattgaacacggaagctctggtgcaaatcatatggcctaaacttttgacatgctngtacgattgaggcccatgatatatcgagatgcttcaaattgagaaatggaagttttcgagaaattcaaatgggcataacttttcactcgaat

SEQ ID NO: 12878 - DNA, 426 bp, Glycine max
  unsure (1)..(426): unsure at all n locations
agcttagctacacatacctctctaatagctaagctcacctccttgagatgagaagctagagcttagctacacaccccctataatagctaagctcacccccatgagaaaaaacatgaaaataacaaaaaaaagtccttattacaaagacaactcaaaatgccccgaaatacaaggctaaaaccctatactattagaatggccaaaatacaaggcctagacgaaggaaaaacctattctaatatttacaaagataagcgggctcatacttagcccatgggctcgaaatctaccctaaggctcatgagaaccctangggccttccttggatctctagccaaatctacttggagtcttttancaatgcccttgcggggtgggattgcatcattccctccacctgggaaaggatttgacctcaaatcccga

SEQ ID NO: 12879 - DNA, 756 bp, Glycine max
attgtgtaagagccagaagtggcaatgactatacttgttacttctgtgaagttactggaacttggtggtttaccaagaactggatgtactctcagtggaagagatgaaccggtgtaaaacttcttgtgtctgatctttttgtcttcctttaagttttaaactaaccagagggtgtgattgtttttagatttcacatatatatatatatatatatgtacatatatatatatatatatatatatatatatatatatatatatatatattgttgtgcttgctacaaacattcttacatcatgcgatattgttttcttgcaaaaataatatattttctttcaacatagaatttttatattgaggactctgtttttaaaaagagaaaagtgtcataattctatgataacaattcacccccctttcttgtaacataagcttcttattgtgttatagaacacaccctctatgggttaacccccgaacattgttttgagaaacccttcatataacaaataccactctttgttttttgttgggggagcttcttttacggggccgttggctttgttagaagaaatcttctttcttggagggctaaatggagtggtaatagggccccttgtatcaaaatttcttttttttctaaaaaggggttttcttttccacaccaatatttgatgggctgacttttattgtcttttttggtgccccccacaaaataaaaacccctctttcttggccctgtccaaaaagatgaac

SEQ ID NO: 12880 - DNA, 515 bp, Glycine max
agctttacgaagttatcgtatttatataattgttattatatttattttaatcatcagtttttaaataaatataagcattaacaatgtaaaataaactctaaaacctcaatcgttcacacgtgatatattccacttctcagatgacttttaacccaattaatgtggaccgcattataactaagattggattaaaacaattatttatgttttcaatatagtgctacttaattaattgtcaggttgggagggaagaattttcctaaaattgatcaatcagattctcaaattgaaattaattattaacaaatgaactcaacaaatactcgattcatgataatttcaattatcatcaacaaactcatccacgatacatagaggagcaatcaccaatgtaactccgaacgtcacatatttacctcctcaacatccgacatcatatatagaccataagagaaatctcccaatacattttactcattctagacatagacgcctaaaaaccttaaagttccatt

SEQ ID NO: 12881 - DNA, 545 bp, Glycine max
taccaagctttgtgccaaccagaataatggggacaccaggagcataatgcttcaactccggaatccactgaaaatgaaaccacacatgcaatttatcatcgactttttttataaatgaattattttcttaacatataacatgatccatacatccttcattacaggccatacagaaaccttataattatcaaaataaataagaagaaatacacccaaaacactatgaccacaataaattgccacgaagtacctttttagagacattttcataactggccttgcttatgagagagaaagccagtatgaaaacatcggcaccacggtaactcaaaggtcttaatctgttataatcctcttgtcctgttccacaagtaacacaataaatccagagataacttccaagctccaacatcacagaaacaataatcacgcagcattaccagcagtatcccacaaacccagattcacaatgctcccattgacaaccacaattgcgctgagattgtcaaaaacagtcggcacataatcctgtttttaaaatacaa

SEQ ID NO: 12882 - DNA, 418 bp, Glycine max
agcttgtcaaagagagaagcaagttaaaaactcctttcaaagcaaaaacgttgtttctacttcaaaaccccttgaactacttcacattgatttatttaatccctctagaactatgagtttaggtgtaaattactatggcttagcaatagtggatgattactcaaggttcacatggactttgtttttgaaaacaaaaaatgaagcttttgaggcttttcgcaaacttgccaagatgattcaaaatgaaaaaggtcttaacattgtttcacttggaagtgatcatggaggtgaatttcaaaatgagtccttttaaaacttttgtgaagaaaatggaattcaccacaatttttctgcccaagaacacctcaacagaatggtgttctggagaggaaaaataaatcgctagaagaaggtgcaa

SEQ ID NO: 12883 - DNA, 368 bp, Glycine max
  unsure (1)..(368): unsure at all n locations
gtatgagttgatgatgacttgtgcgctctggcacttctctaaggtccaaaaagctttgtgtagcttctgatgctatccggaatcgatcctacaataaaaattacattacaattagtaactatttttttagtgacaatgcaaaanaaataaatcaacaaaatccaatttgcaatacctgtcaagagtagtcttcacctagtacatagtctgttagtggttgcccaggctatggttgtactttgacaggtggtaaacatacaggaccatgtgttacttgttgtaacaatagtttatggcaaaccgaaaaaaatactgactgagtcacggacaatgtcactttctctaagacgttcgtggcactgcaaaaa

SEQ ID NO: 12884 - DNA, 456 bp, Glycine max
tcgtacccgggatgctctcagtcacctgcggcatgcaagctagaagaggatgctctaatggaggaaaagaaagagagaaggggggagcacgaaattgaaggaataaaagagggaaagaagtggaactttgaagtgtatctcataaaactttcattcatcaaagttacaacaagtgttacacatgcttctatttatagactaggtagcttccttgagaagctttcttgagaaaacttccttgagaagcttctttgagaaaatttccgtgagaagctagagcttagctacacacacccctctcataactaagctcacctccttgagaagcttccttaagaagattcctaaagaagctagagcttagctacacatacctctctaatagctaagctcacctccttgagatgagaagctagaacttagctacacaccccctataatagctaagctcacccc

SEQ ID NO: 12885 - DNA, 344 bp, Glycine max
  unsure (1)..(344): unsure at all n locations
cacttacttgttggtgatgaacaaaagcgcatagcggaatanaaaaagccgaaaatgatgaccctagggctgcaaactcgtcaatcccgtgggtatggcttttgaaaggcgggaaaagaagtttttgaatgcaaaaatgccccccctttcgtcattcttataatttggtgcaagggtggctcgcccangcgagctcatcccgcccaggcgagctaacctgcatttttttttttttgagaggatcattaaccatgtcccctccttccttttagcgtcttgcttaacttgaacttacttaagttagagttaggcattgattacttaattntaaaacaaacaaaaag

SEQ ID NO: 12886 - DNA, 418 bp, Glycine max
  unsure (1)..(418): unsure at all n locations
tctagctntaaaatttaaattaaaacgttcagaaactgctggtaatcgattaccatatatgtgtaatcgattacacagtgcaaattttgaattcaaattttaatagctgttgtaaattagttttggccactggtaatcgattacatcctctggtaatcgattaccagagagtaaatttgttgaaaaaaaaactttttcacttaaatttcttggccaaactttttgctacttcaatttgaaattcccttcctatttaatatatcctttctaagactctagagactgtcttgatcatccatcttgaatatctttaatttctttgtcttgaataaagctttgagacgcatgtgaacctttggcatcatcaaaacattcagcttgatcatttgtctacagcttgtaagggttgttctcgtgg

SEQ ID NO: 12887 - DNA, 153 bp, Glycine max
tggaacgagtcaccactggctgtcttgaggagagagacatgatagagctgacgaactttcttgtgagatgggagatcccacttattggcttcagcacccacctgatttaacactcgggaaggaccgtattaccgacgggagagtctatcatta

SEQ ID NO: 12888 - DNA, 408 bp, Glycine max
  unsure (1)..(408): unsure at all n locations
agcttgaatacaaataaattttcttagcaaagaatagacaatatgatcttaagtgtatcatccaatgatttagtagagtttcgcttcaaagattttgctaatctcttctatatttttccctgttatgcttttgagtagagactgtcttttatagacttaagagaaggatccattataggattagcactgaatcttgatatggttgttgtctcgcatgtgggggcgagacaacgtgacacgctttgatttgagaggaaaggaacaaaagtacagacaacaacatatgctcctctttcgcgtcaaaaacgacttctagcggaattttctgtgaataccctctattctcttctatnatgtcatttccttaaattcaaatgttagaaattcccaataaagataggtaaaatt

SEQ ID NO: 12889 - DNA, 404 bp, Glycine max
tctagtatttatagaccttcttcaagaagtgcttgttgtctctaaaccaatggatttcttcactttaacttgtatttgaagaatgtgtccgttggagcatttaatacttgcattaaattcacgcacgttttcatactggaaaaccactctctttagctatcatgttgaacacttcagcaagaaaccactttcttttgtgtaatagtagatttgcccaacagaacacattttttgatgaagattggtaactttcagatcttgaacttcatttattcttagtaagattttgcagatcctacgagaatgtctcaaatctcagacacaaagtattaagttaaatcttaaatgtcattacttaaatgttgtatcagatcatgactttagctaactatcgtctgttaatt

SEQ ID NO: 12890 - DNA, 419 bp, Glycine max
  unsure (1)..(419): unsure at all n locations
nagcttctgttttcaattntgagaatctcgatatattacgggattcattaggacatccgggtaaaaagttattgtcgtttgaatttgctcagagcttctaatttcaattttgagcgtctcgatatattacgggacttaattggacatccgagtgaaaagttattgtggtttgcatctgctacgaactttcgttttcaatttcgagcatctcgatatattgcgggactcaatcggacatccgattaaaaagttattgtcgtttgaatttgtcaccagcttttgttttcaattttgagtgtctcgatatattacaggacttaatcggaaatccgagttaaaagttattgttgtttggatattgtacgagactttgttttcattntcgagcatctcgatatattacgggacttaatcggaca

SEQ ID NO: 12891 - DNA, 386 bp, Glycine max
  unsure (1)..(386): unsure at all n locations
tactcgagcttgtagcatattcaaacgaccataactnttaactcggatgtctgattgaggcccgttatatatcgagacactcgaaattgaaaacagaagctctgaggaaattcaaacgactataactttttactcggatgtctgattgtgtcccgtagtatatcgtgacgctcgaaattgaaaacataaggtctgagcaaattcaaacgacaataactttttactcagatgtccgattgagtcccgtaatatatcgagatgcttcaaattgaaaatagtagctcctagcaaattcaaaacataataactttttactcggatgtccgattgagtcccgtagtgtatcgagacactcgnaattaaaacagaagctctgacaaattaaa

SEQ ID NO: 12892 - DNA, 208 bp, Glycine max
ggattcaatatgtgtactcctgccgtgtgccacaggatgcttatctaaaccaattgttgaattgttatccatcaacaacctcataggactgcaatttctcaagtttaattcttccattatagcttccatccatagaacttgactggctgccatatcagcaacaatatatcttgatgctcccgttgacaaagaaactacactctgcttt

SEQ ID NO: 12893 - DNA, 340 bp, Glycine max
attgtgtaagattgattgacaaagtcttgaattgattgaatcgaaaatgcaacatcacaaccttgcgctaatagactcttcatgtctggtcaagaagaccatctataagagttataacttttagaagaaacttagaaccaatttgaaaaagtaaaacaccttttgaagagttacatcttttgatttattcagaaacagtcactggtaatcgattaccaaataattgtaatcgattacacaaagcttttatgtgaaaggatgtgactcttcacattcgaatatgaattttcaacgttcaaaggcactgataatggattaccaaaacgttgcaatcgattac

SEQ ID NO: 12894 - DNA, 392 bp, Glycine max
agcttatcaaagattcaaagacaatatttgctttctacttagatgttagtttcatcaagtagtcaactgtaactttaaaatttctattttgtattttcacatacatctctaatcatactgccatcatgtacctatggctactaatactgatcaattattagttaagttcataatttttctatcgtacctgaatgatagaaaaagtatggttttgtgttagtatcactaattttgtctgaactaataatacaatgaatggcaagtttttacttgtatggattttaatgtatacaagtcatcaccaacagattaaattaaaaataaaagcagatgtttatacaaaatctacctgtagatactaatacattatgtactctaatcagggaaaatca

SEQ ID NO: 12895 - DNA, 376 bp, Glycine max
  unsure (1)..(376): unsure at all n locations
cgcttgagctgaggactgtgatgctgatattgcttctcaagggaaagattcgaagctaccccacaagatttcagaggaaatccttcaggtaagctggttttgcgcaagtccttttgggcctgttctgttctgtttgcaccccctgctggtcactttctgattgtgctcctttttctgattgcaccccctgatgtctaacagatttcatcacagttttgactttaatgaaaccttttctcctgtagttaaaccagtcaccattcgattgattctcaccctagcactcagtcaccattgngttctacatcaacttgttgtgaacaatgcatttcttaattggttgcttgacgagactgtctacatgcagcaacctcct

SEQ ID NO: 12896 - DNA, 353 bp, Glycine max
  unsure (1)..(353): unsure at all n locations
agctntcaagaacaatataattgattagattattcatgtaatcgattgaagtgttcttgatcacttattgttagtcggttaatacgactaactttttgtgtaagaaattgtataaattgtatacaactcctcccatttatggttctttntgtaatattgtaattaattcttgttaatataggtaattagtactcaatatcccaattttgtgcatttaatgatccttccatctcaaattcaggtgaaatangcaagattggtgaagtgtaaaattgtcaactcgctaagccaattcatccgctgagcgagaaacccgctaagtgcgatcaccgttggcttagcacaacgaaaaa

SEQ ID NO: 12897 - DNA, 353 bp, Glycine max
tagctacacacacctctctaatagctaagttcacctccttgagatgagaagctagagcttagctacacaccccctataatagctaagctcacccccatgacaaaaaacatgaaaatacaaaaaaaaagtccttactacaaagactactcaaaatgccccgaaatacaaggctaaaatcctatactactagaatggccagaatacaaggcccaaacaaggaaaaacctattctaatatttacaaagaagagtggatccaaccttgacccatgggcttaaaaatctaccctaaggttcatgagaaccctagcgccttctttagtagctctagccctagcctcttggagtcctcta

SEQ ID NO: 12898 - DNA, 397 bp, Glycine max
agctttgacttgaatcatcaagagattataaatatgtgaccatggcatgaatttcatatcatctttttcaacatctctttcaataatcaagaatctatctttcaatcttctctctcaacatcattcaactttttctactgaatgtctgattttttttctcttcacttttctaaaagtttttgttcaaaactttctcttccaagaaaagttctttgttcaaaaacttgtgctattcatctttttcattctcttctacctttgccaaaagagcgaaggactaaccgcctgaattcttttgtgtctctcttctccctttccaagagaattcaaaggaccccgcctgagaattcttttgattcttcccttccccttaaacaaaagatctcaaaggactaat

SEQ ID NO: 12899 - DNA, 441 bp, Glycine max
gacactatagaaactaagcttaataggatagatggacctatggcatccctctatgaccttaaatcaggaaagtttcactcggtcatataccaaagtgtaacaatccatttccatccttcaatggtttatgcagttagtctcaaagccttatatttccttattgtgcaaactataggggtgttcatgggtcggctcgaaccggttttggccaaattcaagactcaacccaatcaaatttgatcggtttggtttggttcagttttcacaatttgtttttgaaacccaacccattcattaacggttcgattcgattcgggccaacagattacccatttaaatttgatctcattgtcaatatcatgattcatccaaatatccaatataattaacacaatattgtcaaatgtcttaaattagtaaaaatgattcatttaatacaat

SEQ ID NO: 12900 - DNA, 402 bp, Glycine max
  unsure (1)..(402): unsure at all n locations
agcttcaagtaagtgctccttanacctccattaattttcaactttaccttctcctccattgttgtttcatcatttttctccatgtatctcctcacatgtcttgcgctaaatgttgttaacatgattctttagaatttccaccgattaaacttgctatagaagctagatttgattttctatggttcaaatttctttttcttgttcttgaaccatgaattgtgttgagtttaggttcctttgagttttgtcttgctattttttgtggctgaaaactaaaccataaaattcttacaaaaaaattaaagtagaagaaaacctcaaaaatctagagtgacttgttcatctattgtagttntgtcatataagtcatgtctagtcatggagcttgtcacataagatttc

SEQ ID NO: 12901 - DNA, 342 bp, Glycine max
  unsure (1)..(342): unsure at all n locations
tgtagagtccgaggaaaaacttttcatttgaatcacttatgaatgcaaatgtcttacttgtcaatttcatttaattgcacttaattaacttctgtttatagcctttaccattttgcaaaggtttaatcctctaatgagcttgtttatattattggaatgaatatattatgcagtttccaagtactttttactatgtaaaaaaaaaaaacttaagtctttgtgtttagtggcttaagcaattttgcaattgggttgttgcatcgtgatcacgacattcactgctgcacactgttttggtcatcaccacaggtaccaaactcntttatanatgttttatgctta

SEQ ID NO: 12902 - DNA, 301 bp, Glycine max
agcttatccttatggcctgcctccggacttcaccccccgtgccaccccggaagatttaagccaagcccctactttcgaggggcaactcccaccttatgaagactatcccgggcaagacgatggggaaggagatacccatcttggccccctactccacctcaaagatccgtccccgcatgaactaccccaaccgaacatagtccgtcataccccggcctcacccacacccgtaaaagaattggttccctttgcggaagataagggaaagattgaggcgcttgaaaataggttgagagcagtc

SEQ ID NO: 12903 - DNA, 344 bp, Glycine max
cttcacctttggtcctcctcatagttgttgcatgagaaaacatgctctattttcatctaccactccaagtaggcctccggatcattctttcctttaaatggaggaatgttgagtttaataccatcaattcggttgtttctaggaacaccatcattccctcttctcctcctttcttcttcattatgatctctattctccatttgatccaacctctcatggagcgcatcatcttgttgtttcattaacctctccaaatgttgcatcaaaacttgcatttggaattgcgaagccccacttcatcattaggaataatacctgacatctcaaaaaacaaatcaacgtac

SEQ ID NO: 12904 - DNA, 394 bp, Glycine max
  unsure (1)..(394): unsure at all n locations
tgttaagctntttcttaagcttttgctacaacctttntctccccctttggcaacatcaaaaagccaaagaactcggaaatcaacacagttataacaatggagtagcaagatataagtatcagagtattaaatccaataagccaaactcataatcaaggaaataatcaaaccagaattcanataacataaaatgtcaacaaccacaaaatatccaagactgaaacacaagaaaaataagcaaagtacttagcataataatgtaaattctaagaaactaaaagccaaaatacacggcttataaaagataaataagcagaatctaaaatctaagaagacggaggaggtggtggaagatcaaaactctgacgaatgtatccgacatcctcttcaagct

SEQ ID NO: 12905 - DNA, 418 bp, Glycine max
agcttgcatgattcacattctccccctttgtcaagcaaattcttttttatatcatcaaaacctgcatgatttacattctccccctttttgatgatgacaagcattatccaaggcttgatctttttgacatcatcaaaatcttcatgatttacattctccccctttttgatgatgacaaccacctgtaggttaggagcaacaacaaagaaaaaatgtctatttgcatatagtttactcccccttggttttgtaatgtttgcttatataaggcaatagacttaaacatttgggaagccgtagaaatagggccttatatacccaccacggtagaaagaaccacaatagatggaagcacaacaatagaaaaacctagagatagatggtctgaagaggatagaagacgagtacaatataattt

SEQ ID NO: 12906 - DNA, 406 bp, Glycine max
  unsure (1)..(406): unsure at all n locations
tgtgcgtaatanaacttatttgacatcaaagatagtattatgataacaacttctgtgaaataacaaattcgtgtctcttaatctgtattagaacttgcagttggtgatacttagaaggctcatatggtgggaacctgatttctttgttaatttggttgtatagctagtttcttgggaagaaggagggtatctgacatcagataaaccaatgccaaggggagagattgtagttggaggatttagtgtgacagctggttactttaagaatcaagaaaaaactaacgaagtgttcaaggtaatttcccaagttacagttgtatgcatgacatntttcctttttaatttcctttaactgctcttannatctgttttgcatattactaaagccactcgtacatnntttttt

SEQ ID NO: 12907 - DNA, 217 bp, Glycine max
acaaagaaatacattgtatttcttactgagtgaggtcaagaacaacttggcttgaggacgcactcattcaatatgaaaataagcgtgccctcctgcgacttaaaagatccctagcgttacgttgacataatccctattgggtcaccttttagacgcacgtatgatgaagttagttgcatatttgtgagcaccagagaaactgttgagagagtgatat

SEQ ID NO: 12908 - DNA, 179 bp, Glycine max
ccatgactcctcgaagagagaggcctatgtgagccaaagaagtccttgtcccaaggaaagacagaattgccatacctgctccaaggaaatatttgccgctcaagttcatgtgattcagatgctttaaatcacccacacaaggacttatctctgcaccaaactgggatttctcataagct

SEQ ID NO: 12909 - DNA, 416 bp, Glycine max
  unsure (1)..(416): unsure at all n locations
agctntgtgtaatcgattacactgatttggtaatcgattactagtgattgtttctgaataaatcaaaagatgtaactcttcaaatggtttttaactttttcaaattggttttaagtttttctaaaagtcataactcttctaaatggtcctcttgaccagacatgaagagtttataaaagaaaggctttgttttgcattttaaaaaaaaaatcaatttaatcaatctaatacaatcctttacaagccttgaatctctttgaacttcttctttgtgccaaaagctttccaaagttttctggttttctaaaccttgaaaacttgtgctattcattcttttcatctcttctccctttgccaaaaagaattcgccaaggactaaccgcctgaattctttttgtatctctcttctccctttt

SEQ ID NO: 12910 - DNA, 412 bp, Glycine max
  unsure (1)..(412): unsure at all n locations
tatcctatggcctgcctccggacnttcacccccgtgcttctccggaagatntaagccaagcccctacttttgaggggcaactcccaccttatgaagactatccccgacaagacgatggggaaggagatacccatcttggccccctgctccacctcanagatccatccccgcatgaactaccccagccgaacatagtccgccatatcccggcctcacccacacccgtaaaagaatctgttccctttgcggaagataggggaaagattgaggcgctngaagagaggttgagggcagtcgagggcctcggcaattacccattctcggatttggcagatntatgtcttgtgcccaacatcgtcatccctcccaagttcaaagtaccagactttgataagtacaaagggacgacatg

SEQ ID NO: 12911 - DNA, 385 bp, Glycine max
agcttgcctcaaagaggtccaggaaggacataggcggccgaaggaactagttccgccccggagtacgacagtcaccgctttaggagcgttgtacaccagcagcgcttcgaagccatcaagggatggtcgtttctccgggagcgacgcgtccagctcagggacgacgagtatactgattttcaggaggaaatagggcgccggcggtgggcaccactggttactcctatggccaagtttgatccagaaatagtccttgaattttatgccaatgcttggccaacagaggagggcgtgcgtgacatgagatcctgggttaggggtcagtggatcccgttcgatgccgacgctatcagccagctcctgggatatccgatggtgttggaag

SEQ ID NO: 12912 - DNA, 416 bp, Glycine max
  unsure (1)..(416): unsure at all n locations
ntgagccaaaatcctgactcaccataaaccttgacccattgtgagaatgccaatccttaccctcggaagcaaannanaggagaagagaaggaaaatttccaatcaaagaggaagcataaaaaggagagaaggaaaatttccaatcaaagagaaagaaaagaagaggaaaggaaattcccaatcaaagagtgggagaaagaaaaaagaaaagaaaagaaagaaaactcccaatcaaagaatgggagaaggaaaaaaagaagtaaaaaagaagaaagctcctggtcaaagaaactagaagaaatgtgcagaaaggtcttttgaccggacgatatctgaacaatacagaattgtcaccaaatgaacaaaaaaagaaggaaaggaaaccacgacctaaaatggtcttcttcctttaatta

SEQ ID NO: 12913 - DNA, 421 bp, Glycine max
agcttctatataagctgaaccattttatcattaaacacaagttgagttttattcagaaaattagagtttatctcttttatcttagtgagagtgattctcctaaattcttgagtgattcaagaacaccttggctgtatcaaaggactttcacaacctttgtgtgttgccctcgctggaaagagtgattcttcccttcctttcatcatcacccttgttctttcaaaccacaattccagaaaatccacctctgcccagaattatctcgtggccataacttccattttacgcactcaaattaagtgattcttgagcctaaattgaatttcaaaacgagacctttcacctcgttttggaatcacctcatttggagccctgttgcttcagttattgccatttctatatttctgtccagccaccactt

SEQ ID NO: 12914 - DNA, 327 bp, Glycine max
accggatgacgccgatcgaacatttcctaaccgacgttatgtttatgtcgctcatggattgaattgaaaactcgttacgcgacatctgtcgtgacgcaccgaccgatatttttcatccgacattgcacaattctttttacagaagctcgctggtcgataatggtctctttaccgcagagcaagtattcatgattcggtgttgcctagaaaagttacaatgtacttcggctatgtctttcgtgcgagttcaaccgacattttgtttcggccaggaaaacattagccgacctctgcgaaaaaaatatttgctaaccgtcttcatgcata

SEQ ID NO: 12915 - DNA, 401 bp, Glycine max
  unsure (1)..(401): unsure at all n locations
agctntataatagactttctcttcataataaaattcacataagtgttttgagacataaaacacaagtcatacatataattcattcagataacggtcaatgtatattgatgctctcctttgggtgatacaccaacacaacatacaaacatgatgatgctaataaaattcttaacattatttggaaattaaatatgcaccaattagtagtatctatttcctttgggtataaaaataaaactaataatacacacaaatcgcctacaattatattcgctaattataagaacaactaactaatcaacctttgagtgatccataaatgtcttataacaatgaatttcaatgtaccccaaaaccaataatcatataatntagcatacattattctatgagtatttgaa

SEQ ID NO: 12916 - DNA, 368 bp, Glycine max
  unsure (1)..(368): unsure at all n locations
tcttcccaatgaagtcaacaccaacaacagatattcacttcctcacctcatcatcatatactctagccttgagtgcaccaaagaaatatgcaatcataaattgcataccattagtcttattgtaatgtaaggacatctaagagctaaatgacacctatagaaatgtgtaggcatcgtatcggagacccgtatcggagacgtctggatgccctgactgtgactgacgtgtgctggatgccctatgctgagcaccgaggagtcaggggttttgacttgatatcgtcgtacaccggccagctcacatggngtcagattgtcatgtatgttcgacctgagcgggttcttcgacagtttggctacctttatac

SEQ ID NO: 12917 - DNA, 245 bp, Glycine max
gactcatccctcccaacgaatttattattattttataccggtaatttttggacaaaaacatacatgcatttgaagatcaatcactataagtaaaataaggaggttaataagagaaatgtttgctttgaagacatatgaaaattgttagaaatatcaatactactgccagttaatacttgacttgggcccacagcattaagtgcacgacattttatttgactatgccatgtcaacacaatatatac

SEQ ID NO: 12918 - DNA, 494 bp, Glycine max
  unsure (1)..(494): unsure at all n locations
tggcgcnanggggttgattcttgccctgcatgacgcgctctatgacatctaacctatgggactgtgctttagcatacagtataagctatgttaagagatgagtgtattcatacattgtcgcgactacaaccaatatgaaactcagtagctgttttatcaggaacatcgaaggtgatgatggaggctccatactgatggtcgccttatcctatgttatagcacaaaggggatccattaagactgcgtcatcgcctgtatagtcacatcgcatgtgatggccgattcttgtaaggctacagacatgttacctttggggccaactcagcactcagagacctaatactacatctttttcatcattctgagacatgcggaccttctcgagatctggggattttttagttgcgaacgaatcaaagagcatttctattgtatatggttgcncaaagcagctacaaaatatgtgcgagagtgtgtactttgtgacataacan

SEQ ID NO: 12919 - DNA, 329 bp, Glycine max
agcttgtgcaaatcaaatcactcctacatctcatctctagcatgcattttctttctttacccactcctcacgtttggttttttagggaaaaacaccataactaaacgcgccgcaagggatccctatcgcaccagatccaaatctagaacgatgggtgatcaagaggagacgcaggaacagatgaaagccgacatgtcggctctgaaagaacaaatggcctccatgatggaggccatgttaggtatgaaacagatcatggagaagaacgcggccactgccgccgctgtcagttcggctgccgaagcagacccgactctcttggcaactac

SEQ ID NO: 12920 - DNA, 364 bp, Glycine max
tgtagatgtcacttaagaacataggtgcaacggtatgctcggagaacttggctggtaatgttttgaagtgagtatactttgtcaaacaatctacaatcacctaggtaattgacttcccctgtgacactggtaagtgtgtaataaaatccatagagaagtctttccagacctaattgggaataggtaaaggctataaaaggccatgctatttgtgattgggagacttatgcttttgacaaatctcacaggtttgcacatactccttgacatcccgacacatgtgtggccatgaaaaggaagctgccaaacatataagcatgcctttaacacttgagtgtcctcctgcaagggtggcatggcaatc

SEQ ID NO: 12921 - DNA, 379 bp, Glycine max
  unsure (1)..(379): unsure at all n locations
agctntatccaaaaccccaacccttcgactcataaaccttgacccaggataggaatttttacccttaccctcagaagaaagaatagaaggatctcccaaaaaagaattttcatttactgttatgttatgaatgtgcttcaaaaagcaaaagaaaaagagaaaatccccgatcaaagattggaggaaaacaagaaaaagaaaaaattcccgatcaaagatcgaaagaaagcaaaagagaaatatacagaaaggtcgttggaccagacaatgtgtgaataatgtacaaagttgtcacaagcaagaaagaaaacaaaagaaaccatgatttgaaacacatgaagctccccttcttggtaccaaccaagtctttgtgcccgca

SEQ ID NO: 12922 - DNA, 410 bp, Glycine max
  unsure (1)..(410): unsure at all n locations
cttccaaagtggtcttcggcattacatttaaactctatccattgtcgataagtacttttgcgacaacgtggtccatacatctcaccgacacatgtagagccttgttgtgtcctctcctctcaacgggaatctcttcttccgcaaacgcgatataattgttggtggttatatgattaacgatgccttcgaaaccctccactgagatatcatgtgctacatgggcatcgttaaggactttcatcaacagcgcacgatgaggctcggagtttatgagtagttcaagcaaggagatccttgctggaggtgtattcagttgctcaaataccttaaactcgctttgttggatgaggcggangaactcatgggcctcttccaaagtcactattttttcttgaagtccctctttcttt

SEQ ID NO: 12923 - DNA, 253 bp, Glycine max
taactaatctaatccacagaggatcttagatgaacttattatgttattaaactagaggctgctacttacctattcccagaggattagacaactgatgatcattactggaaaagttaatttagctcactaaatccaacagatgataagaaatttattcatactgttgtaaaagaccacactttaccactgtgttatttactactgcattttctgtttaactaactatttatttgtccaaacatattataatgtt

SEQ ID NO: 12924 - DNA, 388 bp, Glycine max
tggagatgatgcttcaatggaggaaaagaaagatagatgtggggagcacgaaattgaaggaataaaagagggagagaagtggaactttgaagtgtgtctcataaggctttcattcatcaaagttgcagcaagtgttacacatgcttctatttatagactaggtagcttccttaagaagctttcttaagaaaacttccttgagaagcttctttgagaaaactttcttgagaagctagagcttagctacacacacccatctaaaaactaagctcacctccttgagaagcttccttgagaagctagagcttagctacacacacccatctaaaaactaagctcacctccttgacaaaatacatgaatatacaaaaaaaaagtcctactacaa

SEQ ID NO: 12925 - DNA, 237 bp, Glycine max
agcttgtattaaatatattaaaagttcttatatttaagctgagcattcttactttgtgattaatttatcatcaaatgtaaatctaatattaaaaaaagtccatttacccaaggattgttcaaacttatgtaaatttaactttagtttacaatacgtactcatgggtaaattttattttagtgattttaatttaatctttataaattatgtagatatgttatgtgatatgtcacttaa

SEQ ID NO: 12926 - DNA, 380 bp, Glycine max
  unsure (1)..(380): unsure at all n locations
tgagtgtatcaaagaacaatcagtcattangaacccgtattggtgttggagttggactttgaaaataaacaccaatttggctgtgagtgattgatccatttagaaaaatgaaggttaatcttgagttagcaatgatacgactgcttgttttttcaaaaaaatgacataataataagattgaatttggtttatgaaggtatgttgtgtgaaactgtgcgtttgtattaagtgtgttttgtgttatttatagttgtatgagcatttggtcacgttgatgtgtattggaatctaatgtttctttttccctaataactgatgtaacatatgttcattataattntagagtgaaagaagagattatgagttatccatttcatgtc

SEQ ID NO: 12927 - DNA, 351 bp, Glycine max
  unsure (1)..(351): unsure at all n locations
agcttaatgctttctctgagtgaatgtgtcattgntataacgattaaggatgtttgtttcaatttttttntgttctttcctctttgtttcccttaaacacgagttcactttaggatgatgagtaaaaacaatatgaatcctatcaaggatcatatcagcaaataaattattctttaataactagatttcaattcatgtttgcacaagtttgtttaaatatacatttgggatattttaatttatttttaacatatatgtacataattaaatattattaataaatattaatattaattaatatatattattgagaacatgatattaaattttattgaacatatgtgcttcaaa

SEQ ID NO: 12928 - DNA, 296 bp, Glycine max
tcgaagggaagagagagaccgatcatgatcacatagcatggtcttaaaagaagagttagccgcttgctcaaggtccaaaaggaacttgactcagcgtttgtgcgagacagagaccaacatgttagctatcatcaccaagtatcaagaagaactaagcctagccacaacccacgagcatagggtggcagacgagtatgcccaagtgtacgcataaaaggaggctagaggaagggtgatagactcgttacaccaagaggcaaccatgtggatggaccgatttgctcttaccttgaacg

SEQ ID NO: 12929 - DNA, 410 bp, Glycine max
  unsure (1)..(410): unsure at all n locations
tcaagccttatgatgacgaaccaaacaattntgatgacgccaaaagcccaaatgattgattcaagacttcaagatcaagcatcaagaatccaatccaagattcaagagaagaaatcaagaagcaacaagtcaagacttcatataggataagtattaaaatatgttttttcaaaaatcaaatagcacgattttgttttacaaaagaattttctcaaattttctaaaataccagagtgattacactctggtaatcgattaccagttggcagtaatcgattaccagtgaccagtttggttttcaaaatattttcaaatggtttacaacgttccaaaatgatnttcaaatagtgtaatcgattacactatattagtaatcgattccaagtgaatatgaacgttgaaattcaaat

SEQ ID NO: 12930 - DNA, 329 bp, Glycine max
  unsure (1)..(329): unsure at all n locations
cgatccatgaatcttgattcttgaattcaactgtcctcttaaatcttgaagtgttcttcaactnttcctcttgagtcttgaagtgttcttcaactttcctcttgaatcttgaagtcttcttgattctatcttgaatatcttgaactcattctttgattgaccattgagctttttgtcatcacctttgtcatcatcttttgttatcatcaaaacatctttgaatcactcttgatcatcatgaagctttgcttttacattctatgtttgatgaatttctgaaacttcttcacaaagagtgagaagtcgttctcatcatcagatacttcttc

SEQ ID NO: 12931 - DNA, 432 bp, Glycine max
  unsure (1)..(432): unsure at all n locations
cgacctgccgcatgcaagctntgcatcccagggaggggattcgagcttaatgctgatggtcaacctctgaagatcctcaggaagaatatgaccacactcgctcatacatggagtgttttttcttactccaacttgatccccacctcccacacttctaacatcacattggatctggccaagttgatttatggcattattatgaagatggacatgaatctaggctacctcgtctcttaccagatttctatcattgcccaacatgactcctccaggcttggatttccagccttaatcacagctttgtgtaaagctagagaggtcacatcagatttccagccatcagattctagatgatccaacagtgacattcaaagggccaaggaaggccaggggtaagagatctgaggctccccctacttcaacaactcaagc

SEQ ID NO: 12932 - DNA, 345 bp, Glycine max
  unsure (1)..(345): unsure at all n locations
tcctgactcaccataaaccttgacccagtgtgtgaatgtcaatccttaccctcggaagcaaaaaaaaaaaaaagggagaaggaaaatttccaatcaaagaggaagcagaaaaaagaagagaaggaaaatntccaatcaaagagaaagaaaaaagaggaaaggaaattcccaatcaaagagtgggaganagaaaaaagaaaagaaagaaaattcccaaccacagaatggaagatagtaaaaaagaagaaagctcctggtcaaagaaaccaaaagaaatgtgcagagaggtctttggaccagacaatatctgaacaatacagaattgtcaccaaatgaacaaaaaga

SEQ ID NO: 12933 - DNA, 404 bp, Glycine max
  unsure (1)..(404): unsure at all n locations
agcttgcctcaaagaggtccaggaaggacaaggcggccgaaggaactagttccgctctggagtacgacagtcaccgcttcaggagcgttgtacaccagcagcgcttcgaagccatcaagggatggtcgtttctccgggagcgacgcgtccagctcagggacgacgagtatactgatttccaggaggaaatagggcgccggcggtgggcaccactggttactcccatggccaagtttgatccagaaatagtccttgagttttacgccaatgcttggccaacagaggagggcgtgcgtgacatgagatcctgngttaggggtcagtggatcccgttcgatgccgatgctatcagccagctcctgggatatccgatggtattggaagagggccaggaatgcgagtat

SEQ ID NO: 12934 - DNA, 412 bp, Glycine max
tggtttgaggtacttacccgttgaagattgaagaaaacgaagaacgaacgatgaatgttgaagaacggtcgagaatcttcgcgtaattgctcacgaaaacattacggaaacgttacggaagcgcctcggcttggattttcttcacggaaataattttcctcagtaatttcgagaaagggagaaatgccaagaaggctgaacccttttcttcttcactcctccccctatttatagcaaaataggggaggagcttgccacccagctcgcctaggcaagcaaggttgcttcctccagaagcaacagccttctggaggaaggatctggaaggcccaagtgggccagattgctatttgtaccaccccttttactaaatgcacccccttctattttttggtaattctttttccataac

SEQ ID NO: 12935 - DNA, 408 bp, Glycine max
  unsure (1)..(408): unsure at all n locations
agcttcacatgatgatgctgatcgaacatttcctaaccgacatcatgcaaatttcgttcacggattggattgaaaactcaatagccgacatccgtcgtgaagtagctccgtttgatatttttcagcagacattgagcaatttttttttacaaacgctcgcgggccgataaagtttttttttacggcagaggaagttttcttgttttggtgttgcaaaaaaaatttacaatgtaggtcggctaggtttttttgtgcgaggtcaaccgaccttttgtttgggccgaaactggcatgttcccatttattcggtcaggaaaagattagcccttctcggcaaaaaaatattattcgccgatattgatcgaaaaagatganagtcgacgtcggcctggaaagttgaccgatcga

SEQ ID NO: 12936 - DNA, 414 bp, Glycine max
  unsure (1)..(414): unsure at all n locations
gctgaaccattntatcaataaacacaagttgagttttattcagaanattagagtttatctcttttatcttagtgagagtgattctcctaaattcttgagtgattcaagaacaccctggctgtatcaaaggactttcacaacctttgtgtgttgccctcgctggaaagagtgattctttccttcctatcatctccacccttgttctttcaaaccacaattccagaaaatccacctctgcccaaaattatctcgtgaccataactcccatttcacacactcaaattaagtgattcttgatcctaaattgaatttcaaaacgagatctttcacctcgttttggaatcacctcatttggagccctgtagcttccgttatttccatttctatatttcttgccagccaccacttaaccta

SEQ ID NO: 12937 - DNA, 413 bp, Glycine max
gtcctccttccacgttgcttttcttctttcttcttctccaccatttatatcctccattttcggagtcttggagcacacctctacttcgtggggcttcaaatttcaggtaagggtggacttcatctcacttgaaattcatgggtgttgggtttttgggagctatggtgggtagttctactatgttattgccttagggtagttatttgtgaaggaatttgttgaaatcatgctaaacttgacatgtttgatgtgagaaaaattagccatgctgatctagggttttatgatgatgatttgtgatatatgtatgctgaaaatgttgatagaaaactggtagagatgatagggagagttaacctacggttaaatgtgagaatgataatgttatgagtgaaaaagtgtgagattttgag

SEQ ID NO: 12938 - DNA, 431 bp, Glycine max
  unsure (1)..(431): unsure at all n locations
cttcatgatgaatcaacaatgattcaaaggtgttttgatgataactttgatgacaacataagatgatgacaaaggtgatgaacaaaaagctcaaaagatcaaagaacaacttaagtgaatcaaagaacatctcaagtgaatcaagaacaagtcaagagttcaagaatcaagaagaattcaagactcaagaagacagtctataatcaagaatcaagattctagatctctagaatcaagatcaagattcaagaatgaagaaaagactcaatcgagataagtattaaaaagttttctcaaaactttgaatagcacatgagtgtttgacaaaacctttaccaaagagtgttcactctctggtaatcgattaccatattgttgtnatcgattaccagtagcaaaatgaggttgaaaagttctcaactgatttacac

SEQ ID NO: 12939 - DNA, 343 bp, Glycine max
agcttcctctttgccaaaacagaggaattagcgctaggtatgacctcagcaaaaataacaacaaggccaacctcactagcaggttgacctctttctccaagaataagagtagaagcagacggtggcacagtctcactcccaggtccgacctgcttcacgagtggccttcaggcaaactcacccacaatacctacaaaacaagcaacaacaacacaagcaagtgttagtctcgattgacatcgacctcaaacataaaagaggacaagattaagcactttaccatccaaggcattgaaggggagctcgttgagggaaaaaacaaaatggcccactcgtccagtga

SEQ ID NO: 12940 - DNA, 404 bp, Glycine max
tgcatgcatagctgcagagaagaagagattaataaactggcatgtttactaccaaaacaaatacgaaagaaatccttccaagaggccaactactcgggtagctttcttttcatgatatactatcaaattactttttctaatttcagaagagacttccttttagcattttcttttgtcacaggaatagccataattggtgatatcaactaataaccttttatgtttcacgatttgatttcttatctatagacaggtttcctgggtttcttggggaataaagttgatgctattgatcattatactgcaataattgataatttgagcaaacaagttagtactgatcaaattatacaatggatatgtcaatgtcacccttcttatccttttttgtaattggaactatt

SEQ ID NO: 12941 - DNA, 358 bp, Glycine max
  unsure (1)..(358): unsure at all n locations
agcttggttgctagtctacccttcagactatttgtatcccttgaagccatggtaaagtctaacatttccgtctgaagcaagcactgactcaagtttattttgaggttgaaatcttgagggcaacaaccaattagttgagtctccttctggtcttctcaaatgttgattcagtttattgaaaatattagttaaaagtttaggtgttgtagcagtgtcaactntcttcttgatttccaatttgactttcattgcatcaaaaggaatagacttagtggctccatagatgctcttcagtcttgatatgtctacttctgatataggttgagcaaacatagcatcaacaacaacttcatctttt

SEQ ID NO: 12942 - DNA, 370 bp, Glycine max
  unsure (1)..(370): unsure at all n locations
ntgaaggtgcgtagcccaccatctttntcatagtagaataccgataatgtgtctaccatcacgattatcgtctccttttccatcattgggggtaccacttgggctgctagatccctccacctttgggcgtattctttgaaagatttgtgcccccttttttggcacatgttctgtagttgcatcctatccaaagccattatactgacactgcctaatgaaggcaaccattangtccttccaagcatggactcgggaaggttccaagttagtgtaccaggtaacagctaccacagtaagactttcttggaaggaatgtatcaacaattcctcatcttttacgtatgcccccatcttccgacaatacatcttt

SEQ ID NO: 12943 - DNA, 398 bp, Glycine max
  unsure (1)..(398): unsure at all n locations
agcttcaattccatgtttaactccaaaatttcaaatagacacctatagatatttgctaccacttaataattaatccaaaaggaaggactattgccattgttaattaattgaacatttcagattatttgtttgaggtttctgatttctttgattaacttgaataaggattcaattattctttttttacattttttttatcatttatgatgtaggaatacatatcatggtataatttgggttttgggttgtaatttttgtataactgaaaattcatatagcatgtcagagaaaccaccgattaatttgcaaattanggacatgaggtaatttccataaataagaaaagagataaaatattgtccaggaaaaggctcttgttcatatattttgttgatgat

SEQ ID NO: 12944 - DNA, 390 bp, Glycine max
  unsure (1)..(390): unsure at all n locations
tttaaaaaaatcaaatcaagccttcaaaagacactagttaaataagtcaggctagtttaatgcaaatcctagcctgngaacatttctatagttaaaagcggctcaattttattggctgcatttagcatcataacctacatggtgcccggactttggatgagaaagaaccaaaacaagggtgaacgacacaaataactgtatttaattcaacttatttcgtggacaactaattacttaatttttgcattaatctttttagagcttttggaaaaatgcgattatttcttctgaaataatccgaaccatatatgtgccaagtacattgaagtttttcttatttaagaaggggtaaggaaaactaaggagaactaatcaattgattaaaatcaa

SEQ ID NO: 12945 - DNA, 399 bp, Glycine max
  unsure (1)..(399): unsure at all n locations
agctntatgttaatgaccttgaataaaatgaaaaggcaatcatgttgatgcagaaactatatagggtaaataagtagagaatatggaatctagaacaaccaaagtggccattgtgtagtgatggtcaatcccttgtagcaaagaacatattccataccatagtggagagaacttattcacagctgtctagtgaaatgtcaagctatgaatgttttcttattgagttaaatatatttttaaaatttcagtatctacaaataaaaaaatacgttcacttttagttcctaaaggaaggaaaaaaaacatttacttttggtctttcatttatagaaaatgtattagattagatgtgattcctattaataacagttacatgaagagaaattgaaggacaagaac

SEQ ID NO: 12946 - DNA, 345 bp, Glycine max
tgagttgcttgttgacaaggatctcaagactaactatgacaggattgagcttgaggaaatagttcaagtggcactcttgtgcacacaatatcttccgggccacaggcccaaaatgtctgatgttgtacgcatgcttgaaggtgatgggcttgcagagaaatgggaagcctcacaaagtgctgacactaccaagtgcaaaccacaagaactctcttcatcagataggtattctgacctcattgatgactcttctttgttagtccaagccatggaactctcaagccctatgatgtgaaccttacggggcggatcgcttgatacaggctacgaatatttggatgacgc

SEQ ID NO: 12947 - DNA, 244 bp, Glycine max
agcttgtcttatcgcgtgaagagatagttcttagcggataaacaatctacaaactattcttactcattttctgcttatctcttcactcataccataaaaaccctttctgttgattaatacacaagctggaataaatcacaatcatcaacaagaagttctaactacctgcaagaaataaaaatccagatacacaacggaaagaaaagctgggttgcctaccactaagcgcttctttaacgtcact

SEQ ID NO: 12948 - DNA, 288 bp, Glycine max
  unsure (1)..(288): unsure at all n locations
tgacctatcccgagccaacccgggcatagtcagtctgtgttaacctgtgatgtacctagacctgcgagctcctggcagttctccaattggagaacaaagacctcnaagtcaggagacttgtgtggtggctggccacctatgaatattgagtggtacctcgcaaatggcctctggtaatcggttaccaagaccgtgtcatccattactgggctttaaagtggccacaagatgttaagacggcctctggtcatcgattgccaaaggtgtgtaatctattacccggcttac

SEQ ID NO: 12949 - DNA, 347 bp, Glycine max
  unsure (1)..(347): unsure at all n locations
agcttgtatagttccccaatttatggttattttgtagtgaattttgtaaataaattttgttttatggttaacgttgtctctagaacatttccattggatttaatgatgaaatctatgcattttcaggtgaacaagaggctaagttttgaattgcaaaaagtagcagttgggctaagtgcatatccaccgcgctgaagcgcagcttcagcgcgcttagtgcaaaggataatttggcagagcattagcatcaaagccgcgcactaagcgtaagatcagtgcgctaagtgtagcaagtgccttcagccaggctaagctcgagactggcgctaagcctaattntacttact

SEQ ID NO: 12950 - DNA, 336 bp, Glycine max
  unsure (1)..(336): unsure at all n locations
ntgatgatatggtcttcaccgatgaatagatcaaagtgggtctaaaaagaggcaaatctgatcatcatgctttgataaatgccaaaaaaaaaaaactggggcaaatgaagagggtgagaatgagggagaagcccatgctgtgactgccattcctatacagccaagtttcccaccccaaaatgtcattactcagcaaataacaagccttctccttacccaccgcccagttatccataaaggccatccctaaatcaaccacaaagcctgtctaccacacaaccaatgctaaacacctcctttagcacgaaccaaaacactaaccaaaaaggaattttg

SEQ ID NO: 12951 - DNA, 219 bp, Glycine max
agccttgagggattggtctttgccagtgtaatgatcgatgtgggtctgaaaaaaggcaaatttagtcatcctgcttggacgaatgagaaaactggggcaaatgaaaagggtgagaaagagggagaaacccatgctgtgactgccattcctatacgggcaagtttcccaccaaccccacaatgtcattactcagccaataacaaacctcctccttaccca

SEQ ID NO: 12952 - DNA, 383 bp, Glycine max
  unsure (1)..(383): unsure at all n locations
ntattcaagacaaaggaattaaagatattcaagatggatgatcaagacagtctctagagtcttagaaagggtatattaaataggaagggaattccaattgaagtagcaaaagaattggtcaagaattttaagttaaaaagtcattttcaacaaatttactctctggtaatcgattaccagaggatgtaatcgattaccagtggccaaaactgatttacaacagctattaaaatttgaattcaaaatttgcattgtgtaatcgattgcacatatatggtaatcgattaccagcagtttctgaatgtttttaattcaaattntaaagcttgtaatcgcttaccagaggagattntcagaaaatattctcaacagtcacatctttt

SEQ ID NO: 12953 - DNA, 421 bp, Glycine max
catgcaagcttatcactttagacaatactatttcttatgttgagaaaatatattacttgttaattggctaacaaattttgaagagttttgacgaccctttcaattgcatagccattctttccactaatccttcttatttgaaataagttattggtaattctttttctctttcacaatttccttttctttttgtttattactcaaccttcctttttttttatttattggggagaacagttcgtctagaaatgctcttatccaactttttaatctaaatcctataccttttttcctaacgtgcataactaacttttcccgatacatctatttcccatctcctagcttaagaggtcaaagattccaacctccagactaaaggtcataagagtaaagatgtcgagcgaacttatgaatcacatgc

SEQ ID NO: 12954 - DNA, 315 bp, Glycine max
  unsure (1)..(315): unsure at all n locations
gctaataatatgtcaaaactgccaacgacacagggctatgggtctgatgaggagtgaattctgaaaactcaatgttcttctggctcggatatatnttgttntgtttttttgataagcaaatgttttatactttgttngaacttatgtcacttttttcagcttggaattcttttgaattccttgaagagaatgctcgacagcttgcgccctaggattgaatcccagttcaagacatggngttcttgcttgccacatgttggaaacacgacacctgggtgagcgactagtgaggtgacagtgatgctgagagcaaag

SEQ ID NO: 12955 - DNA, 425 bp, Glycine max
ccggcattcaagctcatcaactgtcccaaaacccaagtttattcgaaaccaagtgtcatgatttctatattaccaattttgctagttgttaatgttgaatcatagttttgctctctcatctgccctttgtctcatctctttaccttacaacttagtcaattctatcattaccctttttcaatatgcagaatcagcaacatgcaaacatatctaatccagcaaatgccaccatcaatagccaggctatggtccagaaccaacaaaatgcctcatgtcccatttctttcatcttctaaatttattgtagcttctgcagatttaaaagaagcatttggttcttcatttcaacatgaatctactgtttagtttataattcactcaattctgcctttagtcattttcaacatgcagaactatcatcatgc

SEQ ID NO: 12956 - DNA, 287 bp, Glycine max
  unsure (1)..(287): unsure at all n locations
tctacttatgtggcaggccggccttccttcactttcttttctccaacgcgagctntgaccactgctcttcctttccgcgatgctttttttcatatccgcctgagtagggctatagcctaaaccatactttccacgatnttctttggcatttatcaggctagttatgccgtcgttgtccttgcctaaacccattccgggttcgtaaccattccctaacataactcgggccatcattatgctgcatcggacagacaaggctgcccagagaaggagtccacacacggaaa

SEQ ID NO: 12957 - DNA, 333 bp, Glycine max
gacacaacattgttcgcacatgtgttaatgatttatgtctgcaaccaccctgttgttgctttgattcatgtactgacgcatgcgtatgaaataaatcgggtggagacaaacaactaggctcgcaccgaccgccccttcccacagaagcgttgtctcaacgtataatggacctagattgcgcttctctccttatcaatctgtccgatctcttcacaataatacccccttcacccactcctgttattcgccttcttcttccatctcctcccccccaaatccttggttttccctcttcctcattcgattactcgtcttgatccctctccccccccg

SEQ ID NO: 12958 - DNA, 395 bp, Glycine max
gtaattagttaaagttaatgaaacttggtagtttgtcaataattgaacacaatttcagtggtagagatgaactagtataaatctttgtaacttatatgtttccttgtgtttttctgctttaaagtgacataaggtttaaatttgattttgttttggaaagttctatttgttttacaaagcttctcttcaaatgataactttgttttgttaaaaaaagacttgaaaattttctaaaaccacaattcaatctctcttcttgtgacacttgcatttacaacatatatatctttatatatatatatatatatatatatatctatacacatacctatatatttatatatatctccctaacagtcttgtttgtgtcattctctaatctacagtacaccgcc

SEQ ID NO: 12959 - DNA, 298 bp, Glycine max
  unsure (1)..(298): unsure at all n locations
gagatctaggaaggataaagcggctgaagtgaaccagttccgctcccgattatgacagccaccgttttaggagcgctgagcaccagcagcgcttcgaggccatcaagggagggtcatttatccgggagcgacgcgtccagctcacggacgacgagcataccgacttccaagaggagatagttcgccggcggtgggcatcactggntacctccatggccaagttcgacccagacataggccttgaattttatgctaatgcttggcctacagaggagggcgtacgagatatgcgatccta

SEQ ID NO: 12960 - DNA, 89 bp, Glycine max
  unsure (1)..(89): unsure at all n locations
agcttttaaatttgaattaaaacgttcaataactgctggtaatcgattaccatatatgngcaatcgantacacattgcaacttttgcat

SEQ ID NO: 12961 - DNA, 56 bp, Glycine max
  unsure (1)..(56): unsure at all n locations
tgaagcttgaagaaaatcttgaagatattttggctttacatgncnaactcctttga

SEQ ID NO: 12962 - DNA, 450 bp, Glycine max
  unsure (1)..(450): unsure at all n locations
ntgatgatcatagctagncgaactatgaaactaagctagaattatacagtaacacttttgccaaccatgngtctcttcttaatatcatgctatcatggaacttcttgggctatncttcgtccaccgaactaaatgtgccaatgtgggccctgaggaggtgagttgaaattctgaaaaactcacctgtgcttctggctcgtgtattatctgtgtttgttttctggctaacacaagcccatatcgctgtttgaacttcgtcccctctgcgagctcgtgattctcttgtattcttcaacacaatgccccacagcccgctccccaggattgtctctccggtcagcacatgggtgctcgcttccacatgttgccacttccacctggtggtcgcttttggcgggccgcgtgtcttgcccatcctctgcttctctcctcctcacttgaccgcatgcg

SEQ ID NO: 12963 - DNA, 363 bp, Glycine max
  unsure (1)..(363): unsure at all n locations
agcttgctaaatggaagcaaaaaagtctatcaatggggggtagaataaccctcattaattcagtcttaacagctntacccatctatttgctgtccttcttcaggatccttaaacatgtggtgcaaaagattgtctctattcaaagaaactttttatggggaagtcatcacgaggccaacaagatcccttgggtgaggtgggacacagtttgcctccctaagagtaaaggggggttagggattaaagatttgactaaattcaatgaggctttgcttggcaaatgggggtgggagctggcatataatcagaatcaaccatgggccaagaatttattgtctaaatatggtggatggaaggatttga

SEQ ID NO: 12964 - DNA, 423 bp, Glycine max
tattactttgaaaactaattaaaattgaaaagtgttatttgtaagacaactcatacaagcactaaaagaccaacaatagttaacacaagtgttaatgatttatgtcttttaatcaagtaattcaggatttgaatcatgattgacaattgggtatgaaataaattgtgttgagagaaaaatactcaccttgtgtgtgcttatggttcctaacaaagatttgtcactacttttgacgaaacaattttatactaataccatgataaaaaaaaatacaagcactaaaagaaaaaaaaacaacttgcaacaaattctaattatttgcatttgattcatataatttgcaatcactaaaagagtttaatggttatacaccgatagtataaaatagttttacatttgtattcaatcacaaatcaccatttg

SEQ ID NO: 12965 - DNA, 156 bp, Glycine max
  unsure (1)..(156): unsure at all n locations
ctcttgnnnncgnncgntccgnctcccaatnttcatgttcgacagcttataacccacattttgccatctatccgttcttattactaattaggggaatcaacccgccgttatcgccacccatatctgccttactacaatcacgcccgcccccacccc

SEQ ID NO: 12966 - DNA, 246 bp, Glycine max
agctttcaacaagtttcttcacaaataactatcatgaagcagaaaactagcaagactacccatcatatctcccaaagccccatacccacgaaatttaagagagaaagaagtccacccaaacctgaagtttcgaagtcccactcgtagccacgcacttcacgacctcgaaaatgctcttctttcacgatttggagtacaaatgatggccaaaggttgaagcttcgtgtggcggttcaatggacgagg

SEQ ID NO: 12967 - DNA, 186 bp, Glycine max
tcggaagaaagtgatgaggtacaagccctaaaggcaaagtttgaaagagcccgggtagtcaaagagaagttcaagtccatagccatcaaaatctgaagagagcatgatgaactaagggacatcactatggccacagctgaagcctcgcaacgagaaaccaagaaggcccccacggaagaacacgac

SEQ ID NO: 12968 - DNA, 380 bp, Glycine max
  unsure (1)..(380): unsure at all n locations
agcttctggtgggacatcttgacttgctttccaatctgacattcaccacagattctgccttcttctattttcagattgggaatgcctctaacagcacctttgtcaatgattntcttcatgcctcttaagtgcagatgtccaaatctttgatgccatatattgacttcatcttctttggagactagacatgtggaggagtaactggtttcttgaggtgtccataggtaacagttgtcctttgatctgctgcccttcattaggacttcactcttctcatttgtcaccaagcattctgactntgtgaagttacattgagtccttcatcacacaactgactgatgctgatcaagttcgcagtcagtcccttcaccagcagtact

SEQ ID NO: 12969 - DNA, 268 bp, Glycine max
  unsure (1)..(268): unsure at all n locations
ntaaaggatactaggttgtctcccagtatggcctccttaacatgtggagccggtcgcgggatgatgatctgctgatcacaggcctagtgcctgctcgtacccatccctgaccatcgcttgaaatgatcatgtccctgtcttttgattcacaagataaaaaaaatgcatgtgaatgtgtatgcatgagcagtttcaaatgcaataattcttttgcaaaagcccgttgggtttagttttaattaagcgcttggggcattcccatggatcg

SEQ ID NO: 12970 - DNA, 293 bp, Glycine max
ccgcgcccctgaactataaactgggacaacccgggccgcccattgacgcgactatcccaccttaatggcgtcccactcaccgcccgcctctcagtccgccaaccccccaccgcaattgcttatccgctcgcccaccgcctaccccttccataccccactcggcgcatctctcctcaccgcactgctcctgtgactcccctctccacctctccccatatcctcccgatcaacgaaccaagccccccccatcccaacacttcccctccgctccactctatcctttaccctccccc

SEQ ID NO: 12971 - DNA, 269 bp, Glycine max
tacacagggatcaactgcattaaccgcataaccatatgagagcaatgactgtgacgcgaacattgataatactattggacggaaaagcttgttccaaaccataggaggaatcatttagtttgcaaaccataggactttgaaacacttaagacaaagtgtatctggaagcatcacatgaagtagcttcttcaatgtcaccatttagaaaaacaggcttaacatccatctgatgtagctctaaatcacaaggagctacaagtggcattatt

SEQ ID NO: 12972 - DNA, 419 bp, Glycine max
  unsure (1)..(419): unsure at all n locations
tgaagccnttggtgcgcacaaaaaccatgagagattgccacattttttgttccagtttttcgattttgtcgcttatatcatcgccataataatatataattagtttaattctaccacgcccgtaattaagatgagcaaaaaatggaatttgattactttccacatgcgctggtgcttcctgaaatggagtctcgatcagtaaagtgaacgaacggttctttcggtttgatacatggaatttattgtgtatgtgttgtatctatgaatttaataaaaacttaaggataaggttttacattatgaggtacaggtactgcatataatcttctgtcagaaattagcaatatcgttgccacactcatccatgcacataaaggaaatattattaacaataaaaataacatatatgaagagataag

SEQ ID NO: 12973 - DNA, 343 bp, Glycine max
aactacaagccatacattgagctactgacttgctataacacgaatatcacagctagtatgtacacaaactacttccttcacaggtgaccccattcctacacccaataattaaaaagataaacacaaatacaagggaaactggagacatcatatttttgtgtgactgcattccaacacaatcatctacaggagcatattatatcttgccgttgatgattcataggtacattaaggctaattgtgtgaaaggaattgattaattgtagaaaagaacaaactacggttggcattaattaaacatatatgtcatgaaatgatacacgaataaatttctcaaactttt

SEQ ID NO: 12974 - DNA, 417 bp, Glycine max
agcttgatactcatatcaaaactgcaatttacaagtaaagttttgtattgtccctcatatcatgcagtgtaatattttgtgtcaaccatttgttatcgtcatatagatgttgatcatgctattattataagcagtgcaatgaagtcaacaaacacaactgcggatggtacaaataatccagcaactcctaagtggattgaagtcaaggttagtgatgcaattaatcattattttccagtattgatcttcaaatgataacctcaatacaattgttagatcgaattattatttatattgaatgtagagccatgttcaaagcagagggtatgagtgtggctactacgtgatgcattggatgtggaacatcatcagtgggggtttaaagaatgattggagcatggtatgttcggtttaaca

SEQ ID NO: 12975 - DNA, 317 bp, Glycine max
  unsure (1)..(317): unsure at all n locations
tctaaactntgtacaagaatgaagctctgataccacttgttttcaagtggcctcagatatcttaagaaggtggggttgaattaagatattccaaacttttctcctaattaaaaatctatcttactctttacttaagttatgaattcccttaatgacacatcttcttaaatattaattcaaatgaagcaacttgaattatgaatattaagcaataatcaataaaggagattaagggaagagaaaatgctaactcagttttatactggttcggccacacccttgtgcctacgtccagtccccaagcaacccgcttgaga

SEQ ID NO: 12976 - DNA, 424 bp, Glycine max
tgagcttgttcagcgaggccctttcagccaatgagtaggggttgatgcacttattacgagaagtaactcgcttattgcgtgaacaaagattcacttaacgcatagggcatgctgagcgagtggatggctaaaaaaatttctaatttatttttccatccacaacttcagagaagcttaatgaacctcatatccaaatgcaaaacatgctgatgattcattcaagcaatcacaaacaagtaatcctaactatatgcagtgatgaataaaattaaaaagggttgggttgcctcccagtaagcgctcgtttaacgtcattagcttgacgcatcttacttcatatgtcttgaaaatacatgagagtggtcatcctcttaatattccctccacgatactgctttaatctctaaccatttactacccatgg

SEQ ID NO: 12977 - DNA, 242 bp, Glycine max
  unsure (1)..(242): unsure at all n locations
atatcgttgctagcaagcagtatatcatcgacatataacaccaagaatgagtatttactcccgctaaacttgtggtatacacaatcatcaactgcattttccgcanaaccatatgaggtaatgacttgatggaacttgtaatactattgacggaaagcttgtttcaaaccatagatggatttattagtttgcaaaccataatttgagtcacttaatacaaagttttctggttgcatcatatg

SEQ ID NO: 12978 - DNA, 416 bp, Glycine max
agctttctgcagggaagctaagtgtgaagtatgcaatcctgcataggattggcactgccaactgggtacccaccaatcatacttccactgttgccacaggtttgggtaaatttctgtatgctgttggaaccaagtccaaatttaattttggaaactataattttgatcaaactattaagcattcagaatcttttgctgtcaaattacccattgccttcccaactgtattgtgtggcattatgttgagtcaacatcccaatattttaaacaacattgactctgtgaagaagagagaatctcctctatccctgcattacaaactgtttgaggggacacatgtcccagacattgtctcgacatcaaggaaagctgctgcttcacgtgctgtatccaaggatgatttgattgctgaactc

SEQ ID NO: 12979 - DNA, 318 bp, Glycine max
tgagatgaggaagtgtagaaggatgaaacttcctgcttttattcgttgaccacagagtggtacctggagatatgtcgcgggggtcaggagaccttgtggacgtcaggtggggtgctattgcccaaaaccaagcttgaccaatcccgacccaacccgggcatagtcagtcagtgagagcatgtgatgtacctaagcaggcaagctcttggcaatcaacagataaaagaaacaaaaccacaaagcaaagaggcttatgtggtggctggccaactgtgaactttgtttgatatgtgggttatggcctctggtaatcgatta

SEQ ID NO: 12980 - DNA, 441 bp, Glycine max
ctcgacccgggattgatacgtcacctgcggcatgcaagcttccttctcttctcggccctgttccttctcaatgtagcttcaatttctaagtctagaggaactaaattgcctatgggagatctatgcatataaaatactaacagacatagcggttatccaattcaataagagaagataaatatgaatagaaaacaaatattcacagataatcaaagaataacgaataaagaatagacacctaaaaataaactaactttccaaataaaaagaagttccctggcaacggcgccaaaaacttgttcgcttacgacaagtgcaccggattgcgcaaatagtataaaatggtaagaaccgagtatcgaactctcggggaacttgtgttacttggtaaagttatttcagtaaataggtgtctagtgtgaaaagagatgtgtttactat

SEQ ID NO: 12981 - DNA, 415 bp, Glycine max
  unsure (1)..(415): unsure at all n locations
tatgagaattccaagctntatatgcaaagagttaaaatttatcatgataaaaagcttccaaaaagggtttttcaacctgatcaacgggttttgttatttaatcctagattgagattgtttccaggtaagctgaaatccaagtgaactggaccattcatcatcaatgaagttatgccacatggagcgatgatattggaggacccaaccaccaaaaggacatgaactgtgaacgacaacagaatcaaacactacttatgtggtgatattgagaggctcaacactcttgtccaatttatgaagcctgaaccacaacaaggacgaccagcttaaaagatgtttaaaaagtgctcttgggatgcaacctagtatttctaaactttgctttaatttgagtgatctaactttatgccttata

SEQ ID NO: 12982 - DNA, 395 bp, Glycine max
  unsure (1)..(395): unsure at all n locations
agctnctttactgttggagtatacacaactgggagtaactcctcaacatgatcaagtggaagctcgttaaacagcctttcattcctctcctgcaacccagcatataacgaatggaaaacattaaaatccactcccaaaatttgcaaaccaagttcaaaacagaaatcttgacaaaaacagtacaaatgtgcagacaagtccaaatttatggaaacatacaaatcttcacagatttctatgaaaatgttttggagtcattattcacagcttatcttatgcacttgtcaattattgatgctgcattgtacgaatatttcagttccatactataagcataaaggtgtagcctacatctaatggtgtgtttggaaaggtgctgattgccgttgaatgcc

SEQ ID NO: 12983 - DNA, 336 bp, Glycine max
ttgtcatcagggatagactcagccttcttcatgctttttacgagcttctcagttaggtttccgttttcatccatgtgcatcacctcctgtattggatgcatgagccccttcattaacaaacaataagcattggtttcattgataagataagcaattcaagaagcacattggagggcaataaaccggttacagtaactatattttatttacttcgctaacccgcaattttctcgcagtgagagacatatttggccactttaatttgtctataactgtatttgtttcatttaagaatgtctcgtgttgctatggatgttacctattatgaaaaactcg

SEQ ID NO: 12984 - DNA, 398 bp, Glycine max
agctttttagatatgctttaaatgaaatcatagcatcaaaagctcttcagaacatgtttaaacaaaaagattattcgagtcacttttaaaaatatactgcaggatgagagatcgttttcagcatagaaacaatacatcattaagtgatgctcaatagttatgttttgcaactagaactcaaaaagtcaactattcattttttaagtaataatcaggggaacaccataattcttcaagtgaggagtaaggacatgtcaacaactcaagctcaagaattttaagaaatatcagagagattatggttcatatcccatttccaaaacagacttttaagttataagtctatgattaaagatgaagcctcactagaaaataatatacactaattgacaaatgag

SEQ ID NO: 12985 - DNA, 424 bp, Glycine max
tcatctatcgactcatcacaaagcttcatttggaagaatttgtctaataaggagacaacaagatatttcaagaaatatcatgtgatattagcgaagaagtgtatatgagaagtttaaaactctgtctttagcagaactttaaagttgatctactctcatacttcaaaagacatgaaaaaaaaaatggagtgacaagacagtaattcagaaaactcggcatacttcaagcataaagatagatacttctcctcacttaccatgcatgaaaagtacaaaaagaagagataaaaagagatcagttaaaatatgtgtaggaggtaagagtaaaacatgtgagttattataaatcatttgtatttgatttttataaataaaaaaaatgcatggaagagtaaaataatatttaatacttttaacatttata

SEQ ID NO: 12986 - DNA, 114 bp, Glycine max
agcttggtctaataaagtgatgcatctatgatacacaacaactaacaagtatgaaaattgtaaatatatattggttttagggtttacacacgaatggataaaaataattgtttg

SEQ ID NO: 12987 - DNA, 214 bp, Glycine max
  unsure (1)..(214): unsure at all n locations
ttttcaaatctcaatatacgttgcctattgtgagtatggatcttcatttggtaaaccatgaaacagatatcttaaggcgttgggtcctcctactgagtaagttgatgcaattaaagatgttnttctaattaaaatgttcttgtgtttctatgcttgaggacaaaaataccaaaactgatttcctcgaagagttggactaatttaaatcaaactt

SEQ ID NO: 12988 - DNA, 321 bp, Glycine max
agcttgatatgaggaagtgttgaagggtgaaacttcctgctttattgttgaccacagagtggtacctggagatatgtcgcgggggtcaggagaccttggggacgtcaggtggggtgctattgcccataaccaagcttgaccaatcccgacccaacccgggcatagtctgtcagtgagaacctgtgatgtacctaagcatgcgagctcctggcagtcaacagataaaaggaacaaagaccacaaagcaaggaggcttgtggtggctggccagctgtgaaacttgattgatatgtgagatatggtctctggtaatcgattacc

SEQ ID NO: 12989 - DNA, 356 bp, Glycine max
  unsure (1)..(356): unsure at all n locations
ntgaggaaattcaaacgaacaatacctttgactcggatgtcggattgagtcacgtaatatctcgagacgcttgaaattgaataccgaagctctgagcaaattcaaacgacaataactctttactcggatgtcggattgagtcacgtaatatgtcaagacgctcgaaatagaataccgaagctctgagcaaattcaaacgacaatacctattgactcggatgtcggattgagtcacgtaatatctcgagacgctcgaaattgaataccgaagctctgagcgaattcaaacgacaataactttttactcggatgtgcgattgagtcccataatatgacgagacactcggaattgaata

SEQ ID NO: 12990 - DNA, 320 bp, Glycine max
agcttgattatactgtagcggcacctaggtctctaggcgtgatcccggttatatgtgtaccctgcgtgaaagtggcatgcgctaagtcttgcacacagactacaagccgtagacaacacttgcaaaacctgtggtgccgacagagtgaaccttctcccattagaggcgtggcgctctctgaccactatacaagacggagacctcgtttgccaactgcattaacgaatccgtcaacacgaacaccttgctgacgtaccgcccgatgctctgggatgctgctagacccattattgtcaagtggatgtcttgcacgcgcttat

SEQ ID NO: 12991 - DNA, 95 bp, Glycine max
tgcgtgctagaccgtcgactatacacgatcgtgtggttctgatctccaatatttactgtagtgtgtcgcatcacattccactggctaactgtact

SEQ ID NO: 12992 - DNA, 293 bp, Glycine max
  unsure (1)..(293): unsure at all n locations
agcttcatcgtgtggaggttcccaaccctaattgtgagcggcatgatagattccgctgttgcgattgcggtcacatccatgccggtgttgagtaagtccacaatggcatcggtgcttccgacagcagaagcggcgggcgctggagcacgaacagaggcggtggcgcataagtgtctgtttccgacatgggtatggaagacggagcttgttantgttggggttgtgtggaggtnctaggagggtggttataaaatgctatggcgttgtaggatctttctttcaagcttttgaat

SEQ ID NO: 12993 - DNA, 347 bp, Glycine max
tgtctctcaacactacaaagctattcacctttaatccttttgtaaagatatcttccagctgcatttcagtgctgcaatacctcaaatccagctgcttcttgctcaccttttccctcagaaaatgaaatctagtctcaatatgttttgatcttccatgtgctactggattcatggccaaactgatagtagatttgttgtctacatacaatctaactggcctctgaatttccaccttcaattattcaagcaagaagtccaacccacaaggcttgacatgtagcatagcaagatgctatgtactctgcctcacatgaggataaagccaccacttgttgtttcttggaaca

SEQ ID NO: 12994 - DNA, 214 bp, Glycine max
  unsure (1)..(214): unsure at all n locations
agcttctcatccaacttggctttcttgtgtgcttcggccaaggatctttttttagccttattaaaggttgtagcttcttttctaatgatgggggatagagaaggtttggattaaggggtaggatgaggtgatgactaangtggaagggctaangaaggtgaaggtttgaggtgtcaaagttttaagaatcacatagtcaaattctcggtctttt

SEQ ID NO: 12995 - DNA, 389 bp, Glycine max
  unsure (1)..(389): unsure at all n locations
ntagcaactctttctttntgtttagtcaaaacctctaatgctcttaatctctcctcatctaaatcaaccaactcatctaacatcattttccaataatggtcgattggaatgtccatttgtttttgtaccctggctgattgcaaatgtatttcgaccggaagtacagcatcatgcccataagtcagtcgaaatggggtagtattagttgattccttangagaatttctacatgcccatagaacttgatctaacgttttattccaatttcttggcttttgggcaatgtgttttttaatcaagttaattacaatcttattggctgcttcgaacctgaccattgcttgcgcgtaatatggtgttgaggttaataatcgaaagccagttttttg

SEQ ID NO: 12996 - DNA, 396 bp, Glycine max
  unsure (1)..(396): unsure at all n locations
agcttgcttctacaattgggactttntcatccccctcaacttaggcctctattaggccatcaaatcctaacgaaaatatgtcaaaataagatacattgtatgcgaatcaaaacccctaacactattctaactaacaactaacctaacatcatgcagtcaaaatgaaaaacaaggttaaatgaagcttacttggatcgctgaaattggatgcaaagaaggaagcaaggagaacaagcaaagagtgagagcacaaagaagagagaaagctccaacgaaatgccaaaatgtagtttaaaagcacaaatgaaaatgtaactgccaaaggcagttatgccttatttttggtggtttcgaatgcctcgcttagtgcgtcaactcgctaagtgagcatacatg

SEQ ID NO: 12997 - DNA, 331 bp, Glycine max
gtctctaagatctaaacatttacctacagttgaagatgatatgtacatattaaagacttttacctacagttaggagatgtaagtagaagttaatgacttttacctacacactatacatagtaggtaaaacctatagtgacagacaattagccgtcattatatgtcgctcaaagttgacggaaaaaacgtccgtagaacaaagtctatcatacatttacctacggattttttatttatagtgacagtttttgtctgtaagtataggtcatttttcttggaataagtttgaagctgactagaacaagaatgcaggggatgccaacatgctatc

SEQ ID NO: 12998 - DNA, 416 bp, Glycine max
agcttcttagatatgggcaaacatggaataagctttacttattggatatgttttatgttattgtgagatgttcaagcagcttaaatacaacacatccacaaagttgttaatcttgtgacctgttaaagagcctgtgctttgaggatcattatagttgtagtttatttagttagtggaataaatattggattcactagatatataagttcttatcatggttatacttgaactttcagttcaaatggagaaatgattggttttgttctctctctgagaaggctactacccaaggcaaggtagacccatgccctttgcattcccaatggctaaaagagttgagaattgtatgaagcttgaactctagtgtgtgtgtgtatgtgatgtgtgcaataggttaacaacttctaagagttatg

SEQ ID NO: 12999 - DNA, 346 bp, Glycine max
  unsure (1)..(346): unsure at all n locations
tgcctaattaacctgaaattgagaganaatgatcattttacacacaaaatgaaaatactaagtatttattacctatacttaacagaaaatacttataacactacaaaataaccataaattgggagagtttgatacaacttatacaagttttatacacaaaagttagtcgttttcatcgactaacaacgacccaccaacggaggatgatgctgatactgatgaatataggaatctagacacaccatatcaatatcaaaataccgatttgggcaatcaactttcaacttacatggtgctttctttaattccttttgattgaggggagaatctaaacttacaaattaat

SEQ ID NO: 13000 - DNA, 422 bp, Glycine max
  unsure (1)..(422): unsure at all n locations
agctntgatgatatggtcttcaccgaagataggatcaaagtgggtctaaaaagagtcaaatctgatcatcatgctttgataaatgcaaaaaaaaaaaaaaaaaaactagggcaaatgaagagggtgagaatgagggagaagcccatgctgtgactgccattcctatacagccaagtttcccaccaacccaacaatgtcattactcagccaataaactaaccttctccttacccaccgcccaattatcgacaaaggccatccctaaatcaaccacaaagtctgtctaccgcacttccaatgacgaacatcacctttagcacaatccaaaaacaccaaccaagaaatgaattttgcagcgagaaagcctatagaattcaccccaattccagtgtcctatgctgacttgctcccatatctacttg

SEQ ID NO: 13001 - DNA, 411 bp, Glycine max
tgaaatcaggtgcagccatttcccttagagtcctctcacgaggtggaggttgtgccatgttctcagaatgtgcaaaatcagaatgctcagaatcagaatgctcaaaattataatgctcaagatcaggatgttcaaaatcaccaataacagaatgcacagattcaccagttatggaatgctcagaatgatcaaaaggtataaaatgatgcctaactaatctatgaaatgtcctatctatctcaggatcaaagggttgtaagtcagatggattgcctctagtcatacactacattcagcatgcacacaactagttgccttgtcatgtaaataaaggtgtaggtttgaactacagctaccctcaaatgatatccaaatgactttgaaatttgtgagcaaccttataaaatgatg

SEQ ID NO: 13002 - DNA, 415 bp, Glycine max
agcttgtcttaaagaaaatgatagaccaatatttgtatcttggaattggctaattaaaaacaagtggagtggttcaaaatttcaggtaaagttatcttattattttgaacataattttttaatagttttatgcttataatataaaatcatttatactttgatgtaagaaagaagtttgacaaacaaagctaatcgaagcaagtaagaaataaaatcaattattggcacaaaatcaatcatgccaaaggcatttgaaatggtaacatcttttaatattttatattcatttttttacaagttatataataataactctttttttattttgcgaattttttatatgatatatgaaaggttggtgaaatttatataaaggcatcatgccttacattatatatggtttatattaattaaa

SEQ ID NO: 13003 - DNA, 410 bp, Glycine max
  unsure (1)..(410): unsure at all n locations
tccttgagaaacttccttgagaaacttccttgagaagcttccttgataagattcctagagaagcttgagcttagctacacacacatctctaatagctaagctcacccccatgccaaaaatacatgaaaatacaaaaaagtccctactacaaagactacccaaaatgccctgaaatacaaggctaaaaccctatactacaagaatggccaaaatacaaggcccaaaagaaggaaaaacctattctaatattaacaaagataagtgggctcatgagaatcctacggccttcccttggatctctggcccaatttacttggagtcttctatctaatgcccttacgaggtangattgcatcattccctccacctttgaaaggatttgacctcaaatcccgaggtcttcatactct

SEQ ID NO: 13004 - DNA, 383 bp, Glycine max
gataggaaagtgatcacctcatgataatgtctaagagcatatactgttattgatgagggaaatgtaagtggcgactgagagtttctactatcatttgctttagcttatagtatacttcacaactttctttcttttctatattaacaacatatggactgtgaaagggaattcgtgaaggcgcgtgaagatgaaggtggaagaacagtggacattatgcgcattattttaacttatgggcttgatgcaattatgtacttcattataccatcgccaagtaagaagcattataccctatcgcctttattcctatatgagatatgcttggccttctcttactatgttaacaatccagcccatcatctattatagatagactgttccat

SEQ ID NO: 13005 - DNA, 245 bp, Glycine max
  unsure (1)..(245): unsure at all n locations
atctgagactntntgttactaggatgccttccatttcatgccgctaccatcatggaggagattcaggtaaaacatcctacttataacaggttaaccatgtggctttttactgaaatgtgtctgctatgtctatccagattgaattgattcccttggttacgcacttggcacctacttaaaaagaccatcgatctaaaataccttctgtatctcgttcctgatgcactttagcgattctttactca

SEQ ID NO: 13006 - DNA, 432 bp, Glycine max
  unsure (1)..(432): unsure at all n locations
tcgtcccggatccttaagtcacctgcggcatgcaagcttttgatgatgaatcaagtatgattcaagtagttttcatgatgacacaaagcccaaaagaatgatgtcaatattgagtcaacaagttcaagaaatcaagaagattcaagattcaagagaagttgatttcaagattcaagattcaagagaagttgatttcaagattcaagaaaagacatcaagaagaatcaagattcaggagaagatgaattcacaagggaagtattgaaaaggatttttcaaaaaccaaacatagcatagttttgttntacaaaaagagttttcttaaatttttctaagttaccagagtatgtactctctcgtaatcgattaccagtttcctggaatcgattactagtgataaaatttgatttcgaaaagctttaactgaatttg

SEQ ID NO: 13007 - DNA, 278 bp, Glycine max
  unsure (1)..(278): unsure at all n locations
ttcaagaacaatataattgattagattattcatgttatcgattgaagtgttcttgatcacttattgttagtcggttaatacgactaactttttgtgtaagaaattgtataaattgtatacaactcctcccatttatggctctttttgtaatattgaaattaattcttgttaatataggtaattagcactcaatatcccaattttgtgcatttaatgatccttccatctcanattcacgtgaaataagcaagattggcgaagtgtaaaattgtcaactc

SEQ ID NO: 13008 - DNA, 400 bp, Glycine max
agcttgttagaaaaatgggaatgtaacattcccatgtttacattcctaggaaccaactgttaatatgttaaacaaacacactcttaggaatcatatatcatgggaatcatgatttctaggaataactaaaatatgtttgattcattattaatattctcgagattatttaagggacatttgtttcatagaatcttcttacattttaaagaatataatatgagaatatcattcttgggtatttgtaagaaaaaaaactatgtttggttacattttaatatttctagaaatattttttaagattttaaatgatctaaatgaatgttactaatatttttagttgtaactttttttatatctaatgttgacttattttttatttttttcatcttcgatattttgg

SEQ ID NO: 13009 - DNA, 416 bp, Glycine max
cgacactatgaaactaagcttgcacaatttccctaaagatttggtagaaatgaacacttggaaccgtgtttagtgtcactattcttgcttggaacctaagtaaaacatacaatatggacaaattgatttgaatctaaaaaatagaataaaattgataaagaaggataaaaattatattatctaaaaaaattattcttttcttaatttacaaaatataggatcgaattgatttgtttgagtgagcatttataaaattgatatttattataattattttgaattaaagcgatttatctttgaatatttgtataataaaaataaattataagagaacttaatataaaattttatatcaacattaaagctactcagattatttcaactcaaaattaattttaaagtcaaattaattctat

SEQ ID NO: 13010 - DNA, 400 bp, Glycine max
agcttcttatctgattctctctgaaaatatattttcagatttgttttcattcttatgtgaccaaagcacagcttcaaatttggccactttagatttatcacgcaatcaaataaaggggcaactgccagattgttggaaatcagtaaagcaattactgttccttgatttaagcagcaacaaattgtcagggaagattcctatgtccatgggcgcccttgttaatatggaagccttggttttacgaaacaatggtttaatgggtgagttgccttcttctttgaagaattgcagcactttatttatgctggacctgagtgaaaatatgttgtcgggtccaataccatcatggattggagaaagtatgcagcaattgataatcttgaacatgcgaggaaatcac

SEQ ID NO: 13011 - DNA, 392 bp, Glycine max
  unsure (1)..(392): unsure at all n locations
ttgtctncattttttaaacaactntaaaaaactaaatattatangtgttaggattttaaaggaaggaattccttggggtttcaaagaagaccaaaacataactagcaaatgaatgaatcaattagtttggggttgttgtaatttaactaatgtcagagtccgagttttaaatgtaattgtgtcaaataattagaaggagaactttgatgctcagagtaatcctacccaattcgaacaaagattatctccctcgagcatatatgtcatctcaaactaaaagaagactgaaaaatattttccttgtaaccaaagacgaattgtaaagtatacttgattgttgtttatttggtctgctaatatcatgaatgtgagtagttctcactttacttcac

SEQ ID NO: 13012 - DNA, 327 bp, Glycine max
agcttagcaaaccaattccctgaatattttggagtttttattagtctcttaacaaaaaattgatcggtgtgaatccctgatcatccgataacatttttagttctttgctgttaaatttcgccaaactctcttaagtgataatgtgacatttgttctaatgatatttaattacatttttccgcgttaattttctgaagattcaaaacggcaagataatgcttgatttagtgtttaaaatgtcattttacggtgttagagtcatttgtttaacatgctggattcagtgttaattttatggatctcgcgacgcctatcgaaaaattggaa

SEQ ID NO: 13013 - DNA, 323 bp, Glycine max
  unsure (1)..(323): unsure at all n locations
tgtagggttcaccccaaattccgttgtcatatgctaaacttgatcccatatctacttgataattcaatggtagccataaccctagccaaggttcatcaacctccatttctccgagaatacgactcgaacgcaatgtgtgcttgtcacggagaagccccggggcgttccattgagcattgtanggctctgaagtgtaaggtgcgaggtctaattgatgctggctgaaatttgaggagaatcgcgtgtaaatcctgacattgacaagagatgccacacatggggcaattttgaaagctggtgttaggtgtccctaatgactcatc

SEQ ID NO: 13014 - DNA, 399 bp, Glycine max
  unsure (1)..(399): unsure at all n locations
agcttctacttatgtggcagggcgggcttccttcactttcttgtctcaatcgcgagctttgaccaccgcccttccttcccatgatgcttccctttacatctgcctgagtgggcttatagcctaaaacatacttcccacgatttcctttggcatttatcaggctagatatgccgccgttgtctttgcctaaacccattacgggttcgtaaccgttccccaacataactcgggccatcattactgctgcatcggacaggcaagcttgcccagagaaggagtccacggaggaaatgcttaccacctcanaagactggaaagcggtttctaatgactcctttgcggctatcacataaggcatagaggatgggcagctcaccaagatgtcttcctcgcctgata

SEQ ID NO: 13015 - DNA, 318 bp, Glycine max
  unsure (1)..(318): unsure at all n locations
tgtcggctcatgcggagaacgcctctagttcaacacccgtgcagtctaatgcacccacccagagggaagctccccaagttccaactccgaacacgactcgaccggccggtaattccaacacgacaaggaacttccctccgaggccattgccggaattcaccccgctcccaatgacgtacgaagatcttctaccatccctcatcaccaatcatttggccgtggtaactcccggaagggtcctcgaaccccctttcccgaagtggtatgaccctaatgcaacttgcaagtaccatgggggtgtcccggngcattacgtcg

SEQ ID NO: 13016 - DNA, 356 bp, Glycine max
  unsure (1)..(356): unsure at all n locations
agcttcatcctctatagctttttctttactagagaacactcgggattcaggggtaatttatgttgcatgatgtcgagacttaagccgggaatatcttggtatcaccaagcaaagatatcttggtagtctcgcagcaaagccaccaattcatcccggatatgtgtggacatgcccatgccaaccttgagctcttttctttcctcgccaacacctaagnttacgatctccaatttttcttggtgtggctctacttacttgtcttcctattcgaccattctttntagctctggnggaagccccctatcctcatcttcctcttcctgagctngattaatagttgctcaaaatcaacgtct

SEQ ID NO: 13017 - DNA, 417 bp, Glycine max
  unsure (1)..(417): unsure at all n locations
tatagttattggagggagaataaaacaatccaaaatcaattgtacccttcaagtaacgaagaattctttttgcggctcttagatgaggagaggtaggagccttcgtaaagcgacacacaactcccaccgcatatagaatatcgagccttgtattggttagataccttaaacttcccacaagactcttagagaccatggagtctaccttctctccttcatcaaactttgataacttcaagccaccttccataggtgtgttcacgggattgcaatcaagcatattaaatttcttcaacacttcttttttgtagctgtcttgtgagacaaagataccattctccgtttgcttcacttncattcccaagtaatatgacatgagtcccatatttgtcatatcanattcacgagacatgaact

SEQ ID NO: 13018 - DNA, 286 bp, Glycine max
  unsure (1)..(286): unsure at all n locations
agctntctcgggaccatttcctgtgaaacacatttgtaaagtcagttccagaaatagcgatgtcaataaaaaagggcatacaacctcctccaataaacacaaacatcaatgtaaatntagagcaaactcatacacacatttccttgagaaaacacattcatgaacatacatgcgtgcaagatattntgctacctaaataaacacagaaattaacaaggctcttgctatctacattaataaggatattntttttgctaccgaaaatacatttcatgcatattcaagt

SEQ ID NO: 13019 - DNA, 354 bp, Glycine max
  unsure (1)..(354): unsure at all n locations
tttggagtagaaacatgggaccaactcattntatttcataaaaagaaatcatatctagtcaaggtctgagagaccatacaagtttcctaacgatttctaattatgtgggccattaagtctatcatatgctgacaatagccgagaagcccatgaatctcttcggcggcggagtaggtgtctgccatcgccttggccttggctaacaatcggggaagttcttgactcccgttcaaggtaagagcaaaccgatccatccacatggttgcctcttggtgtaaagagtcgatcacccttcctctagcctctntttccgcatatacttgagcatactcatccgcgattctatgctcgtgg

SEQ ID NO: 13020 - DNA, 419 bp, Glycine max
  unsure (1)..(419): unsure at all n locations
agcttcagactttnttcttttctcagtttcatcaactgcatcttgtagtttccacagcatttcctcactatgcttttttgacaaagacagctgttgtcttagttcttgcaactttgattcatattgctccttgataaatgcaattctcaaggactcctgcatagcaaccggtggtccttcaggtcctcttctgtcatgagcattagcacactcagcctctgctttgtctttcagttccttcaaatgaatagacaaattcttaaactcctctgttttcaaaacttgttcagcaagcctcttggtaagttcattgcattggttctgcagccttatcagctcattatcagattgttttaatgaagtgaatgcagtttccagttcatccaatttgcccaggagaactatacacttgaattctg

SEQ ID NO: 13021 - DNA, 358 bp, Glycine max
  unsure (1)..(358): unsure at all n locations
tactaagctgcttacgtatcttgttaatcaattctgcaacctcttcttctctgatgagactaagtgactgcacccttttggggctcagaagctcaaggacacatatttttcttttgtgtttccagctntctccataggatgcaaaaccaatgtcattacatccatacagcaaggtttttgctgctgtggttttgggtcggtttgagaaagttatgtcgtgagttttcatgatttccctgaccgcgtctggagatgaaaccaccaaggctcgagtctgccccaactgcaacaacatcagagaaccatgcttttgtgagagggttctaagagaatggtatggcaatttgcttagttgatg

SEQ ID NO: 13022 - DNA, 419 bp, Glycine max
agctttttgcgtatgtatctcgttttctttatcttattcatgatgtaattactcttttaactgttatattaaagtcaacccccctccccattccattttgaaattaatttatgtctttgttcaaggtgataagtgtataatttagcataattttaagtgtttgaaaatacttatgaattaattcgagcagcattgattaaaaaaaattcaaatactgattagtgtcctaggaatattaattaaaaaacttaaagtataaataatttagaaggcagaaaattacactgcccattatgtttttttatgctttatcatgatttatacaatatattttcttttctatatatatatatatatatatatatgagtcatttacctaattaatcaagattaaaaaaataattaatttagttgatatc

SEQ ID NO: 13023 - DNA, 331 bp, Glycine max
  unsure (1)..(331): unsure at all n locations
tggagattcgatattgttcttcccatgcatggccaggtctgcttcacgtaatccttcaaacgtgtggggatgttaacttgcctcttgngctttgctatttgcaactcttttctgctaacctcactgttggatgtatcacccaacatagtttatttgaagaaaaaaactgagttagattcataatcagtgaggataaaggctacagtgggcaaactaatgaattttcttagttatcaccatggaaaacaatctatattcatttgatatattattttttattattaagggttcaattntttttcttttctattttttttttctttccctatat

SEQ ID NO: 13024 - DNA, 421 bp, Glycine max
  unsure (1)..(421): unsure at all n locations
agcttagcgaatcagcctcgcttagccacatgaatcccagcaagaggatgagtgtgcgtccttaaaagatgaacttgcttagcgcagtatgcgcgcttagcgagttctttcgaaaacacatatattcaatgaatactgatgaactcgcttagcccagcaaactcgcctaacgagttcatcacattttccagaaaaaatgcattttgttttcttgcactttttttagcctctaaaaggaaaatcaaacatgcaaaccaaccaaaatggcttctacagtacagacatatataaagttctaatcttttacttcttctaaaaacattaaaaccttaagaatctaaagctaaatttaaggttttctaaccaaaggtttaatggaataaaagagaatatagganatgggaaacttacttgaatcttt

SEQ ID NO: 13025 - DNA, 418 bp, Glycine max
  unsure (1)..(418): unsure at all n locations
ntgagccaaaatcctgactcaccataaaccttgacccattgtgagaatgtcaatccttaccctcggaagcaaaaaagaatagaagggaaatttccaatcaaagaaaaagagaaggaaaatttccaatgaaagcaaaaaagaaaagaaggaaaattccccaatcaaagagtgggagaaagcaaaaagaaaagaaaggaaattcccaatcaaagaatgggagaaagtaaaaaagggaaggaaagatagttcttgaaggaaaaacagaaggaatatgcagagaggtctttggaccggacaatatctgaacaatacagaattgtcaccaaatgaacgaaaaaagaaggagagggaaccacgacctaaaatagtcttcttcctttgattaccaaccaaaatcccgtgcgctagcgactttttt

SEQ ID NO: 13026 - DNA, 419 bp, Glycine max
  unsure (1)..(419): unsure at all n locations
agcttcggaagaaagtggtgaggtacaagtcctaaaggcaaagcttgaaagagcccgggtagtcaaagagaagttcaagtccatagccatcaaagtctgaagagagtatgatgaactaagggacgtcaatatggccaccgatgaagccttggaatgagaaaccaagaaggcccgaaaggaagaacacgaccaaaacaagttttgaggggctttatagggcagcaatagtgagctcaagctcctaagaggtgaaaggaatcatcacgggtcaaaggcatgatctggaaggacgagctaaaggcttgccttangtcgaaaagaaatttgtcctaatagttaaagtgagactgaagggaatatgtgggccatcatcaatgagtgcaaagagaagctaaatctagcggcaactcacgagcaaa

SEQ ID NO: 13027 - DNA, 399 bp, Glycine max
  unsure (1)..(399): unsure at all n locations
tgtgactcttggcaaattctntaaaactagtcaccttttataaattgtgactctnttgaaaactagtcacttaaaaagttgtgacttttgaaaaaatcttcagaaacaagtcacttgaagaattgtgacttttgtaaatttttttttcgaaatcagtcactggtaatcgattaccatgaaggtgtaatcgattacacatcaacagatgtgactcctcagtttaagttttgaaaatcaaaatgtttagaagctctggtaatcgattacatattttgtgtaatcgattacacaagttcaaaatgatttgaaaatgtttaaacacaagttgtcactctttgaaattgaaatctaacatttaaaaacactggtaattgattacatactcatggtaatcgatta

SEQ ID NO: 13028 - DNA, 420 bp, Glycine max
cgcgtatcctcttattaccgcgattgtgaacaaaaaataaaagaaacatttattttgaatacagagtgttattagcatttcacttgttttcaacacaagaagattggtttagtatgaaaaaaacaattttatggacaggctgtctgcaactcacatggtagtgggggcagtttccacgtgattcaaaaccagactgccaatggaatctgtttacttgggccatccttacgttgggattctaatctcttttttttttctgtctttagatctcctcgatttacttcttttctttctattctatttaatgggcattaatgcaacaaacttttaaaatataataatactattccattatttgtatcactctcactattttgtttcttcttcttataatacaccttagattcatgttccttggtg

SEQ ID NO: 13029 - DNA, 312 bp, Glycine max
aaatgagacacacttgagcaacctttttataatataggacatctcttatcctcgaatgaaatttcatctttatattagaaaaactgatcttatccccttggtgtccttcacaattaaactttcttcatgaaaaaataccagaaacaaaaaaataccttggaccaaccatatttgaagctatcatttgttgggacaatgccccttttgtgcaaagctgaggtagcatcggcatccatgacaatggcaccagcatgttgctgacaacaaatgaagataaatgagagagaagcagagaaaaagactggatgtctt

SEQ ID NO: 13030 - DNA, 349 bp, Glycine max
taaagaaatttcatgaagacttcattagaaggaacctacattaaaataggttcttcctcaataatatcataatgaatttctgatagacctttataagctatttagatttgatcatcacaatgaatacttcagaacaaacagcaaatatgtcaagtcaagtaaggtgccatttatgttttgaacttcactttatgaagttacaaagccaagggctccacttccaatgactaatttcttggggtgttttaaagacctgaatgaagcttttgaagatatcttgaagtaatcaaaaaagagaaaattctcccagttgtcacataacatatagtttgacttgtggggtttatat

SEQ ID NO: 13031 - DNA, 148 bp, Glycine max
tgaacaatacttgtaactgtgatacgaaactgcaaacttgtgggcttcccaaaactgagcctcgcattggagactagacataccaatctaaatcacttgtttgctatcttgtgattacactgagcacggacaatgatattatagctag

SEQ ID NO: 13032 - DNA, 347 bp, Glycine max
agcttctgtattgaatttcgagcgtttgttcatataacaggagtcaatcatacatccgagttaaaagtaattgtcgttcgaatattctcagagcttccgaattcaatttcgagcctctcgatatattacaagacttcattataaatccgagtaaaaaagttattgtcggctgaatttgctcaaagctacggtattgaatttcgagcgtcttgatattattaaaggactccatgagacatccgagtaaaaaatttattgtctgtagaatttgctcaaagcttcaacattacatttcgagcgttgcgatatattaccggactcaatccgacagtcgataaaaaattact

SEQ ID NO: 13033 - DNA, 308 bp, Glycine max
cgcttgagccaattcaaatgacaataactgtttactcgaatgtctaattgagtcccgtaatatatcgagacgctcgaaattgcataccgaagctcttagtaaattcaaacgacaacaactttttactctgatgtccgattgagtcccgtaagatatcaaaacgctcaaaatggaatgtggaagctctgagcaaattcaaacgataataacttttaactcggatgtctgattgagtcctgtgatgtatcgagacgctcgaaattgaataccgaagctctgagccaagttcaacgacaataactttttac

SEQ ID NO: 13034 - DNA, 337 bp, Glycine max
gggatccttgagtcacctgcggcatgaagcttcttacatagtccgcctttgctttatcttctttatgcttaaaaacagaaacattaggcataggcaaaagatcaagaggagttagtgggttaaaaccataaacagcttcaaaaggagaacaattagtggtgctatgaacagctctattgtaagcaaattcaacatggggtaaacaagcttcccaagtttttaagttcttcctcaaaactgtcctaagcaaagttcccaaagtcctattaacaacttccgtttgtccatcgggttgtgggtgacaagtgtgtgaaaataacaatttagtgcccaactt

SEQ ID NO: 13035 - DNA, 411 bp, Glycine max
  unsure (1)..(411): unsure at all n locations
tctcccctattntgctataaatagggggataagtgaataataaaagggttcagcccctgaggtacttctctctctctctctcaatagctgaggaaaattagttccatgaagaaaatccaagccgaggcgcttccgtaacgtttccgtgagtaattacgcgaagattctcgaccgttcttcaagattcatcgntcgttcttcgttttcttcggtcttcaacgggtaagtacctcaaaccaagcttttcaattcattctatgtactcgtggtggtccacattttgtttcatgtatttttattctcggtntcatttactttttatacccccttttgacgtgcttaagccatttatttaagtcatttctcgcttaatctaaaaaataaataaactttcaccgatcgtttgaattg

SEQ ID NO: 13036 - DNA, 403 bp, Glycine max
  unsure (1)..(403): unsure at all n locations
agctntgcataccccgaggatccattatgaaattacttgtgaaagagagccatgagggtgggctcatgggccactttgggatagacaagacccttgtcttactcaaagaaaagttttattggccccatatgaagaaagatgtccataagcattgcactaggtgtgtggcttatttacaagccaagtctagggtgatgcctcatgggctatacacaccattacccatctgcacccgtggtagacattagtatggactttgtccttgggcttcctataatccgaagaggtgtagactctatctttgtggtggtggataggtttagaatgataaaagtggtggataggaactaaacttcttttctctaccacttgtcatccacaaactgatgggcaaacaaaggta

SEQ ID NO: 13037 - DNA, 363 bp, Glycine max
tctccttcttttccctataaataggggaaggagggaagatcaaaaatgttcaaccctcctggtatttgagaatcacttaaaattagtgagaaaaattgtttccgtgaagaaaatccaagccgaggcacttccgtaacgcttccgagacatttccgtgagtgatttcgcgaagattttccgccgttcttcgttcgttcttcttcattcttcggtcttcaaccggtaagttcccaaaatcgaacttttcaattcattctatgtacccttaatggtcctcatttgtttcgcgtgcttttatttttatttcatttacttttcgtaccccttcttgacgtgctttagtcatttattcaagtcattttc

SEQ ID NO: 13038 - DNA, 276 bp, Glycine max
  unsure (1)..(276): unsure at all n locations
agctntgtggatttggtcttcgccagtgtaatgatcgatgtgggtccgaaaagaggcaaatttgatcatcctactangacaactgagaaaattggggcaaatgaagagggtgagaaagagggagaaacccatgctgtgactgccattcctatacggcgaagtttcccaccaacccaacaatgtcattactcagccaataacaaacctcctccttacccaccaaccagttatccataaaggccatccctaaatcaccacaaagtctgtctaccgcac

SEQ ID NO: 13039 - DNA, 317 bp, Glycine max
  unsure (1)..(317): unsure at all n locations
nttctttcacaatcaatctgtctactatactaacaattctaaatgcaagttcacattcttgttctttcttggtctaacatgcacacttgctcaaactcatgaaaagaaacacaaactccattacaatcatgcgttcaatttaaaataaaagcatacacccatttttcacaaatcaataaaagtgcttcactaccatgtcataaaaaacaaagttaaactattcaaaatgcttcagaataagcaaaccaacgattcataaataaaactaacaaaaaggaattactgtactaaaaccataattaaaataaaaataaatc

SEQ ID NO: 13040 - DNA, 190 bp, Glycine max
  unsure (1)..(190): unsure at all n locations
agctntactgaagcatataggacttgattttcttctttttttctcttccgtctcacccgtattaagttaattatgcttattagagtttatgggagatttacggaagcattacgggtgtcccggaagccccggaatcccatttttcaacaaaacggggggtgtggtggccatctagctcgcccaggcgagc

SEQ ID NO: 13041 - DNA, 388 bp, Glycine max
  unsure (1)..(388): unsure at all n locations
tcttatccaaggctcatcttggtggtgaaactctntcttccatggcttattccctagtggatggcacctcctctcacctcttctcctttgtcttccgctgcatctccatggtggaaaatcaccattaaaggacctcattgaagctcanagatccagcctccatagaagccccacaagcaagcttccatcaggtcccttcctagggaggatagcatcagagagcatttgataattaagttctcttagaacatctctatcttacttttcgaagtcagacacacattatatagacccatngtgccttttcnaaatggtttgaagagatgtgtcntttcaaaaagttttcttgaatttctcactagtatcgatacaggttctggtatcgata

SEQ ID NO: 13042 - DNA, 338 bp, Glycine max
  unsure (1)..(338): unsure at all n locations
agcttagaggtttgtctagttctcatcttggatgattcttccgagagttgagggatttcanggatggtcgtaaactattaatcttacttaataattcaatgttgctatcacctatctcctccctaggggatttttgtttcctaagctctctaaatttttgtttggctttttcgctaacctttagagtgcgtttggataaagaattttaactgaggaaagtaatttattagagaatttgaacttctgtaatttagaattcattgtttggatgctttttatgaaanattaaaattttggattttaaacagaatttaaacactanaatctggaattcaatt

SEQ ID NO: 13043 - DNA, 346 bp, Glycine max
  unsure (1)..(346): unsure at all n locations
tcttatccaaggctcatcttggtggtgaagctccttcttccatggcttattccctagtggatggcgcctcccttctcctcttctcctttgccttccgctgcatctccatggtgaaaaatcaccattgaaggacctcattgaagctcanagatccagcctccatagaagccccacaagcaagctntcatcaagaaccctanggccttctttagcagctctagcccaatcctcttggaggcttctatccaatacccttgggggtaggattgaataaaaacataagggcttgggatcgatcttgcaccccattgaaggatggcaatggattgtcacactttggtatgtg

SEQ ID NO: 13044 - DNA, 54 bp, Glycine max
gcatgcaagcttaggaacccaaacttgtagcttcaatgcatggaaacatgctta

SEQ ID NO: 13045 - DNA, 429 bp, Glycine max
gacctaccgcatgcaagcttgttatctttagtattccaatcaaatttttgaagatagacctagtatgtagtgttgtaatattgacttggtcgagatgagataataggttaatagattagtaatcaatttaatatgtcattagttgatctgatatatatttaaaaaattaaaattttataacctactttaaaagagttaaaaaaatcatatcataaattaatataatttcactctaaaacatattggtttaattttttattattactcttcttttgtttattatattatatgttttgttttatttcatttattttacaataattatttgttatgtttcaagtgaattattattattatgattaagtttattagaacttgtttgttatttaattattattttggtttgttatcattcctttcactatgtta

SEQ ID NO: 13046 - DNA, 411 bp, Glycine max
  unsure (1)..(411): unsure at all n locations
tgcacagagccacatcaagctgcaatttctaacatcatctactattccaactcacgcagccttcttaattntcttagccttcacacctttcgtagcctttacacttttagtagcctttgccttcacttcctctcgcttcttcttcttcttcttcactcctgactctngatccttaacaaccaactcacttccactcccctcaatcgcatctcccttaacccccccaacagacaagcccttcttcttcttcttccccttggcagtcaactcattaaacaccaacttcttcaattgctcaacaccactcaactcactcgaacctcctttcttcctcttcttactcaccatctcatcttcactatcatcgctggccaatngatcttcaatctcatccatgtacctaacctcatg

SEQ ID NO: 13047 - DNA, 406 bp, Glycine max
agcttccttgagaagctagaggggtgggggacacacacccctccaatagctaagctcacccctttgccaaaatacttgaaaatacaagaaagtctctattacaaagactacttaaaatgccctaaaatataaggctaaaatcctatactactaaggtacccttaacttgtagggcagggtgcccttaatttgtagggtaccctacaaacctaaaaatgccaaaatacaaggcccaaaagaaggaaaacctattctattatttacaaagataagtggctcatacttagtccatgagcctaaaatttaccctaaggcacatgagaaccctaaggctttctcctgcatctttggctcaatcttcttgtagtcttctatccaatgcccttaaggtaggattgcatcatcc

SEQ ID NO: 13048 - DNA, 418 bp, Glycine max
  unsure (1)..(418): unsure at all n locations
tgtccnctatnttcatataaatagggggagaagtgaatggaatttaatgttcagccctcctggtgtctttcttccgtaacgtttccgcgacagttggcgactccactgggaactattttttgagagttaggccatttaatcttgtgcaatgttttatcataacatcctcctttgttggtttccctttatttttcttatgttcttgtgtaaataactctttgatgcttttagtgtgttttaaaaggtatgcatgaggtaaacaaattttcatttgatgcacacaaacaccaacactatttgcacacacggtgattngaaaaaaggccctatacccgggttcgtgggaacataaggagtggaggtgaatctgtgatcatgctangtctccgactcgcttgattcagtgaaccctcatcta

SEQ ID NO: 13049 - DNA, 424 bp, Glycine max
  unsure (1)..(424): unsure at all n locations
agctngcacatttacactaagactcactcatatcagatcactaaaagtatttgacatgttttttcgtgaaaaaatgttaactattaattattaattttttgtttgtatgaaaattgaaatccataacctttctattttgccttcttcactcaccaccaaaacaaacattataaccccaaagtatttgacatattagataattttttctactaaaatattatgttcatattagaacattttgctcctatcgttttcacgaacacttcctttaagattcctttacttaccacatgcacgaaatgagtgtcaagtccattcgattgtaagttaaacgcatagctggagcacatgcttcgtcaacacatttcgatattttttattggggataccactacattntcttttttaaaatagagctagtaac

SEQ ID NO: 13050 - DNA, 416 bp, Glycine max
acatagacattgcatgttgttcacactctcttctactgattttaaagatgataacaggttggaatttctgttccatgatcatctgaaaatcaagagacattctagctcaaataaagcctaagcattggtgtttattatatagaagaggtttattgagacaggaaaaaaaattagagggaaatgaggataagaagtcctccctaaaaaagacaaacgtaaaagatatgcatctaggaacaatagacaccatgatagtaaagctactcaatctctcatcatatctgtaaaggaaactcctttgaaaagaccatgtgctttacaccatatggaagggagacaaacacctaaattactcgcatgtttgggctatttcaaagtcaaaagtgcttctttttgtacagcaatcccgagaaagt

SEQ ID NO: 13051 - DNA, 139 bp, Glycine max
  unsure (1)..(139): unsure at all n locations
agctttgagataaaaaagagttttttgtctgcttttgattatncggctatgacattaacttgcaactcacaataatctgagtctaacatgaaacttcatgagaatatgattttagttggtcgcgcctctcttattaaat

SEQ ID NO: 13052 - DNA, 174 bp, Glycine max
gaatataatatcctaggcctgctttgctataaattgttcgtggaccataatatcgatcacaggcttcgatttaaggctctggctgaggcaggcctgcaagcctatgttaagtcctatattgcatgaaggaattcaaatacgtgaacagacttatgttttctattgatggtcata

SEQ ID NO: 13053 - DNA, 199 bp, Glycine max
agcttcattaatttattaagaaaattgatcatataattctaactttcaacatcccaaaaagtattcatagcataagaaacaaaaagaaatatacccttaagaaaattaccaaaagtatttaaaccaatgcacatgcccaaataaggcagaactccttagaagctcaactaatcagaagctaataatcacatatggtagg

SEQ ID NO: 13054 - DNA, 151 bp, Glycine max
tttttatgtgtttcacactttcaattcgaacttttaattatattaattctacatcaatcgattcacaacttaataacttaatggttcattcagaatcctaagcgaaccacctctaccaaacctatgagccaatggtgtacatttgaattta

SEQ ID NO: 13055 - DNA, 395 bp, Glycine max
  unsure (1)..(395): unsure at all n locations
agcttgtctaggcgagttgattntagccttattttcaccttagttattattcaattcggttaagaatgagaaatcccaaaaagaaaatgtccggttgattttccgctttattttactaaaagatgttttttttattattatattattctttacctctttttttgatttccaacgtggttacggttgacgaacggtcggaattcattttaaccgaagtttacagataatacaattcaaacgatcgctggaaatttattttatttttaggttaagcgagaaatgacttaagtaaaatggcttatgcacgtcaagagggggtataaaaagtatatgatatgagattaaatatacacgaaacactatgtggaccaccacgggtacatagaatgaatcga

SEQ ID NO: 13056 - DNA, 307 bp, Glycine max
  unsure (1)..(307): unsure at all n locations
gctctaaattacattgatgtttgtatttatgggaggaggttgtacgccatttttgttttaagagtagtgtcccactggtaaaactaactntccaaatttttgccttcgcaggaaatggccccgaggaagcttgcctcanagaggtccaggaaggacaaggcagccgaaggaactagttccgctccggagtatgacagtcaccgctttaggagcgttgtacaccagcagcgcttcgaggccatcaagggatggtcgtttctccgggagcgacgcgttcagctcagggacgacgagtatactgatttcc

SEQ ID NO: 13057 - DNA, 402 bp, Glycine max
agcttatactctactaacgagagagagagcactctttcaggacacactgattgatggccttctgtactttctcattggcccaacttagtggcaccacattcaagataaatattgccaacctcagtttagttcctctctctcttcattcagatcttcctagctttcactgctttcaaaagcaaatacgaaagaacctgcacttgcacatagcacacccttcttttatttatccctatctattaccaagtccctttcactggatctcatctctgctccttctttccccctcgaactgtgtgcaaaaccaaacccggttcttcagttgcttctcctacaagatcttatcctaccccagcttagtccctaagctgaagaacataacacacacacacacacaaaaaa

SEQ ID NO: 13058 - DNA, 380 bp, Glycine max
  unsure (1)..(380): unsure at all n locations
tatgctacaaacattataatagacctcctcagcaacttatccaacaacaacagaataattatgacttttcaagcaatagatacaatccaggttggaggaatcatccaaatctgagatggacaagtcctccacaacaacaacagcttgtccctccttaccagaatgttgctggtccaagcaagccatatgttcctcctccacaaaaaatacaaccaacaactgaggctcctcctcaaccttccttagaagagttagtgaggcaaatgaccatccaaaatatgcaatttcagcaagagacaagagcctncattcagagtctgacaaatcagatggggcagatggctactcagatgaatcaagcttagtcccaaaattatgac

SEQ ID NO: 13059 - DNA, 402 bp, Glycine max
  unsure (1)..(402): unsure at all n locations
agctntattatttcacaaaacccatttgcttctcttcttctccatgcttacgaagctcaaacccattttcttttcttctccacactacatgacaactgaaaacaaagctgcaaagtgattctgttctgcatcaacgtggttcttcttcctcgttgatggttttgcaagccatcttcaacgatgccttcttctcgacgacgggttcttcttcaacagctctcttcgttggcagttctgcaagcattcttgttgccgtcgattctcgtcatcatcggttcccatcattgttgtttcttgtttgtgggtgtgtttgctgtgctgtgaaagatgtctcgtataacataaatgtttgcatctttggaatatcaagatgaccatgctccactgtggtcattcgttaca

SEQ ID NO: 13060 - DNA, 396 bp, Glycine max
tgtaagggcttgggtggcaaatgatagtgagactcaacttggataccaaccttgtgctacaacaattgcaacaagacccaccatccacaatatgagaacaatttttgtttaaaaccttgtatcttgtatgaaagatgttctctctttgggtttgggttaggtcacaggattgactcccaaggagccttctcaccattagaagatcaccttcttcaatattctcatcacccttggtttcaccctcacttccacttgaggaaggagaagaagtttcctcctcttggctactatagatgtcttgacccctcatgatcatggttttctttgtggggcattgagaagcaatttggcctttcccaatacatttgaagcacttgatgttactagttctatctt

SEQ ID NO: 13061 - DNA, 341 bp, Glycine max
  unsure (1)..(341): unsure at all n locations
agctnttaagaaatataaatgattaaatttaaacagtaacaatatgctaatcttaataacatattattactgttcaattttaataatttattgttaatttcatttttctaattaatggtcaccttggaatttaatagataaaggtccagaattaataataagattagtcaaaattatcttccatccggtgctatgggaattaaaaaaaaaaaaaaactatgcttaaactgttgtttatccccttcaaaaaaaaaactgttgtctatcattgagaggttcacttttatttattttttatggatgaaaattcctcatactaaactgaattctagtagagtatg

SEQ ID NO: 13062 - DNA, 347 bp, Glycine max
  unsure (1)..(347): unsure at all n locations
tatggtgagattgcaatctctaaacttccaaaactagatcaaacttttgtatttgatggtaggacgattctggtagattaattttatgtattagcagtagttttttttttctttgtagtattatataatctgattttacagcattacttgtaattgtattttagaatgttaatgactatggntgcatcgcaacaacattatttaccaaggttctgcatattaaggatgttaattcggggttgaagcatattaaggcaatcttgtggtcttggatctgcattatagggggtatcgtatattgtgacccacctctaccaaagagtactaactctctggtaatcgactac

SEQ ID NO: 13063 - DNA, 154 bp, Glycine max
agcttcttttctggaaagttccttccctggttggtgttttgattggtattaggggtggtggttggtcttggatgtgcatcgattggattttgtggacgattaggcgatggcctttgtggatgatcgcgcgttcatgcgctgcttcggtggtcgc

SEQ ID NO: 13064 - DNA, 386 bp, Glycine max
  unsure (1)..(386): unsure at all n locations
ntaagaaaagtcaaacgacaataacttttaactcggatttccgattgagtcccgtaatatacgagacgcttgtaattgaaaatagaagctctgaacaaattcaatcgacattaacttttgactcggatgtccgattgtgttccgtaggatatcgagacgctcgaaattaaaacggaagctctgagacaaatcaaacgacaataacttttactcggatgtctgatcgagccctgtaatatattaagacgctcaaaattgaaacggaggctctatgaaaagacaaacgacaataactttcgactcggatgtctgattaagtcccgtacgatatcgagacgctcggaattggaaacggaagctctgagacaaatcaacgacaatacttt

SEQ ID NO: 13065 - DNA, 385 bp, Glycine max
  unsure (1)..(385): unsure at all n locations
agcttgttagcttgatgacttgtcagaatcaatttgttgactagcatcaaatcagagaattaaacctggacatcttttagaaatgcttgctgaattaagacaggcagaaatctagtgtctccatttgggacaaaaacccattctttgcagcatataatccaaaaaaacccatgagactgagtcataggccttttcaaaatccaccttgaaaaccatagctggccttttgcttctacaagcttnctcaatcacctcattaagaactagtatgccatgcaggatgtgtctgttttttatgaaagctgtctgcctctcatcaataagaccaaatatcacttgtctcaatctatttgctaataacttagctatcaccttgtacatacat

SEQ ID NO: 13066 - DNA, 366 bp, Glycine max
  unsure (1)..(366): unsure at all n locations
tatgcgcatatttccttacgaacgttcacttgcacaatacattctattaactaagaaaaatgcacccatatacaatcaaggcagcttcgttacctagattatttacatgtacttccaaggtgtatttgttacctacatcacacacatttcctttgctaaattcacatacatgcatactctaagcactttggctatcgaaaattgcatacgtgcatatcctggtatttctaatacctatacatacacaaactgtatgataaatcttgactatctacacaataaggtgctacatttcatgcttgttttcaagtttttgctacctaaagccgcatgcanattcaagtatattttcttttgctgactaaa

SEQ ID NO: 13067 - DNA, 56 bp, Glycine max
tactaaactttataaaagatcgaatttgttaaacagtccaatgattgtaatataaa

SEQ ID NO: 13068 - DNA, 202 bp, Glycine max
tccattgctcaatttcgagcatctcgatatattatgcgccttaataggacctccaagtgaaaatttatgaccatttgaattgctcaagagcttccattgttcaatttcgagcgtctcgatatattatgcacctgaatcgtacctccgagttaaaggttaagaccatttgaaaatcttagagcttccattgttcaatttcgag

SEQ ID NO: 13069 - DNA, 254 bp, Glycine max
  unsure (1)..(254): unsure at all n locations
gcttacttcccgctgttgacctaaagctctttgagaattgcataagggagacccaggttgcaagctacccagtggcttgtcttatattttaagataaataaagctgtttctataaggaacgngaatgaactctttaaatttaaatgataccattcctccacctaaatgacgaagaaatattaatgtgctctagactatcacttgctacgacctgggtacaaatttaacataaatctattgacaaacaccttctc

SEQ ID NO: 13070 - DNA, 521 bp, Glycine max
  unsure (1)..(521): unsure at all n locations
ntgcaccgtccggtcttgagcaccgngctgcgctgaggaaagtggagagcgctcctcttattctacccgnatgacctgtaattgtccgggtagaacctgggactagtggggcttgccnaccactgacatctgccacccgctatagtatgaactgactcctaacagcactctgcgcaacataaaacaaacacnacagngctggggggtggccttgattgatatatgctctgatcataccaggggatcatacagctaaagagacaagtaatgctctgatcatacaggttggatcatacagctaaatgggcagagtgaatgctctgatcatacanggagatcatacagctanaatgaatggatatgngtgctctgtatcatacatcattgatcataccatgatatcaggtcatgttgactggacttagttgctctgatcatacatgtggatcatcccaaaaaagctagcaccttatcatgntgtngacctggtttcgagtattctcaaactaccctcttttatg

SEQ ID NO: 13071 - DNA, 618 bp, Glycine max
  unsure (1)..(618): unsure at all n locations
aataccccattagagccttagatctcagctctccnnncatttctataatnggggagaagtgaagtagtanagggttcagccncttatgcacttctctctctnntcgaattgcttangaaaattgtntccgtgaagaaaatccaagccgaggcacttccgtaacgtttctgtaacgtttccatgagtgaattcgcgaaggttntcgaccgttcttcgacgttcttcatcgttcttcagtcttcaacgggtaagtaccgcanaccaagcctttcaattcattctatgtacccgtggtggtccacatttggtttcatgtatttntgttctcgttnntattaccttnttatacccnnctttgacgtgcttaagccatntagttaagtcatttctcgcttaacctannaataanataaatntccaccgatcgttngaattgtaccatcccgtacttggtgaatgaattccaccgatcggcgtgccgaccacgttgaatcaaaaagagtaatatatatataatctaaaatcctttataaataagcaaaatcaacgacgttctcttggatttcatcttatgatgactatataaggaacaggtaatcatcctatcactcgccaaat

SEQ ID NO: 13072 - DNA, 465 bp, Glycine max
  unsure (1)..(465): unsure at all n locations
tgtgacatccggtcttagcacgcgctgcacttgctgaactggtccanacacggagtgagatgtgaacctacctgcacagtctaggagtgaccggatgacaaaatcgcgatgtagagcttctaaatgtttggctgtgtggaagagtcactctcaccaatgtttggctgtgcataaatgtcactctcgtcaatgtgagcctccttaccatgagagatcacgagagagatagctcgagaacctgacaggcacaactgtcagtactatgctgagagtcattgtagaccatgcacggtgcctgatgaanagtcagccaagaaaccctcaagctgcatagattgcaagaacctctctctcctcgaacagtgttctcagaagnaatctttgttgtgtagcactatgtcttaagcaattgaaggcgatgctgcctgcctcttcttgtgtaagattgtacactgaaacgaagcg

SEQ ID NO: 13073 - DNA, 205 bp, Glycine max
ttgatttgattttttaagcatgtaattaacacttgttgctttgagaattatcaaccttgatgaccagcttattgcaactttttattttgaagtttccatttgactttttcatctttaattcatgggcttggccactgattttcctgcattactaagaaactggttaatccctttttcttttattaatctaatcatcattcatatt

SEQ ID NO: 13074 - DNA, 637 bp, Glycine max
  unsure (1)..(637): unsure at all n locations
nttgcagtgtccctgtcatcagtcgactgacgctgcagcttgtatcaagtggcagtggctataacatgtatgtggaggacattctgtctattttgatagtaattgataagaaatagcatgctgatgaatgaataagctctcgttatgtgttgagacttatatgcanacatgttgaataagagactaaagcatgaagatagtcttatgatttgttggtttaataaccttataatgccaaacatgtntgtaaagatgtggcatttgtattatatgtnnttagaactagacatgctaaacgtttagacttagtttattatccatgnccaatggtnatcanatatgagaagaataatgtattgaagttcttatgaacaatcggntaacacctggtatcaanttgtaagttantattcaatataaaggtaanaacagcataaactcattctctgaatatgacaagttatcaataatgatatatgttgaatcatactatcattanagagaagcgtgactgaatataatctgttcatatataatggacgaactagactttgtataatatatatttacataactgcagttttatgatatgtagatcnacacagatatgtatgtcattcttctatgtactaactcn

SEQ ID NO: 13075 - DNA, 259 bp, Glycine max
acattcacaaatcacatataaatccaccatcttcagttggccaccttcaactgagctcacgtactcccacgtagcccttattcccgttcctctcaacaccgggtccccatcaatcccttcaagctttcacaacatccaaacatcatgcactattcaaaacaagaaaacagggcagaggcagaaaactctgcccaaaacacaaaccaataccacaactttccttactcaaataccccagtaacattctcttcgttccaat

SEQ ID NO: 13076 - DNA, 445 bp, Glycine max
  unsure (1)..(445): unsure at all n locations
ttgacttcgtcggacctagactggtcgctactttgaataaccccatgagcgtatgtgtactaaactttacaaaagatgaatttgttaaacagtccaatgattgtaatataaatggagaataataagcttaacaacactgtttattattcccacataatgatactcacttcttaactgaaaaaagttgtatcatattatacaacaagttttatgcttctgtacacagatctagatactttatctaaatactctgcttctttgaaagactcgcttaagtaaatgtcttaattcagtctagaccgactgataaagtttatgcaatattatccatttatttatggctattaacaaatatctattaagtgattgctgtcataagtcgtaataggtcgtacgtctacttgccgctatgttatttcaaatgggttactatacgcaaagaagn

SEQ ID NO: 13077 - DNA, 222 bp, Glycine max
atgcgggggtgaatgactaaaagctgaaaaaacacttattgctaatatgacgaagtccatggtgaaagccaataaacattctgctaactcaaaaggaaacacatgccaatagttggacactattaacagatatacaatgcaagaagtgcattccgttctccataagaggaagcgatctttgaatgcaacatctgatgaagcttcttgaacatgatcaatata

SEQ ID NO: 13078 - DNA, 245 bp, Glycine max
tgtaatctatacttatataaaaatcatttactattatgcttggatagcccttcatctcttccaccttaaattttgatgtatcacaataaatatgaattattggtatcctaatgagtacttgacaagagacaagattaatatgtctcaggacttaactgtcctcaatatcatctacgactcaagagacatgcttctgcttatctaacatccaacagtgctaaaaccaaagagcatcacccttatgg

SEQ ID NO: 13079 - DNA, 578 bp, Glycine max
  unsure (1)..(578): unsure at all n locations
ngggttggactatnactagtcgagngacctntcnagcacctgaggcatgcacctgtgtacactgcagaacatctgctctttcttgaagtctcactgctgctatgagggngagatnngtattatgacaggaatntccaagaaaatcaccatccaagagtgaatgtgaggaaaggtatcagctgtgatgaacttgactnncaatcacatctccatggccaccacagtatgtgcaacccatgccnnagctaatctgccatccaagtgtgtngcacccatcaattcttttaccaacccattttctttctatactctannagttcaagtctttcatgcctctctgagtctcatcaaccannaattcactgttgtgttggaaatagtatgaacactatgatttttattatggacagtggatcattattttttttcttctaacaagcagctgtacattgatgactgccatatacatattatatgcgtaacacttctaattgcagtgtatataacagctagaataaatactacgtgttgtattcatctgatcgataatttcttttccttgtatgagaattttctcn

SEQ ID NO: 13080 - DNA, 121 bp, Glycine max
tagccctcgacaatttctggttgaactcatgcaaactgaagttgattttatgatactttgatatgtctattgtccaagacaaaatgcttttgggacttttgttgaacagtcgtttgggggg

SEQ ID NO: 13081 - DNA, 250 bp, Glycine max
tttatgggtcgtactatagccggtaattatgtccaaacgtatggcctagcaattgtaaaaaaaggcatgccttgagggcagatcagactttttgattgagctaatggattggtcaaatgtcttgaggacttagaccacattgcttaaaatctccccttcaactcaccaatcatgagtccataagagatttgggctttaaaagggataggtcttagcctcattttgccccgccatcctcacggagtttaaa

SEQ ID NO: 13082 - DNA, 677 bp, Glycine max
  unsure (1)..(677): unsure at all n locations
caggggntcgaattgacgnnaccctcgtangtgaacctatagantactcaagcttaacttgcatgagnggccntntngcacaagaagaacacacagcatagcaaatagatctatttcctagtaatngatgaagtgtgtgacgttggtaatatatatttaaactggagttctcattcacaaagtagaaaaatacgcatctaaagcatcatttggcaaacaanatcaatgggtgatatatattgctagaattctatgatagatatattcattatgcttgttagcacactgttcgaacccagcacgtgcatcagatcgtgcaagtagtataatacggtacgaaccgagtatcgaactctcatggaacgttgtgtactttggtaaaggtatattcagtgaatangtgtcttgtatgaaaagatatgtgtggactatgaatangtatgtatactaactattaaaaacggaaatcacgtgagntatgatgtgtatagacaagtagacaacgtgttgatccttctcatanngtgccgtactgtataaggatattctctacttaacaatgctcatgtgtttatggtngtctctgaatgctaaccccgatcctctgatagctagctaatctgagcacatcatctcaaacatcttgttgattacctgcttaacccttatacaacttt

SEQ ID NO: 13083 - DNA, 149 bp, Glycine max
  unsure (1)..(149): unsure at all n locations
gtgtggatcatagcttctntgatgttacataccatgccaagcaccaagcttagataccacagtttaatntcattctatatntagctggcatatctcatgcatcttcccctttcagtttcagcgatctcaaaactatccaagtttgactg

SEQ ID NO: 13084 - DNA, 140 bp, Glycine max
tgaactgtgctccccaaacaaactctatggtgccggtaactctattctgtgatgacataactaggacaaaattatagatcggtcttctttgctttgactgcaaactacctgttaagatgtgagaacgcaaaatatataat

SEQ ID NO: 13085 - DNA, 202 bp, Glycine max
gatcaccatggagtcttgcatgaagtaaagcacaagaagaaatggaggcttgtataaagcccggatcgagtggaaaggaacaacttctaaagtcgtgatagaaccgtgacatggcgcgacaaacacgatgttacgactttttatttctctaaattccttgaagggtcaaggatgatgatcttttgaagcctctttcaaaaat

SEQ ID NO: 13086 - DNA, 206 bp, Glycine max
tatacaccttaattgggatctatactctataggaccaggcacattacaaattgctgctttgaccacttaacaactgcttttaaattgtaaaggtgtgttggtcatgtggactcctacactatctaacctgtaaatttttttagacagcttagacctgaagggtagcgaagtcaatgacacttgctctaggtatggagggtactatt

SEQ ID NO: 13087 - DNA, 301 bp, Glycine max
tatggggtacccatcacatgtggtactaagtgggggtcgggcgatggggcccaacaagtttttcacatccacaatgcgcgcataaacccaccatcccctgttgcccacctccaactgagctcacgtactcccacgtagcccatattctcgtttctctcaacaccggggtcccatcaatccttctcagcttccacagcatccaagcagaacaacattcaaacggcataagctatcacagccaagcaaaagcagagcaaggcagaaaacttgctcaacaccaccaaatacagctttctcactt

SEQ ID NO: 13088 - DNA, 427 bp, Glycine max
  unsure (1)..(427): unsure at all n locations
atgtcctgtcggtcttgagcactgngctcagctgcctgctantgataaagcaagtgtgagaagagcctgctgttagtctatctataagatctataggctctactgaatgagctataccggattgcaaaaactttattattgtctgcataacattattggttgaccggagtattttcataagattgcaaacttggactactacacattatttctgattactatcatgggctatgacagctccccgcatggtctggctacacactttaataggggaccaagaatgatatcagtattgtagttccctgacgtatatcgtaaactnacttctgttgctttaagcaaatgatacactngtggctgtgactgacaacccttattcataagactactagangctgtgtgaagtatcaatgtctcgagcgtgtcg

SEQ ID NO: 13089 - DNA, 286 bp, Glycine max
cttgagctgagtctatttttacatgaaggatctgcggacaaaactcagtttaagttattctaaacctaaaaggggtgtctaaattgggtgtagtcttaaatgaaggatttgcggacaaagcttggatattcaacctaacgagggatcgagggtttaataatttaagataccacatagaacaccagaacacgattgattagagaaatatatttctatgcatcagcttgtttgttagtgtcataccctaatttcgttcggggactattcgtttggtgggatgcaaccc

SEQ ID NO: 13090 - DNA, 159 bp, Glycine max
aatgacccattaatttataaacttgcggctataagaagacccaattagcctcttcagtaggaagcatctctgaagcatacagctacaagtccagagctactataaactagttatactagattacctgcagtggcactttgaataaagtttttttgctgt

SEQ ID NO: 13091 - DNA, 55 bp, Glycine max
tgggaaagacatctattaattcccgcaataagggttgaacactatgagaaacata

SEQ ID NO: 13092 - DNA, 352 bp, Glycine max
  unsure (1)..(352): unsure at all n locations
tcacatgtttgtcatcatcaaaaagggggagaatgtgaatgtatgtatacatgattttgatgatttcaaagaagaatctaacaaggctggcttcaatgataaacatttgcttcaagaataattcaagattgcttcaacaaacaaagccttgttcaagattcactaaagaccaagccttgccttaaacaaagtgctttcaaacatgccagggctctggtaatcgattaccaggaagtgtatcgataccagaagacaggattgagaaatagctgttgaaaagggaattaaatttcacatgtatcgatgcctatgtntgaatcgataccagcacagaacttggaaattcaattca

SEQ ID NO: 13093 - DNA, 105 bp, Glycine max
acttatctgctgccagactttattctctgtggacactcttgattctaaatgaaccatgttatcattcggaagaattgatacagaacatatcgcctatagttctga

SEQ ID NO: 13094 - DNA, 71 bp, Glycine max
aaaatgaatcctgtttttttattgaattttcactatgtgaaccgacacttgcatcttggctgctttctgtc

SEQ ID NO: 13095 - DNA, 658 bp, Glycine max
  unsure (1)..(658): unsure at all n locations
tatgcctccatgcggtggcngtgcactatagagtactcaagctggaaccnanaccggtgagagtgtgaccttanactgtgagtaataatctttgcatgaatctctacatttagaataaatgtatanatgaggacatgatgaaggccatgattgtacatacacaagctctctgaccaaatagcttaccttgatgatactagtatcttttgctcccgtgtatcaagcttattgatttgtcattaatngaaccctgaactctanatgattatcttctaataccttacttagattctaggagagcatatggttcaagacacatatactctatatttnggggagaaaagtcganaagaatgaatagataaatgtaaagcatcaacacacgcaacanataagttgtatgtttaanaataatgagaaangaagtgtgctgctacaatatggtcanaagcanatcaagaaantgaatagtgagaatgctattttacagacangatagatcattggatagtctcgacttgtgtctctagaatctanacttntgatctaganaaccaataaattttgtacgcagcctactacagcctgagaagtcctctgttctgctatcatttcacttgatgatgaatgaatgaangatggactctgtngtgtatat

SEQ ID NO: 13096 - DNA, 371 bp, Glycine max
atatttcaatttttattaaattattgcaataagaaggaaatgttttgtaaaaataaatactactaaaaattctattattaatataattaatattgatgttatgaagatcaattttctcctatatttaataccattaattaataattaatttataggatgaaatatttacaatgttatctaattatttattttatttttttaaatacataactcacattaaattaaaattatgacagtaaaaaggtgttctcttattgcttttagaattttaggtttgaaattatatcgacttaataaaaatataacaaatttaatatattgctgaaactaatttcccgtattccttacacactttggtatagaaactttta

SEQ ID NO: 13097 - DNA, 312 bp, Glycine max
gcacggcgcactgagtactactgagctgtgtagttaggtctactattctgacaagcaatgatatggaactttcaatggatgctgactatcgcctcggtaattatgctggagtggctagatattcttatttatcaacaagttccaaatgtcttataataggttatcgatcatatggcgtggaattacaatacctcaggaaccatttcaaatggttgacatgattttaagaagtgaatgcttttaaagagcatttactaaactagttctttctttctcttttttgaatatgtatcttctgtgtgttctcccttt

SEQ ID NO: 13098 - DNA, 479 bp, Glycine max
tcattggcttaataaggatatcgaaaggtgtgcttgaatcttgataatgattctattaaaaccaagcaatataacttagagccagacttctgcacgtttcaatatgacataaccgaacccaataatgaatgatagccgagatactggactacatcacatgtgagccaattttcatgaacttgaatcttggagtatatgaaagacttttatctgaacattatccctgacctcaaattgcgtcacataatggaggaaaatacacgctcaaatttataatggaagccaaaatggatttattgacttcaaaatagatgagtgacacgttggtcttatccaaaaaactacttttgaaccgcagataaaagcctctgctatgatattatacataccaaccttgactaataagtatgcagaatcctaatcacaaattgcaaccactagcatctttcttcgtcaggatcatttcaatatgtttatag

SEQ ID NO: 13099 - DNA, 365 bp, Glycine max
ttatcaaatggatttaaaaagtgcattcttaaatggctttattcaagaggaagtatatgtagatcaaccccctagatttgaaaactcgggcaagcctaatcatgtttttagattaaaaaaggcgttatgtggcttaaagaaagcccctagggcttggtatgagcgtctgagtaagtttcttttagaaaaggatttcttagaggcaaagtagaactactcttttcataaagagaaaattacatgatattttattggtcaatttatgttgatactattatttttggatctactaatgaattattggcaaggaattctctcatgacatgcaaaatgagtttgaaatgtcaatgatgtgagaacttaat

SEQ ID NO: 13100 - DNA, 442 bp, Glycine max
  unsure (1)..(442): unsure at all n locations
gtggtcatgagacgcttgaggccttaatctagctgttatttctgcacttgacctcttgatagacccgttctgactgtgcttgtgctctgacgctcttgccattagatgtattttcctgcccggatcggcttcttgatagattctacttctgggtatacttccagcatgcggaatatatctatcacaccagctccatgttatattttaatcgagaccatgtatatataatggatggatatccctgattggaattatacagaaggatatatagcttacatgtactgtgactttgaacagaggagctttgagagacttcgttggaatgatcgcatcttgtagagggtgggagtacgtggccgatatatgggtttgatactcgatattctgtagtagatgaacactcacacttgtaccatcggagaggaattttaccatcttgtcn

SEQ ID NO: 13101 - DNA, 499 bp, Glycine max
  unsure (1)..(499): unsure at all n locations
ttcttcgatccacacgcggcctgtcagcatgccacctggctctaagttataataatgcttgacataattaggcacaagccataagcaacataccccaaaggacttacttcattgacattctcaacttcaacaaacataatgggaatacctatttgatccatcgtgttggaaaatcactatcaaatatggttgcttataattngttgtgccacatttttaagtgattaacataaggataatatttatggaccgtttggaacacagaacatcatgacggtgtgtttgaaataatatggtgattgacatgcctggcataggaaggcaatgcaaaatacattgtgctgtacaanatatattcatttaacaagaaatctattcagtgatgtatctttttttgacgattatgtatacaggacatttgttcttcagttttgaccaatatataatgatcttgtctatggttatatataaacggaaattttggacatcccatcacttt

SEQ ID NO: 13102 - DNA, 259 bp, Glycine max
cccaccccctcacatcacaatgaaagtgcatgaggtctcaatttaaggcaggcttggatggtaataattaatgctgttttccaacaaaggttttaacatagttcttgaacaaaaatacctggaccacacttgagcacctccattcaagtcattactacaccatgttttattcatatattataaaaacgattattctttttttcttttgggagggtagttgaatttgataacacaaaccttttgttcgcatgatgggatc

SEQ ID NO: 13103 - DNA, 241 bp, Glycine max
ggggcacgaaatttatgcctcaaatgatgtatgaactttgaagtgtaatttctcaaatgatcgaatttgaaaaattgcacacacaagacctttatttatagcctaagtgtcacacaaaattggaggaaaatttgaatttacttgaatttgaatttgatttgtggagccaaatttggaaccaaaatttcactattatgatagtgaatttcagctatggtttagcccactaatccagatcaag

SEQ ID NO: 13104 - DNA, 626 bp, Glycine max
  unsure (1)..(626): unsure at all n locations
nttggacccgtcgcggatctctgagtcacctgacgcatgcangctanagtatgcccgagtcattcatccgtatgagatgtgtgaagtatggcgatcagaatgacattccttggatatannggtgaaccanactcattgcttttacaaanagggntcatcanagtcaagtttgatatatggaaagtaacccgtcctgcanatantggngcanaangatgaatngagtcacatcactgcttctctactggcaacatattangagtgtgatgtcttgtacttcagttcacctgacaagatgtatggatcatgtgaaatctaatgatcacccatatctgcgaaaatcgcatactcactatcatattccatacatcatgtttcattggtgcatgtcttgattcttcttgaaaaataataataatgacttatcttgtttaaaagaaagacccttacaccctacgactctcttactaatatgatgacaagagtcagaaaatangtactgagcatatacaatgccatgtgagctgaacatanaaatgagcatcgttatgcgtctcctgctagtaccatgcatcgctacatgattcactaattgagagattgagcgcacctattcataacaccct

SEQ ID NO: 13105 - DNA, 670 bp, Glycine max
  unsure (1)..(670): unsure at all n locations
ntatgtcaccattangtgcactatgantactcaagcttgcctanagaggtccanganagacaaggcggccgaaggaactagttccgccncggagtacgacagtcaccgctttatgagcgttgtacaccagcagcgtttcgaagccatcaagggatggtcgtttctccgagagcgacgcgtccagctcanggaggacgagtatactgatttccaggaggaaatagggcgccggcggtgggcaccactggttactcccatggccaagtttgatccagaaatagtccttgagttntacgccaatgctnnggcaacagaggaaggcgtgcgtgacatgagatcctcggttaggggtcagtggatcccgttcgatgccgacgctatcagccagctcctgggatatccgatggtattggaagaatggcacgaatgtgagtatggccagaggaggaaccggtctgatgggttcgatgatgatggccatcgccanctgctatgtataccggngcatgattntgcccggactgctgcangaatgcgagtgcgaatcatgcngcaccacatgaccaccctgaccagatatggatgatcgtgctctcagcanncatctgccacgatatantncgacctccatgcgagtgcagtgtgtcgcatctgcacgatgactcatgcg

SEQ ID NO: 13106 - DNA, 312 bp, Glycine max
ttatcatagattggcatgttattttctttcatttgtgagccctaaagtttggggtatgtgaattttgtgaatttggttggtcaaggccctcaggtcattgttgtaggacctactgattctggaaagagtaccttgtcgaggatgcttcttagtagggcagttaaacaagggtggaagcctacctttggtgatctggatattggccaagggtctataacaattcctaaatgcattgccgccactccaattgaaatgtcaatcgatcttgtggaaggcattccacttgaaaagcctcttgtttactattatggg

SEQ ID NO: 13107 - DNA, 522 bp, Glycine max
  unsure (1)..(522): unsure at all n locations
ntaacccttgagctgtccagagccccgcngctgcagctntaacttatcagaataagcttgtccactgtaacagcgtctaatatataaactgtgggtgataacaatacaatattctcaatacacttatttattctttcagtcaaatcctaatatgaactcttatatgatccatcgacatctgatctaattaaacactataataaaagtcacggaaaaaaggcgctcaattatactgtggccacctgtgctactcttcccagcatcgctagagtactactgaaatctttcaagtttaaccaagcatgctctctgttaaatcttaccacgacctcgctttatcttaacataaagaagagatatcttttgaaaaatttctgtgcctaagatttatatgatgatgccgatctaagtaaaattgtttcaatacctgtgctaaattacactggttagcttatactgtgctgaacctcantggcctaattttaaatgcgatctccgtggacatccttaatatacgctact

SEQ ID NO: 13108 - DNA, 170 bp, Glycine max
  unsure (1)..(170): unsure at all n locations
acgtcgatgatttttgatatttatcaagattttgatatttatatatnntaagaatttgatatttatatatttgctttttggtaaccagtacactaacatggtaatctgttaaaggataacatatacaccaatgatcgtaatattttattatagcaatacgctaacatcgt

SEQ ID NO: 13109 - DNA, 312 bp, Glycine max
tgggaggattgatggggacccggtgttgagagaaaagattatatgggctacgtgggagtacgtgagctcagttggaggtgggcaacaagggatggtgggtttatgcgcgctttgtggatgtggaaaacttgttgtgcaccatcgcccgaccaccacctagtaccacatgtgatgggtaccccataatcctacaacttgaatgaggaagtgttgagggtgaaacttcctgcttttattgttgaccacaaagtggacctgggatatgtcgcgggggtcaggagaccttgtggacgtaggtgggggctattgcca

SEQ ID NO: 13110 - DNA, 170 bp, Glycine max
  unsure (1)..(170): unsure at all n locations
catcctgaccactcacgactagactcccgaccattctgtttctgacccggtccataatctccagctcccacataagtatcacatcaacgcaacttacgcagaacaagcaagaaaacttgcaacccacaaatacagtnttactaagacccagacatctcgtcatcgtacgt

SEQ ID NO: 13111 - DNA, 649 bp, Glycine max
  unsure (1)..(649): unsure at all n locations
tatccccattacttcngtgcacttgactctcagctatgctgcnnacattataatagacctcctcagcagaaaaaccaacaacatcataataattatgacccttcaagcaacagatacaatccaggttggaggaatcatctatatctgagatggacaagtcctccacaacaacaacagcctgtccctccttaccagaatgctgctggtccatacaagccatatgttcctcctccaatacagcagcagtcacaacaaagacaacaagcaactaaggctcctcctcaacctttcttagaagaattagttaggcanatgaccatccagaatatgccaattcagcanaagacaagagcctccattcagagttngacanatcagatggggaagatggctactcagatgaaccaagcttagtccccaaattctgacantatgccttcacanactgtgcagaatcccgaaaatgtgagtgacatcacctttgaggttgnngcaccaanatcaagtgcctcaccagtagtacacctgcactgaactatcaagctcattctcacctgataaaggatatatagtgccatagagaagcttctacaaaaattatgccgtgacttctctgtatctgatacagacccctatctttctccactag

SEQ ID NO: 13112 - DNA, 401 bp, Glycine max
  unsure (1)..(401): unsure at all n locations
tttatgtgcgtccggatcttaagcactgggctgcagcttcgctcgactgaagactgtactccttctatgatatactacattcgattggctccatcgcctcactgagatatgtaaacgaaggaacttaagagttgttgngggaagactgcaccagtgccctcatggcaagaatatcctgagtacctgctgttcttaagtgagtctcttatcgctgtacggagataagtaaagagcattgtctctccgtggcgcacggaaggagatctcgctggccgtgtaccaactttgctatccatccacttatgtggattataacttactaccccctcagaccagtgtaccatgcgcgtgctgcgtacaagctccgctcatcacaggtaactccttacagtatcgatcct

SEQ ID NO: 13113 - DNA, 613 bp, Glycine max
  unsure (1)..(613): unsure at all n locations
nctgatttgcgcacgctatgangtgacactatgaatactcaagctngatccttganntctgntgctngagtctngagatcaactntcctctngaatcttgaagtgttcttcaactatcctcttgaatcttgtagtgttcttgattctatctagaacatcttgaactcattctttgattgacctttgagatttttgtcatcacctttgtcatcatctttggtatcatcanaacatctntgaatcaatcttgattcatcatgaagctntgcttctacaaatntaacctcacattacttgtttcgagacgatgtgactgcataatgctntntacgagatgatttgactaaacactattntntttcgaatagtgcannaccaaccgtcattaataagactcaattannatgttatatttcagtgtatctcaccatantatgagcatgtgaaatagagatcgctaatatattacaataaatctgaagctcattttgtgccaaaggagggcgaatacactacatatcaccgcatacacatacgtacaggcatatcacctcngatctggagctatcttggcaaaaaaatgcgaaacacacacatattgcctatggattct

SEQ ID NO: 13114 - DNA, 456 bp, Glycine max
  unsure (1)..(456): unsure at all n locations
atgccgtctgacctgtcaggacttagcacgcgctgcactaatgatcagctatgtaggaatgcactaagagatctggagtaggttaaaccaaccaaccgtggcaatggccaataagcttcatgactatccaaaaattcatatatttaagagaaagaagaaagggatggttgttcaatcttctccaggacctatatacatgtatngttactaatccaattcaaactatagaaccactcaaaatgtgagaactaattctgaataatttactactcacactcgatgttgattcaaatcacaatctttaatatgtactctatagcttactcttgctagatctgactgttcaacggttatagacctgttatactgtataatttaaaacttttttactgttcaacagtattctccatgtaaacagattctcatgtttaacaggttgtttatgcggtttacact

SEQ ID NO: 13115 - DNA, 576 bp, Glycine max
  unsure (1)..(576): unsure at all n locations
ntgatgaggaagctattagcacatggtngtgcatgtcggagtaggactntgctccgaccgcaacanggagaaaggtgcggatcatgcgcaccagcatgaccactctcacataaatctggatgacgttgctgcttagcanaattctccctagcgaccataactcggacctcaccctactaaagtgtcagctggtctacaccatactgacacatgtgagtgtacatgtggctcagctgatctctgatgctatntaccagtntgcanggatggtgcgtaccaaacacccggtggacccggagaagtncaacangggccttgagatttcatgctcttgatataggccctctgtcagtctatggagtgtcggcacccccacacgctatccgcctcctataataaggcttcattggaagactgatgccagcaagacatggcangcccacacagccgagatggcagcacaggactgcaaccaccacacatctcaagtcactctctactgcgagtgaacgctgtcacatgtgtgacatngcgcaatatgggcatgcagtgataagcttatatccctcatcatgg

SEQ ID NO: 13116 - DNA, 630 bp, Glycine max
  unsure (1)..(630): unsure at all n locations
cgtgnntcgattgacgnacgcttgtangtgacactatgantactcaagcttcatcctgctagctnntgtttactaanggaacaaccggatcaacggtaatcgatcttgtacaatgccggngttcanaccgngcatatcttggtacgaccaagcgaagatgtcttggtagtttcgtgcacaacaaccaattcatctcagaccaatgtggtcatgcccgttaccaaccttacctctnntccttctttgccaacacccaagttatgaattccgtctcttcttggtgtggcttcatttcttagtcttctcgagcgaccatcatttctagctttgatggnaccccgtatcttcatcatcttcatccttagctcgatatgctactgttcaaatcgacgcagggtccttgatatagaccttcacagaacttgtcgttgatctgtatacttaatccaacagaaataacatgccatgaatgatattggtgatgtgcaagacaatcaaggaaatatttatatttatctgatgcacaaaacatatgcttaccaggataacctaatctatgctagtgtnggtaaactatgaatcatattccgcagaaacttgtcgtcacactgcatttctattggagagaag

SEQ ID NO: 13117 - DNA, 412 bp, Glycine max
tgctcttccacacggtgcatgctaaagcgagcaggcagacatctcgttaccaccttgacctcccccctcagctaaggggcgtttcgagcacctcctaggacacattctgttcagagaaagggccacgggctatgtctcctgcagtgacaaaatctgattatcctgctgccaagagggctacataactggaggcaggcgtgtcccttgcatcggttctggtgaaggcgatgattgctagagaccgctatgtcatagagctcccactttatacggagattgcgctggagagaggcattcccactaccctccattgtagtgttccacctgccgttatcactctcgaggagttgcctctgcgaaacttgtctacttctttattatgtgcatccctgcaattcacgcgttcatcatc

SEQ ID NO: 13118 - DNA, 656 bp, Glycine max
  unsure (1)..(656): unsure at all n locations
tatgaccaccattangtacactatgantactcaagctnganagagcnncggtagtcgaagagaagttcaagtccatagccatcannagtctgaaagagtatgatgaactaanggacgtcaatatggcccacagctgaagcttggaacgagaaaccaagaaggcccgaaaggaagaacacgaccaaagcannagtttgaggggctntatatggcagcaatagtgagctcaagctccgaagaggtgaaaggaatcatcacgggtcanaggcatgatcttgaaggacgagctaaaggttngccttangtcgaaaagaaaattgtcccaacagttaagcgagactgaanggaatatgtgggccatcatcgataagtgcanagagaagctaaatctagcggcgactcacgagcaaaggctagaggatgagtatgccaagatatcagcagaaaggggaagcagggaaggggtattgattattgaccaagaagaacaatgtgacggaccgattgctcttacttgacaggagtaagaactatcccattgtagccanggcaaagagtgcggacacctactcgcccgagagatcacgactctcactatttcacatatatgacttatgacattgatagaaccgtngaagttgatgcgtcaatctatn

SEQ ID NO: 13119 - DNA, 679 bp, Glycine max
  unsure (1)..(679): unsure at all n locations
ttgtttagtgcgatcttaagcacctgggcatgcagctaagctctcactgctangctctnatattngagagtnntctgtgtactctcactcgacanagacactgacananacttatctntttcttttnggacannagtatgacagcnntggggcagtannatttcttnccatcagaaccttcggatgcaactgtgaatcatatnctctatctcagctagatctttgacnnnggtattcaagccatcatttcgtctttgcnncttgaatgtaanggagcgtcccaatcacactgtcacatacattnnttctcacatgcataacatcaatacaatgtctaacgtctagatcagaccagtacagaagatcaaagaaaatggacctcttcttcatatgcangcttactntattcttcttttgnngattccaatacagtatcaattgtgaacctgctgtatcctgttacantcaacggtatcgggcatatcggctcttgcttcattaaagctnttcatcgctgaggatactggtgtagaaacccatcaactgaactggttctcatgttagtgatgactgtgttctccaatggctctatacctacactgacgtgattcttgtgaagatatgttaaacatgcgctaacttctggatgtaaataaccctgccacttagttataaatag

SEQ ID NO: 13120 - DNA, 305 bp, Glycine max
tttgtcccacccccaaaaaacctgcccattaagccaaaatcaacttacacaatgaattgaaaggtattgaaggatagataaaagaagaaataacccgaggggcatttcatagtgataatctaaacagggttttaacaatttgcgggaattaatccagacaaccttatgctgacttactttgcaggcagttacccattttaaccatatttgaaagaatagttttacctgaactatgcttgagggttgcagatgtcacaaggtctgaaaatcttctcaggtggcgaaacagcaccaacaattgttca

SEQ ID NO: 13121 - DNA, 264 bp, Glycine max
ttttttgttggtgatgaacaaaagcgcaaacggaatcaaaaaaatgcgaaaaaggatgaccctatggcttgcaactcgtcaatcccgtgggtatggctttttgaaaaggggaaaagaagttttttgaatgcaaaaacgtccccccctttcgtcattcttataatttggtgcaggggtggctcgcccaagcgagctaacctgcacatttttttttttttttgagagggaaacattaaaccatgttccctccctttaccatggatt

SEQ ID NO: 13122 - DNA, 231 bp, Glycine max
cttacttgttggtgatgaacaaaaacgcaaaacggaatcaaaaaatgcgaaaaaggatgaccctatggctgcaaattcgtcaatcccgtgggtatggcttttgaaaagggggaaaagaagtttttgaatgttaaaacgccccccctttcgtcatttttataatttggtgcaggggtggctcgcccaggcgagctaacctgcacttttttttttttttttttttttttttga

SEQ ID NO: 13123 - DNA, 429 bp, Glycine max
  unsure (1)..(429): unsure at all n locations
ctccctcaacccccccgtnnatgtcctttcnnnnnncnaatacctgttccctcggaccacacgcgctgagctcaaattcagaccacttatatatattgctacaggataaaaataggtgggtcgaatgtgaacaatacccacgcactatcacttgttccaaggagcagtgcatggctatacactgacaactacaaccttatgatacaaacaattgacacttcagaggctattacaaaaattaataaaagggctttctctctggcagacacacactgctttctaattgttgtaaaatggcatggaactctgttttttcctgcagctagctaggactccgttgcgcttattcttgagatctacgtcccctaaagtaaactaggacactaccccccattctgcttttctaagccctgtatattttaattttct

SEQ ID NO: 13124 - DNA, 68 bp, Glycine max
tagcctataaccagacaatgtcctactttgctttacccatcatcttgaatctgagacctccgtgggca

SEQ ID NO: 13125 - DNA, 633 bp, Glycine max
  unsure (1)..(633): unsure at all n locations
tatgctccttcgttcngtgcactatgatactcagcttangaatntgncaactagaaccatacgccagacanacaacaagagagtttatgtagtttatcataccacaganagttagtagcacataattgtanatcatgcaagctntgatggtgtcgagaagagatcacatgtntgtcatcatcaaatagggggagaatgtgaatgtatgtatacatgactttgatgatgtcaaaagaagaatcaaacaaggcttcattgcttcaagattaatacaagattgntcaacaaacaaagccttgattcaagatntcttcaagatcaagccttgcctcanaacgaaagggttcaagtcatccanagcatatgtaatcgattaccactacatgtaanntgatacncaatggttngaaagtgtgtaatncgatacacatcatatgtaatcgattaccagagactctatatattgtgaattcaaatttatatgaagagcacaactgtcaagaaaatactatgtatcgatacactatgtgtatcaatactgagggatatcgcacagccatctatcattgattgatgcataangcttattattggactggacaatgagagttgctgcaatgttatcttaaaaat

SEQ ID NO: 13126 - DNA, 524 bp, Glycine max
  unsure (1)..(524): unsure at all n locations
tgttgttgctgtcgcggtcttaagcaccgggctgcagctctcncatttctatatggggagaaggagagatatggtatctcctangactttctcttctcaaanagatgaggaaaatagtncgtgaagaaaatcagccgggcgcttcgtacgttccgtacgttncgtagtattatgcaagattctgacgtcttaagatcatcgtcgtcttcgttcttcagctcacgggagacctaaccactttaattattttgtaccgggggcacattgtatgatttatctatttcatatttatcccttgcggctagcattatagatttcgtatcaaataatattcccgacgtgatgtctcgtattcgtaatgatcgaccgcgcggcgacccatgaataaaagagtaatatattatataaatcttagtatagcaaacacgcgttcttggatcattatgatgcatacaggactagctatctgcacactgccaaagattgagaattgttctnaaggattagcagctatgcctagaaat

SEQ ID NO: 13127 - DNA, 432 bp, Glycine max
tgtccttggtttagacatgattggtgcatgatttgggacttgtatgattcaatttgggcaatattggatgagggaaagagtggttttcgaaatctgcactttatgcagaattttgctgttgaaatgtgcagcagaattttgcataagtgcagaaaaatgctatgtaattgctggttgtggaaagagtagtacagaatgagttctggatgttttctagtagatcccaacggtaaaaatgtatacttatgtactacagacttccgtaaaattttcgagtcgatccaacggttaacggattggaacgaaggaaatgttactggggtctttaagtgagaaaaagctgtgattttggtttgaattttgggcagagttttctgcctttgccccggtttgcttggtttgttaatttgtgatgatttggatgttgaatta

SEQ ID NO: 13128 - DNA, 665 bp, Glycine max
  unsure (1)..(665): unsure at all n locations
tatgctcttcactgcngtgaccttgantctaagctcagaaaagatgcctcaganactcctatntccagaaaggaattctatcaatatacctccaatctntaatggagagggttaccactactgtgaaacccgaatggcagattttatagaggcaatagacctaaatatttgtgaagccatagaaatagggccttatatacccaccacagtagaaagagttacaatagatggtagttcatcaagtgaaagcattacaatagaaaaacctagagatagatgatctgaagaggatagantatgagtacaantacacattattagccaaaacataataacatctgccctgggaatggatgaaatattcacgggttcaaattgtaagagtgctaacgannatgtggacactcttcgattaacacatgaaggaactacagatggtaanagatctacgatacatgcactaactcatgagtatgaactatttagaatgaatgcacatgaaaatattcanagcatgcacaagagaattacacatatagtatatcgtctagcagccttacgtaangagattcaaataggatctcataacaccgtgttagatgttacgtagagatggcacccaagtatcggcatactgatacgagattgctatctgtccttgcctt

SEQ ID NO: 13129 - DNA, 622 bp, Glycine max
  unsure (1)..(622): unsure at all n locations
tatgcttgctccgcttcangtgaccttagatactaagcttagagacacagcgagccaacanaagtngatggaccctnntaatanatcttctctataatcgaatattacctcttcaccatcatagttgatagtgccatcaggctgaggactctcatcatctgagctagcatccagtgtttggtttactttactggtggacgcattagtcattatacacatgttgacttcttcctcattgttctcatccaacgatgaatcatccaggtcctcccaagtgctcatgaggctnttctttntggactngaagaatntattcttcttatcctttgactntccaagggtaggacattctgacttgaagtgtnctggcttcttgacatatagctcataatcgaatnntctcttatgnaggatcttcggatgagccgcaaacttaaggagtcttatcttctatatcttctaatcttctggtgacagactcactcatcatcttctcttagagcatatcatataaatcttctataagcttataacgcacggcatagagagactcttgacgcaagtacatttgtctgagtganggctgcgacttctcttgtctcatctgacaccttgtatgacg

SEQ ID NO: 13130 - DNA, 608 bp, Glycine max
  unsure (1)..(608): unsure at all n locations
nttgttccctgtcgcgcgatcctctgnagcacctgcggcatgcnngctgncttcttacangtccagtgctacctcgtagccactggatcttctttgatngatatctncgctgcctgcntaacannnataaaagagaaatcagtacatgcattacagtatataagaatnttcataatgtcattcaatatcanaatataatatactaacctctgatgcttttatagaaataaagtgtatgtcactatagatcagagtgatcataattataattntatataatatcttaagatatactaaccctatnttaatgattattgatctgaccatgtaaggtttctgattgatcatccaaatgcaaaattggtgctcttgatacttacaaacattccatatattctattgatgatcaagtttataaccacataaacttctaataaaataccaacatcactaatttatggcctattatagacatatcacattatagttattaatatctctgttagtaactgtaaacaatctgctataggagaatagaatgaatcaatcatgttgatgaaatattatagactgctatctgtataatcagtgcagaaaagaacaatccg

SEQ ID NO: 13131 - DNA, 565 bp, Glycine max
tccgcatcacccgctacttcaattgtttcctttatcatccttttttggtgtatagctagctttcggtatttgaacaatttttcaatataaaattattccctaaaatgaacactgcatgaacatgttccaacgttgcaactccacctttaacgtacgcatatattttaatactttgaaaataaaattaaggtgtcagttcatctcttatgttagtgcacagcgatattgtgtccataaaagactgcttatcattatagaatatttctattttacatcgcttcttggtttatttattggtgtaagtacttttcttatttcaatgcgtgtttgtatgtgtgggtattattgcttacactatgaatacatgtacgcgcgtttgcatttgagtaaagaaaaaattgagtgcgtgtttatttctttgcttttgtactttaaaaaaaaaaataaaattctaccttatagaaattttctttttcaataaaatcagattttattttatttaaggtaaaataaaatgaatcattaaaaagggtggtagatgtacaactgactctaaaaattttaa

SEQ ID NO: 13132 - DNA, 112 bp, Glycine max
catttttactctgtcaggaccattggattcattgtttttcttttttatcatcgccctctattttttatctgtgcgaatagcaccctgacatcctgattaagctagagcttta

SEQ ID NO: 13133 - DNA, 373 bp, Glycine max
tgcacattgctgcttaatagaagaagagaagaatgcttagccttggtacttcaatatcaaacgatacatcgaagacaagaaatacccgcatgaggcctctaacaacgacaagaggacattgcaaaggttggcagccaacttcttcctgagtgggaatatcttatacaagaggaaccatgacatggtgctacttcgatgtgtggatgccagagaagctgagcaaatgctggtagaggtgcatgagggatcctttggaacacatgccaatggagagctgggtattactagctcactatggagagcgattgtgcatctttgtgaggaaatgccataagagccagacctttactgataatgttaatgctacacccat

SEQ ID NO: 13134 - DNA, 548 bp, Glycine max
  unsure (1)..(548): unsure at all n locations
atgtactgtcgcggacttaagcaccgagctgcagctaacactcttctactntcttattgtggtcatcttcttggggtgaaactgcctgagtctcttcatatatatgtgctgagangcaggctgattcttgaggtcgattatgcaccaatactttctgtgctcttagaatttacaacctgtctttctcaatggagtgattgtgatcaccacaggctatctcatctttcanaacacaacttagatgttgagcagatcttcactctccttttctctcgatgggctcgtcttagtcctaagctgcttccctcagaagcttctctaatcaagtctcagcagcctgaatctttttttactggaagcagtactatactaactcttccgaggttgggttgaagatatgttcctgaactctcactgacactctgttcctggtttattgtcaaagtaggcccttgatgatgcaatccatcatctatgtaccacctgagccatacgttgcaataagactctgcttcatctatatatccgaagaggcgctgtgatctcct

SEQ ID NO: 13135 - DNA, 492 bp, Glycine max
  unsure (1)..(492): unsure at all n locations
gtgttcattgccacctatagtaccttgatactcagctcctgtagtctgtgtatggtattctaggaatgcaattcggtatgctgcagcttccacatgcttactttcacggcnttgtacattcactttatggttcaaatgctatctccatggtgactctcgctctttcttatattattaattaaatttaaacaatgatattatatgacaataataatttaacaaatgaaactactactttagtttgattcttcagacagatgtacacaaataacccacttgatacacctttatctgacttgagtgaaggaacaaaaggccagacaactgatacatgctaccgcagcatattaaataatatctctgtgaccatggagacataccagatatatacaatctattctaacactaagacactacattcgaagcacccggttatgcattgcgttccaatagcgttggcgttgaaaatattgaatgccttattcttcaaac

SEQ ID NO: 13136 - DNA, 152 bp, Glycine max
ttctactagacttatgtgcatgacatttttttaagaatagagttttttttgtacatcatcaccattggatatgctctacaacaatcaacatcccagctctctaagctctctataaatgtgctgaataatagactataccaaaaaacacaaaa

SEQ ID NO: 13137 - DNA, 271 bp, Glycine max
  unsure (1)..(271): unsure at all n locations
tttctatttggggccttattcatgaatcgttccgttgccacaacacaaacacttgaacaaaactggcctaatgtattttcaccgaaccccacccttgtgtttagtatggtttgcgcgttattagtacagttaaaacctttctgactaaattgtatttcaacctttgattcctggaatttaaaaaacgaagccttttggatctgccaaaattaaaattatggcagaggattattcatctaaatgaaaatctagttgattntgattattaatt

SEQ ID NO: 13138 - DNA, 249 bp, Glycine max
tgctgtactatgtctatgactgagtatgaaatgtagaaggatcaattgcttcgattgtgcatggcacaattgttgcgaagttgttgtgtggaaaatcaatggttgagtttacatcacgctagaattgctaactaaattagctccgtcatgacaaagtctggtgtcaaatgggggcatcgctgcatgtgttgatcagaataaggatctgagtggactgagaattgctggtaagacagatagtctgatcta

SEQ ID NO: 13139 - DNA, 293 bp, Glycine max
ttggaacccgaacgctccattgactagcccgtttatgctaagcttttggtatgcatccttgggacacaccctgtgtaaaccaatgtagataattactgacttgtggataatagccaattgataaatgttgcttatagataatgttacatattacatgttacttagagataattgctagttgataattgtaccttatagataatgtgtagctttgtagataattgaatacctgcccagagataaaaggatgacaatatattcaataatagaggttagagataactttgtggttt

SEQ ID NO: 13140 - DNA, 352 bp, Glycine max
ggtcttagcacgcgctgcactactatgtttacgcttattgggcatcatctggtcgcttcgcctttaagcgcgtatcctctgttcctgtttgctttaccatcttgctgaatctgatcctggtgtgcatgacctcataagggagttcgtgagcttttgggcacgcttgagcgattatatcacctgtcataaacatgctcttagaataacattctcttcagacataaacccttgtcaatggcatgctctttaccacgactgcgaagtcttgaagggacccctagctgcaaattgtttttccgaagttgaagaacgtctcaagagagttggctctttaagaacaaacagtaactct

SEQ ID NO: 13141 - DNA, 674 bp, Glycine max
  unsure (1)..(674): unsure at all n locations
tatgcacgcatgaggactatgacactaagctatgctgctnacatctacacagacctcctcaacctcagcagcaaactctgccacaacagaacaattactccagcaataggtacaatcccgggtggaggaatcatcccaaccttagatggtcgaatccttcacaacagcagcaacaacaaccctantttcataatgctgctagcccaagcagaccatacattcctccaccaattcagcaacaacaacagcaacagcctcagatatagcaaacagttgaggctcctccgcaaccttcccttgaagaacatgttaggcaaatagatgttgcaacgtgcccttttgcgggcgtgcgaggcgaggctcacgggtgcactntccanatgaggatagatgcgcggagtcgccaccaacgtnntattgtagaaacgtcagaaaaacctacggataccggcataatgaaaatctaagtcgggagttgtattacgtctgagggnggtatagcacctcttacgtctgtctcgaagacaacagcctatacttaagaatgttganatcgtataccntaagctttatgtcttatattttttanagcnacnagagcggagctatggctctacgtacactcngacgacaatggagtataactacgtagtcatttctacgagtgatgatat

SEQ ID NO: 13142 - DNA, 331 bp, Glycine max
  unsure (1)..(331): unsure at all n locations
acacggctcactgcgtggaagttatgtanaaattattacattcctagccgatctaaaaatcactcgaaggtgcatactaacacagtgtgacaactatgaaaaggaacgccttaatctttggagcgtgatcaactgtgccgcatgaagtgatacaaatagacgttagtgtgacgcgtaaaattacctaccgtggggagagcatgaaaaccactggtctgtgaagaaaagaattgattttgcccaaaaaaaaagtttttaaaggtatacttaaactgcatttaaaactcacgaataatgcatcttcaggccttcagaattttaatggtatgat

SEQ ID NO: 13143 - DNA, 391 bp, Glycine max
tctaaggaagttttctcaaagaagcttctcaaggaagttttctcaagaaagcttctcaaggaaactacctagttaataaatagaagcatgtgtaacacttgttgtaactttgatgaatgagagtcttgtgagacacaactcaaagttcaacttctctccttttttttccttcaatttcgtgctcccccctctctctttctctccctctttcttttcctccattgaagcatcctctccaagcttcttatccaaagcttatcttggtggtgaagctccttcttccatggcttattccctagtggatggcgcctcctctcacctcttcttctttgtcttccactgcatctccatgggtggaaaatcaccattaaaggacctcattgaagctcaa

SEQ ID NO: 13144 - DNA, 441 bp, Glycine max
tgtagaatggctagacatgatacatgtcagggtttggtttggttcaaggataaaagggatgccccacattatttccatgacacaaatgcaaaaatgatgatttggaaactttatgcaaaactggtcatgcatgcacctatgcggacactcaagtgtcaaatttttatggtcatgtgatgctagggctcacgattcatttcctctattttaatcaacccaatgtttccaaaatatgttcttttatcaatttgtgcattcatccgagtccatttcgggcgtctggggaaatttcacagcattcacccttcaggtgtagacacattttccaaaaattggttatgatcaatgaatttttcaaagaaaagttggaaatcgtcttttttcaaaagcatgttagtttttagctagacaacttatggttttccttttttttttttcttc

SEQ ID NO: 13145 - DNA, 559 bp, Glycine max
  unsure (1)..(559): unsure at all n locations
ntgtgggttgttagccgtgccgcgatctctgagtcacctgcggatgcagcttancaaataatcacataactttactcgtgtcgattgctcccgtgatatcgagacgtcatatcagatagagctctgacaaatctacgacataacttntactcggatgccgattgtgcccgtttatatcgagacgctcgaattcaaacagaactctgagcagaacaatcgacataacatttactcggctgtcgattggtcccgagatatcagacgccgaattagataaaagctctgagcaaattacgacataactcttactcgatgtcgatggtccgagatatagacgtgaataaaagacttgacaattaacacaaacttttctggtgccgtggtcgcttaccgagctaattaaataacttacaatcacaatactttctcgtttatgtgcgtaataacgcaataaatactcgaaacacgaaaattattgtgcgggccggatatgactatttaacattgcaacaagtcttttctgcggtcttttcgcggaataaagctgaacaccatctct

SEQ ID NO: 13146 - DNA, 322 bp, Glycine max
ttcccccatcgcccacgaagtcacgcacctcttctgggtttcctttcaaattcacgcagacgaagaatacaatgcaactgtcaacaaaaccatgctactcaaccttctaactgccctgaaatctttcacgacatcccggttggcccatgtaacggtccaaaccggaaccaaacactacatgggcccagttttcgacccggttacttcacgcaacttatctggcaccacccaccctttgacgaaaacatgccacggctcccttaacaaacttctactacgcgctcgaggacctggatgcttcttagcgccctcgctgacgtac

SEQ ID NO: 13147 - DNA, 344 bp, Glycine max
  unsure (1)..(344): unsure at all n locations
ttctctcaaatcctttttctctagaaaaggatcaagcaataacaaaggtcaccttgtaggcattaaagagatgcactaaatacatgattccctaaattttggacttctaagcattcaaaatgaagatcctatgtagtcttacaataaggttttaatatagacaatgccaacaagttaacactctttcaaaaagttaagccacagacgaaaatagaagaaaaaaataatggagtaaggttcaagaccaagattaaagagctagagtctatggcctangtatgtcttgtaaactctccaagtatcactagaaatcaatgatccatctagagctctaataatcaatc

SEQ ID NO: 13148 - DNA, 568 bp, Glycine max
  unsure (1)..(568): unsure at all n locations
cgcgtgcacctgtagctcgtcacgngatctctnagtcgacctgnggcttgcangcntgcatantcacattctncccctttgtcaagcannatctttnttatatcatcaataacctgcatgattacaactctcccttcgaaatctncaagaaacganaccntgagttatgaattgtaaggtcgtccaaacacttttaattgctgaagtgaaaccaggtgagtttataagaaaacatataccgctgaatgatagatacaatatatgatatctcaaaggatcataattccattaatcataaaggtctcccaattgagacatcaatatgataatatatgtctgtactatgaacacttcagatgatgacattctaatcttatcgtaactaaaccagaacaactgtctaagacatgatcatacatattgtatgctaatgacatactttacatttaaacttgtatatcccaactatgtagagcgattcctgaagttattaacattctgttttagagtggcccttatagtataccactcatcctatagtgctgaataacttgctctatacttggct

SEQ ID NO: 13149 - DNA, 453 bp, Glycine max
aagctaataagttttaacccgaaggatatttgggtcataacttgatcatgattaggggtaataaggattcatgcttgagggtttatgaagatatgatgttgtaatacaacacactacaacaccatattatgttttaactgtaaggagttaagacctcctgatttgagaaatttgaaataagcttattatgtgcttggtgctccataaatatctccctattatgtgcttgttgctccataaatatctttctctgattgttatagcttaacatggaaattcttcaagtccaactactgaatttttgtcttgcccaaggtgaaggtgactgatgtgtcatcattttttcatattttctaaccacttttcgtcaccattttaaatactgaatagccttaattgtcaaattaatccagctttaattaatggaataattttgtgtttttaatttaattt

SEQ ID NO: 13150 - DNA, 71 bp, Glycine max
caccttcttctgtgcttactatatttttgaattatgtaactttcctcatttcacttcagaagtctctgtat

SEQ ID NO: 13151 - DNA, 157 bp, Glycine max
  unsure (1)..(157): unsure at all n locations
tattctaatgaacaatctaatatatctaatagataagtctaatagataaaatttgagataaatagtcagcctcttcagtcaaccaattctgattcagcncatgcttataatcctgaatagataaaacatannatactgatgacccaatataaactgc

SEQ ID NO: 13152 - DNA, 373 bp, Glycine max
  unsure (1)..(373): unsure at all n locations
tgttgattgccgtaccaagagttaagcaccaagcatttctcaccacacatcagcatagtccctcaccaagataaaagggactaaaagtaaatgatttttatatttttcagaaataaattttgaaaaacaaaaatggataaatttaaaataagtcgaattggagaatctttttatatttatgccactttttaggtacaaacttttgtatttttatttttatcancctaaactaaaacggaagtattcatttcaaatttttcatctatagtctaaggaaaaactcactttttctctggttttttttattgtctntgaacacgtattgatattgatttttttatcgtatttgaacaactaaaataaaaaaaaaaaa

SEQ ID NO: 13153 - DNA, 259 bp, Glycine max
cccaccatttttcataggaaaacatttgttatgtgtctactattattgtgaacatttctttccccggcattggaggggccacttgatctgtcaagtctcttcatctttgggcgtattcttttaaaaaatcctgtcacttgaactgccaaggctttccatcttttggcctattctttgaaagaattgtgcccctttttgcacatgttcttgtagtgcatcctatccggaaccatatcaaaattgtactgatactgcctaa

SEQ ID NO: 13154 - DNA, 420 bp, Glycine max
  unsure (1)..(420): unsure at all n locations
ttgtgcgtcggtcttagcacgcgctgcnctgacgtggattgcaagtgaagagtatcttttctctactcccgtatgcagatatgggtgatgcttaaatggaataagcatcttaaaaagctacttgggaacgggctaaaacccattcgctcatgaattaatcttattattttaatattagtgaaatttatgagactcctgagactttatgcttactcatgtgcatttgagacacattgactcactatactcacaactgaagaaactttctacctagaaggtttgctctaatagctatcttttctgccatgtgaagcaaagttgcctatgccaagtatgtatcaaacctgctgttggggttccagttctactttacttgcgggtcttttttcttgcactactctcggggatagaggccttggg

SEQ ID NO: 13155 - DNA, 576 bp, Glycine max
  unsure (1)..(576): unsure at all n locations
tatgccaccttgagagctatgatactaagctgtgcatcatatcctgtgagggtgtccatatgttctaagactgactaaacattgctgcccaagttcatggtcttgcanngtgaaatccttataagcatcttaaggagttccatattgtttgtccacccatgaagcccctaatggtcccggaaatcatatctttctaaagggctttcctcgttctctggagggagtggcaaaagattggtgtactgccttgctccaggtccatttagctggatgaccttaagaggggttcttgaganattcttcctgcatgtagaccactgcatcanaaagacatttangcatangcaacttantgagagagcttgttgatactgnaaagatcaagaattggtgcagtgtctcccacaattctaacaactctcttaattttatgaggactacactggaacagatgatgatgctgcaggggactctgtgattaccctctgggtagaattatgaaaatattcactccacatcatgagaatatgtatgtctaagagcatgagacacgatctctattctaaataaactgag

SEQ ID NO: 13156 - DNA, 202 bp, Glycine max
gcacttgttgcgaccttgtaccctcgctaggcctcagactccgtcatcaacatcacgcgatcaccaagaatctcagctgcgataccctcagaacaaacttactctctgcatttggcggactcgaggctcacccttcaagggtactaccatgagcctgggggcggctcgcaaagtgctaaacagcactatggcgtggctcaag

SEQ ID NO: 13157 - DNA, 130 bp, Glycine max
cttaacacagaaccccttcaaaagcactttattatacacttgcacacatatctttcttaaccaaattgtgtgtgaaatttctttttctcttgggttccccttgtttttttttttttaagggggggggggg

SEQ ID NO: 13158 - DNA, 470 bp, Glycine max
  unsure (1)..(470): unsure at all n locations
ngatgtactgtccggatcttgagcgactgggcatgcagcttgtaaaccatattaatcatcaccctacacaaatcctttgtaagatctattaaaagaatttcttaacctcagcaatcaagatacataagaagaagatagatcagagagatgtcatctttttatggtcactcttatcttaagactcttcatattatcaacaataatttcttcttaaattcacaccatcttagtcacctaaaaacacgccatcttgcttatataagctaagaactactaccaacaaaacatcactcctaaatatgttgacactgaaccacaaatcagaaaaacactatgatcccaaactgtgagagcattgatcaaataatcttactgactaaaaaattagtgctcctattacctctttttttatgaaacaggatctaaaaaactgagtaacagaaattatattaggctcctgaataaagaaa

SEQ ID NO: 13159 - DNA, 346 bp, Glycine max
ttttatgttttttagtcgtttctccctaatatattataaaatggaattctaaccattatatgtgttgtaatctcgtttaatcactggcaaaacaaaatttaaccgatcgttcacgctgttaccacggttaaacccatacaaatgcgaaatagttattaaataatcaaaatatcttgaaaaataataataaaataatcaaaatatttttgaataaaataataaaaaaaatcaatcggacgtttttctttggaagtttccttgaatgaattgactaataaacaaagtgaaactacgctaaaatcaactcacaaatcaagctttgtccgcaaaagtaactcaaaaccgt

SEQ ID NO: 13160 - DNA, 439 bp, Glycine max
  unsure (1)..(439): unsure at all n locations
tgtgcctccggatcttagcacgcgctgcncttgaaatagataagtccccaatgtgcaatatgagataacctaaactctataaattcaggacttattataatgcaatcgaagtctaacaataaggttgagaagttgttgaagaccctgtgttttggaaaaacctgagcaacaggttctaaagtcccaccttctggtataaaagacaaaagatggactaaaaaatatctgtgaatgtttgtagagagaacgcatctgtcttgcgtgcttataccagacaaaaaggtgtcatctgctctattgtgacatcttgagataaagtgaaaaagtgaatattcccttctttgtggtatgtagttactacatgctacattggcacatagtctacaggagggttgagggtcttcttcaaagcctcaaatgactaaagggtcgtgagatg

SEQ ID NO: 13161 - DNA, 319 bp, Glycine max
actgggggatgaacaaactgtgtttgataccactccatttaaagaaaaacctgttcctaagagtcatgccaactaaagaggaaagcttattccacttattaataggaggttcatttctcacaaccagacacggcataattaaacatgtagaaatataccttgatcagttttccacttgctgtccaaaactttaattttgcagacaacatactttttaagcctggcagtgcccaatattggtcctacagatttcaaagcaatgaaattcaactgctgtttaaagcacaaacaatatagcttataacatatggaatattga

SEQ ID NO: 13162 - DNA, 506 bp, Glycine max
  unsure (1)..(506): unsure at all n locations
ccctcactccctctctcgtattcttcccttcatcacaccccnncnnnctnttgtctgtgcgtctnacaccggtcactgagaaanangcactaccatggcaaagctgttgaccagattctctggaaactggcagcacttaacaaatccaggagagcacttctacaatagatacttacagttagacagcgtttatatttgcaacctctttcttatgtagttgaagcaaaacaatagcagtactcggaacactcaggtgccactgcatatttatatgtataaggtaataaaaacatagctgatcctgcaaactacaaaaaggtgttttaacaaaccagtgtctcattttgacatgaaatagactatttcttcttacttacaggtgtagctctcatatttgcattatgagcaactattgcttacgtgactgacaacctatctcttatccgaccaacatggggtcacctacaactgtcactctactggtgtgattgctggctcgattggcn

SEQ ID NO: 13163 - DNA, 359 bp, Glycine max
  unsure (1)..(359): unsure at all n locations
agcttttagccgaaaggacctaccttgaaataagtccctcgattgcccttatgagccttgcgagcctctccttgaaatgaagctcactgcaagccgtaaataaagaaccatgatatttccacatccttaaggaattttggagctatggagattgtttgtgaataactgagggggggggggggaatnaataccctaatttttgtgacaacccaaaaaatttatatgtcaatttgccaatgaaatatctgaatgaatgaaaatttgaaaacattcctccaatatgttaaaagagaccacaaattggcctcttacagcttaacttaatatcttaatgtcaaagaggatatcattatcttact

SEQ ID NO: 13164 - DNA, 511 bp, Glycine max
  unsure (1)..(511): unsure at all n locations
ttgttccgtctgtcnggactctagcactgggctgcagcttacacatntcacagaatataaaaacttttttattacagattataagtaagtcatatcatactcatcgctactcacctacaaattaaggattctgagctggcacatttgcatctcaaagataattggtgaacgatgctntatggacatgtccntgtgatctgataccgcaatggatagatggtctctcagatanatatggtatgcctccacggtctcagaccgtgatccgctaatacctatactcaaggaaatgctctaatgatacattcttgcatataggatcatacaaaccttctaacactggcatagacgatcttttagattgattgtgtgtctagacaatgtctgtaatacatttgctatatatgtgatgcttcagatcatacgcaccaggggtagtacaacatagtagttgtctgaggtttgtcctccaccctctctaacaaacatattctcctgcctgacagcaact

SEQ ID NO: 13165 - DNA, 332 bp, Glycine max
gaacatcatgcagcaataaagaggagggatcccttggtggtggagatggagtgcattcgtccggagcattaagcgggagatcctatttatgaaccccatttagatccttcctatacccaaaggacacaactgcagtggccgaaaatggtaaaggaacgtttaaccttaacaaaaagttcattaacaaaaggaatgttgaagtgctgcagaattcaagtaacaaggtggggataagggagaggtgcattttcccgaagccttatgcatatggtagcgaacaagatgggcccattcatttgacgaccagtttgtaggcctataacagaatcata

SEQ ID NO: 13166 - DNA, 67 bp, Glycine max
tgggaccaatatttaactttcggaatctcacccttttaactaacgttgttgttctgactatctcctt

SEQ ID NO: 13167 - DNA, 241 bp, Glycine max
gatttgccaaataacactttttgacattctttcttggcaagacaaatgcactgagcgccattcttacccgagaagaattgggctcaatgtgaaatggcgcactcaacccccaaagttgatttttgcttaacgaagaaaactaactatgccagaattgcaaatcataaatacattgttcaacatgaaaaatacattttttcactcttctttttttcaaacgcctacctaaaccctaacacct

SEQ ID NO: 13168 - DNA, 295 bp, Glycine max
atttgatcatcatactttgataaatgcccaaaaaactatggcaagtgaaaaggatgagaaagagggagaaacctatgctgtgactgccattcctatacagccaagtttcccaccaacccaacaatgtcattacttatccaataacaaacctttttcttacccaccacacaattattcacaaaagccatccctaaaattaaccacaaagcctacctaccgcactttcaatgacaaacaccacctttagcgtaaccaaaacaccaacccagaaatgattttgcaacaagaaagcctg

SEQ ID NO: 13169 - DNA, 207 bp, Glycine max
gagacaagaaaaggaagagcctcttagtaccggaaaactcccgagactgtaactgagactctggaaaaagaaaaaaagggccaatagaataggaaatacttggggtcaactattcataccatgacgctatatcagagtctaacttgaactctgactttaaatctgagtatacccccctcacactcctgactttaaatcaacaatccc

SEQ ID NO: 13170 - DNA, 654 bp, Glycine max
  unsure (1)..(654): unsure at all n locations
tatgcttcctccgcttgcngtgacctatgantactaagctcatgatgagtcnaggtgagtcanaggtgttntgatgataacantgatgattacatattatgatgacaaaggtgatgaccaacagctcanagatcaatcacagaacaactcaagtgaatcaagaactattcaagagttcaagatgagaatcatgaagaattcatgactcatgaagaaatgttagagtcaagaatcatgattcatggctcaagatctcatgaatcaagatcatgattcaagactcaagattcaagactcaagagaaggcttattcaagactagtatgagaacgttctctcataaatcgagtagcacatgattgttctcataacatgtttagcacagagttnttactctcttgtgatcgattacaactgtttggtaatcgattaccagtgcctttgtacgttcanattcanattcatatgtgaagagtcacatcctttcacatattagctttgtgtaatcgatacattgatttggtgatcganaccantgatcgttctgagtanatcaaatatgaactctcaatagttttgctcttcaatcagtctangtttctaagcatactctcattgttgctgcagcatactagctataacaagctttttgttt

SEQ ID NO: 13171 - DNA, 301 bp, Glycine max
tttgcttgtgatcggctttggctttatgtctaggcatcaatataaactttgactgtattgccctagtaatttaggccagcatctaaattttaagtcttggtggtcagtgtgatgtaaatgtatactctttacacactgtttactatggctgccttcttatgaactgtcattaactaaaagcctcgtcttagctgattgatatggctgttatagcattttctgtcttcaacttttcaagtgcttttcactaccagctgtaaatcaaaggaaacagagctgtttactgtattacctgcaatac

SEQ ID NO: 13172 - DNA, 663 bp, Glycine max
  unsure (1)..(663): unsure at all n locations
tgtgntccattgangccgcttgangtacactatgatactcagctnntaaacttanatggcaagcttctcagttctgccactttagtcatctgttcactgtccacacttgtgtccacaacagtcaaattcatgacatctgtactgcagtttggagttttaccatgagatagcagtggcgtggttgatcacgggaaatttcatggtccagttttgtatcttttgtccaaccatatccttcattgctagtgcaatcattatctgcaatcgactcgagctcaattagctcatggtcagaagcaactttacacatgacatcactaacagaaatcaaatagtgattccccttcacgtagtttctcgaaaactttttaacccncaggacaacggaaaaccagagaatgctttataaccatcagcataatatgactattctggcttgtcatagtgcccacctctggcaagttaacgaggccaaacagctttccagaagagatcacttgttcgagcgttactttaatctgaaatcacctgtangaanactaataattnctgaagtgtagaattgacatgctttgccacttgttttcttgcnagcngaatgcgtgatggattatgaatcataccgttctgcaaacgtttttccttccttggttctcctcaaag

SEQ ID NO: 13173 - DNA, 156 bp, Glycine max
  unsure (1)..(156): unsure at all n locations
tttattcttcgactgcgggggagcctctatccagcttgagctgaatcgtatcttgttcctggaaagcaccttgacgcaagcattaacggaccagngagtgaaacacctctgtcacataatttcatatagcccttcaatgacaggaagagaagaact

SEQ ID NO: 13174 - DNA, 371 bp, Glycine max
gcattctggttcctctgggaattccatgaaaaggtgggggtctacagacaaaagtacagataagttgtagtaaatttttcttttttcaaaatgcatacaaaaacttaagtggaactataaacacacccagaacaaagtggcattgtttagcatcacctaagctcatcaacaggaccttaaattttacagaaatagcagcaaagtgaaaaacggttacccactataaaatattaagacatgcttagattgaaaaaggtttcagatttcaccggtaattacaaaaatatcaatttattctcattttacttcatgcttcctaagacgtgtatatcaaatgacaaaaatatcaaatttgttctcattttacttca

SEQ ID NO: 13175 - DNA, 574 bp, Glycine max
  unsure (1)..(574): unsure at all n locations
tatgctttgtgcggatcttgagcacctgcggctgcagctatccaaagtaaaagaaatataatntttttagaaacatactacacattcnctgcatataccacgtaaattcttaacagtgcanaggcaaagagtgaggctcacccgtaagtgtgatagagaaacacgaaacattgtaccatgaccacgatatgcatcatgtgatgacatgcctcataacagggcaccagtttataggtccataaaatttccattatggcatcanagcataatggatccattctatcgagatcagcatgacactcatngcacactacanggccatagtanggtagccgcgacataaacttacatactggcttatgcaccccaacacgttgagtatgtgacggcagaggattttgcctgatgcatgttgtaacctcttattgtgtgaccatgtcactctgtatctctgcacagtgcanaaatcgtcaacccccctttttttttttttttttttttttaataattaattaaatataaacaaggggggggggaaagatacaaagtgcaacaanagtatgtatcatatgct

SEQ ID NO: 13176 - DNA, 276 bp, Glycine max
tttttctggtataaattacttcatcttataacatttcaccctactagccatgcatgatatcagacggggttctcaaagagaaaatcttaatggttgtgtatttggtaaatccatcgtgaaatttcggaactaagtttcaatttctgaaaaaagaaggtaaagtgaaaatatatgcttaattttcacatatttttctgtgtattttctctataagggtatgaaaaatatgaaaaccagtattgctgatatgatcatgccacattaacatgttttaaa

SEQ ID NO: 13177 - DNA, 120 bp, Glycine max
actctgagctagtactccacaccttatactactactctgaagctttgaagatctaagagtaactactccccctttatgtactgctctgaagaagtaagtacacccccttaagtactaccc

SEQ ID NO: 13178 - DNA, 423 bp, Glycine max
tgtaggattatggggtacccgtcatatgtggtactatgtggcgatcagcccatggtgcaagtcgactctccacatccataaatcacacataaatccatcatccccagttgcccaccttcaactgagctcacgtactcccacgtagcccttatactagttcctctcaacaccgggtgcccatcaatccctccaagcttccacaacatccaagaaattcagcatccaaacatcatgaactatccaaaactaagaaaacagggcaaaggcagaaaactctgcccaaaacacattccaataccacagttgtcctcactcaaataccccagtaacattctcttcgttccgatttgttaaccgttggatcgactcgaaacttttactggaggccctaatacataaatctacatttgacccgtgggatct

SEQ ID NO: 13179 - DNA, 529 bp, Glycine max
  unsure (1)..(529): unsure at all n locations
tggttgtgcgtctaagcactgngctcagctggtcagtctaccgtgaatcatacagagacgtcagaacgtcaaccttcgcgaantcctacgaaacgtatggaacgttcgaagccctcgctatatttctcaccgaacaattttccagcaattcgaagagaagagtgctaagggctgaccctttctctcacttctcgcattatagcaaaangngagaggtgccgccactcgccagcgagcangtgcttctcatagcacagcttctgagatctttgaggccaatggcctgtgctattgccccatctactaatcaccctgcttgntngtgatcttttcgaagtcggactacaattctacatctgttcttctatgtcgactgcgtactatatcctttactcgatgtcgactactatgcacgactcatgattcgggacgactacgtgcgtatattttgttgctgcgattcaatgcagatgcacctcagcagagcctgtcacagccgcaatagtaatccctttctatgaaagagaat

SEQ ID NO: 13180 - DNA, 166 bp, Glycine max
aagacaaccaaccattcttttacacccccaagaaagaagaaaggaaaatagacttcagatgcaatgtaaaaagaaatttccattgtagatccaggcttacacttttactctttttagtagaattttcatccaaaatatgccttttttagttcactatgctctggat

SEQ ID NO: 13181 - DNA, 409 bp, Glycine max
  unsure (1)..(409): unsure at all n locations
natgaccgtgcggtccggacactgngatcagctgagatatgggaccataatgtgacangtgcgangcgatggccacagtttcaatcacaaccgctaaccacatcctgtgcactcacgactatgctcccgagcatatctgtttaaacggccatatctcagtccatcagatcatacaccactcgcaaacggcagcaaacttgcacacacaatcagtttataaaccgacatctctcatctacggacatcaagtacgagtcatcatacattgcgtgataacaaccatattatatttcccatcccactttgtggcattgtgcataaaaatgcagcatgaccctcttcatgcaaactagcaagtattgacacataccacaatggcacttagttatgaataagatacatctcctcc

SEQ ID NO: 13182 - DNA, 182 bp, Glycine max
atctgctggaataatcgcttaacatactaacgatctatatatagtattacatcaagctattacagtacagaaatatctaatatatttacaaaattattatataatttatacatagctcttatcatatagaatattataaaatagtataaaaactattaggtaatctagcaaacaacacctgt

SEQ ID NO: 13183 - DNA, 639 bp, Glycine max
  unsure (1)..(639): unsure at all n locations
ncctaacagttcgatcgtgntcanntttcgnatgagcangncccaancnnccngancatgtngttntgatatattcgtgctagctgatttgttctatatctgagngcnnagaattactggaggtcttatatgccacacatgagttctttcaccgtaaaacatanggntaaccttatanttcactttatataagagtgtttctagccaatatttatgaacaataacaagttttataactattcaccggatatatctgctacgacaacaatctggttgtgagagttgtatagactggttttattaaaatcttgacctcacaaatgatattattatgtgggaanatgtaagataacatatcacatctgtgagaaatcgtatctgaagcccaacatgattgagaataatttatgagtgacactttgataactgatcgcagagtattatgacagtaacatctaacattggaactgcgaatgtgatatattacctatacatattatgtcttgactatgatgcaatgtttatattctcggataattgtaactctatgaatgacatgtctgagttgcacgatctctgttgatcatttatcgcaagcaagatttatatattatcgacgaataatgagactctactccg

SEQ ID NO: 13184 - DNA, 402 bp, Glycine max
ctgaattcattctatttacccttacgggtccattcttgctttgtatgttttcatccttcatctcggtctacttatccggtattactttttttctattggttttaaaacaaagttttcgatccgatatgtttatagtccatacacgcgtctactctaattcacaatggtttaataatggagatttcccgaccccgatgcggtttgcatttggtaatcctcattttaaatcacccttttataaataaaatttcaaccaaatcgtttatggttgtaaccctcaggttaaatcatccgaaaagggcaagtttcaaccggacatttactttgaaagttctctttaaatgaattgagaaataaccaagtgaaactaacgctaaaatcaaatcacaaatcaagcttttg

SEQ ID NO: 13185 - DNA, 377 bp, Glycine max
gaccctgacactttgtgaatgattttcaatttttatccttgtgcttgttgccctactgggcttctgttttggaaagattaaattggaaaggaatggctgcaggtgaattttagaaccattcatgtcaaaaatcatggtttattattattttttaaatgcgaacaaataggtgaatcaatggattcttggtttgttaccctcgattttttttttcatacataatcttgagcaatgaattttatttttattgctttcttggtcttgaactgaacttgtaaaattgaccttaagactttttgggaaactcctctttttttcctttatcggacggataacatgtcattacaaagttcatgtttaatcaaaggggccgcttc

SEQ ID NO: 13186 - DNA, 652 bp, Glycine max
  unsure (1)..(652): unsure at all n locations
ttctggtaccttaggccttgatctagctacctatggctgctcgactactcccgtccgtccaacattgagccagccctaccttcaggggcaactcccaccttatgctgactatccnctgcaagaagacgatgaagaagatgcccatctaggccctctacttccnctcaaggatcacggcccccatgaatatccctaaccaaacatagtccgccatgtcccgtctccacccgcacccattaaagaatccgttccctttgcanaatatgtggaagcaaagcttcatgatgaatcaacaatgattcataggtggtttgatgatagcaatgatgacaacaaaagatgatgaanataagctcaagagaatcatagaacatccatctcatgaaaatctagaacaagtcanagagttcaagaatcaagaagaattcaagactaaagaagaaagcctacatacaagaatcaagaatcaagatctcaagaatcaagatcaggagtcaagactcangaatcaagaatgaaganagactcanntcagatangtatttataagttttcataactttgatagcacatgagtntttgcagacctttaccaagaggtntactctctagtatcataccatatgttgtatcattacagcagcaaatgctt

SEQ ID NO: 13187 - DNA, 105 bp, Glycine max
  unsure (1)..(105): unsure at all n locations
gtatattataatttaaactaatcatattcaatccacctctgcttttttataggaatgacatttatggaacataagtaattgaagccgtanaggatacacctctac

SEQ ID NO: 13188 - DNA, 273 bp, Glycine max
  unsure (1)..(273): unsure at all n locations
tagcatggctcgctgttatttttgaaaccaaggtttttgcagatactaactggtagtgaagaatttgaaaattctgactaatgaaagaatgcttttttacttccaagaaaattcccgttgttgttaaaaataataatgattgaagtgaaatagaagagntaaattccgttgtgataaaaaacgagtatagtaagggtctatagtaataccaaagcatggagaaaagagttttgtagttctacactactaactatggacacctactagctattt

SEQ ID NO: 13189 - DNA, 452 bp, Glycine max
actcagcttgatgatttctatggcatatgaacaaccttcaaaacatccattggcatcttttcgtttcaaatggtgtacaaaaacgtgtgctatctaccaatggagttagaactaaaaactcattatgtgaggattgatgtgccattattttctcctatttcttaaccctttttgcaccattttaattactgatttgtcttaattggtatattaattatgcatttttatcatttgggtctactggattaattttgtgttttaattaatttcacgagaattataagcaattgggcttgaatccaaaattgggcttagacttgaagaaagcagactattttattctaccaaattttatcttatcttgattttatcttatctaaatattatttaaaattgatctcatctagatattatttcatctaaatctatcttaactaaaattatttatttat

SEQ ID NO: 13190 - DNA, 409 bp, Glycine max
  unsure (1)..(409): unsure at all n locations
ntggccgntattacacctgtccggatcttaagcacctgggctgcagctcttgganactnctgaangctgagctagctcaccaccctctatactaagctcacctctgagaagctgctaagaagatctaagaactagagctactaccatccttctatactagctactctgaagaaactgactactcccctttatctactccctacaactaacaaaagctctcaaaataagccatcagtgccttcttagacacagctcagaacattattcagaacgttctactgctaatccagtaaactgctctgttacacatggtacagctggagagtaacaaaaaaacacaaggacaaaaatctaagaacaaagaaatttaataacaaccagtgccttcacatgcaaagccatgtcttcc

SEQ ID NO: 13191 - DNA, 204 bp, Glycine max
acaaaggtcacaatatataacacccgaaccgccaacatggcaatgtattaaacagtgacacaactaagatgtcacgtgcaactgaattaaaacctgtttttaatctagccacccatatacatatatgggtgacacgttcggctggaaacactgttcccatgtgacagcatgcaactctgccctatgcctcatcaagtactcatg

SEQ ID NO: 13192 - DNA, 639 bp, Glycine max
  unsure (1)..(639): unsure at all n locations
ttgcacatgagagccttgatactaagctcttattaaacttccnnaagctaatttagcttacaagaannnaatattcttnttnttnnngtttgtttcttcttctcctacaagtgtctataaagaagtntatcgatctanataggcgtaattcattntacttntatactntcttcacctataagtgcttaatgaanagtntatccaaaattagagcacagcacactgactataaacagttgataatagcaagggccaagggccatagtgcatagcatattatcaaggcgtgagaagggccaatatagtgacatcaatcanccatttcaactntatcagtgcaacccttgacgttgtcttggagggtagtacanatacatgaacaacatacagataggaataatnggtatgtgatggaatctcatcttttcttccttcccattcaaccactccacaccncaattcttctccaacaagccacaccttgatctaaccgcacagagatgtttaatatataatggaatcatttatgagaaaacagtgtaaataagctagtctgtcttggtcttggtctgcgtgaggaaattatctanacacactgattagatcaattttgatcatgttcaaataacttgcagactt

SEQ ID NO: 13193 - DNA, 57 bp, Glycine max
  unsure (1)..(57): unsure at all n locations
aagttgatatatnataaaactaatctagctctctgtgtcttaactgaccacacaata

SEQ ID NO: 13194 - DNA, 649 bp, Glycine max
  unsure (1)..(649): unsure at all n locations
tgtgcttggttacgtaactatgactactcagcttancantaacatagctgtgggcatagtatnangtaatgctccttctagaaacttgtantattgcatatncgatttctgctcatataacttcatatgatanagtagatggactcactcatcagtattgagtcaatttaagcgtagaattcaattaactacacacttgttaataatcatcgaagttcagttgttaaatgattaaactgttaaagcaacagggatntagataagtctaagatacaatattatactcctcagattacaactaatacacatatctataaccaaataagaatttaagcatanatgcccagaatcatgtncattcttcanacctctaatctatggctactacagatataaatagcaacacaatctacaaggaagcatatatacagtaattgtcatcatgaatcttccaagttcgactcacaagggatgncgananatntcattttaaactaaatataatagaaatatgtcattcataccagatgctgctatacagctgtggcagtcttcatcaactatatgtttccagcttacatatgagctgaccttgcatgcaacacagcagacaaaatctactactctcaagataacatttatagcaact

SEQ ID NO: 13195 - DNA, 228 bp, Glycine max
taactacgcgcgcctcgtctacgatatactataacatcttcgccattcatctgaacgcatgcagcgtgctaccgtgcacaccgaaggctcgatcacccgcttcattgtcttactaccctcatacaaccttgactccaactttcccttcgcgatacttctcccacctatctgaccactaccatcttgattcaatggatcttgtgaccccactcgtcgtctgtcaatggt

SEQ ID NO: 13196 - DNA, 312 bp, Glycine max
gagtctataaaaagcagaccttgacttgcattcaaagaacttcttgaacaactcttaagaaaccttgaaacctttacaacctttacaattctttaaaaattcattcccaatcatctttcttcttcttcctttgccaaaaagctttctaagttttttgttttccaaaccttattcttctgcaagtgaaaattctgcagaaaacaaaagtgtgctatatcttttcattctcttcttcctttgccaaaaagaattcaacaaggactaatcgcctgaattctttttgtgtctctcttctccctttttccaaaagta

SEQ ID NO: 13197 - DNA, 62 bp, Glycine max
cacatgtgtatctaattggccacacgcgaaaaattgctgtggaaagcacacttttgttttgt

SEQ ID NO: 13198 - DNA, 356 bp, Glycine max
tgcagaatcgagtgtgcaagaatctagattcaagagtaatctagcttcaagacctaatctaatgtcacgaatcacgattcacgagtcgtcgtgatccagattcacgaatggagagaagactcaatcaagataagtactaaaaaagtttttcaaaacattgtgttgcacaagaatttttcacaaaatcgtttaccacagagttttactctctggtaatcgattacctgaaggtagtgatcgattgccacgggccagcattgttttccaaattgatttacaaagctgtaatcgattaccataatcgtgtgatcaatgaccagtggttgatacgttagatttcaaacttcaagagtcat

SEQ ID NO: 13199 - DNA, 214 bp, Glycine max
  unsure (1)..(214): unsure at all n locations
tatgtgataatcatttatgaatgggtatgtatgggtntatatctcttggatgaatcttgcatatattnntttaatatgacatgacgaatacttgcttaagaatcattcataacagctttcanaatccatttatgtatatntattttattttataagagatttcatatataaaatatctttttattctgaaaatgtgtatcaagcatgacatgat

SEQ ID NO: 13200 - DNA, 290 bp, Glycine max
aaaataacttgaaattttttttgttgtccactcgctaagcgccatcttcatgcgctaagcgagctgttgttcgcgctaagcgcattgacccctgatcattggctatatggtctcgctaaacgtgtgacttgtgcgctatgccccataaactctctgtccatttaatttttggaattgggttaagtgagtcatctcgctaagtgcgcaagtctggtctcgctaagcacgctgacaagctagcactattcttctctgtctgattaattttgagaattggcttacgagtgccc

SEQ ID NO: 13201 - DNA, 460 bp, Glycine max
  unsure (1)..(460): unsure at all n locations
ttttgtcctccggtcttagcacgcgctcactgaactcagtatgacctgacaatataaagatcttaccagacactcactcacacaagtgcagcagaacaatcaaaacaagaatggtatgaaaggaagatgaatcaatggggattggtctttacaaagcggtaatcaaaccatctaggaaaaatgggcacaaaaagtgcggtcactgaaacttgctttgactgtgaatctaagcttatgtaaggagacaggtgccanagaatcnanatacatattgtgatgtacacaaaatgacttatggctatttgactaacctgtgctaacattgtaggaagaagggtccacactgtgaactcaaccaggaatccaaccagtcatccaaggtagacggaataaaaatgaaactgttatgtgttcaagaaattactgctctagttcagaagaactagttaacaagcatctt

SEQ ID NO: 13202 - DNA, 212 bp, Glycine max
ctgagaaaactggggccaataaagagggtgaggatgagggagaaacccatgctgtgactaccattcctgtacggccaagtttcccaccaacccaacaatatctttactcagccaataacaaactttcttcttacccaccacccagttattcacaaagggtcatccctaaatctaccacaaagtctgtctaccgcacttccaatgacgaacac

SEQ ID NO: 13203 - DNA, 451 bp, Glycine max
  unsure (1)..(451): unsure at all n locations
ntgtnttagtcgcgcgtctcgngatctctgnagcacctggggctgcangctgcatcatagaatctgagagccaggcttataactctacattaatcaatattttatatggactcnatctatagctgtatggatctacttgactaattcaatgaagcacttccttatattcgtatattagaatgaagctttaaatctatattacagtttacgctaattaatagttatgaagaatttatggtctcctggccacctgactaatgatatacattctaatgtataaactgtgtatgaggggtacaaagtggagcacgttatctatttgccaaatgttaatgtgcacaacagaacttttttagatatgatgtcacgtacatgaacttagttataatacttgtaactaatttctgcaaactatctagattaggatcctgttagggcatgcaccctatcc

SEQ ID NO: 13204 - DNA, 351 bp, Glycine max
gaattgagtaggacttcctccaacttacttgtttttgcatccatgcttggcctagaaagattctggaagtttccaattgctttgtgttaatgatctcattcaatttgtaagacagactgttgtctgatacaatttcatcgtgatgaatttggactctcgctatagcaagaactattgaggaaatctcactgtggtgactagagtatttctccagaacaaaaatcttttacagtataaggatgagtgcttctttgaccaaattaagaattataagcccattgtcctctttgagcatgataatactaaatatcttgattgtagagagtttcaagttgtgagttaaaacctgat

SEQ ID NO: 13205 - DNA, 420 bp, Glycine max
  unsure (1)..(420): unsure at all n locations
gtgctgctgacgtcggtcttgacggctcctgtgggtttggcgctactatgcttaggttcctgatccgaacagaaaggagagcctctggtcctgaagctccccatactgtaactgaagttttgggaaaaaggaaaaaagggaccaatgagagaaaggaaaatgcttgatggttcagattatctaagtccaggtcctctcttttactgactctgaactttgaaactctggactctgaaactcttgagatactactcaccaccttctactactacctctgagagctctagagatctaagactgactactcctactttatctagtactctgatgagtgatactccccctatctactcctgcatctgatcaaaatcttcaatctatctatcatgaattgctctccagctgtaatcaaatgcaacn

SEQ ID NO: 13206 - DNA, 453 bp, Glycine max
tgaggaatcacagaaaattgctaaagatgttgctatcaccattggaatacacacgtgagcccgcttataggtaagggatgagtttattgcaattgagattagaatgaacatgtggaaggatccttataggattaaattggggtttattttgggatatttattaaattacaatttttcctttatgattataaatacaatattgttgtgttctacggaccaattgatgttctgatgataattgattgataaacttgagtgctcttgatgtttttgtgttttgacccatgaatttgattaattgattttgatataattgtgagaaactatttgaggggttttactccccatgttgtgataaaatctttatatacattgttatgttgagattatgaaatgatgaatcacattgtgagtttgtgataattgaacatgtgatgaatgatgaaatacatg

SEQ ID NO: 13207 - DNA, 201 bp, Glycine max
cgagcctgatctgcttgagctcttgatttggcatcccacgatgtttgagaacgcttcaggggtgagctctcaaattcttattggaccgacgtgtctcaaacctgaggctccctgtaatgagagaccgcgttcttgactgtctggtagagagagcaagggttctgtttcaccattgttcacacgggctgggggttccaagga

SEQ ID NO: 13208 - DNA, 335 bp, Glycine max
  unsure (1)..(335): unsure at all n locations
taacattcgttagactntcttcctccatattatattatatacaaactacatttgattgtacaatcaatttttacttccagtaatgatgtcgtgttcaattgagtgaagttttatgctaaattttggatcatcacaagcaagagtccaatacgatccccaacaataattggacggcaacaaatgtaatactcatcttttaatccaaaataaatattgcaccatataacaaataatacgcacttagtatgtggtacagggaattaagagaattacataattatggttgatgatattctagtgcattatgttgacaatggcaatttggaaaatgtaag

SEQ ID NO: 13209 - DNA, 646 bp, Glycine max
  unsure (1)..(646): unsure at all n locations
nttggaccgnnnattgtctgctngtgcagngatctctgagtcacctgcggcatgcanngctctaaactaagtntagatactaatanannattacttngtatttaatttttattatatcganatntcatatatatatatatagataagaatatctaatatataactcttttgattaattttttaatcaaaattaatttatatttcactttgttttggatngactattactgcaaaaaatcagttcanaataattctatgtgacttttcacgaatcaacattntntatgataaattttaaactggtctaccatntcaatntccatatcaattctcttcgtaactatttttaaatatgttttttttgtntaanannatgtaaacatgatattttaaaatgatatttcaaaataattttataaactattagaaagaaattcttaagagattttttactctctaaaagtatatttcaaatgataatgatgatgaagatcacttattcctgacatcttataatacgaaatgtatgtgtagaagtatcttgttatagaaantgagtaaggcaatgtgcttatttaactttactacaatactctgatagtaagctatctggctatatgcaggagcttaaagtgtgtgccaaaat

SEQ ID NO: 13210 - DNA, 608 bp, Glycine max
  unsure (1)..(608): unsure at all n locations
atgctcgatttgtgccgcttnangtgcactatgantactcaagcttntatatacagtctgatcatatacattctntacgttcactgggtccataatatagcattatgcatagtcttaagcacagacttggagacttatatgctcattagtaaaaaacaagaatgctaggctgattaggtctacatgagtattctatcacatatcatcgttagaattatgtcataagttaacaaacttaccatatatgatgtgttgtgagtggatgattgtgtacatttctcccttanacaacttggattatcagcatgtacatcgatatgaattaaccatcacagctatactagtttgcatcagaagaagataaaatctggagtttgatgagttactcatcccactatcttctaatanggtatgcactaccctacgatgcatgtagttgtgtttggagcatgatcatgagaaacttgaaatatctctactgtcatttatcactgtgtagagattattgtcattatgctttaaaactatgagcatatatctttactactccggttgttctaatgagaaaatgttatacatcactatacggtatttatcattcatttttg

SEQ ID NO: 13211 - DNA, 475 bp, Glycine max
agctttctatctcttctttaataaagatttggtggtagagaccccaactagtggttctgtgttaacttctaatgtgtgtttggattgtcctgtggaagtttctggtaaaataattatgattgatctgatttgtttgcctttgagccaaattgatgttattctaggaatggactggttatcttccaaccatgtcttgttaaactattttgataaaactatggtgtttgatggttttggagtgagtaaagatatgatgttcatctctaccaaccaagttgtgtgatgaggacatgaccaagagcaagggcaaggatccacttgaaggacttggaggacctatgacaagggctagagcaaggaaatccaaaaaagctcttcaacaagtgttgtccatactatttgaatacaagcccaagtttcaaagagaaaagtccaaggttgtgagttgatgagaatcctgaaactggccaaatac

SEQ ID NO: 13212 - DNA, 583 bp, Glycine max
tccttgagaagctagagcttagctacacacacccatctaaaaactaagctcacctccttgagaagctttcttgagaagctagagcttagctacacacccctataatagctaagctcacccccatgacaaaaaaacatgaaaatacaaaaaaaatcctactacaaagactactcaaaatgccctgaaatacaaggctaaaaccctatactactagaatggccaaaatacaaggcccaaaataagaaaacaacctattctactatttacaaagaagagtggacccaaccttggcccatgggctcaaaaatctaccctaaggttcatgagaaccctaaggccttctttatcaactctagcccaatcctcttggagcctcttgctcatggctctggtaactggtcctttcctagggaggattgcatcatcccctcccccttgaagaggatttgacctcaaatctgttggttcctcctcctctatatcagctccacctgcaaaaggaattaaatcagaaatattaaaagtggtgctgactccatactctcttgggaggtccaacctataggcattattattgatcctc

SEQ ID NO: 13213 - DNA, 543 bp, Glycine max
agctagacttaccgctgatgatgctgctatgatttcagcctcaacaggggattgtgctacaatctcttgcttctatgtgcaccatgagaaaacccctaagcctaggctgaaacagtatcctaaagtgctcttcatgtcatcaacagatacaacccaatcactatcagagaatccatacaacttgaattcttaacacttcttaaatttgacaccataatctacaatgcatttcacttgcacagtgcacaaaacgagacaagagacttacaacaaatagagtgtctggccttgttgcagtgagatacattagacatccaatcaagctcctataatatccttcatcaattttatcagcaccatcttgcttgctgaacttctccttttgattcataggggagctaacagatttgcattactcccatttgaaaacttctttaaaatttcttttgcatatttctttgacagaaaaacactttgttctaactttgcttgatctcaaatttcagaaaataagtcatgagaaccagatcagtcttttaaaag

SEQ ID NO: 13214 - DNA, 608 bp, Glycine max
taaatgacggcggcgcacctcccgacatccgattttttctcattgacgctatgctagatacccagacatcgtcattaacctcccacccctctcacaacacttcagcagcgcgtaaagcttatcagctaccctaatctcattagtagaagaatcttaggtctgggactgatgttgagactgcttggaaagatggaaaagggtgaaggatatctgttataattgttataggtggaaaaaaatgctaaaattaatagaatttatgtgcaatcagctttttttttcaaaggatacatattgtccagtcaggtatattatctactctactgtgctcatctttatcaaacagaacatgaaactgcaattttaagtgagaaaggccacgaatatatttcctaacacatgggcaaacattgtatatatttcataaaaattatcgcgtataaaaatgattgtcattagagtggtcgtaaataacaggaattctgatccgctgatattatgtataatatctatgaacaatacaagtgtttaaaaaaatattaatgatgctagtattaaaatttaaaaatattactgtcttttatcatttgattaatgattttcaatcc

SEQ ID NO: 13215 - DNA, 504 bp, Glycine max
agctttagtaactgtgtgcaaccacagattttacattgagtgtcctcattgatatgttctacaattggttttgcatgaatttttaattgtcataacatatgattcatggatatgatctaggcattctttctttcttttcatctttagccactggccaaacaactatcccaatgtatattattttatcatttgcaagcactctgagccaaacctttgatattttgttggaacactaacctaggataaaagtttcctaccttaccttaggttaggagagcaaaggtgttttgttggagatatctatcatttggtggctaattcgatataaatactttgtttttaatatggctattaagggaaaacaaacacataaaagaaaaattgaaaaaaaataaaagagacaatatctgaatagaaaaaagtgttaccttggtgaaaagaaaaaggataggaagtgatcattcatttaagttactagctagattttatgtctactctcctatt

SEQ ID NO: 13216 - DNA, 432 bp, Glycine max
ttaaagatattcaagatggattttcattacagtctataaagtcttagaaaggatatatttaataggaagggaattcccattgaagtaacaaaaggtttggccaagaaaaataagttaaaaagtcttttacaagaaatttactctcttgtgatcgattaccaaaggatgtagtcgattaccagtggccacaacttgatttacacagctattaaaatttgaattcaaaatttgccttgtgttatcgattacacatatatggtaatcgattcccaccgtttctgaacgttttatttcaatttttaagcttgtaatcgattacacatatactggaatcgattaccaaaacagagtttcagagaatattctcaacagtcacatctttttatgtggttcttgaatggctatcaaaagcctatatatatgtgacttgag

SEQ ID NO: 13217 - DNA, 506 bp, Glycine max
  unsure (1)..(506): unsure at all n locations
agcttagataccaccagcatcaaggaattatggcggttgatggaacctctccaaatgcaagctttccgcaagacttacggaaagatcttagagttgaccttagcagaggtatccatagaagccattgcatcactcacccaatactacgaccagcctttgagatgcttcacattcggagacttccaattagtaccaaccattgaagaatttgaggaacttctaggatgtcctctcgggggaagaaagccatatctttcatccgggtgtctcccctctttgagcagaattgcaactgtggtcaaggattcaacaagaggtttggaccgcataaaacagactcggaacggcatagcgggcctaccacggaggtacctataagacaaggcgaggggtatggccaatcaaggagattgggtcccgtttatggatgtgttagctntgctaatttttggggtcgtnctctttccaaacgtggatggtttggtggacctaccagcaatcgacgt

SEQ ID NO: 13218 - DNA, 431 bp, Glycine max
  unsure (1)..(431): unsure at all n locations
tgggtgatgttgcgcgtactgatgggtaccatgaggtgtttgctggggtttgacccacgcgggtgttgaagagacggcatgggcatctccttccttcctttttgcccctgttgccccgattcttttggcgttcacgtttgtggaggaaacgtaatcaaactttcctctcttcaatccaacctcgattctttccccggcaaacaccagatccgcgaagctggacggcatgtaacccactagcttctcatagtagaacactggcagagtgtctaccatcatggtgatcatctctctctcaaccatgggaggagctacttgtgccgccaaatccctccatcgctgcgcatattctttaaaggtttcaccctctttcttaaacatattctgcagntgagtacggtcaggagccatatcagaattgtactgatact

SEQ ID NO: 13219 - DNA, 468 bp, Glycine max
agcttttattatgttttgtgaatgatctatgacattatgttatttatttattctttgaacattagttatgttttaagtatttggtacttagttaattatgactgatcttggtgtctttattttgcacttagatgcttatgttttatacttagacttggttattttgtgatatatgactaagtggtttgcatctcaatttggttttattaaaattatgctttatgtatgtttttagaatcttttatgtttgttttacaaattatgctttgtgtatgattaaattattcatgttttacgcactttggcctatttgatgttgccaaagggggagagaaaatgggtattttagaaatcaagatattatattttcaaagctttaaaattaagcataaattcaaaaagaaagggggagaaagagattagtgaactgtataacaaaacttgtatgtattctcttgatttcaggat

SEQ ID NO: 13220 - DNA, 438 bp, Glycine max
tgtaagtatttgttggtataattttcctgttccattaagctcttaatgtctttagaggttatttcctcattgacatcttttgtcttgaatggaattgccatgacaggtttattgttactgtctttgatgtttggtagttgatattgtgttgcgggaggtaattccgattggattaactcaccatccttcacttgccaatttgttatgacatttgttgttggatcacctatgatgtcttgtttccaagggtaatcttgttgccatcagaaagggtaatcttgttagatcacaaaggatatatattgccatcagaaagggtaatcttgttggatcacctatgatggcttaagaaattaatttaccatagcttaaactttcatatggaatatatccattggcagattgactaccgattttatctctaaccttgtgtcctaa

SEQ ID NO: 13221 - DNA, 525 bp, Glycine max
agcttttaattaaagaataattccatgctcatgggtgatgacatgaatgcaaccatagtaatcagcaacttgaatgtcatggattgagcaaatgttacaatgagtaccattgttggtatgattttttttttcaaccatttttctatactttactattgctatttaataagcaaatgcatgtttttcttttcatttgtacagcatgttctaataatattatggttggctttgtaggtggggatggggatgtttatagtccaagatatttgcttccaaaacgggtaggcccacgtagaaattgcaagtagtagctctctacttatgcatagatatatccatcataaaccgttgtggcattctgggttaacaagacattctttattccaatggaagagacaaatttattgagactcctttatcaacaataccactgattttatctttgaaacgtatttgttgtgtttcaaaattatctttggagatgtagttgttgttttaatgggactttttaagtcgccatggtaa

SEQ ID NO: 13222 - DNA, 570 bp, Glycine max
tgtaagttacaaaatagagaaattctagagaaatattttgcttccttttgtatttaagcattgcattagagtatgtcactactaccaactcactttaattaaaataagttttattctctctatatatattcctcatcctatatcactacttattttcttggtatttaatggttctaaagaataattgatcgtgacaaatattatggaaaataagggcttcaattctttgaccaattaggaaatgaaaacttggattctttttacgtttcaacagcgacaccaaaggtaggaaccacgatataagggcagctccattcgatgatgatctcagagtttgtttacaaaaaccaacttgaaaatgttaacatacaatatgaaagagcttgcggacatgtcccagctagctgggagtacgttgtaattgcatatagaagacatacagttgcagtgtaatcccgaagaagctcggacgtgttggcatggcatcattaattggggaaagaagattatctctctctctcggtgctgacctcatactctcttgggaggtgcaacctatatgcatatata

SEQ ID NO: 13223 - DNA, 441 bp, Glycine max
agcttgctctaaatttacattgatgtttgtatttattggagggggttgtatgccatttttgttttaagggtagcatttcttggtaaaaactaactttccaaatgtttgccttcgcaggaatggccccgaggaagcttgcctcaaagaggtccaggaaggacaaggcggccgaaggaactagttccgctccggagtacgacagtcaccgctttatgagcgctgtacaccagcagcacttcgaggccatcaagggatggtcgtttctccgggagcgacgcgtccagctcatggacgacgagtatactgatttccaagaggaaatagggcgccggcggtggacatcactggttactcccatggccaagttcgatccagaaatagtccttgagttttatgccaatgcttggccaacagaggagggcgtgcgtgacattgagatcc

SEQ ID NO: 13224 - DNA, 484 bp, Glycine max
tcacgatatactacgggacacaatcggacatccgagtttttattattgtcattttaattttctcagagcttccgttttcaattacgagcggctcgatatattacggggttgaatcagacatccgaggaaaacgtttttgtcgttagaatttgctcagagcttttgttttcaatatcaagcgtctcgttatattacgggacttaatcgaacctctgagttaaaatttaatggggtttgaatttgctacgagcttctgtttccaattacgagcgcctcgatatactacgggacacaatcggacatccaagatataagttatttttttttgcgtttgctcagagcttatgttttcaattctgagcatctcgatatattacgagacacaatcgtacatccgagtaaaaagttattgttgttagagtttgaaaagagcttatgttttcaattacgagtgtctcaatatattacgggtcacaatcggaca

SEQ ID NO: 13225 - DNA, 441 bp, Glycine max
agcttctctagaaatagagtgaactagtataaatcttgttctctatcttctttttaactctcatctctattgcattctttgtcaatttgctgagtttcaaagatatttcaaattgttgcactttaacgaaacggtgctatgttcgggtgattgattcaatattgttttaaaagaaagttgtgatatgatcctttgggcaacaaaagttttaaaactctatttttgagtatttgattttacaccagttcaccccccctcttggtttggttagtcctgttgtcttttttttttttttttttttcaaagggtaggcagtggcttgatctcttatgtacatttgttcatgcagtttaccaatagatgaacggcctttctgagagagattgaaatcagatggatgcactattaagagtttggtgattgccatccacaaatgcactt

SEQ ID NO: 13226 - DNA, 291 bp, Glycine max
tgagatgaggacgtgctgaagggtgaaactacctgcttttattcgttgaccaccaagcgggacctgaagatatgtcacaggcgtcacgataccttgttgacgtcacggggggtgctattgtccaaaaccaaacttgagcagtcgagacccaacccaagcatactctgttaaagacaacctgtgatgtttctaagcaggacagctcatgcccgacaacagacagaatgaacccacactcactatcatagaagaacacgtggaggactgccaccatcatattgatcatatata

SEQ ID NO: 13227 - DNA, 463 bp, Glycine max
agctttgcagatttattgtttgctggtgaaaggatctaaatgggtatgagaaaaagcctatttgattatgctgcttcgataagttgaaagcctcctacaaatggagagaattagaaggagggaggaacccctgttgagacttccattcctacatggccaaatttcccactagctcaccaatatcattactcagccaatatcagtccttctgattacccaccaccctaccagccaagaacacccaatcatccacaaaggccacccctaaatcagccataaaacccgcctgttgcatatctgaggccaaacaccacccttaatacgaaccaaaacaccaaccaaagaaggaatttttcttacaagaagcctatagaattcaccccaattgcggtgtcgtatgctaacttactcccatatctactcaataattcaatggtagccataatcccagcaaatattcctc

SEQ ID NO: 13228 - DNA, 388 bp, Glycine max
gcgtttggaccctgaacaagcgactacactgctgtgtcataaccatgctatgtgctcgcgactggtgcctatattgccttcgcagcttgagttcactattgctaccccgtagagctccgcgaaatggattccgggcatactcttgcttgcgagccctcttggtctcttgttcaagggctcttgcagttattgcattctcttaccgtaacccgacacactgcttgcgaatgtgtgtatcggtcaacttgaactaatacttggcaagtgtcgactttcctaactcgcttttgagagcttggacttgttcgagctcttccggcgcttcaaaactctcttcgctgacgacttttaacttggcgagccaatctaaacctcgcatatgaacttt

SEQ ID NO: 13229 - DNA, 498 bp, Glycine max
agcttgtgcgaatcaaatcactcctacattttatctctagcatgcattctttctttctttacccactcctcacgtttggttttttggggaaaaacaccataactaaacgcgccacaaggcatccctatcgcaccagatccaaatctagaacgatgggtgatcaaggggagacacaggaacagatgaaagccgacatgtcggctctgaaagaacagatggcctccatgatggaggccatgttaggaatgaggcagctcatggagaaaaacgtggccaccgctgccgctgtcagttcggctgccgaagcagacccaactctcttggcaactgcgcaccatcctccctcaaatatagtaggacggggaagggacacactggggcacgatggcaaccctcacctgggatacaaccgagtggcttacccttatggattgccgcccaactactcaccacccgtcttgcaagacgatgcgggccatattgcttctcccgtccttg

SEQ ID NO: 13230 - DNA, 415 bp, Glycine max
tctttgagaaaacttccttgagaagctagagcttagtttcacacacccctctcataactaagctcacctccttgagaagcttccttaagaagattcctaaagaagctagagcttagctacacacacatctctaatagctaagctcacctccttgagatgagaagctagagcttagctacacaccccctataatacctaagctcacccccataacaaaatacatgaaaatacaataaattccctactacaaagactactcaaaatacctcgaaatacaaggcggaaaccctataatactagaatggccaaaatacaaggcccaaacaaagcaaaaacctattctaatatttacaaagataagcgggctcatactttgcccatgggctcgaaatctaccctaaggatcatgagaacc

SEQ ID NO: 13231 - DNA, 787 bp, Glycine max
ccgaaaactggtgcctggttcgccttgttatatcaggctattatccctctcctccagcacgcttatctctccctccgcgagatacgcgcgcagcgagcgtccccatttttttaatgacccagatcaccccctgctgcaactggaacctgtcggacttgattcagagcacctctgaaagaagcaaacaatggccgtgtgaaacacaagtctactacagaacagggttgtttgtgaaccaacatcgttgaaaggtccgacttccaacgacgagatgccgtgcggcgacacgcacttaacacaaaggcgtgcctttcaaacgaacactcttaacatgaaaagacatacttgtatgacaacgagataacgccaaaagtaggcttatgcttcagacgagccttataaatgcaagaagaccgcccttagtatctacacctttccaaacgaccgtattttaatcagaaatgtcctaaacatgtcgttggaataaacaattaacaatccgacaaaaaaacacccttgaaccccttgttaggatcctatctatggctgatgagcctagcccacttccaaaagagctacgttctatctaaactctaggtcatgtccttgtccctgcttaatgataaccaaaaagttgtttttataaggaggaagaacctgaatcggttctgttacccttatgaacactctgtgacggcatcgggtcaattcctattttggacctttttcaccccatatgttcccttatcaaataaaggatggccccgcggtctatctctgtcagccc

SEQ ID NO: 13232 - DNA, 479 bp, Glycine max
tctggtgggacatcttgacttgctgtccaatctgacattcaccacagattctgccttcttctatttccagattgtaggacctcggttgttgtcttatctccaccataatggccgccacatggtgagtagggacaatgccataatatgttcttggcctcctcctttgtcacacatcttctgagaagattgtcagctcctatcttgaacaagtatggatcatcccatatgtaagatcgagcatcatgaaagaatttattcctttgctggcaagtcaggtacttccgaatgattcccgctgctttgaagttggccaaatcaccaaaccaaggtctttcattcaccatgaacatggattcatcaaggaattcatctgtgatttatgcttcttttgaagtgacttactcaataaccaatcatgataagtggcacgctacaacatattcaaaatcctttttatctccgataaccaaatcaaattc

SEQ ID NO: 13233 - DNA, 533 bp, Glycine max
agcttaatcatgtaacttttgaatagcatattttcctttggtaatatataatgatatgaaacatgctccacaataattaaataagaaagacataagtaatgatattaaaataaaatcctatcccatgcttcaaagaacttaattatttatcaaatgtgttgaatcttggtaatttatcttttatagactaattttaagtttgaatgttttttaaacactcataaaattattttaaatcttataaacttataaggtgcttttaaaacttaaaatttaaaggtataaatcttttaaaattcacactataagattttaatcatgaaactatcttaaaaaaattatataagttattatatttttccaagtccttcaaatatcccaagaactgcttatgctaaatttaaaatcctaatctaatacaatctaatgtaaaacgcgtcattagtgtatgtctgtaataatatatttgtacattataattgtcacatatttaaaatgcgacatattcttattatgtgtgtggggcttttttt

SEQ ID NO: 13234 - DNA, 137 bp, Glycine max
tggaccttggactatgcactaactgcggttcctttgctatgctatgagctatggtctggtcccggtcttacgctggaaggaggagttcactatgggtaacccatatacctcccccaaatgtattcccggcttactgt

SEQ ID NO: 13235 - DNA, 632 bp, Glycine max
  unsure (1)..(632): unsure at all n locations
agcttggaggatgtttccaccaattatttccaccaattgtacacattgtttccaccaattagaacattttaacatgtaaaattatgagtggcatttggataaagaaatgcaacttttgaaatgttttaaaacattgctagagtgaaaaacatctatactaaagaaatttgatatatgtaatagctttagagttttagtgcaaatgtccaattaggaaaagtgggggaggataacaaattcattaccttttggtatcttccaccaaaacagaaaggcatcttgtagcaactgtaggtaaaatagcaaggctcattgacctaaaaagcaatgaaagccaagttagcaaaaaaaaaatcgtataaaatatcaatagataaaaaacaaaaagttggtattttatttatactatacagccaaacaaaacaaaacataattcccattatgaacccaccatgaaaaccaataaggatttatgatacataaaaaatttaagaggttgcactctanaaaacatgaaatcaacatgaaagtagagcattttaatccacagtcatgtagtcataaaaaaagaaaagattgaaaattattttttctagcaagatttacatcaatgagaggaatcattttcagtg

SEQ ID NO: 13236 - DNA, 487 bp, Glycine max
tgtatagttccctaatttatggttattttgtagttatttttgtaaataaatcttgttttatggttaatgctgtctctagaacatttccattggatttagtgatgaaatctgtgcatttttagatgaaaaagaggctaagttttgaattgcaaaatgtagcagttgggctaagctcaacaattgggctaagcgcatatccaccactaagtgcagcttcagtgcgcttagcacaaaggagaatctggcagagcatcaacatcaaagccgcgtgctaatcgcgagatcactgcgctaagcacagcaggtaccttcagccaggctaagctcgagactgacgctaagcccaatttcacttactcgccctaagcacgagggtggcgctaagcgcattgtcgcgatttcatagcctatttaaagtctgtcttgtgtagaattagggtacaactttctacagcttttgcacaccttttaggacagcgtgcagaat

SEQ ID NO: 13237 - DNA, 484 bp, Glycine max
cagcctagaacaataaactcggccttgtcttaattgtctttgggcttggcgaccacgatcaacaaagtactttcggcacctactatatgttgacttgaccaacgctgttattggaatgctgcgacaatctttcaacaccttattcacacattctgataagttggttgtcatgtgaccatatcgtcgtccagatgtatcgtaagccatgctccatttttcctttgagattcgatcaatccatcttgctatggctggactcaatcgacgaaatttttctaagttttgatcaaacacatgcttgcaaggagtgtacgctacatcaaatttgttatcatcaaaagttgtacgtagacatgaaactcaaattaaattgatgtataaaataaaccgtacccaattgcttgaacatctctttttgtttcgcgttgttgaatttgcgattgaaattgctggctatgtgtcggacgccatacacatgataacc

SEQ ID NO: 13238 - DNA, 458 bp, Glycine max
tgtaatgaggaagtgtggaagggtgagacttcctacttttattatttgaccacagagtggtacctggagatatgtcgcgggggtcaagaaaccttgtggacttcatgtggggtgctattgccccaaacccagcttgaccaatcccgacccaacccgggcatagacagtcaatgagaacctgtgatatacctaaacaggcgaactcctggcagtcgaccgatttacgaacacagaccactaagcacggaggcttgtgtggtggctggtcaacaatgagtcttgagtgagatttgggatatggcctctggtgatcgattaccaagggtaggcaatcttattgccggcttaaaagtgtagacagtgatcgtagatgggctctggttatcgattgcccacggagtgtaatagattaccagtcttgaagacgagatcatgaaactaggatggcttttggttat

SEQ ID NO: 13239 - DNA, 201 bp, Glycine max
agcttcctctactaatttcttatccaacatatttttttggtggtgaaacttctttttccaaagcttattccctattggatgacaccttctctcccttcttatcttttatcctccgctgcaactccatggttgaaaatcaccatttaatgaccttattggaactgaaagtttcagcctccataaaaactttttaagccagct

SEQ ID NO: 13240 - DNA, 781 bp, Glycine max
  unsure (1)..(781): unsure at all n locations
cggcgcggggntactacatcttgaacggcancnanaaacnaagctccggcgataacaatggttgatgcaatgctgaacatcctaattttttcagaaaagatgaaatgtgagaagtttgtactaaccaaccgttcacaatcatcaaactaaaaggggttcaaaaataaacctgagcgaatccaacatcatatagaggaataacaacaacattgggtgcaaaaggttcccacctcgaagaatgaatcaactatgatgagagctacactccaatcgcgaggctagaagccataagattgttgcccgaatttgcaagtctcatggatttcgaactcttcaaatggatgtgaagacccgacttcctcaatggtctcattggagaagaacggtctgtggatcaaccaccagcattcgtggactatgaacatcttaaccatgtctacacactgaaaaaaggctttctatggtttgaaatcaacaccatgggcatgggatgatagaatgagtcactttctaattgagcaatctttcccttgaagccacgttgacaaaaccattgttcataaagaagtaaatagcgagttgtcacttgttgaaaaatgttgatgatataatatgcggcgtacgaccgaactcttagagtaggagctttccacgttgtccgctctacgaatctgtgaagagtataatgggaaaattaatctttttcttagaccccacgtcacagaagaaaatggaaccttccttacccctccaataatgtcgaaaccaatcacaaatctct

SEQ ID NO: 13241 - DNA, 437 bp, Glycine max
agcttatatataacaactaaaatataactaaaaatttaattaaaatatctgtcgatttttttttgattaaaatatattgatagtgtaaagttgttttttaaaattattttaaaagttgtattttttggtacatagcatgaaacttaaagttatatttagaataatttttgaagcgataaaaaatgattatttttctttatagaaaatgagtcggctcacataaatatttataaaatttgacagttgcactgtgatattgcatatagtagctttttaacccagtttaattatttagatttggatgtggtcctctgatttccaagacccactgtattgtttccctttgtactcttctcccttataacctgcctgcctttttatttttaattccaaccatttattattaaatagcgctccccctccccattttttttttc

SEQ ID NO: 13242 - DNA, 404 bp, Glycine max
tgaattgatgaacagttctattacagtaacgaaaatgatctgtgggcattcaagtgttcatgtacactcgttaggaaaagagataaatgaaaaagtccaagtatatatgatataagaagagagattgataagaaagaaaaaaaaatgatatcaatagactgtttatattgtagtaagtttcagttcacttttcaaatatgatatgctgttgcaagagggcttccctgtatctgtatctagctagttatataagtttcatctagatataaaaaaatatattaaagcaaaaggttagcaatacacttaaatatgagaaattatcatatgggtttgggactgttaaaattttgataaattgacacataatcaaatattattagttttggtattgtaaaaaaaaagtg

SEQ ID NO: 13243 - DNA, 510 bp, Glycine max
agcttttaaaccactaaaggaattatggaatagtatttacaaggcaatgtactcatgtacattgatcaccaataatcataatttacataatcatcacatgatatatcccaaaaagtgctctttaagcaattctatcaatttctctgtgctggggtttgctagatagtgatagctacatcattcttactatatataacaatggaagtgagtatacacgtcttacagcaaatcataatttgactctttgacaataaaatcccaaaagcgttaggagtgggaaactcctaacccccttcatacgccaaaacatacaatacccctcaccccctcccttacttgagggtttgcgaggatctccaagaatactatgagatgttgcccttcacaggtagacttctccttaaccattaatcaacataaaacactctacagaaacagaaggacaaatgaaatctatcaaattaaagagcaccatgataactaaaattctgaattaagaatttgaattta

SEQ ID NO: 13244 - DNA, 478 bp, Glycine max
tttcatgttaatggagggctaagaacttctttgttggggagtattctactgagaactcttaatgtaaacctctaactatctatttaatgttattttctggtgttctttgcttctatctgcacttattttacatgcttgtggcttggtcatccatttgtatgtttagtgtcgcaaccttcccttcggcgggagggcgacgcgtgactcacgggatgcgtgttccacgaaaggaatacgcgcggagtcgccaccaacgtttatttgacgaaaacgtcggaaaaaccggaaaagacgcgatctacgaactttttaagtgaaaggttcgggagttgtatttacgcacggggaaggtattagcaccccacacgtccgtcacaagggacggcagcctttaatcgaatgtgcaaacatgactttgatttttagttccctttttatgtctctatatcccttataccccttttataattttctcttt

SEQ ID NO: 13245 - DNA, 530 bp, Glycine max
  unsure (1)..(530): unsure at all n locations
agcttcccgcatccacacttggaaggatctgattatcgccttccttaggcagtatcagtacaactctgacatggctcccgactggacttagctgcagaacatggttaaacgggaaaacgagtcttttaaagagtacgctcagcgttggagggacatggcagcgcaggtagcccctcccatggtcgagagggagatgattaccatgatggtagataccttgcctgtgctttattatgagaaattagtgggctacatgccctccagcgtcgcagacttggtattcgttggggaaaggattgaggtggtcttgaagagagggaagttcgattatgtctcctccacaaataccaacggtaggaggatcgaagcaacttatgcaaagaggaaggaaggagatacccatgctgtcacttcaatgcctgcatgggtcaagccgccgcagatctcccacggtacccaccaatatgcgcaacatcacccgagcttctcagctcgcgccggggacttctncaactcagcgcccatacaac

SEQ ID NO: 13246 - DNA, 443 bp, Glycine max
aattattagtgtgggttggatgttgaattctggttgtacctggtgcggagatgatggtacagcgggtgaaccataagctgaagtttcttttggtgaggtagccctggaaaagcagagcgtttggaatgatttcgtaaatctcagagaactattgggaaatgctggtgaaaacacgaatgtcacgaaaatataaatttgaataacgaatgtacagggccgtgtgaagcaacggtcgaatatgccttggttcagtagtgaacgcgctattaatgataagtgattcgtttgggcacgttcagatatcactagctgctacaattactctagcatacaaatgcccagcttgcccctcatattttcaaactgatttgcatccacagcctttgtgaaaatatctgctatttgatcctcagtggcaacatgcttcagtgcgatcactttat

SEQ ID NO: 13247 - DNA, 555 bp, Glycine max
agcttgtcaggttcagtttcaattaagctcttggggcatcctatggactgagcgaaaaggctcgggtcatcaaatactgcacatcttttaaagcacaaaacgaggatcggaacctcaaccctacgttctttttaaaagactgcaatgagaaaattacagaggacaggaatccctaggggaaaccaagaagaacacacaaaaataaaaacatgcagcgacttcctcaattgccccagatcttaagcatattatcgcttgacaacgtcggagttcacgggtgaaggtagctcctcgtcatccatgttggcgagcaccagggcccctccggagaaagccctttttacaatgaaaggcccttcatagttcggggcccactttcctctgttgtctttcagagcttgggaaactttcttcagcaccaagtccccttcgctgaacctgcgcgagcatacctcttgtcaaaagcgttcttcactcattttttatataaacgcccgtggctcatggtggccaaacgcttgccttctatgagattaagctgatcgaaacgtgcct

SEQ ID NO: 13248 - DNA, 579 bp, Glycine max
  unsure (1)..(579): unsure at all n locations
tattctaggagaagataataagaagaagaaatgaaatgagattttccataagttaaaattagcttatgcataaatttaatttatagaagatttctcatatagcttctttaaagacgagagagcttatacaaataattctgtgcaaaagttagtttaaatagagaagtttatttaatttttttctcttaactttttctcttagaagtgtttttggttaaacttacccaaacagacccttaattcattaatccaagttcaaaagcactagaaaatttcatttatgtatcttttaacctaaatattccgtgtgccatactgattgatggtcattattattggcaattagtctgaatcattaattatggcaggagagctagctttcagcattgcccaccaaatcgaagaactctgttatctttaggaaaaatagatgaaatgaactttctcataagttataattaatttatgcataaatctaatttgtagaagttctttcatataacttctctaaaagatgccagagcttatacaaataagtctgtggatanagtaatttaaatagagaaggttatttatctt

SEQ ID NO: 13249 - DNA, 458 bp, Glycine max
agcttcaaaggtctctatatggcctgatttttgctaatagagcatggtttgcaagattatcatcttttctgatttcccatggatacaagcaatgtacttctgaccattcttttttcattaagcatggttgcaacacaattgttattttgctggtttatgttggtgacattgtcttgacaggcaatgatttgtctaaaattcaaagaattacaaatctacttgacaatgctttcaaaattaaggacttaggagactttaagtactttctggggtttgaggtagctagaagctctattggtataaatctatatcaaagaaagtatgcactggacattctcaataatgttgacatgcttggttctaagccacgttctacaccttgtgattacacccaccaacatcaacactcatggtcacctattttagcagaagatgtttcctcttataggagattaata

SEQ ID NO: 13250 - DNA, 713 bp, Glycine max
ccttgcttactatgtgttgcttattaaatcggctacaaatagtggttctctcttcgtgtaccatctaaccttgtgttgcaaaacgtcggactcacgactacaacgtgactaccaacgtgactcaatgatttttacaagattttatgtgtctcatggaccagaaaatatggacctatgtgtctcctccatatgaatcattgcacggtagatgaatgcacgaacacttgaacgagaatggtagggagcataaagttggagtgcgttcgttatcaacccttcgagccactgtagccaataacataaatagtattgaccacgcacaccaatgctgtgtttccaacatcttaagttcagacaacatacttgtccaaaaaaaataagtttatttgacaacatacaagaaccacagtcgtaaaaacataccttttgttctgcattttaatttccttttaatttaaatacattttatttataccttttaaaaaaaaatattgtgataatccctacttcctccgtacatttttatgtatcttttgaggatttcctctttaaaacaaagaaatgcagtgaatttctctccttctaataaaatagtatgaaaatcttacttcttccttggttaattatttctactttccatactccttctatcccatataattgtgagaaaaaaattttttcccaatctaaattctttaattggcaaaaccttt

SEQ ID NO: 13251 - DNA, 244 bp, Glycine max
agctagtgtgtggccgggatgagcgtttatttttacctcattaccccatatgaagcagtggggtggtacttaagatttcgtggctaaaagatggttatcctctgaaacgctattaataaatttcgatctggagctttaccccatgtgagtaataccataaattagtttaactggcactcatataggctccgatttagcatattctgataccgtaggatacaatgtattatctttcaaggctgag

SEQ ID NO: 13252 - DNA, 254 bp, Glycine max
tgtcagaagtctataccgctgatttaatgtaattagattttatacatttcctttctctgttgtcttctgaaatctacctcattaaataaacaaagagatcttgtttcatctgttcttgcaattgcaccttttcacatatcattgtgcatgatttagtgtctatggtcttgttaggtatagatatgagggtcgattctttgacgatcctaacaacgatggtttgacaatcgattttgatagagatataagcctca

SEQ ID NO: 13253 - DNA, 354 bp, Glycine max
catataaaacccaagacccttaagggctttgctgataacttcttcccggtccaagcttcaattggaggcttggcttttacaaacttaattggacatttggtgaatatggaaataacaggggaaactggttcaacccaaaatggggtaaggaatcccttttccttgagcatcgatctagccatctccataactgggcgaatctttcttttggacacttcattttggtgaagagaatatgccactggaagttggctcttaatggcttcatccttaccaaatctttcaaactcgcgagagggggactctttgccgctatcacttcttaatacttttatccattttccactttgattt

SEQ ID NO: 13254 - DNA, 370 bp, Glycine max
tgaatcttctaccccatttctgacagacaatgggtgtgttcaccttaagtggttcctaagaagacatgcctcacagtgattaagaatgagaagaatgagcttatccccacaagagtgcagaacagctggcgagtctgcattggttatatgaggctgaaccatgtgaccacaaaatatcattttcccctgccattcattgatcaaatgcttgagcgctcggcaagttagtctcattactattttcttgaagggttttgtggttgtttaccaagtcatattgctcctgaggatccagaaaagagcatattctcctggtcctttaacgcttttttctattagaggatgccctttgggccatgcgacgcccctg

SEQ ID NO: 13255 - DNA, 435 bp, Glycine max
cagcttgctgcctcatgaggaatgccttttgcttaaattgcatgaaaaagcccttcgattatgtatgtaaatatgtagcataaaatgccttgcaaaatgttgaataaaatgccttgcaaaatatgaatatatatagcatgaaaatgccttgcataatatgaatatatatagcatgaagtgccttacaaagtgtttgaatgggtagcgtagaagtgtttttcaaatatgtgtatttatgagtatgtaggaaaagaagccttccaaaaaatgtgtgtatatatataggatgtagcatgaaaaggtttttcaaaaaaatatatgtctgtcgtaaagtgcctttcaccaaatttttatgtgtgcaaatgcatatgtgtcgtaaaatagcacgacccccatatgattattttataaagtgcatgttgacattctcgccat

SEQ ID NO: 13256 - DNA, 330 bp, Glycine max
gacgtgtggatctatgtgatgatgttacaagccgtcacagctttaagagtaacgtcccactggtaaaactaactttccatatgttggtcttcacacgaatggcccctaagaagcttgcctcaaagacgtccactaaggactatgcggcccaaggaactatttccgctcccgagttcgcacatcaccgctttatgagcgctttacaccagcacagcttctaagccattaacggatggtcagattatacgggagcgactcgtccagctccaagacgacaaacatactgatttacttgaagacataaggcgccagtggtgggcaccactggtc

SEQ ID NO: 13257 - DNA, 458 bp, Glycine max
agcttgttggtggcaaagtcaaaatctaattgaaggtaaacttgaatcaacctgtagctagctatttttgtattcattgtaactaacggagattctaaatttccacttaatatgtgaagttgtaccttttctgagaccttattgctactaccatttagtagctctggtgccatccaaggtagagttccacgaacaccaccagacaccaaggtatttcgcttaatctttgataggccaaaatcaccaacctggtgaaaagcaagtttcttagctttatcacaatgaagacaatgtaatagaatgaataatccacagcttgaaaagataccttgcatattggccgcataggatccttcaagttcacgagcaaattgtcacattttaagtcaaaatgcacaatatttttcgagtgtgaatattccattccaaaagcagcatccatggcaattatcagtctc

SEQ ID NO: 13258 - DNA, 426 bp, Glycine max
gcttggagaggatgctccaatggaggaaaagaaagagggtattaagagagaccaagggacatgaaattgaaggaagaaaaagggagagaagttgaactttgaggtgtgtctcacaagactctcattcatcaaagttacaacaagtgttacacatgcttctatttatagactaggtagcttccttgagaagcttctttgagaaaacttttttgagaagctagagcttagctacacacacccctctcataactaagctcaactccttgagaaactttcttaagaagattcctaaagaagctagagcttagctacccatacctctctaatagctaagctcacctccttgagatgggaagctagagcttaactacacccccctgacgaaatacatgaaaataccaaaaaaaatccctacttcaaagacta

SEQ ID NO: 13259 - DNA, 574 bp, Glycine max
agctttaggatcaaactcttttttctctttttctctcattttctcttcattcttcttcctcttttcacttttgttttttcctttctctagcacaaatttcatggcttttccattggtgatgatcatggaaggctaaacacttaatcaatccaaggatccactcatagcaaggttgaatttgagttctggttttgtatttctaatctttgtgaatgttcatctttttcttcaatcctatttttgattttcatgattatgattatgcttaggattgaaaatggattaggttatggattcataagtgaatttgagttctagttttgattttcttcaatcctggtgtttataagtgaattgtggtatgaaccaaattgtattgcatttttgagttgacctaggttagtcctgtattacagaatttcctagttttatttgtttttagaatgattcgatagtcgttatcaaaattggcgccgttgtcagggatactattcattgtgtgccaatcttaattcacttataattgacattagtataatatacgtttgcatctgtctattgaaaaaaaaaaaaa

SEQ ID NO: 13260 - DNA, 565 bp, Glycine max
  unsure (1)..(565): unsure at all n locations
tgtaggattatggggtacccatcacatgtggtactaggtggcggtcgggcgatggtgcacaacaagttttccacatccaaaatgcgcgcataaacccaccatcccctgttgcccacctccatctgagctcacgtactcccacgtagcccatatcctcgtttctctcaacaccgggtcccaatcaatcctcccaagcttccacaacatccaagcaaaacaacattcaaatagcacaagctatcacagccaagcaaaacagagaaaagacagaaaactctgccaaaacaccaacgaaaatcacagcttttctcacttaaagaccccagtaacaattccttcgttccaattcgttaaccgttggatcgactcgaaaattttactggaagtctctagcacttaagcctacatttggaccgttgggatctactagaaaacatccagaactcgttctgcactgctctttccacagccaaccacacacaagcatttttctgcacaaaccanaatcctgctgcacccattttgacagcaaaattctgcataagtgcagatatcgaaaattcca

SEQ ID NO: 13261 - DNA, 621 bp, Glycine max
  unsure (1)..(621): unsure at all n locations
agttgaagatactccttttgcttctcccattttatgatcgcatgccaagtacttacccattcccattcccttctttacactcaactcatgtaaaaacaattgaggtgtttcgattaaagagaacttcagatttctgaaaattaatggattggcctaggcgttgccattcttcattgtttgctctaaagaaaaggatagagtcatgtaaaacaaaatcttcaaggatgctcttcagctttagacattcttcatcatttgctttaaagaaaaggaaacagtcatctctgaagagtagatgatagatactaagggcacttatgtagatttttaccccatgaatacaacctctaacttctagtgatttgattaatgtcaataagcccttattgcaaaggatgacgaggtagggggacaaagggttcccctatctcaacccgtgacctatgacgataggcctaaccttctcactattaactatgagtgagtagctcataaattcaagacacatcagaaatcctcctataatagttgaaaattttcattntcaaattcttttccattgtcccttctaattgaaggaatgcacattcttttttcattgtgaactctttacaaaattaa

SEQ ID NO: 13262 - DNA, 558 bp, Glycine max
tttaaagaattaagtgttaagggtcaacctcaatatgttgtcttaacttaatgaacttaatgagtagattgatactttaaagacaaccttagccaaatttgttggagaaacggaaaatcttaacaaattggaacgatatggaagatgtcccatagacaaatctggtcatgggtatgagggacaaatgcatgtgaagtttgtcaaaacagaaaacaagttaaaagttccttttctagcaaaaatattttttcctcctcaagacctttagaattattacatcctgatctgtttggcccaactagaacaacctcagtaagtggaaaaaggtatagactagttgcagtggataattactctagatggacctagattttgttcctagcccacaaggatgagtccttcaatgtcttctttaaattttgtaaaagagttcaaaatgaaaaaagaatgtgcattacttcaattagaaaggacaatggaaaagaatttgaaaatgaaaatttttcactattataggaggatttctatgtgtcttgaaattatgagctactcactcat

SEQ ID NO: 13263 - DNA, 794 bp, Glycine max
ccaactattgcactaaccccctcctataaacaccacctatcttaaactaactcctctagccagcttgatttactttcagaccggaagcgaaagcgcacgaagctgcaacagaagaggcagccgctttttacagtaatccaccacctgatctaaaaagctatgctggactggaagtaaccaaaaacggaaagactcagacaactttaaaattgcaccctatttgtagacaacaatcacccacccactatctccctacgcaatacacgttgcaacactaaagaaaaaaaaagctgattgaaggggattctaattgtacttcaatgggtgcaaatcacgcccttggaaagccgatactaatatcaaactcatcaacatggagactatacccttatacagaagaacccacacatggaagacatgacggggataccaacgtcttccatcttacaattggccgaacgaaatgtacgatacaacctttggtgtgcaataacaaatgcgaagattgacaaagaaacaaaggaccaatcggagttatggtaaagatatggaaagaaaccaaagggcacatatcacaaaaaaaactgcggaaggcgacactatctttttgggccaagcgttaaggtttcctacgcagggttatctgcaaatgaaggaacggttgttctggcaaaaccaacggcccccttttcaaaattaaaccaaaaggaccacgcttcaaatcctattcaaagagattggcgccaggataggaatgaaaatcctcatcaaatactccctccgtgagccacacg

SEQ ID NO: 13264 - DNA, 476 bp, Glycine max
aggcttcaatggctgtaaagagagatgtttttatttagatactaatgcacgtgaacctgaaggaacagaaacggatacaggttgaactttgagatgtgttgtcacgatgactctcattcatcaaagataccacaagtgttacacatgcttttatttatagactaggtaggtgccttgagaagctattttgagaaaacttttttgagaagctagagcttagctacacacacccctctcataactgagctcaccttcttgagaaactctctggagaagatctctaaagaagctagagcttagctacacatacctctgtaatagctaagctcacctccttgagatgggaagctagagctgagctacccccccatgacgaaatacatgaaaatacaaaaaaaaatccctacttacaaagactactctaaatgcctcgaaatacaaggctaaagatctatactactagaatggccaaaata

SEQ ID NO: 13265 - DNA, 509 bp, Glycine max
  unsure (1)..(509): unsure at all n locations
agcttctctctgtgtattacctttctctttacgattggtttcttctaaatcgattctttctttctctccttggtcatggctatcattgatgattctaacccctcaattcttcattcatccaataatcctagcattgctctagtttcacacctcacaagtgaaaactacaattcttggaagaaagcaatgcgcatggcacnttacgggaagaacaaatatgagtttgtcgatggttcaattcctgaacctactttgggtcactccacccatgctttatggcatcgcaatgataacattgtctcatcctggctccttaattcgttatcaaaggagatgcaagtgagtatcttacactgttcttttgccaaagcaatttgtgatgatctcacagaacgtttcgaacaacgtaatgggcatttgattttcaacttaagcctgaattgatcactttgcaacaagggtccatgtctggttcttccttttactccaagcttcgttctctctgggag

SEQ ID NO: 13266 - DNA, 868 bp, Glycine max
  unsure (1)..(868): unsure at all n locations
cgccccccccacggatcccattcacctaatcgaaccccagcacccgtaccgaacatcacaaactcatcaacccccngcccccggggttttgacccgtggaacgcgcgcacnanaaacacagcgcgagcgctaacacccacggacagaaatacgtcgggatctacgtccactgtgtgcactaaccatcaacacccggggataaagataagagcacgagcggggccaagcctaccggggaaaaaagatacgcgaacaggcaccattccaccgaaacacaatgccagccgagcccacaccaaagaacagatcccggcaccattgaccaaagaaagggcagaaccaaaacactggaacatgccatgccgtgagaccgagcaagagaagcgaacggcgaaagggaaaataagaccaaccgacgcgtgagccttgaacccagaaccagagggagattctagaatgaccacacggcatgagaaaaaagacaccttgatccaccgaaaaggctaaagggataagacggggatggactcgttttaccgcgcacagggcattcctgggacacaactacaccgggagantgaggcgaaaattctcagaaacgatgtcagaaagagcccggcagagcctcggactcgagggcaaaaaaaaaaaaaaaagaaaattgccggccaaaacccaagcggaaaggaaacggtccgaaatatcaagcccaacaacttcgtaaaaagatgtaggatacaaaatgggagccactctctcttcacaaaaaaaacatgattgcccggggccttaaaaacaaccacaaccgggggccacaaaagaaaaaaggaggggaccaacaacccccgcccccagggaaaagggcccg

SEQ ID NO: 13267 - DNA, 455 bp, Glycine max
agcttctcccctattttgctataaatagggggagattttaataagaaaagggttcagccctttaggcacttctctctctctcgaaattgctgagaaaaattatttccgcgaagaaaatccaagccgagatgcttccgtaacatttccgtaacgtttccgtgagtaattacgtgaagattctcgaccgttcttcaagattcattgtttgttcttcgttttcttcagtcttcaacgggtaagtacctcaaaccaagcttttcaattcgttctatgtacccgtggtggtccacattttgtttcatgtatttttattctcgttttcatttgctttttatacccccttttgacttgcttaagccatttatttaagtcatttctcgcttaatctaaaaataaaataaattccaccgatcatttaaattgtatcatccgttaatttcgggtaaaatgaattc

SEQ ID NO: 13268 - DNA, 372 bp, Glycine max
tgttaaagaactgaggaaaaatcaagaacgagcttgtacgcacatcgttcgcgtgtatgatatccactccataaggtttgaagtagaggagagcttcaaccctataacgcaacgtggcagacaaaagtgggcagtaaacttgaatggtcatcattgtcaatgcggaaggtattctgcgcttcactatccatgttcacacattattgcagcttgtggttacgtgagcatgaactactaccaatatatagatgttgtttatataaacgagcacatcttaaaagcttactccgcacaatggtagcctcttgggaatgaagcagttattcctccttctgatgacgcatggacacttatccctgacccaactacaat

SEQ ID NO: 13269 - DNA, 547 bp, Glycine max
agcttaagaatatttgaatgaagctccttttgtgtgatgaagttagtgtttccctttgaagatctcaaccttactgatttgaaaggacatcaagaaggccttacacatgagatttatcaaaggctacaatgagcatacaacatcagagtctacatcagaatgatgaaaaacttgactttgaaaactaaactttagaatggagttcaaaatgattaagaatgacttaaaatgaacctcaaagacagcatcaattcttccatatgttaccacacatatatatggcacatcaaaaggctaaggttgaaagcatttcacttttcatatgctctctcactctctctctctctcacacacacaaaggacacatcataaaagtgaatgcttactgcattagaagatacacaactggaaatataagaatatccttgagaagattttgtgtgcaacatcagaatgaagaattgagagactttgtgaagtcttaacccaggacaaaacacttacacaacaacaaccacaaaaataacaacctttcaaatgatctgtg

SEQ ID NO: 13270 - DNA, 397 bp, Glycine max
attgacaaggatgatgtcatcaacgaagaataattggtagacatgaaaaatgtttccccttccgctagcctatgtgagtgatttattatcttggacaaattcttggatgatgtgtgcaacatgttccacatttagcacaaagagtagggggagagaacgttccctggcctaagccctcttgtatgacaaaaagatgtgggaaggcaaccattccaatttatagcaatctgagaggcattaatgcaatgatggacaaggttaataacccactaacgaatgtccaatgaggagagtgtgtccttaatgaaactccactgcatacgatcaatagctttttgaacgtcaacttcttttcaacaaaccctttttactcctactagcctatagggaatggaca

SEQ ID NO: 13271 - DNA, 457 bp, Glycine max
  unsure (1)..(457): unsure at all n locations
gncttgttcgaaaaacaaggaatcaagtttacatgtaaagataaaaatttagtctatcgtccgctttgtataacttaaccccgcgaaaacacccttcgacttatgaggacaataactggctcaaaaaatcacaccccgacgtgtcaccaatcggggggccgaaaggcgaacattatcttatctcgcgacctgggacaattgccatacgttttaattaacttatttgatgagggattagtacttgttgacctgggagaacctctcccatggtgaaaattacgctaataaattcttttctttggcccctttaatttaaatattgaacaatttttccttcgtttgagcttttttaaaaatttttattaaccttttcattaatgccttctttggtcttctccctaaacaggcccatactttgtattaatcactgcgacctggcaaatcctttttcatcttc

SEQ ID NO: 13272 - DNA, 625 bp, Glycine max
agctttctagccccttcttcctcaaaccaatctgcacatataaatgagactcttccggatattacaatgatttttatctcctggcagtaaaaaaaaatctccttgaaagtaaagtttaaatttagcctcgttgatatgtatataaaaaaaacaaattcaaccccattgatatacgaagcttccatagtaatcctataaaatgttttatgtagttaattacaaaaataattttaaagtattttaagcagaataaaaaataacagaaaatattatatttaaaatataataaatatttaatattttttaaaaataaaaatatattaaatattgttttaataaaatcaagactctaatgaaaaatgataaacccaatttaataaatgaaaagcataagtcatttttttacctgcagtgaatgctgtaagagaatctctgttacatttcagtattattattaattttttacataaattagaattaaatatttttctaaaaatgagtcttgctaattgtattttaaagatttaaggtagaagcattaatatactttctcaaatattttcaattatttaaaataatatattccgacgaaccgtttttttctttttttcccaagagttttttt

SEQ ID NO: 13273 - DNA, 497 bp, Glycine max
gctttttaacaaaattttcagttttgttttttctacgttcactatatttatttattggattaggttttcacaacacgtgtcaaattggactgatttgccattctgagagactgcagcgctggaagtcaagaatgagcttgatttcaagaataaggcattatttacccaatgtatagacaacctcttcattcgacagtagtgtaacttaaaatcatcaaggaggtccggggctttactgatttaggtttgaaggaggcaaaggatttagtggaaaaagctccttccgttataaagaaaggcgtttcaaaggaagaagcagagcaataatagagaaaatgaaaattcttggtgcaaaagttgttatggaatgaagtgatatattttgtttcttcccgctttcaatattttagttggtagaaaaatttggattggtgacccaggatactactttgctagtgctgtgttaaatttttttttacacgaactggaatttgatt

SEQ ID NO: 13274 - DNA, 449 bp, Glycine max
agcttcttttggaccttgaacaagcaatcaactcctctttcagaaccatgctatgtgctcgcgactggtccctttcttcccttcgcaacttgagttcattattgctaccccatagagctccgcgaaatttgttccggccatactcttccttgcgagccctcttggtctctcgttcaagggcccttacggtaattgcattctcttcccgtaacccggcacactccttccgaacgtgtgtagcagccaacttgaacttctccttggcgagttttgcctttcctaactcgcttttgagagcttggacttcctcgtccttttccggtgcttcaaaattctctttcgctgacgacttttaacttggctagccaatctaaacctcgtatgcgaaccttcagccctttcgggtacccaccaatgatgccattacgaatgcctctaagctcttgatc

SEQ ID NO: 13275 - DNA, 541 bp, Glycine max
tcttcttaagacctcagggatcggtcatctttcctggctctcgtcgaatgtcatatttttcgatcaatatcggtgaataatatttttctgccgtggtgggctaatgttttcctggttgaataaatgggaacatgccagtttcggccgaaacaaaacgtcggttgagctcgcacgaaaaaacctagccggcctacattgttaattttttatgcaacaccaaaacaagaaaacttccactgccgtaaaaaatacaatcataggccagcgagcgtttttaaaaaaaaaattgtcggggctatttcatgaccgatgtcgactattgagtttttctattcaatccctgaatgaaatttgcatgatgtcgattacgaaatgttctatcggcatcatccggtgatgctttcattttagacctcgatcggtcatctcttcacgacgacgtcagctatcatttttttcgatcaattttcgagaatgatgtttttattgtgcccgggtgggcttacgttttcttggccgactaaatgataacatgctattg

SEQ ID NO: 13276 - DNA, 553 bp, Glycine max
agcttgtaattatggttgagccaatattttgatataagagtatcaggatatgaattgggtttagcccaggttcataacaaaattaaaaaatttatactcgatttataaaattaacaagagattttaatttcaagttctagttataaaattacattaaatatttaaagaaaaaattaatcacctataatgattatataaaactcgagtatggtctacaaaaacaaaatgaaacattggctttaaagactaagtttatatttttttgttaactttgtatttttaacatttgagacatagaactgtacgtactaacaagcagcggcacgttgagtaagtctaggaatacacgtgagatccaataaatagaaattaaaaaatatttgaaaaacattaaatttaaaggttataatatataaaaatttctaactataaaattaaaacagattctatcccatttcaaacaacaataaaaaaagggtttactgcgttttgtatcaaactttattttcacccctaacccacatttttatttttaccctcactcatgctgctt

SEQ ID NO: 13277 - DNA, 437 bp, Glycine max
atgcctaagcactcatgtgtctaaccacttaccaatcaacatgcaacagcgaaaatgtttaatgaagtctctttctgcctatgctaaggaccctaaactctttatgcttgatataaagccaacatttgagactcaaagttgaaaaccaatcgtttcaaacaataaaactcattacaattcaaagaataagcttcctttgacgattgaaacacagcagatgactatgcaaacactgaaaggtaaaaagggtgagctttaagtccaagagaggagctttactccactcctacgacaaccacactactgatgcattatccagaccccctagtcaaccaaagatagaattacccccccccccccccaaccaaagcttttcatgaacatgcatgggtgctagagagaacaatgaaaaaggatttcaaagagggaaaaaaaaa

SEQ ID NO: 13278 - DNA, 416 bp, Glycine max
agcttgtttcctgctaattgttatttttgtgtcattttactctcaattgtgagtccaatttgggagaataagagacctgagattttagtttataaaatcagatgacattgttgatgatgacttgtgatcatatttgaaattgcagctacaagaaaattattgtaccactcatctgtgacatttgtaatctgaccttgttttctatgtgatggggtggaccatggtggcgccaccaccgttgtgatgaccatctatagacgtggaatatggaaaaaagggaggagaaggagggtttgctgaaaattgctttctacataggcatcgttgtctgagaaggatgggtcgctaaaaattgatttttaataatttttaaaataaattaaggataattaattatggttatggacacttaaaaa

SEQ ID NO: 13279 - DNA, 335 bp, Glycine max
tagactggaagaactccatccatgatgcgatacgcccatggggatacacccagttggtccatactaatgagcgattactgcagagtatgaaaaaggcacaagcctagatatgtccttgttcacaggtaatatggtagtgagatagctgtgacactttgagattctagtatgtagggccagggctcccgaaaggaggcacatttcgctctatgatatgacactgtaatgaattggcttcaactgaggcatccctcaaatgggcggcttaacgaacctccgatgctcacacaaatttggccatgtcggccatgtggtctatatacgcatattgcacg

SEQ ID NO: 13280 - DNA, 1114 bp, Glycine max
  unsure (1)..(1114): unsure at all n locations
agcgtcactgacatatgctgntactcttantnatactctcatatagatcntantatcacacagtctctcgcctgctcaagacacataacagacatcacatnacannnnacncacaagacacggagacantttaattgatgaccatctgtatgaagcaaacccagagnatatctataatagatcctcgcaggcctaggatagtacacgntatcggtacgctgagaagcaaatctttttatatttatatctcctgacactaacacatgactcaagcgtgtgacgttcgtacaaggttcactacttcacactaatcgtcttacagagctgtacacgtataatgaatgtgtgtacagcactcggaatgtaccactcccacacagaatattagtgtcaacgaggcgatacatccttaccttngcacacgtcgcacagaggggaccacatcactatgaaaagggcctctttaaagaggaggggtctaatttattgctacgcaagtctgtggggaataacacataacaaaccgtgtcgtataacacacaaactacaagccttttactttggcatagttattgagaaaacactaatctgttgttcttagaactcagcggatagaaacttatcatctttcggggtttaccaaaatgcctaattttgttgggcgagataagatactagggatcagcctaatgataacagacccattagcttaaatagaatataaccattcggacagatggactaaagagaatgattacaatatactttatatgctcgaaaatatagtaactaaggcttctctattaaaaaaagagtcatatgattgacatttaacgatactctcgagaaaaatacataagacaatctctgtgcgtccgaagttaagtctataagaggaatatgggacccttgtcttcataaccgtgggaggccaaccttgtatagggtaccccttatatcacctatcataagacacttattgatataatatcacaacaccgtgtaaaacatacgcatataagtgtactatcttcttgcgtgtcgatcacagagtaaacgctctcttttttcactcaataacctgtgaagaaacaaatacccctctccttacccg

SEQ ID NO: 13281 - DNA, 514 bp, Glycine max
agctttagctttgtccccaaggcttcatgtagacttgtccaaaatcgcgaagtgaacctcggatccctgtcagatacaatactagaaggaattccatgcaacctcactacttccttgatgtacaactccactagcttctccattctatacttcatattcaccggaataaaatgagcagatttggtgagtcgatctactatgacccacacagcatcatgtccacgactagtcttgggtaaactagatacaaaatccatagatatgctctcccatttccattccggaatttccaatggcttcaattctcctgatggtcgctggtgctcaaccttagctttttgacatgtcaaacatcttgctacatattcagctacatctttcttcatgccatgccaccaaaaacttctcttcaaatcttggtacatcttagtcattcttggatggaaactaagacgacttttatgcgcttcttccaagatcttaactttcaaatcatctaaatatggcacatata

SEQ ID NO: 13282 - DNA, 518 bp, Glycine max
tgtcgtcgagatcaccaaaagcagttggggcaaaacgagactccaaagcctggaggaactacagtcatgagtggatctgcccattgtgatacatccattggtaccatactaatgttgattagtcaaggtcaaaagaggcacaacaatgatatgttcttctgcaagggtagcatggtaatcaaagagctgtgagactttgaaaatcaagttgtgagggtcaaggctgccgaaaggaggaacatcaagctttaggaaatgacactgtgaggaagtggtttcaactgtggaatcgtacgagttggcagtagaacgaacctccgatgctagcacgagtttggcaatgtcgtccatgtggtcaataaaggatgattgcaagcgggtcaagcgttgcactatatcatcaagtttgtcagggtgggtactggagtttttggatcgtgttgcaacaaccatgagtcagagaagggagaggagctctcaatgaaagcaccaaatgatgagtagtattctttgtattt

SEQ ID NO: 13283 - DNA, 498 bp, Glycine max
agctttcatccaagattgcaattttgaagctatttatccataaacagcaaactttgtgctacaattcataatacaaatattaatggtgatagagaaaagttaaagactgaatttcagtaataaactaaatgaaactgaaaatctacctagccattgcaaaaaagtacataaatctaagcattattaaagaggtttaaattttgcaggaagttatttgaaaacaacaaaaaattctctaaacagaacacgccatctataatttctttgcaataagaaaaataatcattagtcaaagcatgaactaaagaaatagaagagttggttttaccaaagccaatatgtgtgttggagagacataggagagataatgaagtacaccactacttcatgagttagcattgacatggataaagaattaaaaaaatatattctaacaattagattcatgcttttagaaaaaaagctaatgattattttactaaggcagagaaataaaaa

SEQ ID NO: 13284 - DNA, 493 bp, Glycine max
tatgaatatttcaagaaagacattaaaactctattccttgtatttgttcttatgcttttatatgttgagatttgatagtgttggatcatgaaaacttgtggtgtgaaaagtctcatgatgtgtagataaactatgtgagagttcatgtgattggtgataatgatatgaatagtgaattgatgaagaattgagcaagatgtgagtgatgaattggtgataagttgaatgagatgtatgacgttgatgtcgtgttattatcatataattaactttgttttacaaactaatataaaataattatatgttatgttgagtaactctatgtacatgaagaagacccataaatgctaatttgtgaagtgatgatacatgtatataattattgtggtaagagatgctcataattatgtttattgatggatgtcttacattgtgtttattgatttctcgatgatgatatgagatgtggctgagatgattttgttttattatt

SEQ ID NO: 13285 - DNA, 535 bp, Glycine max
agcttcgaagacatagacacgatctacaaagaatgatttaagttaccacctcttaaaggcaatggcctaaatttcctccaaagaaccgttcccaggttgatcgaggctgctaatgatagccagaaccttttgcgctttgataccccggaaacacttaaaagtaagggttgatctttatgacttataacttaagtgcttatttttaaatttgataagcgtgcagtttttgcaatactttctttttagattgttagatggtagatttaaatatatttttaatccgtgtgatttagtgttttttttcctgtaactttatttttattttagtttttgtaaaatatttattttgttttttattcttaaactaccttaaattggatttttttattatttaaaatattttttactgttcaaaatactatctaaagcattataaggactaaaaataagataaatattgtaaggattaacattgaaaaaaaaaatttttaaaaaaaataaaaaaatgtttaattgtatggatgaaaaaaaaaat

SEQ ID NO: 13286 - DNA, 477 bp, Glycine max
ccccccattgagcttgtggtgtattctgcaattcaaagaactttttcgctttggctctccattcgcaataattcgccccatcaaaagtagggaacaaaatctgtgctctatccaaaatcttgtcggaacctgcctcgctgcccacctcttcttcttcttctaaatttgatttggcacccaaaaaatgaacttgtttgaagagtttctccatcatggaattcacaaaatccatcgtcaactgatagtttttttctgattctgcaatggccgcttaagtttcttggtgaatcttgtacttggctcactgtgaattctccaagatcttttccagaccttcgatccgatgctccaaatccttattgggtgtattgcctcccatcgttacccatcaactgatacccattgttagggtgaagattatcaacctatgattccttactactctcagaacatagaaccaagacctcacacaagaac

SEQ ID NO: 13287 - DNA, 461 bp, Glycine max
agcttccctggaccaatattaagttagcgttaattttgttgcaatatcacctagtaccgaatcagccaaatattatcctgtagtacacacataacaaattccaggtttgttggtttaccttaaaatacttttcatttgtcaaaggggtagaaaattaattcaaagaagcaaaatgcttaagatgcaaagaagaaattgatatgcatcataaaacaatttaagatatatctctgcaaacatgactcagatcaaccatttattctataacaagaagattcaggaagccaaataaaattgaatagactaattttaaccaactagatacaataggttgtcagttaggaagccaaataaaattgaatttttttataagcaaagtaatttatggatataagaatgcttgcaatgagaacaagagatgcccaaacaatactcatacaaaaaatgatgttgataatata

SEQ ID NO: 13288 - DNA, 315 bp, Glycine max
atatcctgatgaaggtgtccatatgttctttttactggactaatacatttgctacccaagtttcatggtcttgcaggtgaaaatcctcataagcatcttaaggagttccatattgtttgtttcaccatgaagccccctgatgtccaagaagatcatatctttctaaaggcttttcctcattctttggagggagtggcaaaagattggctatactatcttgctcctaggtccattttcagctgggatgaccttaagagggtgttcttgggcaaattcttccctgcatctatgaccactgccatcagaaaagacatt

SEQ ID NO: 13289 - DNA, 442 bp, Glycine max
tatagttattggagggagaataaagcaatccaaaatcatttgaacctttcaagtaacgaagaattctttttgcggcttttagatgaggacaggtaggagcctccataaagcgacacacaactcccaccgcatatagaatatcgggcctcgtattggttagataccttaaactccccacaagactcttgaagaccgcggagtctaccttctctccttcatcaaactttgataacttcaagccaccttccataggtgtgttcacgggattgcaatcaagcatattaaatttcttcaacacttcttttgtgtagcttccttgtgagacaaagatcccattctccgtttgcttcacttgcattcccaagtaatatgacatgagtcccatatctgtcatatcaaattcacgagacatggactccttgaagtctgtcaacaaatttgg

SEQ ID NO: 13290 - DNA, 444 bp, Glycine max
agcttctacttatgtggcagggcggtcttccttcactttcttgtctccaacgtgagctttgaccactgctcttccttcctgcgatgcttcttttcatatccgcctgagtgggcttatagcctaaaccatacttcccacgatttcctttggcatttatcaggctagttatgccgccgttgtccttgcctaaacccattccgggttcgtaatcgttccctaacataactcgggccatcattactgctgcatcggacagacaaggctgcccagagaaggagtccacggaggaaatgctgaccacctcaaaagactggaaagcggtttctaacgattcttctgcggcttccacataaggcatagaggatgggcagctcaccaagatgtcttcctcgcctgacacgatgaccaagtgcccctccactacaaatatcaacttttggtgga

SEQ ID NO: 13291 - DNA, 493 bp, Glycine max
  unsure (1)..(493): unsure at all n locations
tccatcaagtggtatcagagcacaagagcttcaagtatgtgctctttaaacctccattaattttcaactttaccttttcctccattgttgtttcttcatttttctccatgtatttcctcacatgtcttgtgctaaatgttattaacatgattctttagaatttccaccgattaatcttgctatagaagcttgatttgattttctatggttcaaatttcttgttcatgttcttgaaccatgagttgtgttaagtttacgctcctttgagttttgtcttgctatttttttgtggctgaaacctaaaccataaaattcttataaaaacattaaagtagaagagaacctcataattctagagtgacttgttcccctattgtagttttgtcatagaagtcatgtctagtcatgagacttgtcacataagatatcttatgttgtgctgaattttatttttcttgattctttgnctaactcatttgttcatgagtgtatg

SEQ ID NO: 13292 - DNA, 515 bp, Glycine max
agcttgtagggttaaagtctcacgattgttacgtgctcatgcaacaattgttagccgtggctatacgagacatctttccaaacaaagtcaggttagcgataactcgcctgtgctttttcttccatgctatatttagcaaagtcattgatccagtcatgtttgttgagttggaaaatgaggccacaattatactgtgccagttggagatgtattttccccctgctttctttgacatcatgattcacttgattgtgcatctggtcagagaaatcaaatgttgtggtcctgtttatctacagtggatgtacccggttgagcgatacatgaagatcttaaaagggtatacaaagaatctatatcgtccataagcatctattgttgagaggtacattgcagaagaagccattgaattttgttcagaatacttagagaaggctaaacctgttgggcttcctgagtctcggcatgatgacagaagggggggtaagggttcaagaagactgcatgtgatcact

SEQ ID NO: 13293 - DNA, 440 bp, Glycine max
taacaaacttagaaatccagtggtcataaattccgaaatatatggggagtaaacgcacattttatctatatacaattgtttgtttcttgcttgaatcttgatttcacgtactgtgttgccatcatcaaaaagggggagattgtggactgccatgcctttggtgttttgatgatgatcatgatgatatgatgcaattgatgcaaatgggcttttcaacattaaattcaagacaatgcttcaagattacaagtcacaacatcaagatgatcactagttaattacgaaggaaattcttaattgaattatcataaggtttggccaagcaattgtaattacaaagtgtttttcaaaggttttactctctggtaatcaattaccagaggatgtaattgattaccagtgaccacatatattttataacagctactaaaatttgaatt

SEQ ID NO: 13294 - DNA, 491 bp, Glycine max
gatcttaagcaccgcggctgcagctttaccgatcaatggcgaatgtttatgctctagtctctaatactcgttttttcttgaagatgattgcaggactaactgatgcctatgtcgattttggtacatacattcaacaacatgatcccttgccaccatttgaaactgccaagtctagattgcaactcaaagagtcaacaattcttctacgggctactcgtgaatctggctcatcttcctctacaacttcccttgttgcaaattcccaaaattttgatgatgatatgaatcgccaaaattcctctcaaggtattcataataataataataatcataggaataggggcaacaaaaataacaaaaatttgggtggccagaactccggcagaagaggtcgtggctctagcgacgatggcttcagtggtgggcaaggtgctggcagtggcaatcgcggacaacaacagcaatgacaaacttccttgcaatggccatgg

SEQ ID NO: 13295 - DNA, 578 bp, Glycine max
  unsure (1)..(578): unsure at all n locations
ccgctttaggatcaatttttttttctctctgttcctctcaactattcttcattcttcttcctcttttcacttatgctcttccatttttgttgcacaaattttgtggcttttccattggtgatgatcatggaaggctaaatacttaatcaatccaaggatccactccaagcaagactaaatttgagttctggtttagtatttctaattttgtgtgaatgttcatttttttctttaatcctatttttgattttcatgattatgaatatgcttaggattgaaagcaaattaaattgtttggatgatattctaacctaattngtgatctcaatgaatttagggattaattcgattaaactaactctaatgacattaattgaacctttacaacttgatcattctctatagaactgtgataattcatttgcattggtttggtgaattggattgatgatttccaatttgttttatgacctatttgtgcaattttgtttatgttatgcaactaaaccatgtttcaatttagatttcacatttctttctagtacctaccaactattcgttggaattcccttgctgtt

SEQ ID NO: 13296 - DNA, 395 bp, Glycine max
agcttgaaggatttcaaaattcagcttgtcttataaaaaattaggttttattgtaagtcaattataaattttggctaataaagaaaatcaaagaagaaaactaaaatacctgaatatcctcccaaatcaaatccttctgagcagcagggacttccttccaggtctcgtatgtgacgtcgaccttatcacgagcgacaacccccaaatatgttcttaatttcttcttgtggggatcgtcggccttgtcggttgtaggatcgacgttgaccactagtctctctgccccaggtggtctagaggccaaggatcgtagtcgtgtctcttagtgtgtccgcttctaggtggatggggacactgatgctattgcaggaggaggagaatgagaacggggagga

SEQ ID NO: 13297 - DNA, 304 bp, Glycine max
ctcagcttcacaaggagaaatatacctaccatcgagataatgcttattcttatcaatagactgctcagttgtttcatcgtcattctgggcaggtacaaaagccgtggttatgcgatcataaccttttttaatgtgcttgaataaatatttgatggacattgattgattgcaccattctatgttgaggtgagcctgatatttcaacaataagattggattgtatggtaccacgtatctattgtctaggggtattccatttttatctatattttactatcattatgccttctataataggatattc

SEQ ID NO: 13298 - DNA, 452 bp, Glycine max
agcttgagaggaaaaccattggtgatggtttcatctggctgacaggccagtggacaaaagaggcagtgcaggtgcatattgtagccatatactttccatgtgatgtgcaaaataaaagaatcttgtggaatgccattaaactgctgaaatcaacaacccaaggggggctttggtgcattttgggggatttcaataacattagacatccttcggagagggttggagtcacacagagagggatggacgagggaaatatataagaatttaatgagcggataggtgaactggaagaggaagaagctccatggataggtaagaaatttgcgtgattcagtcccaacagagctgcaaaaagtaagctggacagatctctaatctctccagaatggctcgcaaaatggccaggaagcttacaacagccattggatagaaatttttcagaccattgccca

SEQ ID NO: 13299 - DNA, 437 bp, Glycine max
tagtaaaggtctaaaacaaaaaccaaagtaggaacaatcttttagcaataaaggactaagaacatattttagaagaaaaaaaaaaatatgtgtgactattatgcatatctttacacctatcatagccacgtatcaaacaattctatatactttcaactaatttcttaaaactgatcaatttgaaattgatagtattttggaggtattaaaattatagcgtatttgctttgtcatttcaaatgttgtggcacactttcatggcataagtgcatatttagatttttgtttaatttgtgataacacgtgcttcgagacccatctaactaatgaacacaaaagacacttctttgatccttcgtgaaacatagattggaggtcattcatttgatactccaacatatcctaagcaaggaagaggatgcttttgaaaacaaacg

SEQ ID NO: 13300 - DNA, 523 bp, Glycine max
  unsure (1)..(523): unsure at all n locations
agcttggagaagatgcttcaatggaggattagaaagagggagagaaagagagaggggggagcacgaaattgaaggaataaaagaggtatagaagtggaactttgaagtatgtctcacaagactctcattcatcaaagttacaacaagtgttacacatgcttctatttatagactaggtagcttccttgagaagctttcttgagaaaacttccttgagaagcttctttgagaaaacttccttgagaagctagagcttagctacacacacccctctcataactaagctcacctccttgagaagcttccttaagaagattcctaaagaagctagagcttagctacacatacctctctaatagctaagctcacctccttgagatgagaagctagagcttagctacacacccnctataatagctaagctcacccccatgacaaaaaacatgaaaataataaaaaaaaagtccttatttacaagacaactcataatgcccccaaatacaaggctaaaaccctatactac

SEQ ID NO: 13301 - DNA, 598 bp, Glycine max
tgagatgaggaagtgttgaagggtgaaacttcctgcttttattgttgaccacagagtggtacctggagatatgtctcgggggtcaagagaccttggggacgtcaggtggggtgctattgcccaaaaccaagcttgaccaatcccgacccaacccgggcatagtcggtcagtgagaacctgtgatgtacctaagcaggcgagctcctggcagtcaacagatgaaaggaaaacgagaccactaagcaaggaggcttgtggtggctggccagctgtgaattctgtgtaatatgtggattgtggcctctggtaatcgattaccaagggtgggtaatcgattacaaggcttataaatgaagacaggaggctaagatggtctctggtaatccataaccactgggcgtgaaactgaagaaagagcgcgaacttcggtcttagctgaaagaatacacacagtaggttgcttttttgattttcatgaaattacaacctctcctagaaacacacatgaaccagatgttcacctgcatgtgtctaaacatcctccccaatcagcatttgcatatgcagataatttgaaggagtttcttgctggaaaata

SEQ ID NO: 13302 - DNA, 493 bp, Glycine max
agctttaaagaaatgggttatgaacctatttgctctaccatttaaattctttttgtaaaagatttttttgtatattcttgtaaagttccaagcattctcaaaacaccttgaacatcttgagagaaaagactaagaccttagatttcatatctgtttgtgagacgattaagaataattagtgaaccaaccaaacaacaaatcttcatatttgttttagagccaacattggcttggtaaggcaaagaatactaggttgttcaatcttggtgtaaaacttggtttgtaagagacaaaagtgacaatgactaatacttgtagctttgagaagttactggaacttggtagtttaccaagaactagatgtagtctcgatagttgagacgagagtagaaatccttgtgccttatagttctcttgatctctttgtgttaaagtgacctcagggtcaaatttgattttgttttgaaaacatgttttgttttcaaattgaatc

SEQ ID NO: 13303 - DNA, 297 bp, Glycine max
acacatattggtagtttaaagtctttcaccctcttgacaaagactaatttggctctggcgacaaaatataagatctgggtgatctcatttgtatgctcttccgagttggataaatgtcgcgcttctatcgacatatgatgcctgagagcataaaacaccatcttattcgttggcataacctgttctactcaaaccgcatctgcatcattgcttaaagttctcataccattatgctcaacatgtacaacgacacgtgacatgtccacaccgagaacaatgtcgatgtcttaatgcaaa

SEQ ID NO: 13304 - DNA, 526 bp, Glycine max
  unsure (1)..(526): unsure at all n locations
agcttacctcatgctttggaaaagggcatttttggatgggacatgaaccattgcttttgtctcgtccttgtccattctccaattttcaccacagtaaaaattctgctgcaatttgtatcacctgacctttgcagtaatggttgattgctggatatacatggattaggcaagtcattggtgagttttcacttgttcgtcaagttttgattataaatggtattaatatttctacgatattgattaaaacttgtgatgaatttaagaatttgatttataccgccttgttttttaatcaaaaaattatatgtattaatatgtttcaaaacataagtctctgagtaaaaagaaaatgttaaaagatgtaacaaaagtacaaaactattattctatttntattcaacaatttatactctttaaatgttttttaagaatatgtacaatcatgaatcctgcattcactaccttgaatagtagaaaaaccatcgagcaaaaaagataattaccgaaactaaatttactaaatcag

SEQ ID NO: 13305 - DNA, 514 bp, Glycine max
tagtaactaactctgctctaactaattgccaactaatctaactagcctctaactgaaaataactaactccatctttttcatacagctgtaatacccccctcaagttggagagtaaatgttaatgagtcccaacttacgggtaaaagaagagaaagccagaagcattaagggctttgtgaagatatctgcaacttgatgttggtatttcacatgaacaagcttaagggtgtttgactgcactaactcacaaatgaagtgataatcaatatcaatgtgtttggatcgttcatggtgagctggattagatgctagactaattgcaaatttgctatcacagaaaagcatggtagatttgatggaaatctcaaagtgcaggagtaatcgtcttatccaaattacttcacttgaaactgaggaaagagctcgatattctgtccttgctgaatatttagacacagtggtttgcttttttgatttccatgatattaaaacatctcctagaaacacacatgaa

SEQ ID NO: 13306 - DNA, 516 bp, Glycine max
  unsure (1)..(516): unsure at all n locations
agcttgtccacaaaaatagggttttgaaaatttatcatttcagtttcttaccaagtaaaatggatcattttaaggtccaacgccttaaaatgatcacctttcaagtaaaaagaatcgcttgattcacgattaagaaagaactacgtaggtctgatttcctctccaaaggagggtacgtaggagcaaaagccccgcttttgtcgacctcaaaaaataaaaagaaataaaagttaagataacccaattccactattctaaaaaaataggttgttgtcctttgagacaaacgtgagaggtgctaataccttcctcaagcgtaaatacaactcctgaacttagaattttcattttgaccggtttccttcggtttttctgacgttttctacaaataaacgttggtggcgactccgcgcatctttcctcctttggaaagcgcacccgtgagcctcgcccttgctcgcccgcgaatggcacgttgcgacagttggcgactccactggggattntttgtgagtt

SEQ ID NO: 13307 - DNA, 532 bp, Glycine max
  unsure (1)..(532): unsure at all n locations
tccatcaagtggtaatcagagcacaagagcttcaagtatgtgctccttaaacctccattaattttttgctttaccttctcttccattgttgtttcttcattttctccatgtatctcctcacatgtcttgtgctaaatgttgttaacatgattctttagagtttccaccgattaaacttgctataaaagctagatttgattttctatggttcaaatttcttgttcttgttcttgaaccatgaattgtgttgagtttaggttcctttgagttttgtcatgttattttttgtggctgaaacctaaaccataaaattcttacaaaaataataaagtagaagaaaacctcaaaaatctagagtgacttgttcacctatcgtagttttgtcatagaagtcatgtctagtcatgaaacttgtcacataagatttcttatgttgtgctgaantttatgttcttggttctctgtctaactcatttggtcatgagtgtatgaaattcttttacctattatttggattgagtcaaatctttca

SEQ ID NO: 13308 - DNA, 520 bp, Glycine max
agctttgtcgatccctaagggcaggacccaaaaatgggtgaatcagaaaaatgtgggttgtatgttgatgacaatcctccctgcctggttgcccttggaagagtttatgaggggtcgacaactgtccacaatgtccctttaggaaatgatcaagtgaaggtcaatgttgaggaagtttgagatgttgatgctcaaatccctatacccactcaagagattcagttagtgaggcagaccgttaacaccttccttgcttggccgacccatcttgtacaacctttttcagaacaagtatttccttttgttgtgtttgttattattaaaaaagtatttgttacaaataaagtgttcactgtcattgatttatttttattaactgtttaggataaacaaagaaccgtgggactgtcgaaacctgttgatagactagaacttgaggactatcccttataccagttggcattgacaattctatagcttttcctcaagcctatgcagatgtcgtgggattcaactgtgt

SEQ ID NO: 13309 - DNA, 530 bp, Glycine max
tttgtcactccacccataccctggtggatataaaggcttctttgaatcagtttgtaatgtattatacataagggcatgtgcttgctgaaaagactcttgtccgaggtcaccaatcatatgctccaagtgatctcccatttctacatcaaatggttcagattgggacccattctgcatgtctatcaattcaccatgccatatccacgctgtataattcttcttaatcccatcacacaacagatgctctcggttgtcatgcaatatttatcgtatcccattcaaacaatttatacaaggacacaaaaattttccatcctaatccagatgacttctttcgaaggcaaattgcaagaactcttcgacgccttccttatatgcaaggctcatgcgacttttgttcatccaacttcgatccatctaaataataactctgtgatactcacaaaagtattcgatgcatgaaaatatcgctattttattataagtgtggccctatcccattgatgaagacatttttttatggtagcttc

SEQ ID NO: 13310 - DNA, 538 bp, Glycine max
agctttataaggactatattggccatacatgagtggacaaatagacaaggagagagaaacaaacatatgaataacaaagcactaaaaaaatagacttgaaagataaagcaaaaaaaaaatactacaatgataaggaaaaaagtcacaatcattaccttgccccccaagcataacacactatatatgtgcatgtgtttgcaatgcttcttaaaaggattcatcaactttggaggaaactattcctacacaaaatattgtcataggtgtccataatcatgatatatcgatcaattgtgagcctacaaacttgaatgatcatgaaccatgactggtttcctactcacgtgttcaaataattgcaaacaaaattagctcgaaacatctgttagtgccatctttaaggacttattcatttagtgctcaagtctttcaagcataacaagcacatcccaacatagttggggaacaaaactagaaagaaagatttattcttgatatgaactcaagaactcatattgaaaaggcaataacaaaaaaa

SEQ ID NO: 13311 - DNA, 586 bp, Glycine max
tcatgtttatcaaatttgaaagctttttggcttttgacagaagttggaacatgcagaacaaaagggtgccagcatgttagtaaactttggaggtctttataagaatggtcaattagtttttttttttcactttctttgtcttccttattttgaattattttcaaaagatacaagaccccgataaaatttagaaaaaataaagaatcgaggtaaatagaaaaaaataagaacccaaaaggtcatttggccttttttggttaactttcataattaaaagttagcttttataagacaacaatatgtaattttaacaaaatagtaacttttgtcatttgaacataaggtaattatattctataactatctaccttgtaatatggtttacactaaacatttgatatgattaaaacttatcatattcttatgatatcaaatttttatcttcttctcatatcctattatactttatccaccaaatgagttattagagtaaatgttgtatacaaacgcctaataagattgtatcattatattatcaaataggtttgacaatataaatctttaagccaaatgcattactttttga

SEQ ID NO: 13312 - DNA, 576 bp, Glycine max
  unsure (1)..(576): unsure at all n locations
agcttcgtagaatgctttttagaaaaaataacttgctctaaaataatctactattggtagatttaatctattataagttcatagcctatttttttctattctaattcatattttaatatatattgtgataaatataaatttataaaaaaaattcttggatgccttaattgctttaatttatggcatacaaataaagaaatttcttcaattacttaaatataattataaattttggtttttcgatgaaatgtgaatattctcacaaactttggcccaaatcacttatcgggctattttatgatccatgtcatacttaaagttttttttacctcttaatatattacataggattaaattaaaattcttttatggccctaatatatgagagtactgatacttaatcctaatagacaaatacaactaccgaggtaaatganagagagagaaatgaggggccaattaagaatacaccccaaaagaaatttgcattatgaagaaacaaaactaaagaagaagcaaacaatacttaaatgaatgctagacatgcaagtttccttgtccaaacatcaagtaaac

SEQ ID NO: 13313 - DNA, 451 bp, Glycine max
tgtagaatggctagacataatacatgtcagggtttggtttggttcaaggataaaagggatgccccacattatttccatgacacaaatgcaaagatgatgatttggaaattttatgcaaaactggtcatgcatgcacctatgcggacactcaagtgtcaaatttttatggtcatgggatgctagggctcacgattcatttcctctatttttagtcaacccaatgtttccaaaatatgttcttttatcaatttgtgcattcatccgagtccattttgggcgtccgggaaaattttcacagcattcacccttcaggtgtacacacatttttttcaaaaactagttatgatcagtgaattttttcaaagaaaagttggaagtcatctcttttcaaaagcatgttggtttttcagctcgacaaactattttctttttgctctctgtttcctttttt

SEQ ID NO: 13314 - DNA, 482 bp, Glycine max
agctttctcataagtgctaaaggacatttcaggctaggattaactcactttaacctccatttaccacagagtccagatttaaccttccaactctcaaagcctcactctttttccactcataacaccacattctcactttctaaacctaggttaactctacccttcatgtctaacagtttccataagcaatttcagcatataaacatcacaagcatcatcacaaaaaccctaaaacagaatgggtatgtctaactcatccaaacatggcaagttcaacatgctttcaacaagagtcttcacaaataactatcacgaagcagaaaactaacaaaactacccatcatatctcccaaaaccccatacccacgaaaatcaaaggagaaagaagtccacccaaacttgaaatttcgaagtcccactcgtagacacgcacttcacgaccccgaaaatgcgctcctttcgcgatttggagcagaaatgat

SEQ ID NO: 13315 - DNA, 380 bp, Glycine max
tagttactaactctgctctaactaattgccaactaatctttttgcctctaactgaaaataactaactccatctttttatacagctgtaatacccccctcaagtcggatagtaaatgttaatgactcccaccttacgggttaaagaagagaaagccaaattccttaagggctttgtgaatatataagctacatgatgttggtatttgacatgaacactctgtacggtgtttgacccctctattgcgctgagattaagttcctttgagttttgtcgttggatcgttcatggtgagctggattacatgctagactaattgcaaatttgctattcacagaatagcatggtagatttgatgggaatctcacagcgcacgagtaat

SEQ ID NO: 13316 - DNA, 541 bp, Glycine max
agcttgtccatattttattccatatgcttgctataaaatcaaagaaactgtttatactggcctctggtggttgaaaaggcataccctgcagtaatagatgatttagtaattcacaatttgttgtcataacattaccaataattagcatattttgtgaagaatcagaagactaactttctaatgaacttatctacggggaacaattctacaatatcaaactcatgtctcagactcagactgatctgctattgattacctagagcttattactaaccattttaagtaattagaaacaaaatattaaatgtatttatgtagtgatactgcagataaaagaactgttgtaaagtcttctttgtcgtcctgtccaacagttcaaaataactatagttgttaaagtttgatgaaaagaccaatgggcaatggtgaaacatagtatccagatttgagcaagtttcacattttatgagaatacaaatcttggtcagatacatggattaaataataccattgtgttcatgtcatagaaaataaagcatac

SEQ ID NO: 13317 - DNA, 464 bp, Glycine max
cttgtgggggaggatgtgactcttcacatttgaatttgtatttctacgttcaaaggcactggtaatcgattaccaaaacattgtagtcgattatagctttttgaaaataattggaacgctgggaattcaatttgaaaactttttcaaaacaattttgctactggtaatcgattacaacaatttggtgatcgattaccagagagaaaaaactctttggtaaaaagtgttgtcaaaaactcatgtgctattcaaagatgtgaaaaactttttaatacttatcttaattaatggctctcttcattcttgaatcttgatctcgattgttgagatcttgaaccttgaatctggattcttgactgtagactctcttcttgagtcttgaatacttcttgaatcgtatctcgaactcttggattgatcctgattcacttgaggtgctctttgattgacccttgattcacttg

SEQ ID NO: 13318 - DNA, 494 bp, Glycine max
agcttaacagaccctcgtggaggtacaactgcaagaagaacgtggaaaatcattctagaagctaggggtggtgatgtaaacatactataggccgttaggattgttagttagctattacgtaactaactacatgtataaaagccatgcacaaacccgtgaagggattatggaaataatattctcattttgcatttagattcttcctctctcctcctctctctctcgtagaatactcagtcacgaggaaagctacctctaacattggtgctttcattgcatcctctccgccatggctgacgctacacgatcgaagacaagcatggagcgttgggaagacgcgtttgcaaagctttctgcatccatgacgacaaagttcgacgaacttctcagtcgtatgaaccaactagaaacctcccacgccaaaaatcaggctccgcccgtgttcgtgaactccgctgcacgggcacagcaaaccagcttatcgattgaagttg

SEQ ID NO: 13319 - DNA, 467 bp, Glycine max
tgtgctattccaagttcattaatcatacctttaagctatattgcttccttcactccttcagctagggccatgtactctgcttcagttgttgctctatcaaaaactgattgttgatttgttttccaattgattgctgtaccaaacaaagtaaacacatatcctgttaaagatttccttgtgtttacatttcctgcaaaatctgcatctacatagcctgtgattgctgcctcatgtgttgtcttcttgtaccttaatccaactttcaaagatccatttagataccttagtgtccacttcacagcttcctagtgtgcactgccaggatctcccatgaatctgcttataatacttacaacatgagccaagtcaggtttgctgcaaaccattccatacattatgcttcccacaccactggcatatggtgtttgatccattttacaccttttttcagctggttttggtgcttg

SEQ ID NO: 13320 - DNA, 399 bp, Glycine max
agcttcctgatttcaacgtattcccactgtccaatgataggtctgaatcagtggatgttggaaagtggtactgcccttttatgtttgttaaggaaagattaatgaaattgaaggagcagatgaaaaagacagtgttctatgagttgacacttaagcaaagatgggagaagatattttcaaaggaaaataatgatggagaaaatctggctgtgtttgtggatgttgttgttcaaacagaagttgcaaagattgcaggaagggaagctgtttggaatgagaatggtgagagggtggtgtggtttaagagttttgacgatgaggggttggaaattacaagtgttgggctgagtttgaaaattgttgatagaatgagatgggagcaagaaagagttggatgga

SEQ ID NO: 13321 - DNA, 407 bp, Glycine max
ttaactcattaattagaaaaatgttatatactagtggtggatgcgttgggtttgcttctgctggtatgaccctagcttgtctgataaaaaatgaactattagtttacacattatgagaatacattaatataccatacatcatattattaaagagtgtcctacaatacctgaatagtgacaagtttaagcctttcacccacaatgggttagtaccctccacagcatctttcacagtctccagcctttcaaaaaaaaaaaaatctttcacaatctccaatattgttttgactagcagatgataatatcaatgctttcagccttaattaggggtttgattaggggaagccaaactacatttctcaaccatgaattgctctttacggattcggttcatatgactactgcgt

SEQ ID NO: 13322 - DNA, 499 bp, Glycine max
agctttcattgttgacaactaacattgttttttgatgaccgtgatgcatgtatgtgccagatcattgacaatgtttcataatgcagaataatttattcttttgcagcattgtgatttttcaatcacacttggatttggataggtttcgattaaggcaaaaattatgatatttgcttgatcaactaaaatgttctttgtacatatttttctgtgtatataatattaatttatgtatatctaatttttaatatctctattatttattgtgattgtatttttctaattatcatgtgatgtcttgagctttatttgttaggtttttttatcattctaatcacattggtgatgatgttaatttaactgtgattctatttttctgaccttgctatgaaatgatattaaagatgtacttgtgattgatacaatccaattcaatatataccctatattatgtataatattgtgtgaatgagacaatatttgttttcatgaaatactt

SEQ ID NO: 13323 - DNA, 401 bp, Glycine max
tgttggattatgggggacccgccatatgtgatactaggtggtgatcgggcgatggcgcaaatcaactctcccacttccacaagaatcacgaagaagtcgcgactcatgaagaaagcctagaatcgagattcaagattgaagatctcacgagtcaagatcaagattcaagactcgggatggttgaatgtagaaaagactcgatcaagatctgtattaaaaagctgtttcaagactctgaatagcacatgagtctttgacaaaacctttaccaaagagtttttactctcgtggaatcaattaccatattggcgtaagcgattactaggcgccaaatgagtttgaaaaagtttgcaaaccgaatttacaacgctccaattattttcaaaaggctgtgatcgatt

SEQ ID NO: 13324 - DNA, 329 bp, Glycine max
ctctgacattactgaagcttagaagtgaaatgggtattcgctgctgccaaattttgacacacgattaactgtcttgcagaaatttgtgtgtcaaagtctggcatagttgggcttaggtatatttagtaactttatatctggaaatcctctgtgaggacttactgcgttcataacttatgaagtatagtacaacatgagttgaatattcttgtcaggagcgtattaccgcctgttatgcagatttatttctggcacaactgtgggtttgggttaagtggatgacgattgactaacactaataaagagaactgcttactttagtgctaagt

SEQ ID NO: 13325 - DNA, 389 bp, Glycine max
tgaagaaacgaatgaaaatgggaacattcatgttatattttctcaggaagaagcatctggaactcgccttctaataaatggaaggacttgcttgcttcatgtgaaatgagtacatttgtaccttacctatgttcattcttccaagaaaagatgtcttttgacttgtaagtaactgggcgtcttctactatgatctttgaattaaaaggaagtgaaggaaatttcatgaccctatattatatatataattgctgctcagaatcttatatcactatatgtttgaaactttttatgtttggaaaacagcacaatgactagtttacacaatcttgcaccttaacatgtatttgcacaatctgaacttgttgagatataatgggaattttattt

SEQ ID NO: 13326 - DNA, 478 bp, Glycine max
agctttctacatagacttgatttatggtttacttgctcttggttccctttatatttgagcacacactagaacactgattatggaccatttattacaggcttacagttccttttttaaaagaatctttttttaaaatgaataaattcttttatttttcatgtgtttttcaaaacaatagatttttatgattgtgaacaaatataaattaacttttttttagtttttaaaaaataatctcaattattttatatcaaaatcacttcttgttttaatatataaaaactggtcatacatattcttttgttgtgggacacagatagattagggcagaatgtgaatggacatactaaccttgaaaaaatcttgtagttttgcagaagctattatttgtttagtttctgagaaaagtactagaacaatttttaaccttttttctgagtatatctttatcttacatcattattatttttttcaaata

SEQ ID NO: 13327 - DNA, 409 bp, Glycine max
catgctcttggaagcgccgctattaatacgacactcttttgacagtctataaaaaaggtaccgacgcctccaactgctcagaggcccaacgaacactctcgtgcacatgcactgattacgggactcaatcaaacctccgattggatacggagaagctcattaatcggcttataggctcatgaatgaattgcaaacggattgctttattactggacacatgcacgcatgtcgtagaaaaacattactagtaataattagcataagaaaccaactgattaagttagactaccactattaatgtgatgatcttattcacttatttatattaagatcacaactatataatttgctaatataaaatacaatattattctaccgtttcgaactcccaaagaataaccttgtttct

SEQ ID NO: 13328 - DNA, 556 bp, Glycine max
agcttgcctcaaagaggtccaggaaggacaaggcattcgaaggaactagttccgctccggagtatgatagtcaccgctttaggagtgctgtacaccagcagcgcttcgaggccatcaagggatggtcgtttctccgggagcgacgcgtccagctcagggacgacgagtatgctgatttccaggaggaaatagggcgccggcggtgggcatcactggttactcccatggccaagtttgatccagaaatagtccttgagttttatgccaatgcttggccaacagaggagggcgtgcgtgacatgagatcctgggtaaggggtcagtggatcccgtttgatgccgacgctatcggccaactcctaggatatccgttggtgttggaagagggccaggaatgtgagtatggccagaggaggaaccggtctgacgggttcgatgaggaggccatcgcccagctgctatgtataccgggacagggatttgcccggactgctgcagggaggcgagtgcgaaatatgcgccccaacatgaccaccctgacccaaatatggatgac

SEQ ID NO: 13329 - DNA, 406 bp, Glycine max
ttttagtttcagatgatgcagatgggtttgtagctacctcatgcactcctctaatgactatggcatcatttctggcgctaaactgttgggagttggaagccatcttctcaattaaatttctggcttcagcaggagttatgtctccaagggctccaccactggcagcatctatcatacttctctccatattactgagtccttcataaaaatattggagaagaagttgttctgaaatctgatggtgggggcaactggcacatagtttcttaaatctctcccagtactcatacaggctctctccactgagttgtctaatacctgagatatccttcctgatggctgtggtcctggaagcacggaaaaaattttctaagaatactctcttaaggtcatccccactcgtgat

SEQ ID NO: 13330 - DNA, 457 bp, Glycine max
agcttgaaggtttgtacatgaccaaatctttatttaatcgtctttacctaaagcagtctttgtattcgtttaaaatgcatgaagatagatcagtaggagaacaattggatttgtttaataaactgattctagatcttgaaaatattgatgtcactatcgatgatgaggatcaagctttattattgttgtgctctttgcctaagagttactctcatttcaaagagactttattgtttggaagagattctgtttctcttgatgaagtgcaggctgctctgaattcaaaagaattgaatgaaagaaaggaaaagaagtcatctacaagtggtgaagggctgacagcaagaggcaagaccttcaagaaagatagtaaatttgataagaagaagaaaagccagaaaatcagaagaatggtgaacgaaacatcttcaaaatcagatgttattactgtaaaaag

SEQ ID NO: 13331 - DNA, 478 bp, Glycine max
  unsure (1)..(478): unsure at all n locations
taaacaaaggaagtggcatcatgcaacaaatgtgaaacattatctacaagatgtctgcattacctttcacttgttggatcaagtggcctcggaataattaagaaggggggttgaattaattattaatgagcctttactaattaaaaaatctatccttcttaatgttactaaattcaattaagcttttaccacaaagttaagaaagtaaagaatagtaattgaaacttaaccaaaagtcaaagcgataatgaaagtgcatagcggaaattaaagagtgtntggaagaagaagacaaacacaagagtcttatactggtttggcaataacccgtgcctacatccagtccccaagcgacctacggtccttgagatttctttcaaccttgtacaaacctttacaaacaaagatccacaagggatgtaccctcccttgttctcttttgacaaccaagtggatgtaccctccacttgaactgatc

SEQ ID NO: 13332 - DNA, 468 bp, Glycine max
agcttcaacatcagaccacttccagggtgttggaactacttcacatggatttgatggggcctatgcaagttgaaagccttggaggaaagaggtatgcctatgttgttgtggatgatttctccagatttacctgggtaaactttatcagagagaaatcagaaacctttgaagtattcaaagagttgagtctaagacttcaaagagagaaagactgtgtcatcaagagaatcaggagtgaccatggcagagaatttgaaaacagcaggttcactgaattctgcacatctgaaggcatcactcatgagttctctgcagccattacaccacaacagaatgggatagttgagaggaaaaacaggaccttgcaagaggctgctcgggtcatgcttcatgccaaagaacttccctataatctctgggctgaagccatgaacacagcatgttacatccacaacagagtcacactga

SEQ ID NO: 13333 - DNA, 429 bp, Glycine max
  unsure (1)..(429): unsure at all n locations
tcaacattcaatnttgagcgtctcgatatatgacgagactttttcagacatccgagtaaaaagttattgtcggtttaatttggctcagaaggttcaacaatttcaatttctagcggctcgctatattacgggactcaatcagacatccgagtaaaaagttattgtcgttttaattggctcaaaggttcaacatttaatttcgagcgtctcgctatattacgggactcaatcaaacatccgagtaaaaagttattgtcgtttgaattggctcagagcttcaacattcaattttgagcgtctcgatatattacgagactcaatcagacatccgagtaaaaagttattgtcgtttgaatttgctcacaggttcaacatttaatttcgagcgtcttgatatattacgggactcaatcagacatccgagtaaaa

SEQ ID NO: 13334 - DNA, 501 bp, Glycine max
agcttgtattttgcaattgaagaaaataaattcaaatatgcaatgataaagctggccaccaaaacaccaatggagaaaaagaaaaagctcttatttcttagcatacaaggtcatcccattaatgatttgatgaaagacatggtgcatttcaagtaatgtttttaggttcagaaaagtaattcattaaacttactcagacttagtcaccaagttaatatctttatgctagagggcaaagtacaattaaatttattattcattgtatgaaagttgactttttaattgatattcaagcactttctcattattgaggagtatgtaaccacatggatttttgcaacaaatctacttgaccttttttgtaagtagtttgattatgctactacttcactctactagttctcttagtttaatttcttaaatgaattgaagttttttttttaaattttaccaattattatcgtaattagccctcagacaagtctactctatgatttctat

SEQ ID NO: 13335 - DNA, 535 bp, Glycine max
tctacttatgtggcagggcaggcttccttcaccttcttgtcttaaccgcgagctttgactacagctcttccttcccgtgatgcttctctttacatctgcctgagtgggcttatagcctaacccatacttcccacgatttcctttggcatttatcaggctagttatgccgccgttgtatttgcctaaacccattccgggttcgtaaccgttccccaacataactcgggccatcattactgctgcattggacaggcaagcttgcccagagaaggagtccacggaggaaatgcttaccacctcaaaagactggaaagcggtttctaatgactcctctgcggcttccacataaggcatagaggatgggcagctcaccaagatgtcttcctcgcctgatacgatgaccagacgcccttccactacgaatttcagcttttggtggagtgtagagggaacaacccccactgagtggatccacggatgccccaacagacagctgtagggggggttaatatccattatttggaaggaacttgac

SEQ ID NO: 13336 - DNA, 560 bp, Glycine max
cgatatagtagagctgcacgcatgcaatcttttctatggaatgggaaataaaacctattttgtttcttaattacaagctctctcgcaacagactttcataactcaaaagaacctttgcactcttttgttctctaacacattaatgacacactttaggcctcgtatactgatcatctaacaatatgcgaaaaaagaaaaattagttatcgcccaagcaaaattagtttctgcgtggacaaaacgagtttttgcacgaataaaaaaactagtattatttgtcaactacatcgtgcaaaataagatggtgcgccacttgtactcaataatttgcaagaccacagacttctagtttccatcaaactagatgcttcgtcaacaccactgactctacatttagcacacactactcgtaagatttcggtgtttcttgtgcccatattcgaaaacagtaaactgagatgactcttgtaattatatggacggaaaatgatatccagtactaaataatattatacgaaacactacgaatcttatgtgccgccagcactactatatatgga

SEQ ID NO: 13337 - DNA, 484 bp, Glycine max
  unsure (1)..(484): unsure at all n locations
ttcactctaaagtctcatgacatgagaagagtatattaccttgtaccttttattattgactttacttttggcattaactattaaattcattcattcaacctgcatttagtaacttccttgtggatggagccattcttttccaactcattttaccatgtatgaatgaacagtatggaaaggattatgaatatgaagctccagtcaagcttttggataaactgctgcattcgatgccacaatcaccggatgaacaacttgttgtggtctctcaggtatgctttctctcgggctttctttctgttgtttctcctaaggaccttatgatgtctgattaactttttgacacattaaaggtgctggtggctgatatcaacattggatatgaagatattgntaacacccaaggtggtaatgggtatgttccatcttttttgcttttccttgctgacagctatattggcttaactgctcaagtttttactgg

SEQ ID NO: 13338 - DNA, 504 bp, Glycine max
agcttaccttgaacccaacaccgactatgtctgcgagactggcagtgaaacgtacctcaggtcaccacgagttccccaatccttgcagcagaaaccataaaaggtccttgggttaaccacgagttcccaaaacagacctaggtattcaatagaacaacacaagtacacgaaacgtaccttataagcaagatgtgacagtcttcatcgcaatggagaacaacaaccttagatgttgacagagaaaaagagagcgtgagagagtacacggagaagaaaagtgcgcgacaggatacacggagatgaagagagcgtgagcaaaataggtcgcgtctaataaaatttaaaatttaagttcaacatcgattttcaatataaaaaaaaaccgatgttaacaaattgatgataacgttaacatcggttttattcaacaaaccgatgttgactgatcataccttaacatcggttttctgaaaactgatgttaacgaagtgaagttaacattgg

SEQ ID NO: 13339 - DNA, 787 bp, Glycine max
ggatgaacctgtattcggacctttaaactccgcttcttagaccaggtgatgtgcaccatgtggtcactagcttttgtactttttgtggtgactccagctttagttgctgcggctagttgtctgacctttaatgccattggggcacgaataatccagggcgtgcaataactaagagtgccctctgtctctcacacgtggtgacatttattagattaacctccaactcacaaatgcggtcattacaacatcgttttcgtatcttcacttacaccatacgttagggtgaaaatgtacaaaagaaattctgggtatcgcgctgataaaccctatcttttcaatggatggtatgatacctgcaatatcttctattacatgctgcagtcctgtaatatggtacgaatcttacacaaaaactcatgacatgccatatctatctggaatggaccttgatatattgaaaaacttgcagacttttttctttgcttaaatggaggataaataacctgtggaatttttggtccttttcggagcattggcggatgtatgggagaaaatggacacgtctatttcttggttataatttagaagatcctaacctatgggggttaatagaagtttgataggccttatcttatatggagccttgaaaagaaaagctccttttctttccttgggttgtatacactccaatttcaagatgtggggggatggggagattcccttttgatgatttctcccacttctatattggggatagaatcttattggaatcacaccttttagaggg

SEQ ID NO: 13340 - DNA, 380 bp, Glycine max
agcttcttatccaaggctcatcttggtggtgaatatccttcttccatggcttattccctagtggatggcgccttctctcacctcttctgctttgtcttccgctgcatctccatggtggaaaatcaccattaacgaacctcattgaagctcaaagatccagcctccatagaagcaccacaagcaagcttccgtcaacataggtgcatgcatgactagttttgcataaaatatccacatcatcattgttgcgtttgtgttgtggaaataatgtgggacatccccttttatccttgaaccaaaccaaaccctgacatatatcatgtccagccattctacaagccttgagccaaaatcccaacttaccataaacctttccctca

SEQ ID NO: 13341 - DNA, 440 bp, Glycine max
tggaacaaatatttttaattcttggtccccttagagactttgtaaagatgtctgctaattaatcattagaactaacaaattcactaataacattcttaaaaaggactttctcccgaacaaaatgacaatcaatctcaatatgtttagttctctcatggaatactagattagaagctatatgtatggcttcctgattatcacaacatagcttcatttgttgagtatttccaaacctcaattcttgaagatgtttaatccaaatgagctcacatgtggctacaaccatagctctatattcagcctctgcactagaccttgcaacaacattttgcttcttactcttccgtgagacaagatttccttccaaagacacacaatatcctgaagtggaacgcctatcaatgggtgatcctgccccatctgcatcacaaatccaacta

SEQ ID NO: 13342 - DNA, 287 bp, Glycine max
agcttgtctaagcaaaattgccttttttctattttcacatgcatgagaagtccgacgcatcaacaatgataaatcccaagctattgtgctcgcgatcgatttggagaaacacaccactatgattatgatgatggatggctcaatatctcacaacggtatactcattattttcaaagtgggctctgaacaatctcacggcctgtactacgttattacacgatttcactcacgatacgtccaaactattgttggcaaaacatttacccattctagaacgtaaccaatga

SEQ ID NO: 13343 - DNA, 215 bp, Glycine max
gcgacactatatactactcacgcttgttcttatgggtggcctgcggacttctgtcccctttctctcctcaagactttagccagccccctaccgtcgacgggctgcttcccatgctatatgatgactcatgccaggctatacgcttactgaacgcgactccccagtacgtccgatggtgcagctgcaggatatgcccccccgtgaaatatccccaa

SEQ ID NO: 13344 - DNA, 431 bp, Glycine max
agcttcgatcttccaccaccaccgtcaccatcattttagagttctattttaatattattagcactttgattttcagccttatattctggctatattattatcggattcgaacaagttactatttccttatttgcatggtgtcataccctaatttcgtccggggattattatttgatgatataaaacctttgattggccgcttcgagacacttggcgtactttgatggcaatgaatgaagacccgagacgtgtcagaaatcaaaaggaagcatgcttgcgcaatccgtgaaattccgtaattggcggaaatcgaaaagaggtgtttttgcacaatccagaagtttctgtaacttcttcgaaagctaagaaagagctaatacataattctgaaagattcgtaaccttgcagaagaaaaataagtatcattacg

SEQ ID NO: 13345 - DNA, 603 bp, Glycine max
ttgcttttgtcgaccacctcaagagatcggtaatggtctaactccttaacgtttctctcctttaaaaaatcaagagatcgttaatggtccaacgccttaacgtttcgctcctttctaaaaccaagaaatcgttaatggtccaacgctttaacgtttctctcctttcaaaaccaagagatcgatcctttcaaaaccaagagatcgctaatggtgcaacgccctaacattttttttctttccaaaaatcaaaagatcgtctaatggtgcaacccctttgacgacttttgttcttgtaaaatcgatcttgcggaaaaagatcaaaacaacttaaccaacatttagttctaaaagaactacgtatgtctgatttcctcatcgcaattgaggatacatatgagtgagggaaacaccccttgcaaccactacatgatttgaagatacgtaagaacataaaaagcgtaataacacaataagacattaaaaagggagaataaaacttgttgaagtcatatttgcacacttgattgaaagttgtcgtccccttgtgaccgatgcgtggggagctaataccttccccatgcataaaaacaactcttgaacctt

SEQ ID NO: 13346 - DNA, 298 bp, Glycine max
agcttatgaccatacgaactcctttttagtttccgttggtcaatttccagcgtggagatgaggtatgatcccgaatcggacatccgtgcgaaaagttatgaccactcgattttctcgagagcttccgtagctcaatttccagcgtctcgaaatatcatgaccccgaatcggacatccgggtgaaaacatatgaccacttcgagctatcgagagctcccgttggtcaatgccgagcgtctagaagagttatgcccccgaatagaacattcgagtgaaaacctatgaccattcgaattcc

SEQ ID NO: 13347 - DNA, 362 bp, Glycine max
tctatataagctgaaccattttatcaataaacacaagttgagttttattcagaaaattagagtttatctcttttatcttagtgagagtgattctcctaaattcttgagtgattcaagaacaccctggctgtatcaaaggactttcacaacctttgtgtgttgccctcgctggaaagagtgattctttccttccaatcatctccacccttgttctttcaaaccacaattccagaaaatccacctctgcccagaattatctcgtgaacagaactgccatgttacgcactcaaagttaatgattcttgagcctaaattgaatatcaaaacgagtcctttcacctcattttggaatcccctcattt

SEQ ID NO: 13348 - DNA, 510 bp, Glycine max
agctttgatggtgttgagaagaaatcacatgtttgtcatcatcaaaaagggggagaatgtgaatgtatgtatacatgattttgatgatgccaaagaagaatctaacaaggctgcttcaaatgataagcatttgcttcaaaaataattcaagattgcttcaacaaacaaagccttgtttcaagattcactaaagaccaagccttgccttaaaacaatgtgctttcaagacatgcaaggctctggtaatcgattaccaggaagtgtaatcgattaccagaagacagggttgagaaatagctgttgaaaaaggttttgaatttgaattttcaacatgtaatcgattaccatatgtctgtaatcgattaccagcaacgaaactttggaaattcaaattcaaaagtcataacccttcaaattataactgtgtaatcgattacacaaacattgtaatcgattaccagtggaaagtttcagaaaatctgccaacagtcacatcttttcattagattt

SEQ ID NO: 13349 - DNA, 465 bp, Glycine max
tatgcacggaaaatgtaattatgaaattgagatgccctttgaaacaccatttcctagttaaccatgcattatgtaccatgttcaattattttgtttttaagtgaaacgggtttatgatcccaacatggttggctcgtggtgcctaacatatgcaactaaaaatgcagcgtgaattttcgtacttccctttttttttgattttgttttgtagaggaaaacgcaaggatgagcaaacatgaaaacaaatggtatgcaattttgcagatcaaaaagtttgctgaacgcatatgcatgatgatgccatgactcatgcaaaatgtgaggccgaaatatgataactgacaaatgcaggatatgtccattatgatgttatgaagagatgcttatgcgatgcatgacatgaatgcattttacggacacgagagcaccggaaattatctcttcttactcgcgcatttgggggcg

SEQ ID NO: 13350 - DNA, 550 bp, Glycine max
agcttaggctaaattaggctaaactttggttagctacttgagctgagtctggtcttacatgagggatctgcggatgaaactcagtttaagttagtctaaacctaagaaggttgtctaaatcgggtgtagtcttaaatgagggatctgcagacgaagcttggatattcagccttacgagggatcgagggtttagtaatttaggctacagcatagaacacaagagcgcgattgattagagaaatatatttctatgcatcagcttgtttgttagaaagacccaacatatctacctactgctgtcaatttatttaccttgcattttatagtttttagcatacaagtttagtttaaattctatttgaaatgatcacttatacatgttctctcaacaattctttgattctgaacttaattcaagctaacattagttccctgtgttcgatacacgaattcatccgttttaattttaaatacttgacgacccagtgcccctttccgatgaaaaactccccatttgaattttcctcgagacataaatgcccaaaaaagt

SEQ ID NO: 13351 - DNA, 567 bp, Glycine max
  unsure (1)..(567): unsure at all n locations
tcccgccaatggtatttaaaatttcatggactttattaatttgtttccttgtattatacgtagatgatattttgcttgtggctaatgataagggcatgctatatgaggtaaaataatttctctcaaagaactttgatatgagggatatgggagagacatcttatgtcataggcataaagatccatagagaaagatctcgaggcattttaggcttgcctcaagaaacctatatcaacaaagttttagagagatttaatatgaaagattgttcaccaagtgtagctcccattgtgaagggtgacaaacttgctttgaatcaatgccccaaaaatgattttgagcgggaacacatgaaaaatattctatatgcttcagcagttggaagccttatgtatgctcaggtttgcactacacctgatattgcattcgctgttggagtcttgggaagatatcaaagtaatccacgtattgaccactggaaagctacaaagaaagtgatgagatatcttctaggaacanaggattacatgctcatgtacagacaaacttgatgtctggaagtgattg

SEQ ID NO: 13352 - DNA, 286 bp, Glycine max
agcttgtgggtggaggacgcatgaacaataactctttttatggggctccgagaaaggggggaggatggagaatatgtctacacgatcactacgcatggctacaagactccaacgtggatgacgcatgagcaaaatcttcgttcatggggctactcaaaatggctgaggatggcgaatcgctctatgcagtctctatgcagagcatccccctccttggtggaggacgcttgaacagaaacgcagctcatggggctcctaaccagggttggggatggagaatcgcact

SEQ ID NO: 13353 - DNA, 468 bp, Glycine max
ttgtgtaatcgattacactgatttggtaatcgattaccagtgattgtttctgaataaatcaaaagatgtaactcttcaaatggtttttgactttttcaaattggttttaagtttttttaaaagttataactcttcaaaatggtcctcttgaccagacatggagagtctataaaagcaaggctttgttttgcattttcaatcaatctttctatcaatccaatcaattcattacaatcctttacaagccttgaatctctttgaacttcttcttcttctttgtgccaaaagctttccaaagttttctggttttctaaaccttgaaaacttgtgctattcattcttttcatctcttctccctttgccaaaaagaattcgccaaggactaaccgcctgaattctttttttgtctctcttctcccttttctaaaagaacaaaggactaactgcctgaattcttttgtgtctccc

SEQ ID NO: 13354 - DNA, 589 bp, Glycine max
  unsure (1)..(589): unsure at all n locations
agctngaaggggcaaccacatttcctactccctttgtcttttctaacgaattctttattcctacacttgtacgtaccactcctttcacacccaattaagacaaataaacttcttcctctgctaccggtatctgtgtcagacctcatagcccactgcaccaaatacctacaacgtaaccacaacatattaatttttatacaaaacatcaattcaaccaaatgactcaaactaatcaacatgattacctgagacgtattaaaagcatttgaactatcgacatgtggttcattcacaccacattcttcttcattatcataatcataattcatatgaacttcttgtgatatcgcatagtcatacgttcattgatcttcgtccatcttaaggacatatgcatcaaacacaagtacattcaaattatcatataacgacatccaaaaatttactacatattaactaacaaacatattaacaggacatatgcatcatacaaaagtatattcaaattatcatataaccaccttcccaaaattgactacttattaactaacaaacatattaacaactaatacaaatacctttctaaatt

SEQ ID NO: 13355 - DNA, 746 bp, Glycine max
  unsure (1)..(746): unsure at all n locations
ccctgcgtagcctgttcctttaatgaatcctacatgcttatatatttgttgaatttcaataaaataaagttaaatgttagctaacgattatttgacaatcactgtaagtgaagaagacatgaactcacaattttgtttgcgatttgttgtgccgcttcagaagtcatttggccataacgctttgtgcgggccatcttccacttcaggtgtctcgacactggggatggagggtcgaggttgagtgttgggttttcagtaaactcatcttgctgatctcgacgcttcctcttctcgtccataagtttcttgtcaatatgttcataacccctacgagacaatacgtgggggcaatcattgaatttctaaatgtgctgtgctttcttccgtatacccttaaaaacacaagcttgtagtagncatatatatatatatatatatatatatatatgtatatatatatatatatatatatatatatatgtatatatatatcctctatactaaaaagatagcacatacaaggtgtgaattcattattggatattaggcacactaccaccaaccttgcagtttgggggtttggggggtttttgaaaattgcgccatgttggtaaacaagaacatattttaccgtaagattaaataatttgtcgcctttcttgttggcatagacaaattttaaggtctgtgccgactcttattggccctctttttatttatttgggacgttgaaacaaacctttttt

SEQ ID NO: 13356 - DNA, 272 bp, Glycine max
gattccggactcctctaaatattgaattatcatgaaactgagatgtgtgattccagagtattcttctcacatctacatccgtgggatgagtctaaggatatctaccacgagaaaaatgttggtcacactacaccggagaatggaggctaccattcattctcctctgtctaacgaatggaaaccctatcaatacacctcccggaaaagcttgccgaatctcatgaaccactgacggattctgctatcgctgtcataatacacacgtcagcccc

SEQ ID NO: 13357 - DNA, 203 bp, Glycine max
cccgctgatacgctctgtaataaatttacagacataggttctttcttacgcgacctaagcacagatgcatatttgaccactgttcatgtaccacacaatcgaaaagaggggcaactcccacattgaaggaactcagttaagcaataagtgatacttgatttaaacagcaatagcttgtgaaggcatatacctatgtccatggg

SEQ ID NO: 13358 - DNA, 523 bp, Glycine max
agcttgtagaatggctagacatgatacatgttttggcttggtttggttcaaggataaaagggatgccccacattatttccatgacacaaatgcaaaaaatgatgatttggaaactttatgcaaaactggtcatgcatgcacctatgcggacactcaaatgtcaaatttttatggtcatgtgatgctagggctcaggattcatttcctctattttaatcaacccaatgtttccaaaatatgttcttttatcaatttgtgcattcatccgagtccatttcgggcgtctgggaaaatcttcacagcattcacccttcaggtgtatacacatttttttcaaaaactagttatgatcagtgaatttttccaaagaaaagttggaagtcatctctcttcaaaagcatgttggtttttcagtttgaaaacttatttttcttttttctccttcttcttttttttttaacaatatcatttgtttattgctttttcttggcaggttacctttttccccctttcttttttcatg

SEQ ID NO: 13359 - DNA, 478 bp, Glycine max
tggcaagagacagacgactcatttagcgagctgatctcgcgcttagcacgctgcttcaatttaggtgctcttctggattccttcttcacgctaagcgtgttgaagccgcgcttagcgatggatacgagctaagcccactgagttcgcttagcgcgacagccactttggcatttcaagaaattagctcctttttacctgaaattgtacagattttaacattaattccaataaaagagatcctaatgacaaagatctaaacacagcaaagtttatttacaattcctacaaatgaactataaattggggaaaactatacatattttgcaatggttcgggttcgggtgaagcatcttatctttcccgctgacttcgttgtaatggacattgaggaagatgcagatattcccttaattttgggacgtccatttatgtctattgcaagctgtgtagtggacatggggaagaaaaagttagaaat

SEQ ID NO: 13360 - DNA, 408 bp, Glycine max
agcttgtatcaaattcaaacgacaataatgttttactcggatgtttgattgcgtctcgtaatatatcgagacgctcgaaattgaaaacggatgctcgtagcaaatgcaaaccgcaataacttttaactcggatgtatgattgagtaccataatagatcgagacgctcgaaattgaaaaaagaagttctgagcaaattcaaacgactataactttttactcggatgtctgattgagtcccgtaatatattgaggagctcgaaattgagaacagaagctctgaccataatcaaaccacaataactttatattcggatttgcgattgagtcccgtaatatatgaagacgctccaaattgaaaaacagaagctctgaacaaattcaaacgacaataaccttttactcggatg

SEQ ID NO: 13361 - DNA, 397 bp, Glycine max
ttgagccaattcaaacgacaataactttttactcggatgtctgattcagtcccgtaatatatcgagacgctcgaagttgaatgttgaacctctagtcaaatgcaaacgacaataattttttcttggatgtctttttgagtcccgtaatatatcgagatgctcgaaattgaatgttgaagctctgagcaaattcaaacgacaataactttttactcggatgtctgattgagtgctgtaatatatcgagacgctcgaaattgaatgttgaacctctgagcaaatgcaaacgacaataatttttttctcggatgtctttttgagtccccgaatataacgagacgctcaaaattgaatggtgaatctctgagcccattcaaacgacaataactttttactt

SEQ ID NO: 13362 - DNA, 490 bp, Glycine max
agcttttctttctcaatcaacctgtttattgactaacaattctaattgcaagttcacattcttgttttttctttgtctaacatacatacttgctcaaacttatgaaaagaaacacaaactccatcacaatcatgcattcaatccaaaatcaattcataacaccaattttcacaaaaagataaaaatgtttcactgcataatcatccaagtcaagttaaactgttctgtatgcttcaaaacaagcatactaactattcgaaaaaacacaagtatataattataattataaaccaaaatcaccaaaaaagaacaatgtactaaaacataatagttataataatttccaaaaaaggaaaaatcaggaatttagaattcctgtgactggtcctatgtatcctcctcatctgtcagatggacaacagggggtagcagaaggagtatcaactcatccagatgctgactctgtagagtcttcagagataataataat

SEQ ID NO: 13363 - DNA, 420 bp, Glycine max
tgtgctcaaagagtattgcttatgaagacgctcatgctatgcgtacacatgcatatttgatatgttgtgataggggcaggatcgttttatgaaatagtcgaataccgggccgaatccagagacagagatgaatcgaggtcatcggtgacgcggccacgatatgctgtgccatgtcattttctgctttcaggtacttacggactggcactagtggaggctaggtccatgatcaatggatcgtggttcgacgttcagctccggacaagcgagaagcgctactgggaggcagccttgcattctttaaattcctacttatgaattgttgtggtttatttaaggtgatggtcggatgcctaatttaccctaagggcttcgaggaatcgaacgccgacccatagagaggcgcataccttggctttt

SEQ ID NO: 13364 - DNA, 483 bp, Glycine max
agcttgactaggcgagatgagtttatccttatttttactttaaagattacgcaattcaattaagaacgataaatcccacacagacaacgtgcgagagattatccgctatattttactgaacggcattgattctattattatatcattcattctacctcctattttttatttccaacgtggttactgcacgaccgaccggccggacttcatttgaacagagattaacagatgatacacttcaaatgattggcggaaacttattatatttttagatgaggcgagaaatgacgtacatacatgaccgaagcctgtctaacgggggtatagaacgcgaatgagatcgcctctaaacatacctgaaacacaatgtggaccaccacgggtgcatcgaatgaattgaacagctcggcttgaggtacttacccattgaagactgaagaaaacgacaaaccaacgatgaatcttgttgatccgccgagaatc

SEQ ID NO: 13365 - DNA, 458 bp, Glycine max
tatccttatggcttgcctccggacttcactccccgtgccatccagaagatttaagccaagcccctactttcgaggggcagctcccaccttatgacgactatcccgggcaagacgatgaggaaggagatacccatctcggtcccctgctccacctcaaagatccgtccccccatgaactaccccagaccaaacatagtccgccatatgccggcttcacccacacccgtaaaagaatctgttcccttcgtggaagataagggaaagattgaggcgctcgaagagaggttgagagcagtcgagggcctcggcgattacccatcctcggatctagcagacttatgtctagtacccaatatcgtcattcctcccaaattcagagtaccggactttgataagtacaaagggacgacatgtccgaaagggcatcttcggatgtattgccgaaaaatgggggagta

SEQ ID NO: 13366 - DNA, 537 bp, Glycine max
  unsure (1)..(537): unsure at all n locations
agcttcagatcaaggtaaatcaaattctatgtatccaaaacccatcaatttagtggattttcaaggtttaagaagtgaaaatgagaattggataattttggggtaaactctcatttcaatcaagtctataacattgatttagacttgctcaaactggttttaaggtgaaaaccccagccttcaaaatttggcccctcaacacccaatttaccctagaaatggctcttttctttcacacttgtcattcctttttctcatttgctctacccaagctttcctacaagtcctaattgacattctaaactaggatcaactcactttagactccaatttccactaaccccaaatttggcttttcaaaccctcaaaatctcacacttttccactcatatcactaccattctcacatttaaccctaagttaactctccccatcatctctaccagttttctaccaacaatttcagcatacagatatcacagagcatcatcatanaacccctaaacagaatggggagctttactcacatcaaacatg

SEQ ID NO: 13367 - DNA, 403 bp, Glycine max
tcattagagaggcatcctctataaacttcattaagagtgtctctagcacacgccagatatcttcgtgaaagatcccaacggtcagatcatggacaagtttcttgtgaagttgcagaccaaatttcgagaagatccaacggttaaagaaggctgggaagcgtttttaccgaggcagcttcatgtagctttctctataagcttcattaagaggcttcctccagaagcttcctcgtggcttctttgagaagctagaatcttatctatccacacccctttattaactaaattaactgacttataaatagttgcggatgataaatacgctgcaaatgatcagacatcggacatacatactaatatatctgtatatatatatgtatatggacttgtagatatatctata

SEQ ID NO: 13368 - DNA, 467 bp, Glycine max
agcttttcgattcattctatgcacccatggtggtccacattgtgtttcgtgcatttttattctcgttttgtttactttttataccccctgttgacgtgcttaagccattttacttaagtcatttctcgcttaactcaaaaacaaaatcaatttccaccgaacgtttgaattgtattatccgttaacttcggttaaaatgaattccgaccgttcggtcgtgccgtaaccacgttggaaatcaaaaagaggtaaaaaataatataataatcaaaaaaacatcttttagtaaaataaagcggaaaatcaatcggacgtttttttctctttgggatttctcattcttaatcgaattgattaataactaaagtgaaactaaggctaaaatcaactcgcctagtcaagctcgtccataaaaataggcttttgaagtttgtcatttcattttctcactaagtaaaatggatcat

SEQ ID NO: 13369 - DNA, 385 bp, Glycine max
tgtcgaaattgccatgtttgggtgagttagatatacccattctgttttagggtttttgtgatgatgtttgtgatgtttatatgctgaaattgctgatggaaatctgttatagacgaagggtagaactaacccaaggttagaaagtgagaatgtgatgttattagtgaaaaaaaaaaagtgagacttttagagtttgaaagctaactctgaattctgtggttaatggaggttaaagtgagttaatactagctcgaaatgtcatttagaacatgtgagaaaggttaggctgagctatagagaaaaacaaatgactcatgtgaacaaatagccattgctagggcgaattttggtgttgaagagtcaaattttgatttggtggaaattt

SEQ ID NO: 13370 - DNA, 743 bp, Glycine max
cggctgagtagacctacaaacccgccaatttaaagacaccggaagctgccagagagaaagacttaattttttttatttggggaaagacattgggctagaagcattcagggcttatttcctcctatacttaaatggggtcaagggtgaattactcgaaagggacctctcttgtttcaagcccggcccatagggggctttgatgcatcttttagaatccaaattacgatgaatatgctcaggggaggattgaaggcaaatggaaacgctttgtctaacgaaatctatatcaattaccttgggcggtactgtgaacaggcacaagaacaacctgcatggatgggtaaaagtttgctagatgtaaaccactctacctgcacaaggcaaaactgacggaattcttaacatcccagaaagggctcctaaacgggcccggaggatcgccaggtcgacggaaccaaccaacttatacccggagggaagctgttataccgtgccaaccccttttttatggtgacacttctgctgaacccaccagtccaaagtatgtttccctgacaaattcttcggtaatatagtccccgtatgtttgctaccacactccctatgggcgaaaggacgacatttcctgaaacaaacgtccgcttctggtaaacaccaacataaaattgaacaaaaactcacgtccaacaactccactagtgcagaactgtggtggatactacatacctctcccgaatctttcg

SEQ ID NO: 13371 - DNA, 308 bp, Glycine max
gacactatataaactcaactttataggctcgagctcggactgaggtgaatactttatatttgatcttggctcattacctgacataggatctctttattttataaggctcaggatggctcatataaaaaaccggcttataccacgaacctatttaaaagtctgcttacagacgtatttgattaatcaatatatttcaaaacctagtgaaatactgactgaaaaaacaaacttacttaattctctataagaaaacgacagatgcaaaaaacattgatgaactaaatgatattgaatacaaatcggtaaag

SEQ ID NO: 13372 - DNA, 733 bp, Glycine max
  unsure (1)..(733): unsure at all n locations
ntgatgtgtcgtcgntccgaggaccctgtggagtcgaccagcaggcctgcaagcttgcatcggacatcggtgtgggggttctgtctatgtggatctctgagagcgtccgctgatgagttccnagcgttttgacctattacgcacgcgcgcataggacataccttgcgacaagtgaccgactataagtgagctcccagagtctcccatggcccatatcctgcgtattgttatatccaggggcccgaatcggacatccgggtgacacttcatgaccgttagacttcctctagagcgcacaggcgttcatagccagcttctcaatatgtgagcagactgacttgctcatcacagcgaccagaaataccgcttgtatctcttaagaacatcgtagactatcttgagccaattattaacgagtggatgaatccgaaattctgtgaaaggcatgacgcttagacctcctttgggaccgcgggattactttcaaacctccaaattatttggactaatttgtcaccgcgagaaaaccaggactttttgtcttggggagattcgctgtcaatttaccgtacaattttgataaggcggaattgggaacacgtgaaagttttacaatcttggccaataataactccatggccaatttgggtttttcttgtttaaccgactgaatcttaagccccggaaacaaatgctggtggcacaccccccccttcgggggtttatagggggg

SEQ ID NO: 13373 - DNA, 435 bp, Glycine max
ttagagttttggatgacaccacttctagagagggaatattctttatggtagacgcgacaaggattaccttgataagtctgagattggttcaacaaggaacccagagagaagctctcacaaaattttatcaaatgccgaaagttcctctattgaaaatgaaaaccaatacatataagtgtgtctgaacaaaaagatataaataaacatgggccttctaaacaggttgggccaacattacaacttaaagattataaataagaaagaacatatttggcatgggccttctaattattttgggcattcagcaacaattaatagtcttggtaatgcctctgcctctgggccttcattcttctccacttgagccttgataaatatgcccggtaccatttgttggacggtatccactaactgttagggcctactcctggtcat

SEQ ID NO: 13374 - DNA, 355 bp, Glycine max
gaaaaaaacgatataacggcggggggggcgctgtcaaaaattaaaaaacaaacaccccatgttaatacctatacaaaaaaatctaaaatataacgcactcagttagatgtgaagcacacacaaccctttaacaatacattcttacaatatgtttgaatggacgattttagagagaagtatcacaaatgataaagggacactaagcgtgtgtttatattatcttattgcgttgaaaacaacttataatcaaaaccaacaatggaataaaataaaaaatggtgtatatcagatatgatccctaaaatcgaatcgatctaacatctatgaacaacagagagggaaattcacatataaa

SEQ ID NO: 13375 - DNA, 562 bp, Glycine max
ttagctagtgtaataaagataccaattatcgatacaaaaactccatatggttgatttatttaaaaaaaaaaaagtcaaaaacaacatgtatggaatagagatatttgaaccaccaaagtaaagaactgttacaaataaggaagaaatgaataggtttaaataggaagcaacataaaataaaccaaatttgagtggtttaaccctatatgctacactcgtttgctacctactattattggttacctgtgatgacagttaattcaaaatgtaatttataatattaatatcttatttttgatttttttaatttgtggttggttgaatactttggtgcatttgtcaagtgattacgattctttgtgttaaaaggtattatcgatcaacttctttatttctaactacaaagttttacatggactgtttatagaaatattttgttatgtattacatttaaaacatattggataagagtgttctcgttagtgacaatttgtcattaattgagtgttaatacatgtcataactatcgataggagtagttgttcttttgcattgcataact

SEQ ID NO: 13376 - DNA, 446 bp, Glycine max
agctttctagcttttcattggggtatttttatcttcttttggtgctctaaaatgtgggaatgtgctcaaatatgtggggcaattttggtttgtcttcttgcttgattgggttggattgggggtttgtatgggatggccctacgcctataatgcattttgaagcaatggggcatgccacattgtccccgttctcttgctattgatgcctaaacgcgcgcccaccaagtgttcggtgaaatgcctcattggcattagcgtgtgacttttgtaaggaaacaacccatggggcattttggtttgtacatattttctattttttgggacatgttttcattcccgaaaaaggctagaataattgcctcacatatatactacgcctatgaaccaaagtttttatgcaaaaaaacacaagacgaggtgcatgtggggtaaagtacccttttttg

SEQ ID NO: 13377 - DNA, 382 bp, Glycine max
ttgatgcaacatatggagaggttaatgaaacaacgagatgatgcgctccatgagaggttggatcaaatggagaatagagatcataatgaagaagaaaggaggagaagagggaatgatggtgttcctagacaaaaccgaattgatggtattaaactcaacattcctccatttaaaggaaagaatgatccggaggcctacttggagtgggagatgaaaatagagcatgttttctcatgccacaactatgaggaggaccagaaggtgaagcttgccgccacggagttttccgactatgctcttgtgtggtggaacaagctacaaaaggagagagcaagaaatgaagagcccatggttgatacatggacggagatgaaaaagatca

SEQ ID NO: 13378 - DNA, 600 bp, Glycine max
agcttcatattacatgatatagtcttgagtttattttctaacctataaacttgacatactaatatcatcatattcaaacatattttgacccctaagaaaattcttacctcaagaaagaattattaatctcatcctcttcataggttagacactgatagaatttaaaaaatattgtacacttgtttgatctaatttgaggtaactttgaataaatttagttttgtaaccatttcaatgtattagttgaatcaattcaccaatggaaaaggtcccttgagtcttttactgtatattaacagttattactatagtgtaacatatagtaataactggtaaacttgggtatgattccttgacactttctaaactttaaacttgggtatgaatttggaacatattacaagctaattaataagatgaatgaagaagacttctttttgtattgaagaaacattacatatatgatcattattttaccatagcccattggagattaattcccagagaatacattactagacacctcctttttaatggggatggcttgttctctcctagggaaaatatacagaaaatggtaaaaaaaaggggctattggtg

SEQ ID NO: 13379 - DNA, 499 bp, Glycine max
  unsure (1)..(499): unsure at all n locations
tcttagtttcagatgatgcagatgggtttgtagctacctcatgcactcctctaatgactatggcatcatttctggcgctaaactgctgggagttggaagccatcttctcaattaaatttctggcttcagcaggagtcatgtctccaagggctccaccactggcagcatctatcatacttctctccatattactgagtccttcataaaaatattggagaagaagctgttctgaaatctgatggtgggggcaactggcacatagtttcttaaatctctcccagtactcatacaggctctctccactgagttgtctaatacctgagatatccttcctgatggctgtggtcctggaagcacggaaatttttttctaagaatactctnttaaggtcatcccagctcgtgatggaccttggagcaaggtaatacagncagtcctttgccactccctctaatgaatgaggaaaagccttcagaaatatgtgatcctcttggacatc

SEQ ID NO: 13380 - DNA, 522 bp, Glycine max
agcttcgcacttgataagggagaacacatgaacagcgctaggcaatgacattcatggtgctctgaacaaatgtggagtatggaggattgccttgatggtcctcacttaagcaatcatgaagttgagctccaaactcgaaagtggaggacacatgaacagccctaaacaagacattcatgtggctctggaaaaggacgagaatggaggattaccttgaggttcctctcttaggaaatcatggaatacagctccaatactcgaaaatggagaacacatgaacagccctaagcaataacattcatgtggcttcggaaaaggacgcgaatggaggattgccttgaggttcctctcttatgcaatcatggaatacagctccagactcgaaaatggaggacacgtgaatgacaacgcaattcactcacgcggcttccggaaaaagatgaataatggaggattgccttgacgggcccctcttatgcaatcatggaacacaactccaaaactcaaaatggaggacacgtg

SEQ ID NO: 13381 - DNA, 500 bp, Glycine max
atactaagcttttcctaccattaaactgcagccagggccaatataagaatttcagtgctgcgaagcacaagaaatgctacagaaacatgagaaactcagccatataagtaaaagctaacattggggactcaatgtttcatacatgggcaactcgtcaatacagaattcatccaccaagatttatggttttaatacctatagtaacaatataaaacaacttctattctattatagactaacaggcgacatcaggggcattgacaaatattaatatatgtaaacttacgctaacagaattctcatgccccagccagatatacatcagaagtgataggccatacctcatgctagtatttcaatattgccaactatgcttaaaactataaaccaatgatacagatcgtccacacaagattgtcatccgacaacatagagtttgaactaataaatgaatgcacaatagggtgggatgaaattagcttttcgattctacgcaaaag

SEQ ID NO: 13382 - DNA, 520 bp, Glycine max
agctttaagtgcgattcctttccttttcttgttattttcctcatgttgatttagcctcatgagttccatttcgtgttcctgaagctttccaaaaaaagttgcaagagacatgttagtaagatctcttgattctgtaatagtcgttacctttggttgtcattccctgcttaaacatcttagaactttgttaataagatcttcattgggaaatatctttcctaatgatgcaagatgatttacaatatgtgttaatctcttttgcatatcctgcatagttttattttgattcattctaaataattcatattcttgggttagggtatttattctaaacccttttgcatatgttgttccttcatgggttacttgtaaggtatcccacatttcttttgcattcttgcagttggatactctaaaataatcattcatgcctaatgcagatgtaattatatttttggcttttaaattatattggaccatttcctttcttcttcattccattggttcctaaggttttcta

SEQ ID NO: 13383 - DNA, 401 bp, Glycine max
tgcctgtccgatgcagcagtaatgatggcccgagttatgttgtggaacggttacgaacccggaatgggtttaggcaaagacaacggcgacataactagcctgataaatgccaaaggaaatcgtgggaagtatggtttaggctataagcccactcatgcggatatgaagagaagcatcgcgggaaggaagagcggtggtcaaagctcgcgttggagacaagaaagtggaggaagcccgccctgccacataagcagaagctttataagcacgggtctcggagacgaaggtcaagtggtcgcgatatacgaagatgatgttccgagtacattacatttggtacgactatgccctcctgatttccagctgggaaattgtcgagtggaggaacgccctgtcattta

SEQ ID NO: 13384 - DNA, 325 bp, Glycine max
agcgagatggacaacctggctttaaccaatcttcatgcaaagatagctgctcttgctgggaaaaggaattttcataactccccaaacactccatgactattatcctcagaagctactccttacataaaaaggtatgccctcattgacgtgactgaccattacgttgtactctccgattacaacaatctactgaatgtggatgaatatcaatctttgcaggatcgacgaaaaatgtgatacctgtctcactctcaaccacacatagaggccgtctccatcgaaaatactatgcccatgaaggagccattattctatacatgcgcta

SEQ ID NO: 13385 - DNA, 505 bp, Glycine max
ttatacaactgaaacatggtagaaaaatagtgttttctcatgcatcgacgttttctaaaaccttatcacccttatagacaattgaaaaaacttttaatggaagtcaagagcacgaaattgcactgataccgttgattggtgagcaggttttccagcgagttgaacacctgaatactatatttggaaagacccaaaagaaggataaaagtaagatttgcatatggaagaagaggtccattttctttgatcttccgtattggtctgatctagatgttagacgttgtatcgatgttatgcatgtggagaaaaatttatgtgacagtgtcattgggacgcttcttaacattcaaggcaagatgaaagatggtctgaatacctgtcaagatctagttgacatgggcatatgatcgcagttgcatccaacgtctgatgggaaaaaaatatacttgcctccagcttgtcatactttgtctaaaaaggagaagataagtttttgttagtgtct

SEQ ID NO: 13386 - DNA, 551 bp, Glycine max
  unsure (1)..(551): unsure at all n locations
agcttcaccagatttggatgctgcaaagcatatatcattccaatttcattgacaaattcacggttcccttgtttcgatttggaggagagctgcttaacagcaatcacatgaccatctgacaacacaccctgtgattaaaccatggcatcggcattatgtttttataaaagtattgtgggataagtggcataccccgatgctttgaaatcatattcggattatatctgatgattaagtttgtttaccttgtatacaggcccaaatcctccttcacctatcttatttgcagggtctaagttattagtagctgctttaatttgtcttaagctgaaataacccgttttcaattctagaagttctgcagcagggaagatttgtaaataaaatcactattctattataaaatcaacaaataagaggggtggggggaggaganaggagacacacccagagaaaatattgagaaagcaacaaatatttgcaacgaccacgaacctaaatccacatttttttttaaatttgtcatcattttggaacttcaaagtaaaatt

SEQ ID NO: 13387 - DNA, 386 bp, Glycine max
cgacactatataatactcctgctttgggttcgatggcggagcattggcattgtccacgtactgttcacatttataggatttacttacatgggcgcagcaatcactttgcataatgagccaggaatacccggatctaaggatattcctggccatagcatgcccattggcatgtgccccacatgaacccctcgtggacgacctcaatcatgtagagccccttttttgcgtgtactcatcatagaacgggcatgttgaggcttcatttgcgcaggagggcaccactcgcaaatagaccactcgccaatctccttcacggtctttgggcagtggcggaaattactggaggatatactttggtctgcacatactgtgggatgtccaaagac

SEQ ID NO: 13388 - DNA, 518 bp, Glycine max
agctttatataagtctggaaaagggaaattttatccttgcaatgcagagctctatgactagttaatattgaaaaaggtcccatctcatacatgttaccaggatagtaaatagatttaacggtgtcttgacagtagtcttggtcccatctcatacaagcctagaagcttgaaatgtgctactaataactaataagtattggcagaagatgagagtgctgggtttgactgcagatgactggggaaaaaatggactgcaattgtcatgtgaagacaggagagggaggaatgcttgaacagagcccacatccgcagtctgttttagcctacagcttgttagttgttacccctcctgtctttgacacttgacaatgacctttaatttttagcttcagcttgccttagtaaaatccagcgtgcgcttttgattgcttacacattggctggtagtgtttaaaaaataaaaacactttatttttgttgcaatgtcaccagtgcaagttttttgttaaatgcttttg

SEQ ID NO: 13389 - DNA, 369 bp, Glycine max
aggcgacactatatactcctccagcttaggggctgaagaagcctatgtgacagcaccaacgctctgctttcggccccgactctctcttccttgtgggagactatactgctgtgagctggaagccatctattcaacgaaattagtggcagccgctcgagtcatgctctcaaaggctccaccactggcaatatcaatcctaactctctgcataatacagaaaacttcatactaatattggagaagaaactgctctgaactcagacggtgggggcccctgggacatagcacataaatctctgacggtacataaacacggtctaaccacggagaggtctaacacctgacatatcactcctgatgggtggggtc

SEQ ID NO: 13390 - DNA, 554 bp, Glycine max
agcttctcataaactagatacttaagtcaagagtggatcccgtcatgcagtatgtagtaaattccaattaacactaggtggatttattaaacatcatcatacattctgtttaaaagccacctaagtactttcttccagaagttgagtcttcaaagttggcaatcctactgggacaaaaaagacaaaacgatgcctcaaaaggacatatctattaatttccacctcctcctaacatatgaagaggggaaggaggaataatgaaaatgcacaagctagttattcatgatcaagtgtgccttggcatacattatgtagcttgaaccaacacttctaacattactggtcactaaattgcaactaaacataattctagaccttcatgattctaagagtcacatattgagaatacttaatttcatgtaaagattattttactctccagatagttttacgttttcacatgaagtgtgcataccttctcattggttggaccaaattgattttctgacttctcttggacaggcctaaactattaggtcactaacatcacgttc

SEQ ID NO: 13391 - DNA, 582 bp, Glycine max
  unsure (1)..(582): unsure at all n locations
tgttcgtacatcgttcgcgtgtatgatatccacttgacaaggtttgaagtagaggagaccttcaatcctataacgcaacgtggcggacaaaaatgggcagttaacttgaatggccattattgtcaatgcggaaggtattctgcgcttcactatccatgttcacacattattgcagcttgtggttacgtgagcatgaactactaccaatatatagatgttgtttacaccaatgagcacatcttaaaagcatactccgcacagtggtggcctcttgggaatgaagcggcaattcctccttctgatgaggcatggacactaatccctgacccaactacaattcgtgcgaaaggtcggccaaaatcaacaaggataaggaatgagatggattgtgtcgaaccatctgaccaccgacaaaaatgtagtagatgtggagctgaagggcacaataggcgccgatgtccaatgcaatctgaccgtgggagtaatntatttaattgatttatgtatgttacatgcctgacttgtattgctttaggttttgttcaatgtaattacttcgttggtcttcaataaaatcgtcag

SEQ ID NO: 13392 - DNA, 1013 bp, Glycine max
  unsure (1)..(1013): unsure at all n locations
ctatactccttttagacacactcgtcacntacaccatcctctaactgctatggctgtacatcacaatcctacatcactcanccaccagaaccagggcncatgatgatgcacttcgttgncccccggcaggcattcataataagacctgacatgcatgcacagcatatcaatcaagaccatcaaccactcaccctttctcatttggtgtatttgatacctacactgcacgaaaggaacaccgcacaggggacgcctctcatcaagcttcgaatcacccgctaagcagagacacaaacagtaattgctcccaatgaatgatcatgtgtgatcgacatgaaccctccttagatatactcggggagtacacacgtcttactctatgaggaggagaactacagcaccacgcctttagaacgatattttagaaaacaatttgagatatcaagcaacctctcaaatggagaaaaaaaagacatgtcgcctactcgaatgacgacaaaatggtagtagccaccactgcaggtagaagtttcgaataacacgaacagctgcactatgaattaatctctcgatactgatacgcaacacatccatgagttctgtgcaaccacaacaccacaacacatggcgcaaatgaaggaccaacaggacttacgtggaaggtgtctcacgtatgctttaagcccaagaactttccaaaaataacaagggccaacccgcccaaaccaacatgctatattcccctcagagtcccacttaaaagagggcctcccaccccactgtatatacactggaacggaggaatcccaactagttcaccctccccacatccctcgaaggccatgcagggctcttgtcaaatgagctcccaggagaaacaaagactcccctatagatacaacggaatttcgtggggatcccccgagaaaaactcaacccatggaggcattcaataccccaaccagaaaaggtcctgtaaacaatacaaaaggcgtgacgagagccaaccccac

SEQ ID NO: 13393 - DNA, 317 bp, Glycine max
tttaatcccagatttgaagtgttattctaaacatatgtttctccaccaatggatagaggtctcttatgaatggagaaagggtcttcattttgaagaatctctctatgaatcatctttagaatgatgcattccactaaggaatcactgtttagttcataacacaattagactccccttcttgtatcattttggtcacttcaaaatttatgaaagattttttttttatctcccatatgttcaaaaggcttacatcttggatgttggttttcacatacctcttggacatttgttcaattatagcgtatgggatactaaat

SEQ ID NO: 13394 - DNA, 490 bp, Glycine max
cagcttaagagcatactaatcatatatttttttatagaagtggaactcttattttatattggttcactgaaacagatctacattcagttctcattcacaaattagtgaagggttccaataatcaaaccttgattacaaataagtattttgccttaccactcctagctaatacaatattctctaggccactactagaacacccttagaattcctctaaatctaagacactcaaatattatttaacactaagtcattcttgattttcacaaattaataatgtttgaatgaatacacatattcaaatcactcaatataggggataaacacttaatctcgtatacaaataaataactttgttacacaaaggatgaactagttaagcattatttttgtcttggtcattaacttgactaattctcactttagaatgctccttgttttcactttgaatttttgtttcttgtgggagtagagccttggtcaattttta

SEQ ID NO: 13395 - DNA, 555 bp, Glycine max
ttgcttctacagataggcctatgggtgttttgaatgcagtcctgtaggcccataatgcatcatccaacttacttgactagtcttttcacgaggaagccacagttttctccaagattttctttagttccctgttggaaactttagcttggccatttttttgtgggtggtaaggtgaggctactatgtgcgtgacatgatagttacctaacaccttctgcagttggctgttacaaaaatgagagccccacatcacttattaagactctaggcactccaaagcgagcaaaaatattcttcttcaaaaacttcaccataattttagcatcactcttcggagttgccactgcttcaacccacttagagacgcaatccatagctacgagaatatattcatttcccaaagatggaggaagaggacctatgaaatcaatcccccaacaatcaaagattcccacttccattatgttttgcaagggaatttcatttctcctagagattcctcccatcctttgacattgatcacaatgaatggcatgttcatgaacatctttgaaa

SEQ ID NO: 13396 - DNA, 849 bp, Glycine max
  unsure (1)..(849): unsure at all n locations
ccaccctataactctgtcatctgattcatgnatacacttccatgcctcttataatcgcccgacaatctgctcactantttcacaagcacagaggctgaattttgaccccccagagcccggaccacagataacccgcgctgcaccctctataggacagggattggatattttatccccgcacgggcaagctcctatgacctggtagaattcgaacaacgccccttacaatacacgctatccggcgaagagcaaagaccaacggtgtcctgactctacgctttgtcccaccttatacaaaccctaaaacctggaatgtgcatacaacaaccaaaaacgattgggagaacatgagaatgctggcgccaactgccaaaccactggggaaaaaaaggaccgcagttgtccatgtgataccggagcagggggagtgcttccacactcccccctccgcgatctgtctcctctactactcgcgatgagtaacccctccggcgtttacctcacacatgacacttattttttagccgaaatatgcgaactcaaaaccacggcgccgtctgaaggatacacaatggccgggagggtataaaaaaacaaaacacctacatttggccgcgtggcaccgataccagatttattctccaagccttgaccgacacggatttaaagctggatgcactaaaaatgggggagacccacactgagcgggctctggaggccactaaatagaagcacaccctactcttcccacaacaggacaacgggttgcgaaccctcctattaacatgggtctgcaaacctctggaactccttgtgacatacatcatcgctagcagatcccaacctccg

SEQ ID NO: 13397 - DNA, 588 bp, Glycine max
tgtaaattattgatttaaacattatttagtttattttttcttttaaacataatatacatttatgtaaagtttactttcaccatttagtttgtcaaattatatcaaattcaagttagacaacattattttcaatatttgactcattgtattaagttgaatatgacaattctattattatttgtatctaaagataattattataaaattcaataaatttacattacattccctaaaaaaattataatacataatattttataacattttataatttgatgacaataataatgataaaatgcattaggctagttaactcaactgaaaccttttcaatgaaatttatgtctttaaaatataatatcatattaaatatgaataattctactctcatgtaagtatgatataatatggacttaactcataaaattgtgacttttacattactcaagccttattaaaattttcttgtccaatttgttatattttgttgttggcattgagtcaactcaacttgaacttgataatatatttgtccctctagataattataacattattgtataacattagtgtataacatatattttt

SEQ ID NO: 13398 - DNA, 439 bp, Glycine max
agcttcaacatcagaccactttcaggtgctggaactacttcacatggacttgatggggcccatgcaagttgaaagccttggaggaaagaggtatgcctatgttgttgtggatgatttctccagatttacctgggtcaactttttcagagagaaatcagacacctttgaagtattcaaagagttgagtctaagacttcaaagagaaaaagactgtgtcatcaagagaattaggagtgaccatggcagagagtttgaaaacagcaagtttactgaattctgcacatctgaaggcatcactcatgagttctttgcagccattacaccacaacaaaatggcatagttgaaaggaaaaacaggactttgcaggaagctgctagggtcatgcttcatgccaaagaacttccctattatctctgggctgaagccatgaacacaaca

SEQ ID NO: 13399 - DNA, 508 bp, Glycine max
tctaggatgcctattctagatacaaccaaatcaggatgcacactccaaacgaggagaaaacaacatttatcactaaatatgccaacttttgctatagggtcatgcccatcagcctccaaattgcaggcgctacatactagagattgatggatcgaattttcaaacaacagaccggagtctatgttgaccacatggtcgctaaatcttagagcattgcccaacatgtggtagacctggaagaggtgttcggagagctctacaaatatgatatgcgcctcaacccaaaaaaatgtactttcgaggtctgtgaaagaaaattcttgggctttatgatcatgcatcggggaatagaagccaaccccgacaaatgcactgctattttggagatgtgtagtcttactaacgtccaggaaatccaaaagctgaatggaagactaccatccctgtccaggtttcttccaaagcttgctgaaaagtgaagtcgttctacgaattgctcaagaaaaat

SEQ ID NO: 13400 - DNA, 245 bp, Glycine max
  unsure (1)..(245): unsure at all n locations
tatgtgaagattctcgaccgttcttcaagattcatcgttcgttcttcgttttcttcagtcttcaacgggtaactacctcaaaccaagcttttcaattcattctatgtacccgtggtggtccacattntggttcgtgtatttttattctcgttttcatttgatttttatacccccttttgacgtgcttaagccatttatttaagtcatttctcgcttaatctaaaaataaaataaattttcatcga

SEQ ID NO: 13401 - DNA, 367 bp, Glycine max
  unsure (1)..(367): unsure at all n locations
actcctttaatgacaatagcatcatttcttgcactgaattgttgggagttggaagccatcttatcaatcagattcctagcctcaacaggagtcatatcaccaagagctccaccattggcagcatcaatcatactcctcttcatgttgctaagtccctcatagaaatattgcagaaggagttgctcagaaatctggtggtgaggacagcttgcacacaatttcttgaatctttcccagtactcatacaagctctctccactaagttatctgatgcctgaaatgtcttttctgatggtagtggtcctagatgcanggaagaatttctccaagaacaccctcttaagtcatcccanctggtaatggacct

SEQ ID NO: 13402 - DNA, 397 bp, Glycine max
aacactgcttgaagatttattcactttcttgaagaaaaatcgctgatcatagctagtttttgaaaaaaaaatgtgtgtacacccgaaaggtaaacgctgtgaaatttccccggacgcccaaaatggactcggatgaatgcacaaattgacaaaagaacatattttggaaacgttgggttgactaaaatagaggaaatgaatcctgagccctagcatcacatgaccataaaaatttgacatttgagtgtccgcataggtgcatgcataaccagttttgcataaaatttccaaatcatcatttttgcatttgtgtcatggaaataatgtggggcatccctttttatccttgaaccaaaccaaaccctgacatgtatcatgtctagccattctacaagcc

SEQ ID NO: 13403 - DNA, 362 bp, Glycine max
  unsure (1)..(362): unsure at all n locations
attctcatttcattcactatntatacccccttttgacgtgcttaagccattttatttaagtcatttatcgcttaacctagaaataaaataaatttccaccggtcgtttgaattctattatccgttaactctggttgaaatgaattccgaccgatcggtcgtgccgcaaccacgttggaaaccaaaaaaagaggtaaataataatataataataaaaaataaaaaaatacctctctagtaaaataaagcgaagaatcaattggacgttttctctctgggatttctcattcttaatcgaattgactaatatagcgaaataaagcgaagaatcaactcacctagtcaagctcgtccacaaaaata

SEQ ID NO: 13404 - DNA, 403 bp, Glycine max
ctttctcaatcaacctgtctattgtctaacaattctaattgcaagttcacattcttgttttttctttgtctaacatacatacttgctcaaacttatgaaaagaaacacaaactccatcacaatcatgcattcaatccaaaatcaattcataacaccaattttcacaaaaagataaaaatgtttcactgcataatcatccaagtcaagttaaactgttctgtatgcttcaaaacaagcatactaactattcgaaaaaacacaagtatataattataattataaaccaaaatcaccaaaaaagaacaatgtactaaaacataatagttataataatttccaaaaaaggaaaaatcaggaatttagaattcctgtgactggtcctatgtatcctcctcatctgtca

SEQ ID NO: 13405 - DNA, 355 bp, Glycine max
  unsure (1)..(355): unsure at all n locations
attattgcatatgaaaacgctcatgcatatgcatacacatgcatatttgttatcttgtgataggggcaggatcgttttaggaaatagtcaaataccgagccgaatccaaagacagagatgaatcgaggtaagcggtaacgcggccacgatttgctgcgccatgtcatttcctgctttcaggtacttanggacgggcacgagtggaggctaggcccatgatcaatggatcgtcgtcccacgtccagctccggacaagcgagaagcgctactgggaggcagccttgtatcctttaaattcctacttattaattgttgttgtttctttaaggtgatggtcggatgcctaatttaccct

SEQ ID NO: 13406 - DNA, 366 bp, Glycine max
attagtctattcattcaaggaaacttccaaagaaaaacgtccaattaattttattcaaagatgtgacatcctaaaatttctacccggaattttgtaagtgttacatctaaataattatatatatatatatatatatatatatatatatatatatataaattattcagtgtatatatgtatattcttggtagaagtatgtacattgggggagaaatacgcgggttagactaattagcgaagagtaatccataactagatagttatagattaattctcaattaattagtctaaaaattatcgttttgcgtgtgacttaaaatttaacaaaaccaacctctgaaccacgcttatggtctcattctgagc

SEQ ID NO: 13407 - DNA, 424 bp, Glycine max
catgatgactcaagaatgattcagagatgttttgatgttttcaaaggtgatgacaaacagctcagaggtcaatcaaagaatgagtgtaagaaagatcgattcttgaaagaatgagttcaagatgttcgagatataatcaagaacactttacgattgaggatctatctcccaagaatcatgatcgagattcaacactcaagattcatgatttgagagaagacttattcaagataagtatgaaaaggctttttcaaaaactgagtcgcacatggatttttctcacaacatgtttagcacagagtttttactctctggtgatcgattaccagattggtgttatcgattaccagtagcaaaatgaatttgaaaaagatttcaaatgaatttacaacgttccaattgatttcaaaaaagctgtaatcga

SEQ ID NO: 13408 - DNA, 420 bp, Glycine max
tgcaagcttataagaaacaaaatgccttaatcatttccaaatatgcatgtgaattattatcgcatcaacaagaatcaagccaaggctattgtgcaagcaatcaatggggcaaaacacaccaaatgattataatgatggatggctcaaattctcacaaaggtaaaatcatcactttcaaattgagctttcaaaactatcatgacatgtagagaagaatcaaggatttcaagtcacaaaatgtcaagaacttttattttcaaaacaattacccatttcttgaacatatcctataattcaaagaaaaacatgcaaagtcgtacgtgcacacaaaattgacccaaaatattaaactgaaaatccgacgaaactaacaacattaacaaattaacacaactaacaaattaacaaaaccaacaaaac

SEQ ID NO: 13409 - DNA, 381 bp, Glycine max
  unsure (1)..(381): unsure at all n locations
gtgccaattcgncttcttctttagttttgtcttcttctggcttcaattcttcagtgggctttccttctgtgtccagcatcttgggatgttcccagcctttgatgacagctttccaggttctgctatccagtgatttgaggaaggccaccattcttgctttccaatattcatagttgcttccatcgagaattggtggtctgttcactggtccgccttctttctccatgttcatcagaatttatctccctagatctcactctgtgatttcgagtgttggctctgataccaattgaaattctgataccaggggacagatgtcgtacaggatgtcacgacatcacgcttcagaacatgcagattatatgtgtccgtatgaacaga

SEQ ID NO: 13410 - DNA, 265 bp, Glycine max
  unsure (1)..(265): unsure at all n locations
ttactcggatgtctgattgagacccgtaatatatcgagacgctcgaaattgaataccgaagctctgagcaaattcaaacgacaataagtttttactcgtatgttcgattgaatcccgtaatatatcgaaacgctcgaaattgaagaccgaagatctgagcgaattcaaacgacaataactttttactcggatgtctgattgagtcccgtagtatatcgagacgctcacactngaatgccgaagctctgagcaaattcaaacgaca

SEQ ID NO: 13411 - DNA, 255 bp, Glycine max
  unsure (1)..(255): unsure at all n locations
atctcaaagcttcngtattccaagtcgagcgtctcgatatattacgggactcaatcagacatccgagtgaaaaggtatattcgtttgaatttgctcagaggttcaacattcaatatcgagcgtttcgatatatgaccagactgaattagacatccgagtaaaaagttactgtagtttgaagttgctcagagcttccacattcaatatcgagcgtttcgatatattacgggactgaatcagacatctgagaaaaaa

SEQ ID NO: 13412 - DNA, 363 bp, Glycine max
  unsure (1)..(363): unsure at all n locations
aacataagcacttagacaatgaaggaaagctggagttgctgcacatgatgtccaacgttatgtcaaagaataaaatcgggctgcacaatgcacaaggcaagataaagtgtcaaatgaagaattgaagctgcaggattcacgatgtctgatacaatgtccaggacatcctgcccgaaaatactggagttgctgaaagcattgaagttgcaggatccacgatgtcggatacaatgtccaggacatcctgcccgaaaatactggagttgctgaaagcattgaagttgcaggatccgcgatgtcggatactatgtccacgacatctggcccgaanattctggacatataaatctgttatatctttaa

SEQ ID NO: 13413 - DNA, 378 bp, Glycine max
gagaagctagagcttagctacttacacccatcttataactaagctcttctccttgagaagctttcttgagaagctagagcttagctacacaccctataatagctaagctcacccccatgacaaaaaaaacatgaaaatacaaaaaaatcctactacaaagactactcaaaatgccctgaaatacaaagctaaaaccctatactactagaatggccaaaatacaaggcccaaaataagaaaacaacatattctactatttacaaagaagagtggacccaaccttggcccatgggctcaaaaatctaccctaaggttcatgagaaccctaaggccttctttatcaactctagcccaatcctattggagcctcttgctcat

SEQ ID NO: 13414 - DNA, 325 bp, Glycine max
  unsure (1)..(325): unsure at all n locations
agctttgaatgctctattcaatggagttgttatgaatatcttcagacttatcaacacatgcacagtggccaaggatgcatgggagatcctgaaaaccactcatgaaggaacctccaaagtgaagatgtccagattgcaactattggctacaaaattcgaaaatctgaagatgaaggaggaagaatgtattcatgacttccacatgaacattcttgaaattgccaatgcttgcactgccttgggagaaaggatgacagacganaagctggtgagaaagatcctcagatccttgcctaagagaattgacatgaaagtcactgcaata

SEQ ID NO: 13415 - DNA, 416 bp, Glycine max
  unsure (1)..(416): unsure at all n locations
ngngttcctaggcctagaatcgcatttgggcactcattttaacctctacgttctgtccttatacatataaatcagccccacagtccaaagctcacaaaaccatgctcatatgtcgttgaggcatttcaccgagcacttggtgggcacatgtttaggcatgaatatcaagataatgggggcaatgtggcatgccccattacttcagactgcaccctaggcctaaggccatcccttacaacccctcaattcaacaaaaacaagcaacaattcaatgataaatccctcacgttttttagcaaatacatgcaacttagagcaccaaaatacatcaatggaaagctagagagcccaagaatgaggtacttacttgttggagatgaataatagcgcaaaatggaataaaaaacgcaaaaaat

SEQ ID NO: 13416 - DNA, 377 bp, Glycine max
  unsure (1)..(377): unsure at all n locations
tgaagcttctaagcccaattccacannattttttacagataaggatntgcgcttagcgcggaaagatgcgcttattgcgactactctattggacaacagtgacttagtgagcaagctcgctaagcccaaatccaacaatttgaaaaacggagagataattgcgcttagtgtgatagggcatgcttaacgcatagcaaaacacaaaaattctaagtgtttgagaacacaacacttgcttagtgtatagacacgcttagcgaggtcatacgcaattgaattttcaatcagagaagatgaacgcgcttagagggacatggccacgcttagcgagttcatctggaaatccagatattcaacaaaaaatgatgaactcgctt

SEQ ID NO: 13417 - DNA, 410 bp, Glycine max
ttaaaatttgaattaaaacgttcagtttctgctggtgttcgattaccatatatgtgtgatcgattacacaaggcaaattttgaattcaaatcttaatagctgttgtaaatcagttttggccactggtaatcgactacatcctctggtaatcgattaccagagagtaaatttcttgtaaaagactttttaacttaattttcttggccaaaccttttgttacttcaattggaattcccttcctatttaatatatcctttctaagactctatagactgtcttgatcatccatcttgaatatctttaattgctttgtcttgaataaagctttgagacgcatgtgatcttttggcatcatcaaaacatcggcttgatccttcgtctacaatgcttagtttatgatccatgtttca

SEQ ID NO: 13418 - DNA, 304 bp, Glycine max
  unsure (1)..(304): unsure at all n locations
agctttctctaccgtanaaaaaatattatttgtcgtgttnntaaaaagaattgcgcaatgtcggcagaaaaatatcagtcgtggctatataacgaccgatgtcaggtatttttgtttcaattcagtccctgaataatttttggatattgtccaataagaaatgttcgatcggcgtcatcaagtgatgcttgctttatattttagacctgctggatcggtcatctttcctggccgacatcgactatcattttttttatcagtgtcggtgaataatggtttttggccgacgtgggctgatgttttt

SEQ ID NO: 13419 - DNA, 398 bp, Glycine max
  unsure (1)..(398): unsure at all n locations
tccattgttgagtttttttttgctttctttttcacgctttgtttcactccaacaagtaagtatctcattcttgagctttctagctttccattggtgtatcttggtcttcttttagtgctttcaattgtgtgaatttggccaattccgtgagacaatttggggcaagtttgtgctttgtttctttgaattgaggggttgtaggggatggccttacgcctangttatgctgtgaaataatggagcaagccacattgcccctattcccttattattggcacccaaaagtgcgcccaccaagtgctcagtgaaatgcctcaatgacatttgggcatggttttgtgaactttggattgtggggctgatttgtgtgtatagggacaacatgtagaggttaaaat

SEQ ID NO: 13420 - DNA, 296 bp, Glycine max
  unsure (1)..(296): unsure at all n locations
agctatcgagaatataaaattgtcataacttttcactcggatgtccgattcangcacatcaaatatctagacgctcgaaattgaacaacggaagctctcgagaatttaaaattgtcataacttttcactcggatgtccgattcaggaacatcacatatctagacgctcgaaattaaacaacggaacctctcgagaaattcaagtggtcataacttttcactcgtatgtccgattcacgcgcataatatattgagacgctcgaaattgaacaacggaagctctcgagaaatttaaat

SEQ ID NO: 13421 - DNA, 284 bp, Glycine max
  unsure (1)..(284): unsure at all n locations
ttcttcacggaaacaatttttccagcaaattctaaagagagaaaagtgcctaaggggctggaccctttccttcttgctttcctcccctatttatagcaaaataggggaggtggttgccgcccagctcgcccaggcgagctcaactcgcccaggcgagcagggttgcttcctccagaagcaaccgccttctggaggaatcttctggagggcccaaatgggcctgggtgctatttgcacccccattnttactaagtacacccccctctgctatttttggtgattct

SEQ ID NO: 13422 - DNA, 194 bp, Glycine max
ggaccaaattacgcagcagcacgagatcaaggcacaattctgggaacaggcaagcgtcccgggaaagaaccctacatccccacaacaccgaacaaaggaaagccggggccaagaggacaataaaaatgcgtgcccacgccctttcaacggaaacgcggccacgataagaacgcaaccaacctgcgcgccgccgc

SEQ ID NO: 13423 - DNA, 245 bp, Glycine max
gctttatactctatggatattctgagttttaacatgacctacgagatggaagccatattatcttttaaggccgatagatcggacttcatctgttactgcacacccctcttattatccatacttctggatctaatgttataggggcgcctgggtgtgttctagttgtgatgaaattcctaaggacatatacgacggtgagtatgccaccacaacatgaatctgcacatggatgatcggagcacttg

SEQ ID NO: 13424 - DNA, 371 bp, Glycine max
tggatagactcggcaactgcctttatttgcagtttcaatacaacatttatatggctcctgatcggaaccctcttcagagcatgacaaagcgggaacatgagtccattaaagaatatgctcagaggtggagagacctatcatcccaagtccgcccacctatgactgagagggaaatgatcacgactatcgtacatacgttgcctacgttctactaccagaagctgataagagatatgccgactaactctgcggacctcgtgttcgccggagaaagaatcaagtcaagactgatgaaaggaaacgctgcatatgcctacaacgctgcccccaacaacaatatgagagccccagtggtgggcacactgaaaaag

SEQ ID NO: 13425 - DNA, 256 bp, Glycine max
tgtcatttgagagagattattgagtaaagagtgagtgtgagatgctgagaagaggaggaggaatcccccttcttgtgtaagaaactatcattctctgcttttaatctcatttattgttagggtttctttctaatggctggctaaacaccctagttggggatttctaatgaacagctgatgtaaatacgtaatatctaattgattgtggtttttgtgttcaatgcttcattcaatgcttaatgtttgtatgcttttg

SEQ ID NO: 13426 - DNA, 416 bp, Glycine max
  unsure (1)..(416): unsure at all n locations
cacacatgtattatttggattgttttacatnttttcatgtgaagcatgttggagaattntctcctttcaaatttatggaagaattcctatagttgagaggttatactttcatctaccaaatgagcaatttgtactatttgaagatcatgatgacctagactttttcctctctaagccaattgtgaaagagtccatgttcacaacatggtttaaagcaaatgaaatgttccatgaaggtaaaatcttacttatgctagatttgttacaaaatttgtttacggagcaaaaaaaagatcatggcaaccaagaaaagaaggatataccattggaaggcttaattgggtgccaccaaccataggtgagctatattacttgagaataatgttgtcagtcaccaaagggccatgctattatga

SEQ ID NO: 13427 - DNA, 404 bp, Glycine max
  unsure (1)..(404): unsure at all n locations
gcttgctctanatntacattgatgtttgtatttattggacggggttgtatgctcatttttgttttaagggtagcatttcttggtaaaaactaactttccaaatgtttgccttcgcangaatggccccgaggaagcttgcctcaaagaggtccaagaaggacaaggcggccgaaggaactagttccgctccggagtacgacagtcaccgctttatgagcgctgtacaccaccagcacttcgaggccatcaagggatggtcgtttctccgggagcgacgcgtccagctcagggacgacgagtatactgatttccaagaggaaataaggcgccggcggtggacatcactggttacttccatggacaagttcgatccagaaatagtccttgagttttatgccaatgct

SEQ ID NO: 13428 - DNA, 402 bp, Glycine max
  unsure (1)..(402): unsure at all n locations
tcacgattactcgggacacaatcggacatccgatttatgttattgttattgtaannntctcagagcttccgctttcaattacgagcggctcgatatattacggggttgaatcagacatccgaggaaaacgtttttgtcgttagaattcgctcagagcttttgttttcaatatcaagcgtctcgttatattacgggacttaatcgaacctctgagttaaaatttaatggggtttgaatttgctacgagcttctgtttccaattacgagcgcctcgatatactacgggacacaatcggacatccaagatataagttatttttttttgcatttgctcacagcttatgttttcaattctgagcatctcgatatattacgagacacaatcgtacatccgagtaaaaa

SEQ ID NO: 13429 - DNA, 407 bp, Glycine max
  unsure (1)..(407): unsure at all n locations
gcaagctnttaactggaattgcaacgttccaatttattttaaatggtgtaatcgattacaacatatattntcatatnggtaatcgattaccagtgtatttgaacgttgaaattcaaattcaattgtgaagagtcatatattttcataaaatgctttttgtaatcgattacatggttatggtaatcgattatcaatgacaagttttgaataaaaaatcaagagatgtaactcttccaatggttttcaagttttctcaaggttataactcttccagtggttttcttgaccagacatgaaaagtctataaaagcaagaccttgacttgcatttcaataacttcttagaacaactntttagaatttcttgaacaacttttgagaaatcttgaaacctttgctacttatatt

SEQ ID NO: 13430 - DNA, 424 bp, Glycine max
  unsure (1)..(424): unsure at all n locations
tcttcagcgagtgcttctttgcaaagcccctttgttttcttgatttgtttgttattnncctgtgtgggcaaagccattcaatttaacatatagttgagaatttgatcatcaaatgtatgtgcatgaaaaatatatatgttgagagatattggccttttcatgattagttttttaatccctcccagaagctaccatggccacccataaaaaatgccattctaaatttttgagtttcttacaaattaagtatggacaatggacctaagtgaatgatttgacctacgatagtttgatatattcttgatagttaatatctgaacactcacttattttaaacacttcatcaataattattttttctcttcctatcatatcatctatcttatatttttttttctttttgggtcattctctctgtctctat

SEQ ID NO: 13431 - DNA, 408 bp, Glycine max
agcttccatcttcctacaccacttcgttctttagattcacgaatcatccaacattttcacttgtttgtctaatgagtgaacatagtgaataattatttaaatgccatcatgcccaaatttttgacctctccttatgacataggagcaaatgcaaaatcataatagcagacatgaaaatttctgtcactccgtggaccaaatggcttttcatggacctttttctttactttacattgttactcatgatttgctcttttgaatctaaacttgatagctgaaaattacatatttcacatataaatatcctggtgggtcataaatgtgtctttcttgcatatcgacaaagggaggaatcaaagttgtaaagtttatggggccagaaagccttacatgctacatcataattca

SEQ ID NO: 13432 - DNA, 429 bp, Glycine max
  unsure (1)..(429): unsure at all n locations
tccttctccattcataatttcagcaatatatattatactgtttttaggctngnnagtgggtntggactaatagaaaactgaaaaatacaatacaactaacaaattaactacaacggagtttcactttgagggtgattcattggctaattgcatatcccgggttaaggaaattgccaagtgcctcaaaaaagacacagtattagcgaaacctagaaattgaaacattaaattggggtgagaaaagaaacacgaaaagattagctcaccgcattttgctctactgcggtagtattaggtttatagaattgacttatataccagtgtcaaccaataccaatatccatagtaagtatgctctgatttagatttattagaatttacttntttacctcattntattcattaaaaatgagtngattttctatggat

SEQ ID NO: 13433 - DNA, 396 bp, Glycine max
  unsure (1)..(396): unsure at all n locations
ataatgaactntctcttcataataattattcacanaattgtattgagacataaaacacatgtcatacaaacatgatgaaggtaataaagttcttaacattatttggcaattaaatatgcaccaattagtagtacttatttcctttggctatataaataaaactaatgatacacacaaatcgcctacaattatattcattaattataagaacaactaatcaacccttatgcaatccataaatgccttataacaatgaatttcagtgtacccataaactaataatcatataatttatcatccattattctatgagtaattaaaataatcattaatttaaaattaaataaccttatagatttggccactttggtgactaacaaatctatcatacactta

SEQ ID NO: 13434 - DNA, 311 bp, Glycine max
agctttgatagatctcatagtaagcagaataacttgagcatctttgcctatgaatcatccaacataatatggaacaaattcatagtaaccctcgagtacaagaccgagatgactatagagtagtattccctcatatttgatttccccatttccaacaacttaatatatgttttattttcatttgaaaatgttgtgacatgtgtttcaataaatccaacgaataaaaacaaaataaatgttaaaacaaggattctttgataaaattattttcacctcaaacgtaattttataacatgttcttagttaagtac

SEQ ID NO: 13435 - DNA, 384 bp, Glycine max
  unsure (1)..(384): unsure at all n locations
ggagctnttcgactatgctcttgtgtggttgaacaagttactaaaggagagagcaagaaatgaagagccaatggttgatacatgggcggagatgaaaaggatcatgaggaagcagtatgtgccgactagttactcaagggacttgaaattcaagctccaaaaactaacccaaggcaaaaaaggggttgaggagtacttcaaggaaatggatgtgcttatgattcaagcaaagatcgaagaagatgaggaggtaactatggctcgatttcttaatggtttgactaataatatccgtgatattgttgagttgcaggaatttgttgaaatggataatttgcttcacaaagaaatccaagtagagcaacaattaaaaaggaaaggagt

SEQ ID NO: 13436 - DNA, 382 bp, Glycine max
  unsure (1)..(382): unsure at all n locations
gcttgttgtgaaanttggtaacgctgttctcatatgaaacaatgcaatgcaatggaaagttgtacaatgttcatgacattctttccctattttgtgattntgattttgatttaatctttttggaaaacacagattgactgtccttttgaaaaaggtgataattcatgcaaccttatcctatctttttcaaatctctccaggaactccctcagagtgtatgttctgtttgatttagtcacttgaccattttggagtgacggcaatggagtcgtttgacgtttaatcaatctattgaaattccagggtttgtctccccccccctttnttttcttgtttaaaaacatcgacgggtgaggacttttgatcttgccctatgttcact

SEQ ID NO: 13437 - DNA, 412 bp, Glycine max
taactacaacgattcttttatattgtttgaaactttcttgaatcttcttcctttctggaccttttctcttgctttggcgagacctagccttggtttggttgagatcaaatagggaagaaaggagaaaattttttcacactttttgtgtgggtcccacacctctatttttctactctaattcatttttttttcttttctcttccattattttttcttctctgcaaccgaacaaccccttaactcattgtggcaagattccactaatgaacaaggtcttcatgtagagatttactatgccaaaatgaagcttcgttgaagcgattcttctcatttcttcacttgattttcgtcccttatcgttgtggcaaattggccactcggtgtggtgtgtttaggtatgcagctcttcttt

SEQ ID NO: 13438 - DNA, 340 bp, Glycine max
  unsure (1)..(340): unsure at all n locations
agcttgttgatcttgatganaacggcgattttattggaacttatggggaaaannnaaaaatatntgatccttctattcttatgtttcctatacctgttatgttaacttttctttcaaattctgtttcataatccatttgtttaaaatatcaatatatctaagttatttgctaggcaatgcccctattaaggaacatacttttgtttggactaaggtgcttaatagggttgatacaaatgatgttttatagattcataggccttatgtaactagattgaatttctcttggtgactgtattatgtttattggtactcatacaaagtcaacctttaatttttg

SEQ ID NO: 13439 - DNA, 272 bp, Glycine max
  unsure (1)..(272): unsure at all n locations
tgcctttcacgccctgatcaaacctagcaatggcaccatgagcatgaaatgcttgttcagagagcaagaacatcattccatagatactggccacattaagaatcagcatgcaatacctcccgaagacaaccatgggctcccctaatcaaagcaactctctggtttggangagctacaacttaataggcgtctgggacctcatggaatgattagacctaccattatgggacataccctcgatcatgaatatctgaacagcctaccattgaaaa

SEQ ID NO: 13440 - DNA, 377 bp, Glycine max
  unsure (1)..(377): unsure at all n locations
cgactattctcttgtgtggggaacaagcttcaaaaggagagagcaagaaatgaagagccaatggttgatacatggacgaagatgaaaaagatcatgaggaagcggtatgtgccggctagttactcaagggacttgaaattcaagctccaaaaactaacccaacgcaacaagggggttgaggagtatttaaggaaatggatgtgctcatgattcaagcaagaatgaagaagatgaggaggtaactatggctcgatttcttaatggttngactaatgatatctgtgatattgttgagctgcacgagattgtttgaatggatgatttgcttttcaaagccaatccagtcgagaaacaattaaaagggaaggagtggcttt

SEQ ID NO: 13441 - DNA, 409 bp, Glycine max
tacctaattaacctgaaattgagagataatgattattttacacacaaaatgaaaatactaagtatttattacctatacttaacagaaaatacttataacattacaaaataaccataaattgggagagtttgatacaatttatacaagttttatacacaaaagttagtcattttcaccgactaacaactcccccaaatttacagttttgcttgtcctcaagcaaaaagagaacagctcacttgtccccaagtgacaatgacatgctgtgactacgtactaaggtgtatgctacaaggttactgattgcatgataagagaatggagtaaaatgccatcatcacttgtttttcacaaggttagtcattttcaccgactaacagttactaattgttattcaaaatagattgga

SEQ ID NO: 13442 - DNA, 222 bp, Glycine max
agcttgagcccacattataatcgggccattccaactatagtctaacgaactccctcaaccacgttacaacaccccaaacccaaaaataaaaaatcacgactcatctcaccagcacaaagacacaattcacaatattctctgaagctgaaaaaaaaactagagagtgcgcagcctataaatctcacctttcaatacacgattgactatctttcatagaggaaa

SEQ ID NO: 13443 - DNA, 395 bp, Glycine max
  unsure (1)..(395): unsure at all n locations
gttggagagtatagcattaaacagaattcgncatttgataatttacttagaagaaacataattcanattgtgttttctgcccaaaccaattagaaactactacccacttgttgtttaattgtgactctgctgtggaggtttggaggagatgctacatttccaggggaatttattccccatttttggcaacacggnggacaaattaatggaagacatgtggtacaaggatcatggttgatatgtgataggatgcgcttcatacccaaaataaaatggttaaaagattgtttgggttggagttaaaatattaattattaggatattatctattatgttatctaactcttatttctaatttcccaaggtacgatgatgacactcgtatggtcatcatc

SEQ ID NO: 13444 - DNA, 353 bp, Glycine max
  unsure (1)..(353): unsure at all n locations
agcttctcaaggaagttttctcaagaaatcttctcaaggaagctacctagtctataaatagaagcatgtgtaacacttgttgtaactttgatgaatgaaagtcttatgagatacacttcnaagtccacttcttttcctcttttattccttcaatttcgtgctccccccttctctctttcttttcctccattaaagcatcctcttcaagcttcttatccaagacaattcttggtggtgaaactccttcttccttggcttattccctagtggatggtgcctcccctctcctcttctcctttgccttcccgctgcatctcatggggaaaaatcaccattgaaggacctcattggag

SEQ ID NO: 13445 - DNA, 404 bp, Glycine max
  unsure (1)..(404): unsure at all n locations
tgcttgtggatcttctatggaggtttgatctttgatctcattgaggtcctttaatggngattttccaccatggagatgcagtgaaagacaaaggagaagaggtaagaggcggtgtcatccactatggaataagccatgaaagaaggagcttcaccaccaagatgagccttggataagaagcttggagaggatgcttcaatggaggaaaagaaagagggagagaaagagagaggggggagcacgaaattgaaggaagataaagggagagaagttgaactctgagttgtgtctcacaagactctcattcatcanagttacaacaagtgttacatatgcttctatttatagactaggtagcttccttgagaagctntcttgagaaaacttccttgagaagcttcctt

SEQ ID NO: 13446 - DNA, 306 bp, Glycine max
  unsure (1)..(306): unsure at all n locations
tcatcttatagatgaaagacaaatggcttttatgaaggggaggcacattcttcatggtgttntgattgccaatgaggttatagctgaggctaaggctaaaaataaaccttgcatggtcttcaaagcggattttgaaaaggcgtatgattcggtttcttggggttttcttgactacatgttgatgaggatgggcttttgtgaaagatggaggaaatggattaatggttgcctgtccactgcaaccatatccattttaattaatggaagtctgttttttggagatgccacttagcataatgttagaac

SEQ ID NO: 13447 - DNA, 422 bp, Glycine max
ctgtattctactaatatatggaattgccctctgctttgccttagaataacaattgcttgaccacaacagcgctggaggcggcaagggacaatggtctttcaaataaacctgttgtacatgaacaaacattatatcatgcgctgaccgtgccaaacgaaccagtgaagtcattgcataattgttatactaactatattcaatatacctgaacaaaatgatttccaaacacatgaccgaaacatatgatgcggtggccagaagagtcaggtggtggttgacttctaagagggaaaaatgtcatgctttgttgttgggacaacgatacaagaattacgttataccgtgaagcaatcacatatcccatgtccgttatatccatccacttgtctacactaacctgaatgaacccaaaattaaacatg

SEQ ID NO: 13448 - DNA, 292 bp, Glycine max
ctaatgttttcctggccgaataaatgggaaaatgccagttttggccgaaacgaaaagtcggttgggctcgcacaaaaaaacctagccgacctacattttaaattttttatgcaacaccaaaacaagaaaacttcctgtgccgtaaaaaaaaaaaaaacattacatgacagcgagcgttttgaaaaacaaaaatgcgcaacgtcggctgaaaaatatcagtcggggctttttcacgaccgatgtctgctattgagttttcaattcaatccgcgaacggaatttgcatgatgtc

SEQ ID NO: 13449 - DNA, 417 bp, Glycine max
  unsure (1)..(417): unsure at all n locations
ccggatcacgccgatcgaacatttcctaaccgacgtcatgcaaattttgttcanggattgaattgaaaactcgttaggcgacatctgtcgtgaagtagcgaccgatatttttcagccgacattgcacaattctttttagaaaagctcgctggtcgataatggtctttttacggcagagtaagttttcttgttttggtgttgcataaaaaagttacaatgtacttcggctaggtttttcgtgcgagttcaaccgacattttgtttcggccaggaaaacattagcccacctctgcaaaaaaaatatttgctaaccgtcttcatgcatatttcattcaacgattgaatagaaaactcaatagccgacaacggtcgtgaaatagtcccgactgatatttttcagccggcattgcgcatttc

SEQ ID NO: 13450 - DNA, 442 bp, Glycine max
  unsure (1)..(442): unsure at all n locations
ctcgaccgggatccttaagcttcctgccgcatgcaagcttgtgttattcgatgatgtgattgtcctttttcttgtttgagaagatgttactgccttgttntcctttgtaatgtagtctctacttgtagtgaccatctgttatcctatgtctgaatagttagctaataaaattaaaagttgctagatggtggatgccattcttcccaacatatgatgcctttttgccttataataactaagaaaaactaatttcttttgtcaatggacctaaagtttgaggtttagtttagttgctttattcttagatccgtcctgatgggattaatactatgtagtctggtgaaatgagacttactatgactgacaagattaggggctgtagtgtctaaaattcatagatcagaataagaatgaagcttacctaaatcaatgaagctaaatg

SEQ ID NO: 13451 - DNA, 423 bp, Glycine max
  unsure (1)..(423): unsure at all n locations
tatcctatgggattaccatgcacacaacgatcacaaatttaagtctatttagtntatcacttcctaatagattttgtttctcaagttcatgtaatcctctttcactaacatgacctaatctcaaatgccaaagttttgttttatcaatcaatgtattactagctaccgatgcatgtccaacaatagtggaaccttcaagaataaacaagccattacttttattcttgttacccttagctatgattaaagatccatttgaaatcttacgaacgccatttaaaattctagttgaatatcctagatcatcaaacatgtttatggaaataagatttcttttgagttctggaatgtaccttacatttttcagtagatactctctatcatcaaacattttcaatctcacagttccaatgccttgtacct

SEQ ID NO: 13452 - DNA, 410 bp, Glycine max
gcaagcttaaggatggaatacttacttgttggttatgatgaccctagggctgcaatttcttaaatcccgtgggtattgcttttgaagggggggaaaagaagtttttgaatgcaaaaacgtccccccttccgtcacttttattttttggtgcaagggttgctcacccaggcgagctaacctgcactttttttttttttgagaggaacattaaccatgtcccctccttccttatgggttagcgttttgcctaacttgaacttacttaagttagaattaggcgttgattacttatttttaaaacaaacaaatagtaaaagaaaactactaatacaaaggatacggggctgccttgcagcgacgatcagtcagtcgtgaccccacccccagttgcatccgttcctaagtacctg

SEQ ID NO: 13453 - DNA, 424 bp, Glycine max
actcgcacgtggcttcccgctccacttccccgttatcgtgtgaacttattccgcgccgcgccgcctccctcgcattcggtccggttcgccctcgaccggtccatctccccgaaccggagccacgtcatcgcgaggaagcaccagcatcaccgccacgttacggctcagaagaaaacgtgcatgtgttctccgacgacgcatcccggttcgttccggtgcagcctccacaagaacaataaccagaacgcgcaaaccggttcgtttccgtcgaaccggctcaacatgcggcggtccgcgatgaagaactcgctcgtgagaatcggtggcgtcgaaggcgagtgggtgaaacgcgccctcactgcgctgattcgtccttcgtcgcatcaacagcggagaagatccgcgttcgaaccgcgaccgagtc

SEQ ID NO: 13454 - DNA, 388 bp, Glycine max
gagaagtactgcatgcagagtttggtccagggtgatgcaccatatgccgcggacgtgccgccacctcatcaggctggtccatccggatcatttaacacggagcagtatttgcggcatttggttcgccagcaggcggccaaccaccgggcacatgtacagactcatgattgtctttatcagatgagtctcaacctgcagagccagggctttacttcttttccgtgccctactctggaccagttcaagacagaggtcgcatggcctggagattggcccgaggcccaggcaggagaagcaccagcagaggctcccgacgaggcagatgaggcccgcgaggacgaaaagatgaccgatttacttgatttcttgggagggagcggtgccacat

SEQ ID NO: 13455 - DNA, 377 bp, Glycine max
  unsure (1)..(377): unsure at all n locations
atggaagaacagaagtgaaaagaggaagaagaatgaagaacaattgagagaaaaaaaaaagagtttaatcctaaagcttgcacaacaagtaactaagtctattttttacaaaataaactaactaactaactaacactaatatatagagtgactacttggaaggaaggatgagtcttgattaggcccatcttatatacctaattaaactaattatacaaaacaaagcccaaactcccagcccaattattcaattgcaacggttctgacttccaagcttaatttgaccctcgaaatggcaaaatagacaaaagcttatttttgacaaaatngaagttattgtctgtagctttgcatggattactcacactatttggagt

SEQ ID NO: 13456 - DNA, 337 bp, Glycine max
agctttatgtaaactagatgccttggttttcctggtaacccaactggccatgaataaaaaatctgcacctgtcgccagactctatggtttatgctcctctaccgaccaccacacagacctttgcccttatgtgcaacaatctgaagcaattgaacaacctgaagcttatgctgcaaacatcaacaacagacctcctcaacctcaacagcaaaatcagccacaacagaataattatgacctctccagcaacaggtacaatcccagatggaggaatcatcccaaccttagatggtcgaatccttcacaacaacaacaacaacagacttatttttcaaat

SEQ ID NO: 13457 - DNA, 422 bp, Glycine max
tgccacccagctcgcccaggcgagcatagttgcttctgtatggcccaagtgggcctggttgctatttgcacccccatttttactaaatacacccttgcctttttttggtgattcttttttcataaatttatggaaacttacgaatttcgtaacgatacttgttttctttccgtaatgttacggaaccttgcggattacataatcatcccttttttgacttacggaatgttacggaacctcactaattgtgcaacaatgcttccttttgatttccggtgtgtcacggaaccttacggattgtgcatcaatattttcatttgatttccggcacgtcacggaatttcacaaattgcctaataatgggtgccaagcacctcaaaatgaccaaacacaagttgcatgccaccaagcacaggtccccg

SEQ ID NO: 13458 - DNA, 387 bp, Glycine max
agctttttgtaagaatggaggagaggattataaatagaatagcacaagtttttgcccaatgaaattttcttgacaaagcaagtgttgaacaaaaactcttagaaagatgttgagaattagtgttaataagttttctgaaattcgtgccatggtcacatatttatagtcatttgatgactcttgaagaaccatgttaaaagttgtgacagttggcaaaaactagtcactttaaaagttgtgactctttggaaatttatttttcaaaaccaatcactggtaatcgattaccattatggtgtaatcgattacatagtttattttatcaaaggttgtgactcttctggtgaagttttgaagtcaacgttcagaactactggtaatcgatta

SEQ ID NO: 13459 - DNA, 424 bp, Glycine max
  unsure (1)..(424): unsure at all n locations
actacgcttctacaactaanacatggtagaaaattattgtacactatgcatcggcaatttctaaaacctcatcacccttacagacgattgaaaaaagcttttaatggaagtcaagagcatgaaactgcaccgataccattgactggtgagcaggtcttccagcgggttgaacacctgaatactgtatttggaaagacctaaaagaaggataaaagtaagacttgcataaggaataagaggtccattttctttgatcttccgtattggtctgatctagatgttagccattgtatcaatgttatgcatgtagagaaaaatgtatgtcacagtgtcattgggacgctccttaacattcaaggcaagatgaaagatggtctgaatacccatgaagatctatctgacatgggtatatgattgcagttgc

SEQ ID NO: 13460 - DNA, 319 bp, Glycine max
  unsure (1)..(319): unsure at all n locations
agcttgaagganaactgaatgcattggtttattnggtaacccagctggccttgaattagaaatttgttcctgtcgcaagggtttgtggtttgtgctcctctgctgaccaccatacagacctttgcccttccatgcagcaacctggagtaattgagcagcctggagcttatgctgcaaacatttacaatagacctcctcaacctcagcagcaaaatcaaccacaacagaacaattatgacctctccagcaacagatacaaccctggatggaggaatcaccctaatctcagttggtctagccctcaacaacaacaacagca

SEQ ID NO: 13461 - DNA, 416 bp, Glycine max
tcatcctcatcagggttaaggaggtgttaagggttagtgtagtctcaatgttttccagtcgggtagttgtattctccaacaaactatgaacttcagttgagtgctcttgatggaggtgcagcataacatccatcttctgaatcataagtgaatcaaaaggactccattgatgtgtaggctcttattgagcttcagcttcagcatcttcttccatctgttcaaagtttccaactgctggctctccagccattatccattcatgatcaacaaacctcattccaagcttcttgagatgcctttcagtaatttcactcgacgctttggtaaatccacaatctcattagagacatcaacattgaagtagtcaatgaatcttgaggcaagtacaacataagtgtcacaacgtgggccacgat

SEQ ID NO: 13462 - DNA, 385 bp, Glycine max
  unsure (1)..(385): unsure at all n locations
agcttatgctgcacacatctacaatagactcttctccacctcagtagcaaaatcagccacaacagaacaattatgacctctctagcaacaggtacaatcccgagtggaggaatcatcccaaccttagatggtttaatccttcaaaacagccgcagcaaatacaacagccttattttcagaatgctgctggcccaagcagaccatacattactccaccaatccaacaacagcaacagccccagaaacagaagacagttgaggctcctccgcaaccctcccttgaagaactngtgaggcanatgactatgcaaaacatgcagtttcaacaagagaccagagcctccattcagagcttaactaatcagatgagacaatnggctacaca

SEQ ID NO: 13463 - DNA, 416 bp, Glycine max
ctccgcttaaattgaattaaacgtcatttctgctagattcgataccattatgtgtaatcgattacacagtgcaaattttgaattcaaattttaatagctgccgtaaatcagctttggccactggtaatcgattacatcctctagtaattgattaccagagattaaatttcttgtgaaagactttttaacttaaatttcttggccaaaccttttgctacttcaattggaattccattcctattcaatataccctttctaagactctaaagactatcttgatcatccatcttgaataaagctttgagacacatgtgatcctttggcatcttcaaaacatcaacttgatctctttgtctacaagaaaagcataagcatttgattgactgtgatttccagacgttcatgttaccttattt

SEQ ID NO: 13464 - DNA, 305 bp, Glycine max
agcttatgaccattcgaatttctcaagagtttttgttgttcaatttcgagcgtgtagatgagttatgtccccgaatcggacatctgtgtgaaaagttatgaccattcgattttctcgagagcttgcgttgttcaatttcgagcgtctcgatatattatgaccccgaatcggacatctgtgtgaaaacgtatgaccattcgattttctcgagagcttccgttgttcaatttccagcgtttagatgagttatgtccccgaatcgaacattcgtgtgaaaacttatgaccattcgaatttctcgagag

SEQ ID NO: 13465 - DNA, 386 bp, Glycine max
  unsure (1)..(386): unsure at all n locations
tgccttgccccttgatatattggatgttattatggcattatgaatgacaattccttgngataaaggtagtgttgccatgtttttgatgaggacatgaccaagagcaagggcaaggatccacttgaaggacttggaggacctatgacaagggctagagcaaggaaagccaaggaagctcttcaacaagtgctgtccatactatttgaatacaagcccaagtttcaaggagaaaagtccaaggttgtgagttgtatcatggcccaaatggaggaggactaaatgacaccactttgtctcaattnttagagtggttagtttgtctaaataatggcccaatcctttgtaagttggctgaccaaaaatatgttttgggttaatcaaataaa

SEQ ID NO: 13466 - DNA, 304 bp, Glycine max
  unsure (1)..(304): unsure at all n locations
catgcaagctntgaagagctgagagagaccggtctatagtcgaacgcatgatattgggagacaagttgaaggcttgctaaaggtccaaaaggagtttgtctgaacaattgagcaagaccaaaaaaaacatatgggcaatcattgaccaatacaaaaagaagctaagtctagcggtaacccatgaacaaaagcgagagggtgagtatgcaaaggtatcagtcctgcaagcagaaagggaagcaagagagagagtgatcgattcattacacatagacacaatgatgtggatggataggttcatttt

SEQ ID NO: 13467 - DNA, 299 bp, Glycine max
  unsure (1)..(299): unsure at all n locations
cagctcctctctgagcttcttatccaagatactctctngattgtgaagctccttcttccatgccttatttcctaggggatgatgccttctgcatggtggaaaatcaccattgaaggacctcaatgaagctcaaagatccaacctccatagaagcttcagaagcaagcttccattaatttaacttttattttgtatattttggtcaagctaatttggttggaggttcacaatgtctcaaactgatatgaaccctcatggcacaagggctgacttatgatcgtctangattaaaccttgat

SEQ ID NO: 13468 - DNA, 358 bp, Glycine max
  unsure (1)..(358): unsure at all n locations
tgaattggacctcggtgtgaaaagttatgaccatnngttantttcgagagcttccgctattcaatttcgcacgtctctatatgtgacgctactgaatcggacatctgtgtgaaaagttatgaccatttgaatttctcgagagcttctgttgcttaaattcgagcgtctcgacatattatgctcccgaatcgggcctccgcttgaaaaattaagacccattgaatttctcgagcgcttccgatgtttaatttcgagcatctcgatatattatcagcctgaatcggacctccgtgtgagaacgtatgaccatttgaatttctcgagagcttccgctgttcaatttcgagcgtgtgaacat

SEQ ID NO: 13469 - DNA, 347 bp, Glycine max
  unsure (1)..(347): unsure at all n locations
tctttgaatcatctatccttcaaatcttttcaacatcatctctcatccatctttcaatatctntcaattcatttctctttatctttcaaaaagtttttgttcaaacactntcttttccaagaaaagttctttgttcaaaaacttgtgctattcatctttttcattctcttctccctttgccaaaagaacgaaggacaaaccgcttggattcttttgtgtctcccttcttcctttccaagagaattcaaaggaccctgcctgagaattcttttgattcttcccttacccttaagcaaaagatttagaaggactaaccgcctaagatatcttttgtttccccattataa

SEQ ID NO: 13470 - DNA, 451 bp, Glycine max
cgtgacactttgaatactctcgcttacacaacctatgtatctctgcacaagctgctcctcttgctgcctccagagctcttttccctttataggcattatggtgtgctgtggaattctgtgccttgggcattgtaccctaattctgcacaaaacaggctttaaatagactctgaattcgcgacattgagcttagtgccaccctcgcgcttagcgccagtcatgcgctgagcctggctgaagacaattgttgcgcttagcacactgatctcacgcttagcgtgcgactttgatgatgatgcccttccagattcttttgtcgcactaagcgcattgaagctgcgcttagcggtggatgcgcgtttagcccactgatgagctaaactcaactgtcacttttagcacttcatgacttagcctcttatcacctgagatgcacatatttatcattaaa

SEQ ID NO: 13471 - DNA, 338 bp, Glycine max
  unsure (1)..(338): unsure at all n locations
tcctttactttatcgttaaaatgaattgtttaaaagtctaaaatcaacaccgcgcataattttctcgctntctcaaagaactatgtaggtctaagttccttattgcaattaaggatacgtaggagcaaaagcctcgcttttgtcgaccccaaaagataaataacataaaaaagggaaaataaaatgaaagtcatgattttgcacatttgattaacggctaccatcccttgtgatggacccgtgggctgctaataccttcccgtgcgtaaaaacaactcccaaaccttttattcttaaagttcatagacctgcttttggttttttctaacgtttttctc

SEQ ID NO: 13472 - DNA, 431 bp, Glycine max
gatcaaaacaattatctaatcattccaatccactcattatatacaattgcttattcaaatcattctcaaacattcatttcatgcaaaacaatccactgcatatcattttcaatcaattcactattcaaacacgctttaggtacaagcaaacaactcaaagtgctgaaatttaaataactgaaattaaaataactgaaatatgacaacgaaatcagctggaaatataaggtgtttaaccttcaccaaaacatcttcaatgactccatatggccttgtgatggagcggtcaactaactggagggtcatgcgtgtgggcattatctctatctctccaagtcgctggcacatggaaagaggcattaaatcgatactagctcccaagtctatgagaagcttgcctacaacaacctcaccaatataacacggtatcg

SEQ ID NO: 13473 - DNA, 410 bp, Glycine max
  unsure (1)..(410): unsure at all n locations
gcttgccaacccatggaagctcctaatatctcccacacnttttggggtgggtttattttggaaggccttgattntctcagggtccacttgtaccccatttctaccaactacaaaccctaagaaaactatattatctacacaaaaagtacacttctctatatttgcatagagggtgtttttcctaaggactgaaagaacttgcctgagatgtcctaagtgatcatttaggctcctactgtacactaaaatgtcatcaaaataaaaaactacaaatctacctatgaaatcccttaagacatgatgcataagcctcataaaggtgcttggtgcattagtgagcccaaaaggcatcactagccattcatacaaaccaaacttggtcttgaaagcntgtttccactcatcaccct

SEQ ID NO: 13474 - DNA, 355 bp, Glycine max
atacgacatatatgctccaggttgagggggagtgtcagatatgttttgatatgttttaattacaacagttgcgtatgagattattactcattattttgtttccctctttagtaaacctccttcattataaataagaataatttgggtggtccgaagcgataacacacagtaaataattcttacaggaatcatgacacaacataatttatgttgcttggtgtcccagctatatacttctattattacactgacctgattaggtccagtgtgaccaatatggggaagctgcttttttattcactttccacatctggttttgaagcaacgttctacaatagcttaaacactcaatctg

SEQ ID NO: 13475 - DNA, 399 bp, Glycine max
tcaacaacaatctaaaagctagtttctgatgtggccaagcacaagactagtgttccaacatgaagggaaaatgaatgttgagtctttgaattctacctaaaaaggtttgtctggattgaatctcctctttataggcagataacatcattctaagttctagcctataatttgatgattcctagtcagagaaattcagactagcttctggatcaaccaataaaatatcttcagtctggaaggtcacgtcagactaagaatgatcttagggaagaacaacattagatgtgcatagaagacttatcaactgttgtaaattcatggtagtggagaaaggtgtattagtagatgcaacttttctacttttccagatgatcgcgctaggaggataaaccttgtact

SEQ ID NO: 13476 - DNA, 423 bp, Glycine max
tcatcgtccaaatccaatgttctagtttatgtttgtgttggatattggtgtgactatgaggtaacatgatggtgttgctttggtggatgaaggttgtacatctaagttgtttattgataatggatgtaatgctgttgcaaatttgagtggatgatggttttaataatattgtgttgtggcggttatagagtttgtagaagatgatagaagttgtaaaaataggtgtgattgaatgcattttaaagatagtgacagttttaattgttactattataaattaattattttaaaatttaacaaaatactaatgttggctaacaaaaaaaaatgatcaaaataaaactttctaaaccataaaggatcaaattaaaactttcacaaaatataaagaaccaaaatgaaacttttaacaattaatgtatt

SEQ ID NO: 13477 - DNA, 418 bp, Glycine max
caagcttattgttgccccactaccttgatgtttctctcctccttaatataagatattattcctaaaaccctgctttggttgagatgagactcgagacttgtgtggaaggttagtttagttgttacaactatcaagtgtggctttctttcaactcagatttgcctgtgactcagaacaagacttataaatgggaaaactacggagggtgttggataccttctgtctttcttttggttcaaacacctgtttctgcatgaactccatggagtttgaagatgagtttgagaaaaagcccttgattgtaagtgacagtgatcataaactgagattgaaggatgttgtaggtggaaagcaaacattggcttttcaattgaaaccacaggtgagaccttttttcttttgttccagctcttattat

SEQ ID NO: 13478 - DNA, 406 bp, Glycine max
  unsure (1)..(406): unsure at all n locations
gtcaaaacgtcacacgtatatgtatcatagaatcctataatcaagcgaccatgaattttacgaaccaagccaccaaagccagatttccctggattcccataagtgttgccacatttagggaaaatcaacctttaggggtcattctttccctccatctccatccctctttatcttcttctctccccactaatcccaagtgtaaagtctctcatgacaatgaaatactaaattctccattattgagagcctaacaaccatacgctcatgatataatttctttcctactctctacttaatgctattttaacttttactgtctcttttctatacttaattntactgattgtggtttgatcactcatatttatgtatctgttttgggatttacgcattgagaaatgtttat

SEQ ID NO: 13479 - DNA, 315 bp, Glycine max
  unsure (1)..(315): unsure at all n locations
agcttgtttctacaatctccccctttttgttgatgacaaccctgaaatcaagaaacacatgcacatatttttttctagtcgaccactcacttaattctccatattctacccctttgtttttgagtttaagcttcacttgaaattgagttaattacttatgtgagttcttgatttaatccctatttctctccccctttggcatcaacaaaaaaccaaagtgcgtaacanatataaaacattcacaaatgactaatcatacacaagacattcattgaaaaatctaaaccaatcatgaagcangagacatgaatatat

SEQ ID NO: 13480 - DNA, 374 bp, Glycine max
cgcgtagaacaatatactcggcctacgcttatctgtatttgggcgagcggccacgatcaacaaagtacttttgacgcctactatatgttgagttgaccaacgctgctatcggtatgttgcgacaattcttcaaaaacttatttatacattatgagaggttaattgtcatgtgaccatatagacgtccttctgtatcataagccatcgaacattattgcttcgaaatgcgatcaatccatgttgctatggctggactcagttgacggaatttttctaaattctgataaaaaatgtgcttgcaaggagtgtcgcctgcacaaaattacgcagctacaccactttgaagatatatgaaacttaaatttacatgacca

SEQ ID NO: 13481 - DNA, 343 bp, Glycine max
  unsure (1)..(343): unsure at all n locations
agcttgataggttattgttgtcccctgctttactcaatttagctccagctagtgctcaatatgtcttgaaacaggatttgtttgaccactatcccatcttcctcaaaaattatttggtggattaggggcctaagcccttatagttcatcaatgattggttatcgatgaaggggttcgatgattttatgaaagagtgatatggcaacatccagatgagaggatgagatgcattttttttaaaagaaaaaagaaaaaaaagaggctaaagtcagagatgaattcagtggagtaaacttcaatatgaaaacttggaggtangcataacaactcgtgggacaaaatt

SEQ ID NO: 13482 - DNA, 391 bp, Glycine max
  unsure (1)..(391): unsure at all n locations
ntgatctaacaaataggttttgagtttattgtccaatgtaaagagaagtcttactttataaaagctttaatatgaaataacctattcccacccataatgggtataggtaatccatgatctcaaaccaaccgaaattgacccaattagtttggttcaaatttttttagcttaggtcaaacccaacacaacccaatcctgcctgttcaatttacaagccaagtaagatgttttgtttttttaactcgtgacccaacccgtaacatataattaaattcattatatatataattaaattattaaacacaaaacactataacttttttctaacataatttattaaattaaatcaattatacttttttctttttcagntggtctttatatttttatc

SEQ ID NO: 13483 - DNA, 353 bp, Glycine max
  unsure (1)..(353): unsure at all n locations
agcttctcccccaattntctataaataggttggagaagtgaagtagaaaagggttcagccccttaggcacttctctctctctcgaaatagctgaggaaaattagttccgtgaagaanatccaagccgaggcgcttccgtagcgtctccgtaacgtttccgtgagtgatttcgcgaatgttttcgaccgttcttcgacgttcttcattcgttcttcaccgttcttcagtcttcaacgggtaagtacctcanaccaagctttttaattcattctatgtacccgtggtggtccacattntgtttcatgtattttttttctcccgctttcatttactntttatacccccctttgacg

SEQ ID NO: 13484 - DNA, 417 bp, Glycine max
  unsure (1)..(417): unsure at all n locations
tgtaggattatggggtacccatcacatgtggtactagttggcggtcgggcgatggtgcacaacaagttttccacatccacaatgagcgtataaacccaccatcccctgttgcccacctccaactgagctcacgtactcccacgtagcccatatcctcgtttctctcaataccgggcccccatcaatcctcccaagcttccacaacatccaagcaaaacaacatacaaacagcacaagctatcacagccaagcaaaacagagcaaggcagagagaactctgctcaacacaccaactaaaatcacagcttttctcacttaaagaccccagtaacaattccttcgatccaattcactaaccgttggatcgactccaaaattttactggaagtctatagtgcataagcatacnatttgacc

SEQ ID NO: 13485 - DNA, 386 bp, Glycine max
  unsure (1)..(386): unsure at all n locations
agcttctccctcaattntctataaatggttttagaagtgaagtgaaaaagggttcagccccttaggcacttctctctctttcgaatntgcttagaaaaattgtttccgtgaagaaaatccaagccgaggcgcttccgtaacgtttccgtaacgtttccgtgagtgatttcgcgaaggttttcgaccgttcttcgacgttcttcatcgttgttcgatcttcaatgggtaagtacctcgaaccaagcttttcgattcattctatgtacccgtggtggtccacattgtgtttcgtgtattttccttctcgctttcatttactttccgtaccccttttgacgtgcttaagccattttatttaagtcatttctcgctaacctaaaaataaa

SEQ ID NO: 13486 - DNA, 402 bp, Glycine max
  unsure (1)..(402): unsure at all n locations
tcaagaaaaagatggcctcagcaaattccttatttcctttgggaattctatcaatagacctccaatctttaatggagagggttaccactactggaaaacccgaatgcaaatttttatcgaggcaatagatctaaatatctgggaagccatagaaataaggccttatatacccaccacagtagaaagagtttcaatagatggtagttcatcaagtgaaagcataaccatagaaaaacctagagatagatttttaattaggggaaatagtttggaatatcttaattcaacccccccccccttcttaagataactgaggccacttgtctaacacaacgccttataatgatcacctttgaagtaaaaagaatcacttgataagaaagaactacgtangtctgattt

SEQ ID NO: 13487 - DNA, 402 bp, Glycine max
agctttataaggcactacttaagccttctattcaatgtgggagcatacccaccagttcacaccattaacaacaaaagtgcatgaagccacaagttatggcagccaagggtttccaacccccccccccccccccttcttcatgcctaggcgtcccaatgtcggtggcccaacaatggatccaagcattatagacactacttaagccttatctctagtcaatgtgggactacaccaccccttcacacctatcacaatgaagttgcatgtggtctcaaattaaggcaggctaggatgtccataattaatgctgctttccaacaaacttgttaaggaagtagttcttgaacaaaaaaacttgggccacacttgaacacctccattcaagtcattattacaccattt

SEQ ID NO: 13488 - DNA, 417 bp, Glycine max
  unsure (1)..(417): unsure at all n locations
tgagagatcttgcaagaatntttttttccagaaaacattcttcaaccatttgtctctatctcgctttctctttctcccagtccaatcacccattatccttacattatcttcactattattagtcacatcatggttttcaattttcaatcatcaaatcatgatatctttcaactcatattaaattattaacacagactaaaaagggtcttattatatttatacacacatacaccaatataatcgcctctacactctactatattggtgcgcttgcattatcatttatcaagaaccaaggccaaagaacacatagaagatgtgtctagagtgtgagtgagggaggcaatagacaaagaagagagtctaatataataaaggacactgatctttcagttagatccgtgaactttactagct

SEQ ID NO: 13489 - DNA, 357 bp, Glycine max
  unsure (1)..(357): unsure at all n locations
agcttctaagaggcaatggacaaaaaattatttagaattttttttgttgtccactcgctaagcgcaccactcgtgctaagcaccattttcttcacacgctaagcgagctcttgcttgcactaagcgcattgacccctgatcattggctgaacgttctcgctaagcgcacagactcgccaagcgcaaaaacctctctggaatttaattcttttggattgtgctaagcgagcctattcatgctaagcataggccactactgcatttaatgagcattaattcgctaagcgcagcctttggcggctaagcgcaagatgtangaccaatcaaagctgcagtacccgctaagtgcaagcttgc

SEQ ID NO: 13490 - DNA, 395 bp, Glycine max
  unsure (1)..(395): unsure at all n locations
tgtgactctnggcaatttctttaaaactagttacttattaagttgtgacttttgaaagaatcttcacaaacaagtcacttagagaattgtgacttttggaaatgtatttttcgaaatcagtcactggtaatcgattaccattaaggtgtaatcgattacacatcaacagatgtgactcttcattttgaattttgaatatcaaaacatttacaagctttggtaatcgattacacaatgtaatgattacaagtattgtgtaatcgattacacaagtttaaaatactttaaaactgtttaaacataagttgtaactattcgaaattgaaatcttaacattttaaaacactagtaatcgattactaccttctggtgatcgattactagagagtaaaact

SEQ ID NO: 13491 - DNA, 395 bp, Glycine max
  unsure (1)..(395): unsure at all n locations
tctagaacaagtatgtgcactntttatttgtttgaatttacagctgacataaccattctgaggaacctttgtgataagcatactataaaatcatcaaaatagtcattttgatgtttattgagaatatccatacttgatgatttcctttgatgaaatttatattgatcttttattctgaagtagcatagcttcatcactcttaacacttcttcacaacttcaagcattctgaagttgattacatcaaaaagacttagtgaaagtttagttgttggtgagttagtgttttgtccaaagtcagactaagtactattcttcagtcctttattttaatgcttctcattagtgcctctcatggacaacttcaatcattcaataatgttggatcttcttatg

SEQ ID NO: 13492 - DNA, 336 bp, Glycine max
  unsure (1)..(336): unsure at all n locations
catactcatagctatgaatccaaatttggttttagaattagaaaagcatgaaaattaggacttgcttgtgagagtttttgctcaaatttgggctaccgcatgtttgatactntgcacctaagtaatatgaaaaacaccttgcaatagtatgtatatataggtaaataaaaggggcatgaaattctttgcaaagggtgaatgaatattgaggtcgcttcctaaatgaatgtatgatagcacggaattcccttttgaatcaagtgtgtgcataatgtaaatagcttgccaatatgaataaatgtgagtgaaacaataaaaattcgtatgatatatatt

SEQ ID NO: 13493 - DNA, 404 bp, Glycine max
  unsure (1)..(404): unsure at all n locations
tatcngctacatgccagctaactttgtggatctcgtcttctccggagaaaggattgaatttttactacgaaaaggcaagttcgaatatgcttccaatgtggcccccaacaacaacagaagagccctagtagtgggcgcgaggaaaaaggaaggagacgcccacgtagtcaccaccgccccgacatggatgaaagcatcccaaaatatccaaagcttataccagcccaatcccccaaattttttaatccgagctgggaattctctcccgactcaagtaaaaggaccacctgcaacagaaagagcgccggcccaacgcacggctccagccgctccccggccagttaataatacagcccccgacgcgacctataaatatgcacagcacccgcccncgaaagataact

SEQ ID NO: 13494 - DNA, 368 bp, Glycine max
atcagttttctaatggtgcaacttgaatggaaattttcaggccatgctcctcttgtgaatcttctgacttaggcagtgctacaagagaagctataacgttgtggagagaatttatcttatcatccaaagttgggtgcattatgccatcaaaaccccctgttgcaacctgcttgtgcaattgaagttaccaaaactgtaatgcttgttaacaaatttaaagaacttgtgaaattataatatcaatatcatctttattacctcatacaagacctctttgccaaaattagaccgtatcagttctccataagttgtagtgtcatctattaatttgtagcctacacacctaattatctccatttctttcttat

SEQ ID NO: 13495 - DNA, 428 bp, Glycine max
  unsure (1)..(428): unsure at all n locations
tgaaggtgtgntaacccaccattttccatagaagggtttctgttaggggctaaattaaggcccctccaaagtgttttgcaggggtataccaccaactgcttgccctttagtggcatatccgaggaaaggctcgaagtcggctagattgtggtagggaatttcatgtgtctcccccgtgggttgagagacatgtacatgatgaggttgtcggctctcaatgagtatgggagcagagttattgacatccttattgggagtgtacgccatattgggtggtgtatggttgggaggcaagccatatggcggaaaggcatgctggttttgaatttgcacatcatggggccgtccgtacttcctaaatctttgcctaccatatctgaggttggatgattcatttggttgagatcagatggnggcatcgggttcac

SEQ ID NO: 13496 - DNA, 446 bp, Glycine max
  unsure (1)..(446): unsure at all n locations
ctcggacccgggatcctgagagcctcctgcngcatgcaagcttgaaatgaattgaanatgttttatcacaagttgtgactcttgaaatttgtaatctaacgttttaaaacattggtaatcgattacatgattatggtaatcgattagctttgtaaatcactttgaaaagaatgttggctactggtaatcgattactgccttctggtaattgattactagagagtaaaactcttggtaaaagatttttctttgaaaaattcttttgaacaaaattgatctattcaatattttgaaaaactcttttaatacttatcttaattgagtcttctcttgattctttacttgaatcttgaatcttgatttgaatgaacaactctttgattcttgaaacttgcttgactcttgatatttgaattgagtctttggcatcatcaaaataatcttgg

SEQ ID NO: 13497 - DNA, 425 bp, Glycine max
accgattgatttctttggtctatttttaatttactgtctaaaaaaattattatttagtgggtcagtagtactaactgaacatgcaatgaaacatgcacactaaaagagcagggatattatgatgatattactatgataatatcatttttcttttcccttttatctggacctttgtgtgagctgttttatctgttgtaggcaagtgtataaactttgattgggctgaatgtaggttttgcaagttgcaactgatcatcaagacatcaagtattcttacaattttttctattaatcctctttaaataagtattgattcgaaagtaaatgcaattaaattcttaaaaatttaattagtattgaatatctttttcatttcatgaataggaaattagaaagacgtagagtgaggaagagacagacaatct

SEQ ID NO: 13498 - DNA, 444 bp, Glycine max
  unsure (1)..(444): unsure at all n locations
tcgacccgggatccttaagcctcctgccgcatgcaagctntgaaggtgcgtaacccaccatttccataatagaacactggtaacgtgtctactatcattgtgataatctctttctctgttattgggggcgctacttgagctttcaagtctctccatctttgggcgtatcctttgaaagatccgtgccctctttttgcacatgttctgtagttgcatcctatccgaagccattatactgacattgcctaacgaaggcaaccactaggtccttccaagaatggactcgggaaggttccaagttagtgtaccaggtaacagctaccccagtaagactttcttggaaggaatgtatcagcaattcctcatctttagcgtatgcccccatcttccaacaatacatctttagatggttcttggggaaagtaatccccttgtccttgtcaa

SEQ ID NO: 13499 - DNA, 433 bp, Glycine max
  unsure (1)..(433): unsure at all n locations
ctcaagcttaataccagcagaagtaaaggcaaacatcatgttatatgttcttatgttttgttggtaattnttaccatcagctgtattttggtcaaacagaagttgatgcagaagtttaagtggattctgtaacaatgaacgttcaactttaccatctccacaacataagctgaaccttgggcttgaactatttttacatttttctattctttcattataccacattttgcattacagtgactacattgcatgagctggtcaccaagatcaaaatactctgaaatggttaaattagatatgagtaaatgatggtaaccattgattatattttgacaggaatatgtaaattatagcatgatagataaaagtatattttggattgactattttaatttgaatnttaaactgaagtacttggatcagacatttatct

SEQ ID NO: 13500 - DNA, 359 bp, Glycine max
agcttatgattccatttcctgggaattcttgtattggatgtttaagtccattttctttcccagcccagatctgtacttggatcatggagtgtgtttcttccacttcctttagtgtggcagtcaatggatccatttatggtcacttcaaaggacagcggggtcttaaacaagaggatcctctctccccttatctgtttgtgctctgtttggagtacttttccagagatatgagcagcctcaaggatgatgccaattttaaatttcatcccaactatgcaggtattcagctatctcatttggctgttgcagatgatattatgcttctatctagatgagatatccattctgtgttaactatg

SEQ ID NO: 13501 - DNA, 439 bp, Glycine max
  unsure (1)..(439): unsure at all n locations
ctcactcttcttagtttcagatgatgcagatgggtttgtagctacctcatgcactcctctattgactatggcatcatttctggcgctaaactgctgggagtcggaggccatcttctcaattaaatttctggcttcagcaggagtcatgtctccaagggctccaccactggcagcatctatcatacttctctccatattactgagtccttcataaaaatgttggagaagaagctgttctgaaatctgatggtgagggcaactggcacatattttcttaaatcgctcccagtactcatacaggctctctccactgagttgtctaatacctgagatatctttcctgatggctgtggtcctggaagcanggaaaaaattttctaagaatactctcttaaggtcatcccagctcgtgatggaccttggagcaaggtaatacaac

SEQ ID NO: 13502 - DNA, 280 bp, Glycine max
agcttttcacccagctcgcccaggcgagctatgttgcttcctccagaaggcaccaccttctagaggaacatcctaaaaggcccaagtaggcctggttgctatttgcacccctctgtttactaaatacatccccctgcctttttttgcttattctttttccgtaacgttacggaactttacgaattccgtaacgatacttgtttttcttccgtaatgttacggaaccttacggattacgtaatcaccccttttttggcttacggaatgttactgaacctca

SEQ ID NO: 13503 - DNA, 346 bp, Glycine max
  unsure (1)..(346): unsure at all n locations
ccaccccattgttccttgcaggtcatcttcactatgtgcgcaccctaacatcttcactaagagccatgacttcccacactttgaaaaaaggaggagacgacttctgatggctccccgatcaacccaagtggaaaccctatcataccatacacattctctaaacattcaacaccccaaatgagaattttcttttgaagtataaccagcctgtttgagtcaaaggtccaactgctctanagtgatgatttatggagaactaagtttctatgcttctcggcccatttatatgaaggatactccctcaactagcaatatgaacaatgaatgacttctccacacctattat

SEQ ID NO: 13504 - DNA, 318 bp, Glycine max
  unsure (1)..(318): unsure at all n locations
tcaagcttatatacatcatttcacataattctaatctaaggctgttgtcctttgggacaaacgtgagaggtgtttataccttcctcaaacctaaagataactcccgaatctggaatattcttcatgaccggtttcctttggtttttctaacgttttcctttcaataaacgttggtggcgactccgcgcattttcctcctatggaagacgcacccgtgagcctcgcctcgctcgcccgcaaaagggtaggttgtgacaaagatgaagcaacaactcgcctgtgcaagctgcangtccacctaatngccatttttgctat

SEQ ID NO: 13505 - DNA, 399 bp, Glycine max
ggacactatgaaactccgcttatggacatcttgatttcgcctatctagtaagcttttctgttctaagaggaatctgtggaggggtgttaggaagttccacattgcttgtctcaatttttaaggtgcaacttatatatctatttgacaacttcactactaatgtcaattggttttaagctaaaatctagtagctttgtttgttttcagacatctgtagaggggagtgttcggaagtctcagatcacttgccttagttccccagatacaacttatatatatgttggacaatttcaattagtgttattggttttaagctaaaatctagcaattgacatgtatgagacacatggaagagaattgatgaagaggtagcctgcttaaattaaagcacataaatgc

SEQ ID NO: 13506 - DNA, 370 bp, Glycine max
agctttctcttagtaggatgtaattaatctatcaaatacaataaaatttcttccatgaagctatgaatatttataatgcagatgctagtaattatcagcaaaacagacacaactacatttctttcatcaataaagttctaccctatagtattttaatcgtttcttatgtcttaaactatatttgtagattctgctacagacttgtcctgggttctctttttcttgcattaagccaatcatgtagtgaacttggttcatgttcggtttactcatttctattatggcctcttttctttcaatattaagtttgcacactaaaacttcaatctatcaagactatccatctcgctcatgttgtacagatgtacat

SEQ ID NO: 13507 - DNA, 404 bp, Glycine max
  unsure (1)..(404): unsure at all n locations
cgccttgtgaatgactcgtgcaatggactgtatttgaccaatagttgtcttacttaaaaaacgacgaaaggttcatttaatttaatggatagcctaatatagtaatgacgtttgataaactcgcaccttctgnttattcatttatggctttaatcttttatgcttgtttatttgctcaccctcactgttcactaacaattatgaagctgtcttttatttccaaccaaaaaggttgttaaaagtactattaatttgtctggcaaagaaaaccattgtactacgtactgtcgcgtctcataattagtgaacattatataattaaattaaatcaacatgctttccgaacattgtttttcttaaaaaaaaaaaaaacaggaatgcaaagaaagtagcttaattcactt

SEQ ID NO: 13508 - DNA, 338 bp, Glycine max
agctttcttgtggcgcttctatggaggctttatctttgagcttcaatgaggtccttcattggtgattttacaccatgagatgcaatggaagacaaaggagaagaggtgagaggagacgccatccactagggaataatccatggaagaaagagcttcaccaccaagatgagccttggataacaagcttggaaggatgcttcaatggaggaaaagaaagagggagagaaagagagagggggagcacgaaattgaccgaatacaagacggaaagaagtggaactttgaagtctgtctcacaagactcttattcatgacagttacaacaagtgttacacatg

SEQ ID NO: 13509 - DNA, 429 bp, Glycine max
  unsure (1)..(429): unsure at all n locations
ctcacgcttgttgatcatgactactttagactcttctcctttgtcattcatagacaacatttccgatgacatgcggagatgcccaacggttatccgcacttttgtcaactagaggcaagcgagcctgttgaccaagactattttagtctcacacctttgtcatctacagtcggcaagtcagatgacatgcggagatacccaagggttatccacacctttgtcaactacgggcaagcaagcctgttgaacaccgagactttnttagtctcacacacaaaaattgaagaactacgtaggtctgatttcctcatcacaaattgagaatacttaggagcaaaagccctacttttatcgaccaccccacacttttgttaccgtgactcaagagtctggtggcatacgaagacacccgatggttatccgcacaca

SEQ ID NO: 13510 - DNA, 321 bp, Glycine max
agctttacaagattagggtgccgaagttttataattagtgccacttcatttttgaactcatccaacccttgtccttgtaacatcccaatttttgtaatctatattaaaaaggattgttatttataaataaatagagttttagaaaaatgataagattttataaataaataaataaggggatataattattaattaaaataatgatttgagagaaaataaaaaggatatttcatttatctgtttgatagaaaataaaatagagtttgtttttataaaataaacaaataaatatatatagagcaaataataggccgagtactc

SEQ ID NO: 13511 - DNA, 421 bp, Glycine max
  unsure (1)..(421): unsure at all n locations
ggtttgagctatcgttcatatttatagtttttgattattcttactccacatctgtcagatcacgttcccgtcaatggccatgggaaaaacaaaaggatgataggaatcacagttggtgcaaatatacttggattaactgcatgcgtttgcataataatgatactcaaaaagctaggtaaattttcttttggttattgagtttatgtatcatatgtgcacattgtgaatgtgatagttcttctctattgtatcttctaccctatcaggggtagcaagaataatttataggaaccatttcaaacgaaaattgagaaaagaaggcattgatttgtcaacatttgatttcccaatcatagcaagagccactgaaaactttgccacgagtaacaaattgngagaaggtggatttggacctgtgtac

SEQ ID NO: 13512 - DNA, 278 bp, Glycine max
taacttaatttttataagccttttgcgcttgctctttccaccgaaacgcacccttcttcaaacattcggtcataggacttgctatagtgcttaaatactggataaagcgtctacttaatgatgcttgaccaacgaaagatctcacctccgaaactgtcgtggggctctgtcaagcatagacctccttcactactgttggaacaaccgatcctacatctttagactcctcatgatctaaatctccacactttccaccacaaaacacactttgcctcttc

SEQ ID NO: 13513 - DNA, 351 bp, Glycine max
  unsure (1)..(351): unsure at all n locations
agctnnttagttttaaaggaacacaaatgtttatcaaaatcccaattcaaccccctttcttggtgtctttgtcacttcacatacttggtagtcctcttacgacgttatgatttgcagttttaaggttaaccataggcttgcatatacaagttttttatgccatacctagtgattttctttgatagacaataggcaagatacattttcatatgttagttcactaagccttatcttataaaggtttcttttcctattgctataaaagagtaacgactcatccttattcttgatgagtcatttatccttcttaaaggaaacatcatatccactatcacataattgaatatgctc

SEQ ID NO: 13514 - DNA, 410 bp, Glycine max
  unsure (1)..(410): unsure at all n locations
tctaaactntattcaagaatgaatctctgataccactttttagacaagtggccttagatatcttaagaaggggggttgaattaagatattacaaattatttccccaattaaaattctatcaagttataaattcccttaataatgaacttcttaaatattgattcaaatagaacaatttgaatatgaatataaaacaataataaataaaggagtttaagggaagagaaagtgcaaactcagattgatgtgccatcattttcttctattttctaaaccctttntgcaccattttaattattgattggtcttaattgtcaattaattacgcagttttattatttgggcccattcagactaattgatgtttntaatctaatttcaggaattaatgaagcattgggcttgaatct

SEQ ID NO: 13515 - DNA, 385 bp, Glycine max
  unsure (1)..(385): unsure at all n locations
gcttgagccanaatcctgactgaccacattaccttgcccccaggtgagaatgtatatccttacccctcggaagcaaaaaaaagaatagagggtgatattccaatcaagaaaaagagaaggaaaatttccaatgaaagcaaaaaaggaaaagaaggaaaattccccaatcaaagagtgggagaaagcaaaaaaagaaaagaaggaaaattccccaatcaaagagtgggaganagcaaaaagaaaagaaaggaaaattcccaatcaaagaatgggagaaagtaaaaaggaagaagaagaaggaaagaaagctcctgatcaaggatcgaaagaaaacagaaaaaaagtgcagagaggtctttggaccggacaatatctgaacaataca

SEQ ID NO: 13516 - DNA, 448 bp, Glycine max
ggacactttgaaacttagcttccacaacatccaagcaaaacaacattcaaacagcactttctatcacagccaagcaaaagctgttcaaaggcagaaaactctgctcaaacaccaaccaaaatcacagcttttctcacgtaaagaccacagtaacaattccttcgatccaattcgttaaccgttggatcgactccaaaattttactggaagtctatagtgcataagcctacattttgactgttgggatctactagcaaacatccagaactcattctgcactagactttccacagccaaccacacacaagcatttttctgcacaaagccaaaattctgctgcacctattttgacagcaaaattctgcataagtgcagatttcgaaaatcccactttctctcatccaatcttgcccaaatcaattcctacaagtcccaaatcatgtatcaa

SEQ ID NO: 13517 - DNA, 384 bp, Glycine max
  unsure (1)..(384): unsure at all n locations
gcaagctngtcacacgtcaaccaccattctcatattattacatagttttgcacttttttttaacgntatagctagattagagatcttattatattgatatcatttcatttgattaatttgtttgcttggaaggacccggatgctcctctattgggtatggtggagttgttgagattggacctcttatagtcaacaaaaatggggaaggactacatttcaacacacactcctggaatcaaggtttgtacatagtacatttgtatattatttccatctttggactttgtagtatgttccttttttgacaatcaattgttatatacagttcatgttattactgtgctaataagtattaagaaggggagagattgaggatttattttg

SEQ ID NO: 13518 - DNA, 410 bp, Glycine max
tgttacgatcggaagcgcgaccatcgcgcgcctcgagttctacctccgctgcccttcgatcttgcatgatctgatcaaaatctctgtcgtcttccaacgagtcgtccagcccgaacgattcgaactggtcagcctcatccattctcttataatcactgtccattcacccaggcagcgaaaagttgtaagtgcagaatgaattagggttttccaagagatgaaaaaagggagaaaataaaaagagaagactaactccaaaaaattgtcattgtaaagatcctctccatcttcttcttcttcctcgggctgttcttcaatgtcgtctcgtacgatatcgggatcgacggaagcctcgtcgtcttgggaggcatggctggtgtgggtgtgaggaagctggtcggtgttgaaac

SEQ ID NO: 13519 - DNA, 311 bp, Glycine max
caatgagtaaaaagaaagaaaaagtaccagttaagcaacaggtgaaagtgcgacaagtgtgcatgaaaagtgttaaggtttgcgagtcaactgtgagggtttttggcgacatggatctttaaaggcatggttggtagcacgagcacggatttgcaactgcgaccaataatatgggtgaatctgcagttgcatgatggtgtggtagtggttggtgtcattgatcgggaacaaggactgccaaatgtggagtgtttatgtgttgtgagattgtgtggtgtgtgtttgtgtatgttgtgtgtttttttattttt

SEQ ID NO: 13520 - DNA, 428 bp, Glycine max
  unsure (1)..(428): unsure at all n locations
ggatgttattaaaggctntgcacctacctttncagttttttgacaaatatgatcataagtacgtttacaacttgacatcaaattttacttgagattttatagtttctgatacttggtttacttggacataacagtggggagcaattgatggaagatgaatctcaaattgctctaaggagaaggaagaaacttgttcttgatggtgatttggaaagacaaatcaaagatctccatgagaagtaggtttgagcagatcaaacttttgtctgaactttggagcatgatttaaattagagccttgtcaaaaagaaattcagtctttttttttttttacatcattggtacaaacattcttaaaaggagtgagcaagatagatcaattcatagcttttcaatattttgttgaatttcattatttgtactgtatt

SEQ ID NO: 13521 - DNA, 422 bp, Glycine max
gggatccttaagtcacctgcagcatgcaagcttttatccaggctcatcttggtgggtgaagctccttattccatggcttattccctagtggatggcgcctcctctcacctcttctcctttgtcttctgctgcatctccatggtggaaaatcacaattaaaggaccccattgaagctcaaagatccagcctccatagaatccccacaagcaagcttccatcaagtggtaaatagagcacaagagcttcaagtaggtgctccttaaacctccattaattatttgctttaccttttcttcgattgttgtttcttcattttttctccatgtatctcctcacatgtcttgtgataaatgtttttaacatgattatttagagtttccactgattaaacttgctatagaagctagaattgattttctat

SEQ ID NO: 13522 - DNA, 421 bp, Glycine max
  unsure (1)..(421): unsure at all n locations
cttgtctaccacacaaccaatgctaaacaccacctttggtttcaaccaaatttccaaccaagaaatgaattttgcagcgaaaagcctgtaggattcaccccaaattccggcgtcatatgctaacttgctcccatatctacttgataatgcaatggtagccataacccctgctaggttccctcaaacccccatttttctgaggatatgactcgaacgcaacatgtgcatatcgtggagggccctgnggcattccattgagcactgtatgaccctcaagcgtaaggtgtaaggtctaattgatgcgggctggctgaaatttgaggagaatcgcgtgtaaatcctgacattgacaagagatgccacacatggggcaattttgaaagctgttgttagatgtctctaatgactcatcangattttc
